United States Patent Application Publication US 2018/0126003 A1 - sequence listing, part 182

SEQ ID NO: 323780 - DNA, 2958 bp, Artificial Sequence
  derived and/or modified sequence
atggaccggcgaagtatgggggagaccgaatccggggatgctttccttgacttaaagaaacctcctgcatcaaagtgtccacatagatacaccaaggaggagctcctcgatataaaggagctgccgcattcaaagcagcggccaagctgcctcagcgaaaaatacgattccgatggagtgtgggatcctgagaaatggcatgcttcactctatcctgcctcgggcaggtctagtcccgtggaaagtctcaaaaaggaactggatacagacagaccttccctcgtgcgccgaattgtggatccgagagagcgagtgaaagaagatgatcttgatgtcgtgctttccccccagagaaggtcctttgggggaggttgccacgtcaccgccgctgtcagctctaggcggtcaggctctcctctagagaaggactccgatgggttacgtctcctcgggggtagacgcattgggtctggaagaataatctctgccagaacctttgaaaaagatcaccgtctgtcagataaagacctgagagacctgagggatcgagaccgggagcgcgactttaaggataagagatttcgcagagagtttggggattctaagagagtgttcggggaaagaagacggaatgattcctatactgaggaggagcccgagtggttcagtgccggaccaacctcacagagcgaaacgattgagttaactggattcgacgacaaaatactggaggaggaccataaaggcagaaaaaggacacggcgacgcaccgcctccgttaaggaggggattgtggaatgcaatgggggagttgcagaggaggacgaggttgaagtcatcctggcacaggagccagctgcagaccaggaagtgcccagagacgccgtgttacccgagcagtctcctggggactttgattttaatgaattttttaatctggacaaagtcccctgtctggctagcatgatagaggacgtcctcggcgagggatccgtgtccgcctccagattttcacgatggtttagtaatccgtctaggtccgggagccgcagtagctctctgggaagcaccccccatgaagagctcgagagattggccggacttgagcaagccatcctgtcccccggtcaaaattcggggaattactttgccccaatccccctcgaagatcacgccgaaaataaagtggatatcctcgaaatgctgcaaaaggctaaagtcgaccttaagcctctgctaagctccctttcagccaacaaggaaaagctcaaagagtctagccatagtggtgtggtgctgtccgtggaggaagtcgaagctggcctcaagggactcaaggtggaccagcaggtaaagaattccactcctttcatggccgagcacctggaggaaactctgtcggctgttactaacaatcggcagttgaagaaggatggggacatgacagcgtttaacaagctggtgagtactatgaaagccagtgggactcttccttcccagccaaaggtgagtcggaatttagagtctcacttgatgagtcccgctgaaatccctgggcagccagtgccaaagaatattttacaggagctactggggcagcccgtccaacgtcctgccagcagcaacttattgtccggcctgatgggctccctggagcccaccacctccctgttaggccagcgtgcccctagcccacccttgagtcaggttttccaaaccagggccgctagcgcagactacctgaggcccagaatcccatcacccataggtttcacacctggcccacagcagctgctgggtgatccctttcagggcatgcgtaaacctatgtcaccaatcactgcacaaatgtctcagttggagcttcagcaggcggctctggaaggcttggctctcccacacgatttggctgtgcaagcggcaaatttctatcaacccggattcgggaagccccaggtcgataggaccagggacggattccggaaccggcagcagagggtaaccaaatcacccgcaccagtgcacagaggaaacagtagctccccagcaccagctgcgtctattacaagtatgctgagtccctctttcacccctacgagcgtcatcagaaagatgtacgagtctaaagagaagtccaaggaagagcctgccagcggcaaggctgctttgggtgactccaaagaggatacacagaaggcgagtgaggaaaacttactctcatctagcagcgttccatccgcggatagggactcctcccctaccactaactcaaagcttagtgccctgcagcgctctagctgttcaacaccactttcccaagcaaaccgctacaccaaggaacaagactacagaccaaaggccaccggcaggaagactcccacattggcttcaccggtcccaacaaccccttttttgcgacccgtgcaccaagtgccccttgtcccgcatgtgcccatggtgcgccctgctcaccagttgcatcctggtctggtgcagcggatgctggcacaaggggttcacccgcagcacctgccatctctattacagactggggttctccccccaggtatggacctgagccacctgcaggggatctcaggccctatcctggggcaacccttctacccactccccgcagccagccatcctctgcttaaccctcggcctgggacaccattgcatttggcaatggtgcaacagcagctgcaacggtccgtactccatcctcctggatccggctcacacgctgcggctgtctctgtgcaaaccacacctcagaatgtcccctccagaagtggtctccctcacatgcactcccagctggaacacagaccgagccagcgttcttcttcgccagtaggcctcgccaagtggtttggcagcgatgtgctacaacagccactcccatcaatgcctgccaaagtgatcagcgtggacgaactggaatatcggcaatag

SEQ ID NO: 323781 - DNA, 2958 bp, Artificial Sequence
  derived and/or modified sequence
atggacagaagaagcatgggcgagaccgagagcggcgacgccttcctggacctgaagaagccccccgccagcaagtgcccccacagatacaccaaggaggagctgctggacatcaaggagctgccccacagcaagcagagacccagctgcctgagcgagaagtacgacagcgacggcgtgtgggaccccgagaagtggcacgccagcctgtaccccgccagcggcagaagcagccccgtggagagcctgaagaaggagctggacaccgacagacccagcctggtgagaagaatcgtggaccccagagagagagtgaaggaggacgacctggacgtggtgctgagcccccagagaagaagcttcggcggcggctgccacgtgaccgccgccgtgagcagcagaagaagcggcagccccctggagaaggacagcgacggcctgagactgctgggcggcagaagaatcggcagcggcagaatcatcagcgccagaaccttcgagaaggaccacagactgagcgacaaggacctgagagacctgagagacagagacagagagagagacttcaaggacaagagattcagaagagagttcggcgacagcaagagagtgttcggcgagagaagaagaaacgacagctacaccgaggaggagcccgagtggttcagcgccggccccaccagccagagcgagaccatcgagctgaccggcttcgacgacaagatcctggaggaggaccacaagggcagaaagagaaccagaagaagaaccgccagcgtgaaggagggcatcgtggagtgcaacggcggcgtggccgaggaggacgaggtggaggtgatcctggcccaggagcccgccgccgaccaggaggtgcccagagacgccgtgctgcccgagcagagccccggcgacttcgacttcaacgagttcttcaacctggacaaggtgccctgcctggccagcatgatcgaggacgtgctgggcgagggcagcgtgagcgccagcagattcagcagatggttcagcaaccccagcagaagcggcagcagaagcagcagcctgggcagcaccccccacgaggagctggagagactggccggcctggagcaggccatcctgagccccggccagaacagcggcaactacttcgcccccatccccctggaggaccacgccgagaacaaggtggacatcctggagatgctgcagaaggccaaggtggacctgaagcccctgctgagcagcctgagcgccaacaaggagaagctgaaggagagcagccacagcggcgtggtgctgagcgtggaggaggtggaggccggcctgaagggcctgaaggtggaccagcaggtgaagaacagcacccccttcatggccgagcacctggaggagaccctgagcgccgtgaccaacaacagacagctgaagaaggacggcgacatgaccgccttcaacaagctggtgagcaccatgaaggccagcggcaccctgcccagccagcccaaggtgagcagaaacctggagagccacctgatgagccccgccgagatccccggccagcccgtgcccaagaacatcctgcaggagctgctgggccagcccgtgcagagacccgccagcagcaacctgctgagcggcctgatgggcagcctggagcccaccaccagcctgctgggccagagagcccccagcccccccctgagccaggtgttccagaccagagccgccagcgccgactacctgagacccagaatccccagccccatcggcttcacccccggcccccagcagctgctgggcgaccccttccagggcatgagaaagcccatgagccccatcaccgcccagatgagccagctggagctgcagcaggccgccctggagggcctggccctgccccacgacctggccgtgcaggccgccaacttctaccagcccggcttcggcaagccccaggtggacagaaccagagacggcttcagaaacagacagcagagagtgaccaagagccccgcccccgtgcacagaggcaacagcagcagccccgcccccgccgccagcatcaccagcatgctgagccccagcttcacccccaccagcgtgatcagaaagatgtacgagagcaaggagaagagcaaggaggagcccgccagcggcaaggccgccctgggcgacagcaaggaggacacccagaaggccagcgaggagaacctgctgagcagcagcagcgtgcccagcgccgacagagacagcagccccaccaccaacagcaagctgagcgccctgcagagaagcagctgcagcacccccctgagccaggccaacagatacaccaaggagcaggactacagacccaaggccaccggcagaaagacccccaccctggccagccccgtgcccaccacccccttcctgagacccgtgcaccaggtgcccctggtgccccacgtgcccatggtgagacccgcccaccagctgcaccccggcctggtgcagagaatgctggcccagggcgtgcacccccagcacctgcccagcctgctgcagaccggcgtgctgccccccggcatggacctgagccacctgcagggcatcagcggccccatcctgggccagcccttctaccccctgcccgccgccagccaccccctgctgaaccccagacccggcacccccctgcacctggccatggtgcagcagcagctgcagagaagcgtgctgcacccccccggcagcggcagccacgccgccgccgtgagcgtgcagaccaccccccagaacgtgcccagcagaagcggcctgccccacatgcacagccagctggagcacagacccagccagagaagcagcagccccgtgggcctggccaagtggttcggcagcgacgtgctgcagcagcccctgcccagcatgcccgccaaggtgatcagcgtggacgagctggagtacagacagtag

SEQ ID NO: 323782 - DNA, 1923 bp, Artificial Sequence
  derived and/or modified sequence
atgatcgaggacgtgctgggcgagggcagcgtgagcgccagcagattcagcagatggttcagcaaccccagcagaagcggcagcagaagcagcagcctgggcagcaccccccacgaggagctggagagactggccggcctggagcaggccatcctgagccccggccagaacagcggcaactacttcgcccccatccccctggaggaccacgccgagaacaaggtggacatcctggagatgctgcagaaggccaaggtggacctgaagcccctgctgagcagcctgagcgccaacaaggagaagctgaaggagagcagccacagcggcgtggtgctgagcgtggaggaggtggaggccggcctgaagggcctgaaggtggaccagcaggtgaagaacagcacccccttcatggccgagcacctggaggagaccctgagcgccgtgaccaacaacagacagctgaagaaggacggcgacatgaccgccttcaacaagctggtgagcaccatgaaggccagcggcaccctgcccagccagcccaaggtgagcgagctgctgggccagcccgtgcagagacccgccagcagcaacctgctgagcggcctgatgggcagcctggagcccaccaccagcctgctgggccagagagcccccagcccccccctgagccaggtgttccagaccagagccgccagcgccgactacctgagacccagaatccccagccccatcggcttcacccccggcccccagcagctgctgggcgaccccttccagggcatgagaaagcccatgagccccatcaccgcccagatgagccagctggagctgcagcaggccgccctggagggcctggccctgccccacgacctggccgtgcaggccgccaacttctaccagcccggcttcggcaagccccaggtggacagaaccagagacggcttcagaaacagacagcagagagtgaccaagagccccgcccccgtgcacagaggcaacagcagcagccccgcccccgccgccagcatcaccagcatgctgagccccagcttcacccccaccagcgtgatcagaaagatgtacgagagcaaggagaagagcaaggaggagcccgccagcggcaaggccgccctgggcgacagcaaggaggacacccagaaggccagcgaggagaacctgctgagcagcagcagcgtgcccagcgccgacagagacagcagccccaccaccaacagcaagctgagcgccctgcagagaagcagctgcagcacccccctgagccaggccaacagatacaccaaggagcaggactacagacccaaggccaccggcagaaagacccccaccctggccagccccgtgcccaccacccccttcctgagacccgtgcaccaggtgcccctggtgccccacgtgcccatggtgagacccgcccaccagctgcaccccggcctggtgcagagaatgctggcccagggcgtgcacccccagcacctgcccagcctgctgcagaccggcgtgctgccccccggcatggacctgagccacctgcagggcatcagcggccccatcctgggccagcccttctaccccctgcccgccgccagccaccccctgctgaaccccagacccggcacccccctgcacctggccatggtgcagcagcagctgcagagaagcgtgctgcacccccccggcagcggcagccacgccgccgccgtgagcgtgcagaccaccccccagaacgtgcccagcagaagcggcctgccccacatgcacagccagctggagcacagacccagccagagaagcagcagccccgtgggcctggccaagtggttcggcagcgacgtgctgcagcagcccctgcccagcatgcccgccaaggtgatcagcgtggacgagctggagtacagacagtag

SEQ ID NO: 323783 - DNA, 2886 bp, Artificial Sequence
  derived and/or modified sequence
atggacagaagaagcatgggcgagaccgagagcggcgacgccttcctggacctgaagaagccccccgccagcaagtgcccccacagatacaccaaggaggagctgctggacatcaaggagctgccccacagcaagcagagacccagctgcctgagcgagaagtacgacagcgacggcgtgtgggaccccgagaagtggcacgccagcctgtaccccgccagcggcagaagcagccccgtggagagcctgaagaaggagctggacaccgacagacccagcctggtgagaagaatcgtggaccccagagagagagtgaaggaggacgacctggacgtggtgctgagcccccagagaagaagcttcggcggcggctgccacgtgaccgccgccgtgagcagcagaagaagcggcagccccctggagaaggacagcgacggcctgagactgctgggcggcagaagaatcggcagcggcagaatcatcagcgccagaaccttcgagaaggaccacagactgagcgacaaggacctgagagacctgagagacagagacagagagagagacttcaaggacaagagattcagaagagagttcggcgacagcaagagagtgttcggcgagagaagaagaaacgacagctacaccgaggaggagcccgagtggttcagcgccggccccaccagccagagcgagaccatcgagctgaccggcttcgacgacaagatcctggaggaggaccacaagggcagaaagagaaccagaagaagaaccgccagcgtgaaggagggcatcgtggagtgcaacggcggcgtggccgaggaggacgaggtggaggtgatcctggcccaggagcccgccgccgaccaggaggtgcccagagacgccgtgctgcccgagcagagccccggcgacttcgacttcaacgagttcttcaacctggacaaggtgccctgcctggccagcatgatcgaggacgtgctgggcgagggcagcgtgagcgccagcagattcagcagatggttcagcaaccccagcagaagcggcagcagaagcagcagcctgggcagcaccccccacgaggagctggagagactggccggcctggagcaggccatcctgagccccggccagaacagcggcaactacttcgcccccatccccctggaggaccacgccgagaacaaggtggacatcctggagatgctgcagaaggccaaggtggacctgaagcccctgctgagcagcctgagcgccaacaaggagaagctgaaggagagcagccacagcggcgtggtgctgagcgtggaggaggtggaggccggcctgaagggcctgaaggtggaccagcaggtgaagaacagcacccccttcatggccgagcacctggaggagaccctgagcgccgtgaccaacaacagacagctgaagaaggacggcgacatgaccgccttcaacaagctggtgagcaccatgaaggccagcggcaccctgcccagccagcccaaggtgagcgagctgctgggccagcccgtgcagagacccgccagcagcaacctgctgagcggcctgatgggcagcctggagcccaccaccagcctgctgggccagagagcccccagcccccccctgagccaggtgttccagaccagagccgccagcgccgactacctgagacccagaatccccagccccatcggcttcacccccggcccccagcagctgctgggcgaccccttccagggcatgagaaagcccatgagccccatcaccgcccagatgagccagctggagctgcagcaggccgccctggagggcctggccctgccccacgacctggccgtgcaggccgccaacttctaccagcccggcttcggcaagccccaggtggacagaaccagagacggcttcagaaacagacagcagagagtgaccaagagccccgcccccgtgcacagaggcaacagcagcagccccgcccccgccgccagcatcaccagcatgctgagccccagcttcacccccaccagcgtgatcagaaagatgtacgagagcaaggagaagagcaaggaggagcccgccagcggcaaggccgccctgggcgacagcaaggaggacacccagaaggccagcgaggagaacctgctgagcagcagcagcgtgcccagcgccgacagagacagcagccccaccaccaacagcaagctgagcgccctgcagagaagcagctgcagcacccccctgagccaggccaacagatacaccaaggagcaggactacagacccaaggccaccggcagaaagacccccaccctggccagccccgtgcccaccacccccttcctgagacccgtgcaccaggtgcccctggtgccccacgtgcccatggtgagacccgcccaccagctgcaccccggcctggtgcagagaatgctggcccagggcgtgcacccccagcacctgcccagcctgctgcagaccggcgtgctgccccccggcatggacctgagccacctgcagggcatcagcggccccatcctgggccagcccttctaccccctgcccgccgccagccaccccctgctgaaccccagacccggcacccccctgcacctggccatggtgcagcagcagctgcagagaagcgtgctgcacccccccggcagcggcagccacgccgccgccgtgagcgtgcagaccaccccccagaacgtgcccagcagaagcggcctgccccacatgcacagccagctggagcacagacccagccagagaagcagcagccccgtgggcctggccaagtggttcggcagcgacgtgctgcagcagcccctgcccagcatgcccgccaaggtgatcagcgtggacgagctggagtacagacagtag

SEQ ID NO: 323784 - DNA, 251 bp, Artificial Sequence
  derived and/or modified sequence
gcgcgcggcggggaaggcggcgccggggccagggtgcagagcattgtagaccaaggagccatggataggagaagtatgggtgaaacagaaagtggagatgctttccttgacctgaagaagcctcctgcctccaaatgcccccatcgctatacaaaagaagaactcttggatataaaagaactcccccattccaaacagaggccttcatgcctttctgaaaaatatgacagtgatggtgtctgggaccctga

SEQ ID NO: 323785 - DNA, 374 bp, Artificial Sequence
  derived and/or modified sequence
gttcacagggagtggaaaccggaacccgtggagtatgacccgcccatgcgtggacccggcaggttgctacaacttgcacttggaggggagaggtcccaaggcccccgaattagaaatgccaggctcatctctttttgtaacccttcattttaaaatgtgcagagcattgtagaccaaggagccatggataggagaagtatgggtgaaacagaaagtggagatgctttccttgacctgaagaagcctcctgcctccaaatgcccccatcgctatacaaaagaagaactcttggatataaaagaactcccccattccaaacagaggccttcatgcctttctgaaaaatatgacagtgatggtgtctgggaccctga

SEQ ID NO: 323786 - DNA, 1530 bp, Artificial Sequence
  derived and/or modified sequence
attaagggggagggggccgaagaggaggggcggagggccgggctgcagttacggcggctgaagagagacagcccaagccggtcggggtgggggcgcgagagcgaaggctgcggggagcggcgctgggaccggtgcgggcagcggggaggggagcggcggccgaggcaaagggccgccgagcggcggaggcaccgagtgcagagcattgtagaccaaggagccatggataggagaagtatgggtgaaacagaaagtggagatgctttccttgacctgaagaagcctcctgcctccaaatgcccccatcgctatacaaaagaagaactcttggatataaaagaactcccccattccaaacagaggccttcatgcctttctgaaaaatatgacagtgatggtgtctgggaccctgagaagtggcatgcctctctctacccagcttcagggcggagctcaccagtggaaagtctgaagaaagagttggatacagaccggccttccctggtgcgcaggatagtagatccacgagagcgtgtgaaagaagatgacttagatgttgttctcagccctcagagacggagctttggagggggctgccacgtgacagccgctgttagctcccggcgctcaggaagtccattagagaaagatagtgatgggcttcgtctgcttggtggacgtaggattggcagtgggaggataatctctgcccggacctttgagaaggatcaccgtcttagcgataaggacctgcgggacttgagagacagagaccgagagagggacttcaaggacaagcgtttcaggagagagtttggagatagtaagcgtgtctttggtgagcgtagaagaaatgattcttacacagaagaagaaccagagtggttctctgctggacccacaagtcagtctgaaaccatcgaactgactggctttgatgataagatactagaagaagatcacaaagggagaaaaagaacaaggcgacggacagcctctgtgaaggaaggtatagtagagtgcaatggaggagtggccgaagaggatgaagtggaggtcatccttgcacaggagcctgcggctgatcaggaagtgccaagggatgctgtcttgcctgagcagtccccaggagactttgactttaatgagttctttaaccttgataaggtgccatgcttggcttcgatgatagaagatgttttgggagaagggtcagtctctgccagtcggttcagtaggtggttctctaacccgagcagatcaggaagccgatccagcagtcttgggtcaacaccacatgaagagctagagagacttgcaggtctggagcaagccatcctctctcctggacagaactcggggaattactttgctcctataccattggaagaccatgctgaaaataaagtggatattttagaaatgctacagaaagccaaagtggatttgaaacctcttctttccagcctttctgcaaataaagaaaaacttaaagaaagcttgagactgtctccaaaaaaaaaaaaaaaa

SEQ ID NO: 323787 - DNA, 688 bp, Artificial Sequence
  derived and/or modified sequence
tggccacaggtgcggctggcctggcgaggggcgctcgggccccgtccccagtccctgatcgccggataacaaggggcagctggcgccgtccattggtgcagagcattgtagaccaaggagccatggataggagaagtatgggtgaaacagaaagtggagatgctttccttgacctgaagaagcctcctgcctccaaatgcccccatcgctatacaaaagaagaactcttggatataaaagaactcccccattccaaacagaggccttcatgcctttctgaaaaatatgacagtgatggtgtctgggaccctgagaagtggcatgcctctctctacccagcttcagggcggagctcaccagtggaaagtctgaagaaagagttggatacagaccggccttccctggtgcgcaggatagtagatccacgagagcgtgtgaaagaagatgacttagatgttgttctcagccctcagagacggagctttggagggggctgccacgtgacagccgctgttagctcccggcgctcaggaagtccattagagaaagatagtgatgggcttcgtctgcttggtggacgtaggattggcagtgggaggataatctctgcccggacctttgagaaggatcaccgtcttagcgataaggacctgcgggacttgagagacagagaccgagagagggactt

SEQ ID NO: 323788 - DNA, 192 bp, Artificial Sequence
  derived and/or modified sequence
atggataggcgctcaatgggggagaccgagtcaggtgacgccttcttggatctaaaaaagccaccagcctctaagtgcccccatagatatactaaggaggagttgcttgatatcaaggagctgccccacagcaaacagcgcccctcctgtttgtctgaaaagtacgatagcgatggtgtgtgggacccctag

SEQ ID NO: 323789 - DNA, 192 bp, Artificial Sequence
  derived and/or modified sequence
atggacaggaggtcaatgggagagactgagtctggcgatgcctttctggatcttaaaaaacctccggcctcaaaatgtcctcatcggtatactaaagaggagctgctggacatcaaggaactgccgcattccaagcagcggccctcctgcttgtcggagaaatacgattcagatggcgtgtgggacccctag

SEQ ID NO: 323790 - DNA, 1311 bp, Artificial Sequence
  derived and/or modified sequence
atggatcgcaggagtatgggcgaaaccgagagcggcgacgccttcctggacttaaagaagccgcctgcttcaaagtgtccccaccggtatactaaagaagaattacttgatattaaggaactgccgcatagtaagcagcggccgtcatgtctttccgagaagtatgatagcgacggagtgtgggatcctgaaaagtggcatgcaagtctgtaccccgcttccggacggagctctcctgtggagagcctcaagaaggagctggacaccgatcggcccagccttgtgcggcgcatcgtggatccacgggagcgcgtaaaggaagatgacctagacgttgtactcagcccacagagaaggtcattcgggggtgggtgtcatgtcactgcagccgtgagctctcgtagatccggctctcccttggagaaggactccgatggcctgaggctcttgggcggacgtagaataggtagcgggaggataatcagcgccagaaccttcgagaaggatcaccgccttagtgacaaagatctgagggatcttcgggatcgggaccgcgaacgagactttaaagataagcgcttccgtagggagtttggcgattcgaaaagggtgttcggggagcgtaggcgaaacgatagttataccgaggaagaaccggagtggttttccgcaggccctacaagtcagagtgagaccatcgagttgacgggatttgatgataagattctggaagaggatcacaaggggaggaagcgtacccgtaggcgtacagcctcagttaaagaaggaatagttgagtgtaacggtggagtggccgaagaggacgaggtcgaggtcatccttgcccaggaacctgccgccgaccaggaagttccccgcgatgctgtgttgcctgagcagtcaccgggagacttcgatttcaatgagttttttaacctcgataaagtcccatgtttagcctcgatgattgaagatgttttgggcgaagggtccgtaagcgccagccggttttctcggtggttctcaaatcccagccggtctggctctcggagctcatctttggggagtacacctcacgaggaactggagaggctggctggcctggaacaggccatcctaagccctggccagaattctggaaactatttcgcacctatacctctggaggaccacgctgaaaacaaggtggacatcttagagatgcttcagaaagcaaaagtcgacctgaaacccctcctgtctagcctgtccgcaaacaaagagaaactgaaggagagcctgcgtctgagtccgaagaagaaaaaaaagtag

SEQ ID NO: 323791 - DNA, 567 bp, Artificial Sequence
  derived and/or modified sequence
atggacagacggagtatgggcgaaactgagtcgggggatgctttccttgacttaaagaagccccccgcgtcaaaatgtcctcatcgatacaccaaagaggagctgttagatatcaaagagcttccccactcaaagcagcggccttcttgccttagcgagaagtatgacagtgatggggtatgggatcccgaaaaatggcatgctagtttgtatccagcatccggacggtcctctccggtggaaagcctgaagaaagaactggacacagatcgtcctagcctagtccggaggatcgtagatccacgagaacgcgttaaggaggatgacctcgatgtggtgttgtctccccagcggaggtcatttggcgggggatgtcacgttacagcggccgtatcgtcgagaaggagtggctccccacttgaaaaggattcagacggcctcagactactggggggcaggaggattgggtccggccggattatcagcgccagaactttcgagaaagatcacagattatcagataaggacctgcgggacctccgtgatcgagaccgggagcgggactag

SEQ ID NO: 323792 - DNA, 192 bp, Artificial Sequence
  derived and/or modified sequence
atggacagaagatccatgggagaaacagaaagtggagatgccttcctggacctgaagaagcccccagccagcaaatgtccccaccgctacaccaaggaggagctgctggacatcaaggagctgccccacagcaagcagaggcccagctgcctgtctgagaagtatgacagtgatggagtgtgggacccctag

SEQ ID NO: 323793 - DNA, 1311 bp, Artificial Sequence
  derived and/or modified sequence
atggacagaagatccatgggagaaacagaaagtggagatgccttcctggacctgaagaagcccccagccagcaaatgtccccaccgctacaccaaggaggagctgctggacatcaaggagctgccccacagcaagcagaggcccagctgcctgtctgagaagtatgacagtgatggagtgtgggaccctgagaagtggcacgccagcctgtacccagccagcggccgcagcagccctgtggagagcctgaagaaggagctggacacagaccggcccagcctggtgcggcgcatcgtggacccccgggagcgggtgaaggaggatgacctggatgtggtgctgagcccccagaggaggagctttggaggcggctgccacgtgacagctgctgtgagcagccgccgcagcggcagccccctggagaaggacagtgatggcctgcggctgctgggcggcagaagaattggcagcggccgcatcatcagcgcccggacctttgagaaggaccaccggctgagtgacaaggacctgcgggacctgcgggaccgggaccgggagcgggacttcaaggacaagcgcttcagaagagaatttggagacagcaagagggtgtttggagagaggagaagaaatgacagctacacagaggaggagcctgagtggttctctgctggccccaccagccagagcgagaccatcgagctgaccggctttgatgacaagatcctggaggaggaccacaagggcaggaagaggaccaggagaagaacagcctctgtgaaggagggcatcgtggagtgcaatggaggagtggccgaggaggatgaggtggaggtgatcctggcccaggagcctgctgctgaccaggaggtgcccagagatgctgtgctgcctgagcagagccctggggactttgacttcaatgagttcttcaacctggacaaggtgccctgcctggcctccatgattgaagatgtgctgggggagggctctgtgtctgccagccgcttcagccgctggttcagcaaccccagccgcagcggcagccgcagcagcagcctgggcagcacccctcatgaggagctggagcggctggccggcctggagcaggccatcctgagccctggccagaacagcggcaactactttgcccccatccccctggaggaccacgccgagaacaaggtggacatcctggagatgctgcagaaggccaaggtggacctgaagcccctgctgagcagcctgagcgccaacaaggagaagctgaaggagagcctgcggctgagccccaagaagaagaagaagtag

SEQ ID NO: 323794 - DNA, 567 bp, Artificial Sequence
  derived and/or modified sequence
atggacagaagatccatgggagaaacagaaagtggagatgccttcctggacctgaagaagcccccagccagcaaatgtccccaccgctacaccaaggaggagctgctggacatcaaggagctgccccacagcaagcagaggcccagctgcctgtctgagaagtatgacagtgatggagtgtgggaccctgagaagtggcacgccagcctgtacccagccagcggccgcagcagccctgtggagagcctgaagaaggagctggacacagaccggcccagcctggtgcggcgcatcgtggacccccgggagcgggtgaaggaggatgacctggatgtggtgctgagcccccagaggaggagctttggaggcggctgccacgtgacagctgctgtgagcagccgccgcagcggcagccccctggagaaggacagtgatggcctgcggctgctgggcggcagaagaattggcagcggccgcatcatcagcgcccggacctttgagaaggaccaccggctgagtgacaaggacctgcgggacctgcgggaccgggaccgggagcgggactag

SEQ ID NO: 323795 - DNA, 192 bp, Artificial Sequence
  derived and/or modified sequence
atggaccggcggagcatgggcgagaccgagagcggcgacgccttcctggatcttaagaaacctccagcatcaaagtgcccccatcggtacactaaagaggagctgttggatatcaaggaacttcctcatagcaagcaaaggccgtcgtgtctgagcgaaaagtacgacagcgacggagtgtgggacccctag

SEQ ID NO: 323796 - DNA, 192 bp, Artificial Sequence
  derived and/or modified sequence
atggaccggcggagcatgggcgagaccgagagcggcgacgccttcctggacctgaagaaaccgccagcaagcaagtgtccacaccggtatactaaggaggagttgctggacattaaagaacttccacactcaaagcagcggccaagctgtctcagcgagaaatatgactctgacggcgtttgggacccctag

SEQ ID NO: 323797 - DNA, 1311 bp, Artificial Sequence
  derived and/or modified sequence
atggaccggcggagcatgggcgagaccgagagcggcgacgccttcctcgacctcaagaagcctcccgcaagtaagtgtccacatcggtataccaaggaagaactgctggacatcaaggaattgccccacagtaaacagcgtccctcctgcctttcagaaaaatatgattcggacggggtttgggacccggagaagtggcatgcctctctctatcctgcaagtggccggagtagccctgtggaaagcctcaaaaaggaactggacaccgaccggccctccctcgtgaggcggatcgttgatccacgcgagcgcgtcaaagaggacgacctggatgtcgtactcagtccccaacgccgttcatttggcggggggtgtcacgttacagcggccgtttcctctcgcagaagcggcagtccactcgaaaaggatagcgacggactacggctgctgggcggccgtcgtattggtagcggaaggatcatctccgcacgaacattcgaaaaggaccaccggttgtctgacaaggacttgagggaccttagggacagagacagggaaagggactttaaagataagagattcagacgcgaatttggtgatagtaagagagtttttggagagaggaggcgcaacgatagctatacagaggaggagcctgagtggtttagtgccggtcctacgagccaatcagaaactattgaactgaccggtttcgacgataagatactggaagaagatcacaagggtcgcaagcggacacgcaggcgtacagcttccgttaaagagggtatcgtggaatgtaatgggggagtggccgaagaggacgaagtcgaggtcattctggcacaggaacctgccgcagaccaggaggttccccgggatgcggttctccccgagcagtcaccaggtgatttcgacttcaatgagttcttcaatctagataaggtgccatgtcttgcgtcaatgatagaggacgtacttggagagggctctgtaagcgcaagccgattcagtagatggttctcgaatccttccagatctggctcacgttcgtcttccctgggctccacgccacacgaggagctggagaggctcgccggtctcgagcaggcaatcctaagtcctggccagaacagtgggaactatttcgcccctatcccactcgaggatcacgccgagaataaggtcgacatcctcgaaatgctgcagaaggctaaggtggacctgaaacctcttttaagctctctttcagctaacaaagagaagctgaaagagtctttgcggctcagcccgaagaagaagaaaaagtag

SEQ ID NO: 323798 - DNA, 567 bp, Artificial Sequence
  derived and/or modified sequence
atggaccggcggagcatgggcgagaccgagagcggcgacgccttcttggacttaaaaaagccccccgcttcgaagtgcccgcacagatacacaaaagaggaactcctggacattaaggagttaccacattcaaaacagagaccaagctgcctgagcgaaaaatatgattcagacggcgtttgggaccccgagaaatggcacgcgtccctctatcctgccagcggtcgatcctctcctgtggagagtttgaagaaagaactggacactgataggccctccttagtcagacggattgttgatcccagagagcgggtgaaagaggacgacctggacgtcgtgctgtcgcctcagcggaggtcatttgggggcggatgccacgttaccgcagccgttagcagccgaagatccggctcacccctggagaaggattccgatggattgcggctgcttggtggccggcgaattggttccggacgtataatcagtgcccgcacgttcgaaaaggaccacaggttgagcgacaaggatctgagggaccttcgggatcgggatagagagcgggactag

SEQ ID NO: 323799 - DNA, 192 bp, Artificial Sequence
  derived and/or modified sequence
atggaccgcagatccatgggcgaaacagaatccggcgatgcgtttctggacctcaagaaaccaccagcaagcaagtgtccccatcgatacaccaaggaagagctcttagatattaaagaactgccccacagtaagcagcgtccttcctgtctctccgagaaatatgatagtgatggtgtttgggatccctag

SEQ ID NO: 323800 - DNA, 192 bp, Artificial Sequence
  derived and/or modified sequence
atggatcgacgctccatgggagagaccgagtcaggggatgcatttttggacctgaaaaagccacctgcctcgaaatgtccccatagatacacgaaagaagagctcctggacataaaagagctccctcatagtaaacagcgaccctcctgtctgtctgagaagtacgatagtgatggcgtctgggatccctag

SEQ ID NO: 323801 - DNA, 1311 bp, Artificial Sequence
  derived and/or modified sequence
atggacaggcgaagcatgggcgagaccgaaagcggagacgccttcttggatctgaaaaaaccaccagccagtaaatgcccccaccggtatactaaggaagaactgctggacatcaaggagctgcctcacagtaaacagaggcccagttgtttgtctgagaagtacgattcggatggggtatgggatcccgagaaatggcacgcaagcctttacccggcttcaggacgttcctcccctgttgaatcactcaagaaggaactcgatacagaccgaccatcactagtgcgcagaatagtggacccgagggagcgggtcaaagaggacgatctcgacgtcgtcttgtccccgcagagaaggagcttcggtggagggtgtcacgtgacagctgccgtgagttcaaggcgatcgggttcgcctctagaaaaagacagtgacggcttaagactgctgggcggacgcagaatcggatctggtaggattattagtgctcgcactttcgagaaggaccatcgcctgagcgacaaagatctgcgggatctgcgcgatagggatcgtgaaagggacttcaaggataagcggtttcgtagagagttcggcgatagtaaacgggtcttcggggagcgcaggaggaatgattcgtacacggaggaggaaccggaatggttttctgcaggcccaacctcccagagcgagaccatcgaactaactggttttgacgataaaatcttagaggaggaccacaagggtaggaaaaggacccgtcgcagaacggcatcagttaaagaaggcatcgtggagtgtaacgggggagttgcagaggaggacgaggtggaggttattctggctcaggagcctgccgctgatcaggaagtacctagggacgccgtcctccccgagcagagcccgggagacttcgatttcaacgaattcttcaatctcgacaaagtgccttgcctggcaagcatgatcgaagatgtgttaggggaagggagtgtgagtgcctcccgatttagccgctggttttcaaacccatcgcgatccgggtctcgatcatcttccttggggagtactccccacgaagaactggagaggttagcaggactcgagcaggctatcctgagccctggacaaaactcaggaaattattttgcccctatccccttggaggatcatgccgagaataaggtggacatcctggagatgctgcagaaggccaaagtggatcttaaaccgctgctgtcctctctgagcgctaataaggaaaaactgaaggagagccttaggttgtcacccaaaaagaagaagaaatag

SEQ ID NO: 323802 - DNA, 567 bp, Artificial Sequence
  derived and/or modified sequence
atggaccgtcggtcaatgggcgagactgaatcgggcgacgcctttttggatctcaaaaaacctcctgccagcaagtgcccacatcgttacaccaaggaagagctcttagacatcaaagaactcccccattctaagcagagacctagctgtctgtcggaaaagtacgacagcgatggggtgtgggaccccgaaaagtggcacgcatcactatacccagcatcaggacgttcaagtccagtggaatcgctgaaaaaggaattagataccgaccgcccatcactggtgcggcgtatcgtggacccaagggaacgtgttaaggaagatgatctggatgtggtgttgtcaccacaacggaggagtttcggcggaggttgtcatgtgacagctgcagtgagctcgagacggtccggaagtcccctagagaaagacagcgacggcttacggttgcttgggggtagacgcatcgggagtggcagaatcataagtgctcggactttcgagaaggaccatagactttctgacaaggaccttagagacctgcgagaccgggatcgcgagagggactag

SEQ ID NO: 323803 - DNA, 192 bp, Artificial Sequence
  derived and/or modified sequence
atggacagaagaagcatgggcgagaccgagagcggcgacgccttcctggacctgaagaagccccccgccagcaagtgcccccacagatacaccaaggaggagctgctggacatcaaggagctgccccacagcaagcagagacccagctgcctgagcgagaagtacgacagcgacggcgtgtgggacccctag

SEQ ID NO: 323804 - DNA, 1311 bp, Artificial Sequence
  derived and/or modified sequence
atggacagaagaagcatgggcgagaccgagagcggcgacgccttcctggacctgaagaagccccccgccagcaagtgcccccacagatacaccaaggaggagctgctggacatcaaggagctgccccacagcaagcagagacccagctgcctgagcgagaagtacgacagcgacggcgtgtgggaccccgagaagtggcacgccagcctgtaccccgccagcggcagaagcagccccgtggagagcctgaagaaggagctggacaccgacagacccagcctggtgagaagaatcgtggaccccagagagagagtgaaggaggacgacctggacgtggtgctgagcccccagagaagaagcttcggcggcggctgccacgtgaccgccgccgtgagcagcagaagaagcggcagccccctggagaaggacagcgacggcctgagactgctgggcggcagaagaatcggcagcggcagaatcatcagcgccagaaccttcgagaaggaccacagactgagcgacaaggacctgagagacctgagagacagagacagagagagagacttcaaggacaagagattcagaagagagttcggcgacagcaagagagtgttcggcgagagaagaagaaacgacagctacaccgaggaggagcccgagtggttcagcgccggccccaccagccagagcgagaccatcgagctgaccggcttcgacgacaagatcctggaggaggaccacaagggcagaaagagaaccagaagaagaaccgccagcgtgaaggagggcatcgtggagtgcaacggcggcgtggccgaggaggacgaggtggaggtgatcctggcccaggagcccgccgccgaccaggaggtgcccagagacgccgtgctgcccgagcagagccccggcgacttcgacttcaacgagttcttcaacctggacaaggtgccctgcctggccagcatgatcgaggacgtgctgggcgagggcagcgtgagcgccagcagattcagcagatggttcagcaaccccagcagaagcggcagcagaagcagcagcctgggcagcaccccccacgaggagctggagagactggccggcctggagcaggccatcctgagccccggccagaacagcggcaactacttcgcccccatccccctggaggaccacgccgagaacaaggtggacatcctggagatgctgcagaaggccaaggtggacctgaagcccctgctgagcagcctgagcgccaacaaggagaagctgaaggagagcctgagactgagccccaagaagaagaagaagtag

SEQ ID NO: 323805 - DNA, 567 bp, Artificial Sequence
  derived and/or modified sequence
atggacagaagaagcatgggcgagaccgagagcggcgacgccttcctggacctgaagaagccccccgccagcaagtgcccccacagatacaccaaggaggagctgctggacatcaaggagctgccccacagcaagcagagacccagctgcctgagcgagaagtacgacagcgacggcgtgtgggaccccgagaagtggcacgccagcctgtaccccgccagcggcagaagcagccccgtggagagcctgaagaaggagctggacaccgacagacccagcctggtgagaagaatcgtggaccccagagagagagtgaaggaggacgacctggacgtggtgctgagcccccagagaagaagcttcggcggcggctgccacgtgaccgccgccgtgagcagcagaagaagcggcagccccctggagaaggacagcgacggcctgagactgctgggcggcagaagaatcggcagcggcagaatcatcagcgccagaaccttcgagaaggaccacagactgagcgacaaggacctgagagacctgagagacagagacagagagagagactag

SEQ ID NO: 323806 - DNA, 4343 bp, Artificial Sequence
  derived and/or modified sequence
gccggcggcggcagtgtctgtggtggccgcggcggcgagagcgacggtcccatctttcccaccctcttggttgccgctggccacacgccctccgctggcggcgacttctcagctccgtgcgcccgggctggacagtgagcctcgagaggagacgcgggcggctagagccggagtggggcgagccgcggaacccggccgggagccgcgcgaggcgtgatcggagggtatggttggcatggaattgaatttcatctgtctgtgggaattgtaagcaagattgccatcacgaaagccaaagtggatttctccagtgtggtgtgcctgcccccttccgtcattgctgtgaatgggctggacggaggaggggccggcgaaaatgatgatgaaccagtgctcgtgtccttatctgcggcacccagtccccagagtgaagctgttgccaatgaactgcaggagctctccttgcagcccgagctgaccctaggcctccaccctggcaggaatcccaatttgcctccacttagtgagcggaagaatgtgctacagttgaaactccagcagcgccggacccgggaagaactggtgagccaagggatcatgccgcctttgaaaagtccagccgcatttcatgagcagagaaggagcttggagcgggccaggacagaggactatctcaaacggaagattcgttcccggccggagagatcggagctggtcaggatgcacattttggaagagacctcggctgagccatccctccaggccaagcagctgaagctgaagagagccagactagccgatgacctcaatgagaagattgcacagaggcctggccccatggagctggtggagaagaacatccttcctgttgagtccagcctgaaggaagccatcattgtgggccaggtgaactatcccaaagtagcagacagctcttccttcgatgaggacagcagcgatgccttatcccccgagcagcctgccagccatgagtcccagggttctgtgccgtcacccctggaggcccgagtcagcgaaccactgctcagtgccacctctgcatcccccacccagcaaagccaacccaagtctgccagtgagaagtcacagcgcagcaagaaggccaaggagctgaagccaaaggtgaagaagctcaagtaccaccagtacatccccccggaccagaagcaggacaggggggcaccccccatggactcatcctacgccaagatcctgcagcagcagcagctcttcctccagctgcagatcctcaaccagcagcagcagcagcaccacaactaccaggccatcctgcctgccccgccaaagtcagcaggcgaggccctgggaagcagcgggacccccccagtacgcagcctctccactaccaatagcagctccagctcgggcgcccctgggccctgtgggctggcacgtcagaacagcacctcactgactggcaagccgggagccctgccggccaacctggacgacatgaaggtggcagagctgaagcaggagctgaagttgcgatcactgcctgtctcgggcaccaaaactgagctgattgagcgccttcgagcctatcaagaccaaatcagccctgtgccaggagcccccaaggcccctgccgccacctctatcctgcacaaggctggcgaggtggtggtagccttcccagcggcccggctgagcacggggccagccctggtggcagcaggcctggctccagctgaggtggtggtggccacggtggccagcagtggggtggtgaagtttggcagcacgggctccacgccccccgtgtctcccaccccctcggagcgctcactgctcagcacgggcgatgaaaactccacccccggggacacctttggtgagatggtgacatcacctctgacgcagctgaccctgcaggcctcgccactgcagatcctcgtgaaggaggagggcccccgggccgggtcctgttgcctgagccctggggggcgggcggagctagaggggcgcgacaaggaccagatgctgcaggagaaagacaagcagatcgaggcgctgacgcgcatgctccggcagaagcagcagctggtggagcggctcaagctgcagctggagcaggagaagcgagcccagcagcccgcccccgcccccgcccccctcggcacccccgtgaagcaggagaacagcttctccagctgccagctgagccagcagcccctgggccccgctcacccattcaaccccagcctggcggccccagccaccaaccacatagacccttgtgctgtggccccggggcccccgtccgtggtggtgaagcaggaagccttgcagcctgagcccgagccggtccccgccccccagttgcttctggggcctcagggccccagcctcatcaagggggttgcacctcccaccctcatcaccgactccacagggacccaccttgtcctcaccgtgaccaataagaatgcagacagccctggcctgtccagtgggagcccccagcagccctcgtcccagcctggctctccagcgcctgccccctctgcccagatggacctggagcacccactgcagcccctctttgggacccccacttctctgctgaagaaggaaccacctggctatgaggaagccatgagccagcagcccaaacagcaggaaaatggttcctcaagccagcagatggacgacctgtttgacattctcattcagagcggagaaatttcagcagatttcaaggagccgccatccctgccagggaaggagaagccatccccgaagacagtctgtgggtcccccctggcagcacagccatcaccttctgctgagctcccccaggctgccccacctcctccaggctcaccctccctccctggacgcctggaggacttcctggagagcagcacggggctgcccctgctgaccagtgggcatgacgggccagagcccctttccctcattgacgacctccatagccagatgctgagcagcactgccatcctggaccaccccccgtcacccatggacacctcggaattgcactttgttcctgagcccagcagcaccatgggcctggacctggctgatggccacctggacagcatggactggctggagctgtcgtcaggtggtcccgtgctgagcctagcccccctcagcaccacagcccccagcctcttctccacagacttcctcgatggccatgatttgcagctgcactgggattcctgcttgtagctctctggctcaagacggggtggggaaggggctgggagccagggtactccaatgcgtggctctcctgcgtgattcggcctctccacatggttgtgagtcttgacaatcacagcccctgctttttcccttccctgggaggctagaacagagaagcccttactcctggttcagtgccacgcagggcagaggagagcagctgtcaagaagcagccctggctctcacgctggggttttggacacacggtcagggtcagggccatttcagcttgacctccttttttgaggtcagggggcactgtctgtctggctacaatttggctaaggtaggtgaagcctggccaggcgggaggcttctcttctgacccagggctgagacaggttaaggggtgaatctccttcctttctctccctgctttgctgtgaagggagaaattagcctgggcctctaccccctattccctgtgtctgccaaccccaggatcccagggctccctgccattttagtgtcttggtgtagtgtaaccatttagtggttggtggcaacaattttatgtacaggtgtatatacctctatattatatatcgacatacatatatatttttgggggggggcggacaggagatgggtgcaactccctcccatcctactctcacagaagggcctggatgcaaggttacccttgagctgtgtgccacagtctggtgcccagtctggcatgcagctacccaggcccacccatcacgtgtgattgacatgtaggtaccctgccacggcctatgccccacctgccctgcttcctggctccttatcagtgccatgagggcagaggtgctacctggccttcctgccaggagctctccacccactcacattccgtccccgccgcctcactgcagccagcgtggccctaggacaggaggagcttcgggcccagcttcaccctgcggtggggctgaggggtggccatctcctgccctggggccactggcttcacattctgggctgactcataggggagtaggggtggagtcaccaaaaccagtgctgggacaaagatggggaaggtgtgtgaactttttaaaataaacacaaaaacaca

SEQ ID NO: 323807 - DNA, 258 bp, Artificial Sequence
  derived and/or modified sequence
atgttgtcaagtacagccatattggaccacccaccctcccccatggacacatccgagctgcacttcgttccagaaccgagctcgaccatgggacttgacctggccgacggccacctggactcaatggactggctagagttgagctctggtggtccggtcctcagtctcgctcccctttctacgacagcaccatccctgtttagtacagacttcctggacgggcacgacctacaactccactgggattcatgcctgtag

SEQ ID NO: 323808 - DNA, 258 bp, Artificial Sequence
  derived and/or modified sequence
atgctgagcagcacagccatcctggaccacccccccagccccatggacaccagcgagctgcactttgtgcctgagcccagcagcaccatgggcctggacctggctgatggccacctggacagcatggactggctggagctgagcagcggcggccctgtgctgagcctggcccccctgagcaccacagcccccagcctcttcagcacagacttcctggatggccatgacctgcagctgcactgggacagctgcctgtag

SEQ ID NO: 323809 - DNA, 1842 bp, Artificial Sequence
  derived and/or modified sequence
cgtcattgctgtgaatgggctggacggaggaggggccggcgaaaatgatgatgaaccagtgctcgtgtccttatctgcggcacccagtccccaaagtgctgggattacagacgtgagccactgcacccagcccattgtaactaaccatttttaagtgtatggttcagtggtattaaatacattcataatgtgtacagccatcactgccatccatctccctttcttttgatctcgtaaaactgaaactatccccattaaacagtaacttcccatttggcccttccgccagcctgtagcaactgccattctactttctgtctctatgattttgactaagtgcaatcatgaattgtcttttgtgacaggctgttgcactaagcatagtatcacttccttcatccattgatggacataggttgcttccacattctactgttgtgaatgcacttatcaacacctgtgtacaaatacctgagaccctgcttccaattcttttgggtatatgcccagcagtggaattgctagatcatatggtaattctatttttaagtaagtaagtgttggaggaacctccatactgtttttcatagcagctgcaccattttgcatttctaccacagggcacaagggctccagtttctctgtatcctcaccaatactttcttaaaaatttaattttacagtagccactccagtgggtttgaggtgtatctcactgtggtctccctcatgactagtgatattgagctcttttcatgtgctgttggccatttgtatatcatctttggaaaaatgtctgttcaaatctttcttttacctattcttgagtcaagtttggttttttgttgttgagttttagaagttctctgtgtattccggatatcacttctttatcaaatatgtgatttgcaaatatttttaaagagttttatagtcttagctcttacatttaagtaagtctttgatccgttttatttttgtaaatggtgtgacgttggggggtccaccttcattcttttgcatgtagatatacaggcttggcttctgatatccatttactctcttgattgattggcagaaatttcagcagatttcaaggagccgccatccctgccagggaaggagaagccatccccgaagacagtctgtgggtcccccctggcagcacagccatcaccttctgctgagctcccccaggctgccccacctcctccaggctcaccctccctccctggacgcctggaggacttcctggagagcagcacggggctgcccctgctgaccagtgggcatgacgggccagagcccctttccctcattgacgacctccatagccagatgctgagcagcactgccatcctggaccaccccccgtcacccatggacacctcggaattgcactttgttcctgagcccagcagcaccatgggcctggacctggctgatggccacctggacagcatggactggctggagctgtcgtcaggtggtcccgtgctgagcctagcccccctcagcaccacagcccccagcctcttctccacagacttcctcgatggccatgatttgcagctgcactgggattcctgcttgtagctctctggctcaagacggggtggggaaggggctgggagccagggtactccaatgcgtggctctcctgcgtgattcggcctctccacatggttgtgagtcttgacaatcacagcccctgctttttcccttccctgggaggctagaacagagaagcccttactcctggttcagtgccacgcagggcagaggagagcagctgtcaagaagcagccctggctctcacgctggggttttggacacacggtc

SEQ ID NO: 323810 - DNA, 258 bp, Artificial Sequence
  derived and/or modified sequence
atgctgagcagcaccgccatcctggaccacccccccagccccatggacacctccgaactgcacttcgtccctgagccaagctccaccatgggattggatcttgctgatggtcatttggattccatggactggctagagctaagctcgggggggcctgtgctatcgctggccccactgagcaccaccgccccgtccctgttcagcacggactttttggatggccatgacctgcagttgcactgggactcctgtctttag

SEQ ID NO: 323811 - DNA, 258 bp, Artificial Sequence
  derived and/or modified sequence
atgcttagctccaccgccatcctggaccacccacctagccccatggacaccagtgagcttcactttgtacccgaaccaagcagcaccatgggcctggacctggctgacgggcatcttgactctatggattggctggaactcagttctggcggtcctgtgctgtccctcgctcccctctcaactaccgcgccttccctgttttccaccgattttctggacggacatgacttgcagctgcattgggacagttgtttgtag

SEQ ID NO: 323812 - DNA, 258 bp, Artificial Sequence
  derived and/or modified sequence
atgctgagcagcaccgccatcctggaccacccccccagccccatggacaccagcgagctgcacttcgtgcccgagcccagcagcaccatgggcctggacctggccgacggccacctggacagcatggactggctggagctgagcagcggcggccccgtgctgagcctggcccccctgagcaccaccgcccccagcctgttcagcaccgacttcctggacggccacgacctgcagctgcactgggacagctgcctgtag

SEQ ID NO: 323813 - protein, 191 aa, Artificial Sequence
  derived and/or modified sequence
MAAAKDTHEDHDTSTENTDESNHDPQFEPIVSLPEQEIKTLEEDEEELFKMRAKLFRFASENDLPEWKERGTGDVKLLKHKTLKICANHYITPMMELKPNAGSDRAWVWNTHADFADECPKPELLAIRFLNAESEPRALGTCLTWGSPAWQRGGLCATNAVAFWGEGAVTGKCVVWAALPCCLGAMPRLKP

SEQ ID NO: 323814 - DNA, 576 bp, Artificial Sequence
  derived and/or modified sequence
atggccgccgccaaggacacccacgaggaccacgacaccagcaccgagaacaccgacgagagcaaccacgacccccagttcgagcccatcgtgagcctgcccgagcaggagatcaagaccctggaggaggacgaggaggagctgttcaagatgagagccaagctgttcagattcgccagcgagaacgacctgcccgagtggaaggagagaggcaccggcgacgtgaagctgctgaagcacaagaccctgaagatctgcgccaaccactacatcacccccatgatggagctgaagcccaacgccggcagcgacagagcctgggtgtggaacacccacgccgacttcgccgacgagtgccccaagcccgagctgctggccatcagattcctgaacgccgagagcgagcccagagccctgggcacctgcctgacctggggcagccccgcctggcagagaggcggcctgtgcgccaccaacgccgtggccttctggggcgagggcgccgtgaccggcaagtgcgtggtgtgggccgccctgccctgctgcctgggcgccatgcccagactgaagccctag

SEQ ID NO: 323815 - DNA, 576 bp, Artificial Sequence
  derived and/or modified sequence
atggctgcagccaaggacacgcacgaagatcatgacacttccaccgaaaacactgatgagagtaaccatgacccccaatttgagccaattgtgtcccttcccgagcaggaaattaaaaccctggaggaggacgaagaggagctgtttaagatgcgggcaaagctgttccggtttgccagcgagaatgacctacctgaatggaaagaacgggggactggcgatgtgaagttattgaaacacaaaacgctgaagatctgtgccaatcattacatcacccctatgatggagctgaagcccaacgctggctctgatcgcgcctgggtgtggaacacccatgccgactttgctgatgagtgtccgaagcccgaactcctggcaatcaggttcctgaacgcagagagcgagccccgggcacttggcacatgtctgacttggggctctccagcctggcagagaggcggactctgtgccaccaacgctgttgctttctggggggagggagcggtaaccggaaagtgtgtggtttgggccgccctgccctgttgtctgggggctatgcctagactcaaaccatag

SEQ ID NO: 323816 - DNA, 576 bp, Artificial Sequence
  derived and/or modified sequence
atggctgctgccaaggacacccatgaagatcatgacaccagcacagagaacacagatgagagcaaccacgacccccagtttgagcccatcgtgtccctgcctgagcaggagatcaagaccctggaggaggatgaggaggagctgttcaagatgagggccaagctgttccgctttgcctctgaaaatgacctgcctgagtggaaggagcggggcactggagatgtgaagctgctgaagcacaagaccctgaagatctgtgccaaccactacatcacccccatgatggagctgaagcccaatgccggcagtgaccgggcctgggtgtggaacacccatgctgactttgctgatgagtgccccaagccagagctgctggccatccgcttcctgaatgctgagagcgagccccgggccctgggcacctgcctgacctggggcagccctgcctggcagagaggaggcctgtgtgccaccaatgctgtggccttctggggcgagggcgctgtgactggaaaatgtgtggtgtgggccgccctgccctgctgcctgggcgccatgccccggctgaagccctag

SEQ ID NO: 323817 - DNA, 576 bp, Artificial Sequence
  derived and/or modified sequence
atggccgccgccaaggacacccacgaggaccacgacaccagcaccgagaacaccgatgaaagtaaccacgacccacagtttgaacccattgtgagcctgcccgagcaggagatcaagacactggaggaagatgaggaagagttgtttaagatgcgggcaaagttatttcgcttcgcttccgaaaatgacttgccagagtggaaagagcgaggcacaggtgacgtcaaactcttaaaacacaagactctcaagatttgtgctaatcattatatcacgccaatgatggagctcaagcccaatgccggttcagaccgagcttgggtgtggaacacccacgcggacttcgccgacgagtgcccaaagccagaacttctggctatccggttccttaacgcagaatcggaacccagggctttgggcacttgcctgacatggggctcacctgcctggcagcggggaggactgtgcgccacaaacgcagtggccttttggggagagggagcagtcactggcaaatgtgtggtttgggcggccctgccatgctgcctgggcgccatgcccagactgaaaccatag

SEQ ID NO: 323818 - DNA, 576 bp, Artificial Sequence
  derived and/or modified sequence
atggcagcagccaaagatactcacgaggatcacgatacctccacagagaacacggatgagagtaatcacgatccacaattcgagcccatagtctcgctgcccgagcaagagattaagactttagaagaagatgaagaagagttatttaaaatgagggcaaagttgttccgctttgcttccgaaaacgatttgccagagtggaaagagagaggaacaggcgatgtgaaactccttaagcacaagacactcaaaatttgtgcaaatcactacatcacccccatgatggagctcaagccgaacgccggatccgatagagcctgggtttggaacacgcacgccgactttgccgatgagtgtccaaagccggagctgcttgccataagattcctcaatgcagaaagtgagcccagagctctaggcacctgtctcacttggggctctccagcttggcagcggggaggactctgtgctaccaatgccgtggccttctggggcgagggcgctgtgaccggcaaatgtgtggtttgggcagcgctgccttgctgtctgggcgcaatgcccaggctgaagccatag

SEQ ID NO: 323819 - DNA, 1299 bp, Artificial Sequence
  derived and/or modified sequence
gttcgggtcgtggggcggagggaagagcgggcgggcgggaggcgccggcgccagacgcggagggaaggagctacgagtagccgccgagaggccgcggagccagcgacgaccgacccagccgagccgccgccgccgccgcgcccccatggcggccgccaaggacactcatgaggaccatgatacttccactgagaatacagacgagtccaaccatgaccctcagtttgagccaatagtttctcttcctgagcaagaaattaaaacactggaagaagatgaagaggaactttttaaaatgcgggcaaaactgttccgatttgcctctgagaacgatctcccagaatggaaggagcgaggcactggtgacgtcaagctcctgaagcacaagaccctgaagatctgtgccaaccactacatcacgccgatgatggagctgaagcccaacgcaggtagcgaccgtgcctgggtctggaacacccacgctgacttcgccgacgagtgccccaagccagagctgctggccatccgcttcctgaatgctgagagtgagccaagggccctggggacctgcctgacttggggctcacctgcgtggcagcgtggcgggttatgtgcaacaaatgctgttgccttttggggagagggggcagtaactgggaagtgtgtcgtgtgggctgccctgccctgctgtttgggggccatgcccagactgaagccatgagcagcgccttcccccttaaactcaaagctgtgccaagtagctggtgaacagcagtgcccgctcagccgccttgtggctggcactttggtttgctctccaagctccggttcccattagttgttgcggagcctgaggcccaacccagggcttcctcccagtgctgatcctcgtgccaggcttctggttcactggggccaggggcccctcatggttgcctgggtgccagcaggggctgggcagagagatccacaggcccaggctgatctcttccctgctcagaggtctttccagtccagatcgtccaagctgcgtccagtggctcctggaggagtcagtgggtactgtggcctggcgcctggtagctggccgtttggtgccaagtgaccttgtccttgctgtgggcgtggctgccccagcagcctttccaacacggttgggagccgagcctgtggcaaagaggcccatgccccttggttgcctgagggtccgtgctctaccgctctgcccaaatgggtgcagtcagatgaaggagacagaaggccagggccgatgtcaggtggaccagtcctttcttaggt

SEQ ID NO: 323820 - protein, 181 aa, Artificial Sequence
  derived and/or modified sequence
MGGRSAQAGLGTRITPMMELKPNAGSDRAWVWNTHADFADECPKPELLAIRFLNAENAQKFKTKFEECRKEIEEREKKGDVVPWVGGLLCRLTLHLTILPGGCFFCLPDKHSRVLWPPHVSRVMQLPGDTGASWGALSTCQCCWPQSNWAGIGVRALPGAHQKVLYDGPRFVSQRAWSPLP

SEQ ID NO: 323821 - DNA, 546 bp, Artificial Sequence
  derived and/or modified sequence
atgggcggcagaagcgcccaggccggcctgggcaccagaatcacccccatgatggagctgaagcccaacgccggcagcgacagagcctgggtgtggaacacccacgccgacttcgccgacgagtgccccaagcccgagctgctggccatcagattcctgaacgccgagaacgcccagaagttcaagaccaagttcgaggagtgcagaaaggagatcgaggagagagagaagaagggcgacgtggtgccctgggtgggcggcctgctgtgcagactgaccctgcacctgaccatcctgcccggcggctgcttcttctgcctgcccgacaagcacagcagagtgctgtggcccccccacgtgagcagagtgatgcagctgcccggcgacaccggcgccagctggggcgccctgagcacctgccagtgctgctggccccagagcaactgggccggcatcggcgtgagagccctgcccggcgcccaccagaaggtgctgtacgacggccccagattcgtgagccagagagcctggagccccctgccctag

SEQ ID NO: 323822 - DNA, 546 bp, Artificial Sequence
  derived and/or modified sequence
atgggcgggaggagtgcacaggcgggtcttggcacccggatcacccctatgatggaacttaaaccaaacgccggaagtgaccgggcatgggtgtggaatacacatgccgattttgccgatgagtgtcctaaacccgagctccttgcaatcaggttcttgaacgccgagaatgcacagaagtttaaaactaagttcgaggagtgtagaaaggagatcgaggaaagggagaaaaagggtgatgtggtcccttgggtcggagggctcctgtgcagattgactctgcacctcacaatcctgcccggaggatgttttttttgtctccccgacaagcacagccgggtcctttggccaccccacgtcagccgggttatgcaattgcctggcgacaccggagcaagttggggcgctttatctacttgccagtgttgttggcctcaaagcaattgggccgggatcggtgttagggctctgcctggggcacatcagaaagtgctttacgacggacccaggtttgttagccagcgggcttggtcacctctgccttag

SEQ ID NO: 323823 - DNA, 546 bp, Artificial Sequence
  derived and/or modified sequence
atgggcggccgcagcgcccaggccggcctgggcacccgcatcacccccatgatggagctgaagcccaatgccggcagtgaccgggcctgggtgtggaacacccacgccgactttgctgatgaatgtcccaagccagagctgctggccatccgcttcctgaatgcagaaaatgcccagaagttcaagaccaagtttgaagaatgtaggaaggagattgaggagcgggagaagaagggagatgtggtgccctgggtgggcggcctgctgtgccgcctgaccctgcacctgaccatcctgcccggcggctgcttcttctgcctgcctgacaagcacagccgggtgctgtggccccctcatgtgtcccgggtgatgcagctgcccggggacaccggggcctcctggggcgccctgagcacctgccagtgctgctggccccagagcaactgggccggcatcggcgtgcgggccctgcccggggcccaccagaaggtgctgtatgatggccccaggtttgtgtcccagagggcctggagccccctgccctag

SEQ ID NO: 323824 - DNA, 546 bp, Artificial Sequence
  derived and/or modified sequence
atgggcggccggagcgcccaggccggcctgggcacccggatcaccccaatgatggaactgaaaccaaatgccgggagcgaccgcgcctgggtgtggaacacccatgctgatttcgccgacgaatgccctaagccggagttactggccatcaggtttttgaacgctgaaaacgcccaaaaattcaagaccaagtttgaagaatgccgcaaagaaatcgaagagcgagagaagaagggtgatgtggtcccttgggtaggtggcctgctctgccggctgaccctgcacctaactatattacccggtggttgttttttttgtctccctgacaaacatagccgtgttctgtggcctccgcatgtttcgagagtaatgcaactccctggtgataccggggcctcctggggggccctgtccacttgccaatgctgctggccacagtcaaactgggccggcattggcgtgagggccctgcctggagcacaccagaaagtgctttacgatggacccagattcgtttcccaacgtgcttggtctcccttgccgtag

SEQ ID NO: 323825 - DNA, 546 bp, Artificial Sequence
  derived and/or modified sequence
atgggcggaaggtccgcccaggccggattaggcacaagaatcactccaatgatggagctgaagccaaacgctggatccgaccgagcctgggtgtggaacacgcacgccgatttcgctgatgagtgtcctaagcctgagctgctagccattaggtttcttaatgcagagaacgcccagaagtttaagacaaagtttgaggagtgtcggaaagaaatcgaggagagagaaaagaagggggacgtcgttccatgggttgggggtctcttatgccggctgactctgcacctcactatccttcccggtggttgttttttctgcctgcccgacaagcactctagggtgttgtggcctccccatgtctcaagagttatgcagttgcccggagacacaggcgcatcatggggagcccttagtacctgccaatgctgttggccgcagagcaattgggcgggaatcggtgttagagctctgcccggagcgcatcagaaagtcctctacgatgggcctcggtttgtgtctcaacgggcttggagtccactgccatag

SEQ ID NO: 323826 - DNA, 1879 bp, Artificial Sequence
  derived and/or modified sequence
agatcctgtgctgggcctcccaactggtgcatggacaggctgaggaagcacaggccgggcagagccctggccaagaggggcgtcttgcgcccacactcacttggcaagtttctgcagcacctgctcgcactccagctgcttccgctcaagctgctcagcatagggcactgtccatagaggggtcaccacgtcggccactcgtgttactggtggctcactctcaccctcctgtcgcctcctcctggccatggggtcggccttgggccgggccaggcgcacactgagtgggcggcctttccagagggcaccatgcaaaacgcgcagggccttgtccctctctgcagcgctgcggaatgtcacaaaggcgcagggtggttgcccaaagagtttggttttgtggggctgcagaccaaagcggcccaggaagcgccggacgtcgctgaagctggcgtggcgaggacactcatgaggaccatgatacttccactgagaatacagacgagtccaaccatgaccctcagtttgagccaatagtttctcttcctgagcaagaaattaaaacactggaagaagatgaagaggaactttttaaaatgcgggcaaaactgttccgatttgcctctgagaacgatctcccagaatggaaggagcgaggcactggtgacgtcaagctcctgaagcacaaggagaaaggggccatccgcctcctcatgcggagggacaagaccctgaagatctgtgccaaccactacaacgtgcctctgaactcagagcaggcccgcagcgaagcttagagcacacgggggtgtggagtcagccagacgggccctgatgggaggacgcagcgcccaggctgggctcgggacgaggatcacgccgatgatggagctgaagcccaacgcaggtagcgaccgtgcctgggtctggaacacccacgctgacttcgccgacgagtgccccaagccagagctgctggccatccgcttcctgaatgctgagaatgcacagaaattcaaaacaaagtttgaagaatgcaggaaagagatcgaagagagagaaaagaaaggtgacgtggtgccatgggttggggggcttctttgcagactcactctgcatctgactatacttccaggcgggtgctttttctgtctgccagataaacattccagggtgctgtggccgcctcacgtatccagagtgatgcagctccctggggacacaggtgcttcctggggagccctgagcacttgtcagtgttgctggcctcagtccaattgggcaggcattggagtccgggcactgcctggagctcaccagaaggtgctttatgatggtcctcggtttgtctctcagagggcttggtcacctctgccatgaggctggactgcagctgtggtggcaagtgaccagatgtcactgagcagcctgaccatggtctaggcagtgcttgagtgcatccacctggcttcctttcgtcactgaatttcaagaagacagactccaggaggcggcttggccaggcaggagtctgtcccgagggcgggcaagccgctgtgggtgggtgacggcacttgggaccagcctggcgagggccatgtgcttgaatgcaccgtgcttctgttttctcactgtgctgcttgtgtttttagcaggatcaggcaaaaatgatcatgccgaaaaagtggcggaaaagctagaagctctctcggtgaaggaggagaccaaggaggatgctgaggagaagcaataaatcgtcttattttattttcttttcctctctttcctttcctttttttaaaaaattttaccctgcccctctttttcggtttgtttttattctttcatttttacaagggacgttatataaagaactgaactc

SEQ ID NO: 323827 - protein, 532 aa, Artificial Sequence
  derived and/or modified sequence
MFVLGIPLCPALSFSGGDDSQTQLFVSSKDVIKEIEDFDSLEALRLEGNTVGVEAARVIAKALEKKSELKRCHWSDMFTGRLRTEIPPALISLGEGLITAGAQLVELDLSDNAFGPDGVQGFEALLKSSACFTLQELKLNNCGMGIGGGKVIGTLEEVHMPQNGINHPGITALAQAFAVNPLLRVINLNDNTFTEKGAVAMAETLKTLRQVEVINFGDCLVRSKGAVAIADAIRGGLPKLKELNLSFCEIKRDAALAVAEAMADKAELEKLDLNGNTLGEEGCEQLQEVLEGFNMAKVLASLSDDEDEEEEEEGEEEEEEAEEEEEEDEEEEEEEEEEEEEEPQQRGQGEKSATPSRKILDPNTGEPAPVLSSPPPADVSTFLAFPSPEKLLRLGPKSSVLIAQQTDTSDPEKVVSAFLKVSSVFKDEATVRMAVQDAVDALMQKAFNSSSFNSNTFLTRLLVHMGLLKSEDKVKAIANLYGPLMALNHMVQQDYFPKALAPLLLAFVTKPNSALESCSFARHSLLQTLYKV

SEQ ID NO: 323828 - protein, 253 aa, Artificial Sequence
  derived and/or modified sequence
  misc_feature (1)..(1): Xaa can be any naturally occurring amino acid
XVGVEAARVIAKALEKKSELKRCHWSDMFTGRLRTEIPPALISLGEGLITAGAQLVELDLSDNAFGPDGVQGFEALLKSSACFTLQELKLNNCGMGIGGGKVIGTLEEVHMPQNGINHPGITALAQAFAVNPLLRVINLNDNTFTEKGAVAMAETLKTLRQVEVINFGDCLVRSKGAVAIADAIRGGLPKLKELNLSFCEIKRDAALAVAEAMADKAELEKLDLNGNTLGEEGCEQLQEVLEGFNMAKVLASL

SEQ ID NO: 323829 - DNA, 1599 bp, Artificial Sequence
  derived and/or modified sequence
atgttcgtgctgggcatccccctgtgccccgccctgagcttcagcggcggcgacgacagccagacccagctgttcgtgagcagcaaggacgtgatcaaggagatcgaggacttcgacagcctggaggccctgagactggagggcaacaccgtgggcgtggaggccgccagagtgatcgccaaggccctggagaagaagagcgagctgaagagatgccactggagcgacatgttcaccggcagactgagaaccgagatcccccccgccctgatcagcctgggcgagggcctgatcaccgccggcgcccagctggtggagctggacctgagcgacaacgccttcggccccgacggcgtgcagggcttcgaggccctgctgaagagcagcgcctgcttcaccctgcaggagctgaagctgaacaactgcggcatgggcatcggcggcggcaaggtgatcggcaccctggaggaggtgcacatgccccagaacggcatcaaccaccccggcatcaccgccctggcccaggccttcgccgtgaaccccctgctgagagtgatcaacctgaacgacaacaccttcaccgagaagggcgccgtggccatggccgagaccctgaagaccctgagacaggtggaggtgatcaacttcggcgactgcctggtgagaagcaagggcgccgtggccatcgccgacgccatcagaggcggcctgcccaagctgaaggagctgaacctgagcttctgcgagatcaagagagacgccgccctggccgtggccgaggccatggccgacaaggccgagctggagaagctggacctgaacggcaacaccctgggcgaggagggctgcgagcagctgcaggaggtgctggagggcttcaacatggccaaggtgctggccagcctgagcgacgacgaggacgaggaggaggaggaggagggcgaggaggaggaggaggaggccgaggaggaggaggaggaggacgaggaggaggaggaggaggaggaggaggaggaggaggaggagccccagcagagaggccagggcgagaagagcgccacccccagcagaaagatcctggaccccaacaccggcgagcccgcccccgtgctgagcagccccccccccgccgacgtgagcaccttcctggccttccccagccccgagaagctgctgagactgggccccaagagcagcgtgctgatcgcccagcagaccgacaccagcgaccccgagaaggtggtgagcgccttcctgaaggtgagcagcgtgttcaaggacgaggccaccgtgagaatggccgtgcaggacgccgtggacgccctgatgcagaaggccttcaacagcagcagcttcaacagcaacaccttcctgaccagactgctggtgcacatgggcctgctgaagagcgaggacaaggtgaaggccatcgccaacctgtacggccccctgatggccctgaaccacatggtgcagcaggactacttccccaaggccctggcccccctgctgctggccttcgtgaccaagcccaacagcgccctggagagctgcagcttcgccagacacagcctgctgcagaccctgtacaaggtgtag

SEQ ID NO: 323830 - DNA, 762 bp, Artificial Sequence
  derived and/or modified sequence
tgagtgggcgtggaggccgccagagtgatcgccaaggccctggagaagaagagcgagctgaagagatgccactggagcgacatgttcaccggcagactgagaaccgagatcccccccgccctgatcagcctgggcgagggcctgatcaccgccggcgcccagctggtggagctggacctgagcgacaacgccttcggccccgacggcgtgcagggcttcgaggccctgctgaagagcagcgcctgcttcaccctgcaggagctgaagctgaacaactgcggcatgggcatcggcggcggcaaggtgatcggcaccctggaggaggtgcacatgccccagaacggcatcaaccaccccggcatcaccgccctggcccaggccttcgccgtgaaccccctgctgagagtgatcaacctgaacgacaacaccttcaccgagaagggcgccgtggccatggccgagaccctgaagaccctgagacaggtggaggtgatcaacttcggcgactgcctggtgagaagcaagggcgccgtggccatcgccgacgccatcagaggcggcctgcccaagctgaaggagctgaacctgagcttctgcgagatcaagagagacgccgccctggccgtggccgaggccatggccgacaaggccgagctggagaagctggacctgaacggcaacaccctgggcgaggagggctgcgagcagctgcaggaggtgctggagggcttcaacatggccaaggtgctggccagcctgtag

SEQ ID NO: 323831 - DNA, 1599 bp, Artificial Sequence
  derived and/or modified sequence
atgtttgtgctcggaattccactgtgcccagccctcagttttagtggaggagatgattctcaaacacagctcttcgtttcaagcaaggacgtgatcaaagaaatcgaagactttgactcattagaagccctgcggctcgagggcaatactgtgggcgttgaggcagcacgagtgatcgcgaaggccctcgagaagaaatcggaactgaagagatgccattggtccgacatgttcacggggcgtctacgcacagagatcccccctgccctgatctctctgggtgaagggctcattactgcgggtgctcagctagtggaactcgacttgtccgacaacgcctttggacctgatggcgtgcagggttttgaagcactgcttaagagcagcgcctgttttactctgcaggaattgaagctgaataactgcggcatggggattggcggggggaaggttattggcacgctggaggaggttcatatgccacagaacggtatcaaccaccccggcatcacagctttggctcaagccttcgccgtcaaccctctgctcagagtgataaacttgaacgacaatacctttactgagaaaggcgccgttgctatggccgaaaccctgaagacactacgccaggttgaggtcattaactttggagattgcttagtccgcagtaaaggagctgtcgcaatagccgatgctatcagaggaggccttcccaagctgaaggaactcaacctgtcattctgcgaaatcaaacgggatgccgcccttgctgtagccgaagccatggccgacaaagccgaactggaaaaactggatctaaacggaaacacccttggcgaagaaggttgtgagcagctccaggaggtgttggaagggtttaacatggccaaggtcctcgcttcgctgagcgatgacgaagatgaggaagaagaagaagagggcgaagaagaggaagaggaggcagaggaggaggaagaggaggacgaggaggaggaagaagaagaagaggaggaggaagaggaggagccccagcagcggggacagggcgaaaaaagtgcaacacctagtcggaagatcctggacccaaacaccggtgagccggctcccgtgctatcctcgcctccaccagcagacgtttcgaccttcctcgccttcccatctcccgaaaagctgctccgcttgggaccaaaatcttctgttctaatagcccaacagacagacacatctgatccggaaaaggtagtaagcgcctttttaaaggtgtcctccgtattcaaagatgaggccacagtaaggatggctgtgcaagatgcagtggatgcattaatgcaaaaagcatttaatagtagctcgttcaactccaatacctttcttacgcgcctcttagtgcacatggggttactcaagagtgaggataaggtgaaggcaatcgccaacctttatggccctctgatggccctgaatcatatggtgcagcaggactacttcccgaaggcgctggctccactgttgttagcctttgtcaccaaaccgaacagtgctctagagagttgttcttttgctaggcattcactcttgcaaaccttgtacaaggtgtag

SEQ ID NO: 323832 - DNA, 762 bp, Artificial Sequence
  derived and/or modified sequence
tgagtgggggtggaggccgcacgcgtcatcgccaaagctttggagaaaaagtcagagctgaagaggtgccattggtcggacatgttcacggggcgcctcagaacagagatcccaccggccctgatcagcctcggggagggtctgatcactgcaggcgcccagctggttgaactagatttgtcagacaatgcttttggcccggatggggttcagggtttcgaggccttgctgaaaagctctgcctgctttacactgcaggagctgaagctcaacaactgcgggatggggatcggtgggggcaaagtgatcggtactctggaggaggtccacatgcctcaaaacggcatcaaccaccccggtattacggcactcgcccaggcctttgcggtcaacccactcctccgcgtaattaatctgaatgataatacttttactgagaagggggccgttgccatggccgaaactctgaagacgctgcgacaagttgaagtaataaatttcggagattgtctggtgcggagcaagggagcggtggcgatcgcagatgccattcgggggggcttgccaaagctgaaggaactcaatctctccttctgtgagatcaaaagggacgccgccttagctgtggcagaggctatggcagataaggccgagttagaaaaactcgatcttaatggcaacacgctaggggaggagggatgcgaacaacttcaggaagttttagaaggttttaatatggccaaggtacttgcctcgctctag

SEQ ID NO: 323833 - DNA, 1599 bp, Artificial Sequence
  derived and/or modified sequence
atgtttgtgctgggcatccccctgtgcccagccctgtccttctctggaggagatgacagccagacccagctgtttgtgagcagcaaggatgtgatcaaggagattgaggactttgacagcctggaggccctgcggctggagggcaacacagtgggcgtggaggccgcccgggtgattgccaaggccctggagaagaagtctgagctgaagcgctgccactggagcgacatgttcaccggccgcctgaggacagagatccccccagccctgatcagcctgggggagggcctcatcacagctggggcccagctggtggagctggacctgagtgacaatgccttcggcccagatggagtgcagggctttgaggccctgctgaagagcagcgcctgcttcaccctgcaggagctgaagctgaacaactgtggcatgggcatcggcggcggcaaggtgattggcaccctggaggaggtgcacatgccccagaatggcatcaaccaccctggcatcacagccctggcccaggcctttgctgtgaaccccctgctgcgggtcatcaacctgaatgacaacaccttcacagagaagggagctgtggccatggccgagaccctgaagaccctgcggcaggtggaggtgatcaactttggagactgcctggtgcgcagcaaaggagctgtggccatcgcagatgccatccggggcggcctgcccaagctgaaggagctgaacctgtccttctgtgagatcaagagagatgctgccctggccgtggccgaggccatggctgacaaggccgagctggagaagctggacctgaatggaaacaccctgggggaggagggctgtgagcagctgcaggaggtgctggagggcttcaacatggccaaggtgctggccagcctgagtgatgatgaagatgaggaggaggaggaggagggggaggaggaggaggaggaggccgaggaggaggaggaggaggatgaggaggaggaggaggaggaggaggaggaggaggaggaggagccccagcagaggggccagggcgagaagagcgccacccccagcaggaagatcctggaccccaacacaggagagcccgcccctgtgctgagcagccccccaccagcagatgtgtccaccttcctggccttccccagccctgagaagctgctgcggctgggccccaagagctctgtgctgattgcccagcagacagacaccagtgaccctgagaaggtggtgtctgccttcctgaaggtgtcctctgtgttcaaggatgaggccaccgtgaggatggctgtgcaggatgctgtggatgccctgatgcagaaggccttcaacagcagcagcttcaacagcaacaccttcctgacccggctgctggtgcacatgggcctgctgaagtctgaggacaaggtgaaggccatcgccaacctgtatggccccctgatggccctgaaccacatggtgcagcaggactacttccccaaggccctggcccccctgctgctggcctttgtgaccaagcccaacagcgccctggagagctgcagctttgcccggcacagcctgctgcagaccctgtacaaggtgtag

SEQ ID NO: 323834 - DNA, 762 bp, Artificial Sequence
  derived and/or modified sequence
tgagtgggcgtggaggccgcccgggtcatcgccaaggccctggagaagaagtctgagctgaagcgctgccactggagcgacatgttcaccggccgcctgaggacagagatccccccagccctgatcagcctgggggagggcctcatcacagctggggcccagctggtggagctggacctgagtgacaatgcctttggaccagatggagtgcagggctttgaggccctgctgaagagcagcgcctgcttcaccctgcaggagctgaagctgaacaactgtggcatgggcattggaggcggcaaggtgattggcaccctggaggaggtgcacatgccccagaatggcatcaaccaccctggcatcacagccctggcccaggcctttgctgtgaaccccctgctgcgggtcatcaacctgaatgacaacaccttcacagagaagggagctgtggccatggccgagaccctgaagaccctgcggcaggtggaggtgatcaactttggagactgcctggtgcgcagcaaaggagctgtggccatcgcagatgccatccggggcggcctgcccaagctgaaggagctgaacctgtccttctgtgagatcaagagagatgctgccctggccgtggccgaggccatggctgacaaggccgagctggagaagctggacctgaatggaaacaccctgggggaggagggctgtgagcagctgcaggaggtgctggagggcttcaacatggccaaggtgctggccagcctgtag

SEQ ID NO: 323835 - DNA, 1599 bp, Artificial Sequence
  derived and/or modified sequence
atgttcgtgctgggcatccccctgtgccccgccctgagcttcagcggcggagatgatagtcagacccagttgtttgtgtcaagtaaggacgtgatcaaggagattgaggattttgattccctggaggcgctgagactagagggcaataccgtcggagtggaagcggccagggtgatcgctaaagccctggagaagaagtcagaattgaaacgctgccactggtcggacatgtttactggacggctgaggactgagatccccccggctctgatttccctcggcgaagggttaatcactgctggggctcagttagttgaactcgacctctccgacaacgcctttggcccggatggtgtccaaggcttcgaagctctcctgaaaagcagtgcttgctttacactccaagagcttaaattgaacaattgtggtatgggaatcggtgggggaaaggtcatcggcactctagaagaggtccatatgccgcagaacgggatcaatcaccctggtatcaccgctctggcacaggccttcgcagtgaaccctttacttcgcgtgattaatctcaacgataatacattcacagaaaagggcgccgttgctatggccgaaaccttgaagacactgaggcaggtcgaggttattaattttggggattgtctggttcgatctaagggagcagtggccattgctgatgctattagaggcggcctccccaaactcaaagaattaaatctatctttctgtgagataaagagggacgcagccttggctgtggccgaggctatggcagataaggcagaactggagaagttagacctgaatggcaacacgctgggggaagaggggtgcgagcagctccaggaggtcctggagggctttaatatggccaaagtgctggcctcccttagcgatgatgaagacgaagaagaggaagaagagggcgaagaagaggaggaggaggcagaagaggaagaggaggaagatgaggaggaggaggaagaggaagaggaggaggaagaggaggaaccccagcagaggggacagggcgaaaagtccgccactccaagcaggaaaatccttgacccaaacactggggaaccagcacctgtgctgtcctccccaccacccgcagatgtgtcaactttcctggccttcccaagcccagagaaactgctgagactcggccccaagagttccgttttaattgctcagcagactgatactagcgatccagagaaagtcgtgtctgcgtttttgaaggtttccagtgtgttcaaagatgaggctacagttagaatggcggtccaggatgctgtggatgccttaatgcagaaagcattcaatagtagctcattcaactccaacacattcctgactcggctccttgtacacatgggcctgctcaagagcgaggataaagtgaaggccattgcaaacctctacgggccattgatggcgctaaaccacatggtgcagcaagactactttcccaaggccctggccccgcttttattggctttcgtcactaaaccaaattccgccctggaaagttgttcttttgccaggcattctttactccagaccctgtacaaagtttag

SEQ ID NO: 323836 - DNA, 762 bp, Artificial Sequence
  derived and/or modified sequence
tgagtgggcgtggaggccgcccgggtgatcgccaaggccctggagaaaaagtccgagctgaaacggtgccactggtcagacatgtttacaggaaggctgaggacagaaatacctcccgccctcatcagcctgggcgaggggctgataactgcaggagcccagctcgtagaacttgacctttccgataacgcattcggtccagatggcgtgcagggctttgaagctttgctaaaaagctctgcttgcttcacactgcaggaacttaagctgaataactgtggcatggggataggtgggggaaaggtgattggcaccctggaggaagtccacatgccacagaacggcattaaccaccctgggattaccgccctcgcacaggctttcgccgttaatccattgctccgagttatcaacctgaatgataacacgttcactgaaaagggcgcagtggccatggcggaaaccctcaaaactttgagacaggttgaggtcatcaacttcggagattgccttgtgaggagtaaaggggctgtggcaatcgccgacgcaatcagaggcggactcccaaagctgaaagaattgaacctttcattctgcgagatcaagcgggatgcggccctcgcagtggcagaggctatggcagataaagcggagctggaaaagctagaccttaatgggaacaccctgggggaagaaggatgtgagcagctccaggaagtactggagggctttaacatggctaaagtgctcgcatcactctag

SEQ ID NO: 323837 - DNA, 1792 bp, Artificial Sequence
  derived and/or modified sequence
atttgcccaggagcaagctcccctgcactttccatgtttgtattgggcatccctttgtgccctgccctttctttctcaggaggggatgatagccagactcaactttttgtttcatctaaagatgtgattaaagagattgaagactttgacagcttggaggctctgcgtctggaaggcaacacagtgggcgtggaagcagccagggtcatcgccaaggccttagagaagaagtcggagttgaagcgctgccactggagtgacatgttcacgggaaggctgcggaccgagatcccaccagccctgatctcactaggggaaggactcatcacagctggggctcagctggtggagctggacttaagcgacaacgcattcgggcccgacggtgtgcaaggcttcgaggccctgctcaagagctcagcctgcttcaccctgcaggaactcaagctcaacaactgtggcatgggcattggcggcggcaaggtcatcgggaccctggaggaggtccacatgccacagaatgggatcaaccaccctggcatcactgccctggcccaggctttcgctgtcaaccccctgctgcgggtcatcaacctgaatgacaacaccttcactgagaagggcgccgtggccatggccgagaccttgaagaccttgcggcaggtggaggtgattaattttggggactgcctggtgcgctccaagggtgcagttgccattgcagatgccatccgcggcggcctgcccaagctaaaggagctgaacttgtcattctgtgaaatcaagagggatgctgccctggctgttgctgaggccatggcagacaaagctgagctggagaagctggacctgaatggcaacaccctgggagaagaaggctgtgaacagcttcaggaggtgctggagggcttcaacatggccaaggtgctggcgtccctcagtgatgacgaggacgaggaggaggaggaggaaggagaagaggaagaagaggaagcagaagaagaggaggaggaagatgaggaagaggaggaagaagaggaggaggaggaggaagaagagcctcagcagcgagggcagggagagaagtcagccacgccctcacggaagattctggaccctaacactggggagccagctcccgtgctgtcctccccacctcctgcagacgtctccaccttcctggcttttccctctccagagaagctgctgcgcctagggcccaagagctccgtgctgatagcccagcagactgacacgtctgaccccgagaaggtggtctctgccttcctaaaggtgtcatctgtgttcaaggacgaagctactgtgaggatggcagtgcaggatgcagtagatgccctgatgcagaaggctttcaactcctcgtccttcaactccaacaccttcctcaccaggctgctcgtgcacatgggtctgctcaagagtgaagacaaggtcaaggccattgccaacctgtacggccccctgatggcgctgaaccacatggtgcagcaggactatttccccaaggcccttgcacccctgctgctggcgttcgtgaccaagcccaacagcgccctggaatcctgctccttcgcccgccacagtctgctgcagacgctgtacaaggtctagactcaaagcctctcccatcccttggcctggaccagtgagctggggagggactcggatgaactgaggcgcagcctacgccattgccttggacaggactctggccacaggcagggcgggtctgtgtcccatgtgtcctgtcagtcccctgagtatgtgtgtg

SEQ ID NO: 323838 - DNA, 1599 bp, Artificial Sequence
  derived and/or modified sequence
atgttcgtgctgggcattccattatgccctgcactcagcttcagtgggggtgacgattcccagacacagctttttgtgagcagtaaagatgtgatcaaagaaattgaggattttgattctttggaggcattgcgcttggagggtaataccgtgggagtggaggcagccagggtgatcgcaaaagccctggagaagaagtccgagcttaaaagatgccattggtctgatatgtttactggtagactgaggacagagatcccacccgcactgatctccctgggggaaggtctgattacagctggcgcacagctggtggaacttgacctctcagataacgcatttggtccagacggggtccaaggatttgaggcccttttaaaatctagcgcctgcttcacgctgcaggaattgaagctgaacaactgtgggatgggaattgggggaggcaaggtaattggaactctggaagaagtgcatatgccccagaatggcattaatcatccaggcattaccgccctagctcaggccttcgcggtcaatcccctgttacgagtcataaacctgaatgataacacatttacggagaaaggcgcagtcgccatggctgaaactttaaagacactgcgacaggtagaggtaattaatttcggtgattgccttgtccgctcaaaaggagcggtggccatagcagacgcgatccggggtggtttgcccaagctgaaggaactaaatttgtccttctgtgaaataaaacgggatgctgccctggcagtagctgaggccatggccgacaaggccgagctcgagaagctggatctaaacggaaacaccttaggagaggagggctgcgagcagctccaggaagtccttgaagggttcaatatggctaaggtgctggcctccttgtccgatgatgaggatgaagaggaggaagaggagggagaagaagaggaggaagaggctgaggaggaggaggaggaggacgaggaagaagaagaggaagaagaagaggaagaggaggaggagccccagcaacgcggacagggggagaagtctgccactcctagtaggaaaatactggaccccaatactggggagccagcaccagtcctctcttccccacccccagccgacgtcagcacattcctggcctttcccagcccggaaaaactgctgaggctcggtcctaagagctctgtcttaatagcccagcaaactgacaccagtgaccctgagaaagtggtttcagctttcctgaaagtttcttctgtctttaaagatgaggccacagtccgaatggccgttcaggatgccgttgacgctctcatgcaaaaagcttttaatagctcttccttcaactccaatactttcctcacaaggctgctagtgcacatgggtcttctaaagtcagaagataaggtgaaagcaatcgcgaacctttacggtcctttgatggcgttgaatcacatggtgcagcaagactattttcccaaggcactggcacccttgctgttggcatttgtgacaaaacccaactccgccctcgaaagctgctcatttgcgcgacacagccttcttcagaccctgtacaaggtgtag

SEQ ID NO: 323839 - DNA, 762 bp, Artificial Sequence
  derived and/or modified sequence
taggtcggggtcgaggcagctagggtaatcgcgaaggctctggagaaaaagtctgagctgaagcggtgccattggtctgatatgtttacagggaggctgcgtacggaaatcccccctgccctgatctcactaggagaagggcttattaccgctggggctcagctggtggaactggatctgtcagacaacgcctttggacctgacggagtccaaggattcgaagccctgttaaagagctcagcttgttttactcttcaggaactgaagcttaataactgcggaatggggatcggaggcggtaaggtgatcgggaccctggaagaagtgcatatgccccaaaatggaataaatcaccccggaatcacggccctcgcccaggccttcgccgttaaccccttgcttagagtgataaatctgaacgataacacattcaccgaaaaaggagccgtagcaatggccgagactctgaagactttgcgccaggtggaggtgatcaatttcggtgactgccttgtgaggagtaagggagcggtggctatcgcagacgctatccgcggaggtctgccaaagctcaaggagctgaatctgtccttttgcgagataaagcgcgacgctgctcttgctgtcgccgaggctatggctgacaaggccgagctggaaaagttggacctcaatgggaacacactgggcgaggaaggctgcgaacagctccaggaggtcctcgagggtttcaacatggcaaaagtactcgctagcctttag

SEQ ID NO: 323840 - DNA, 759 bp, Artificial Sequence
  derived and/or modified sequence
agtgggcgtggaagcagccagggtcatcgccaaggccttagagaagaagtcggagttgaagcgctgccactggagtgacatgttcacgggaaggctgcggaccgagatcccaccagccctgatctcactaggggaaggactcatcacagctggggctcagctggtggagctggacttaagcgacaacgcattcgggcccgacggtgtgcaaggcttcgaggccctgctcaagagctcagcctgcttcaccctgcaggaactcaagctcaacaactgtggcatgggcattggcggcggcaaggtcatcgggaccctggaggaggtccacatgccacagaatgggatcaaccaccctggcatcactgccctggcccaggctttcgctgtcaaccccctgctgcgggtcatcaacctgaatgacaacaccttcactgagaagggcgccgtggccatggccgagaccttgaagaccttgcggcaggtggaggtgattaattttggggactgcctggtgcgctccaagggtgcagttgccattgcagatgccatccgcggcggcctgcccaagctaaaggagctgaacttgtcattctgtgaaatcaagagggatgctgccctggctgttgctgaggccatggcagacaaagctgagctggagaagctggacctgaatggcaacaccctgggagaagaaggctgtgaacagcttcaggaggtgctggagggcttcaacatggccaaggtgctggcgtccctcag

SEQ ID NO: 323841 - DNA, 303 bp, Artificial Sequence
  derived and/or modified sequence
atggccagcgaggacatcgccaagctggccgagaccctggccaagacccaggtggccggcggccagctgagcttcaagggcaagagcctgaagctgaacaccgccgaggacgccaaggacgtgatcaaggagatcgaggacttcgacagcctggaggccctgagactggagggcaacaccgtgggcgtggaggccgccagagtgatcgccaaggccctggagaagaagagcgagctgaagagatgccactggagcgacatgttcaccggcagactgagaaccgagatcccccccgccctgtag

SEQ ID NO: 323842 - DNA, 114 bp, Artificial Sequence
  derived and/or modified sequence
atggccagcgaggacatcgccaagctggccgagaccctggccaagacccaggtggccggcggccagctgagcttcaagggcaagagcctgaagctgaacaccgccgaggactag

SEQ ID NO: 323843 - DNA, 402 bp, Artificial Sequence
  derived and/or modified sequence
atggccagcgaggacatcgccaagctggccgagaccctggccaagacccaggtggccggcggccagctgagcttcaagggcaagagcctgaagctgaacaccgccgaggacgccaaggacgtgatcaaggagatcgaggacttcgacagcctggaggccctgagactggagggcaacaccgtgggcgtggaggccgccagagtgatcgccaaggccctggagaagaagagcgagctgaagagatgccactggagcgacatgttcaccggcagactgagaaccgagatcccccccgccctgatcagcctgggcgagggcctgatcaccgccggcgcccagctggtggagctggacctgagcgacaacgccttcggccccgacggcgtgcagggcttcgagtag

SEQ ID NO: 323844 - DNA, 303 bp, Artificial Sequence
  derived and/or modified sequence
atggcttccgaagacatcgcaaagctcgcagaaaccctggccaagactcaagtggctgggggacagctgtcattcaagggaaagtcactcaagctgaacactgcggaggatgctaaagacgtgatcaaggaaattgaagacttcgattcactggaagccttaagactggagggtaacaccgtaggggtggaggccgcaagagtgattgccaaggccttagaaaagaaaagcgaactgaaacgttgccactggagtgatatgttcacagggcgcctgcgtaccgagatcccaccagcgctttag

SEQ ID NO: 323845 - DNA, 114 bp, Artificial Sequence
  derived and/or modified sequence
atggcctcggaagatattgccaaactcgcagagactctcgctaaaacccaggtagccggaggacaactgtcgttcaagggtaagtccctgaaactcaatacagccgaggactag

SEQ ID NO: 323846 - DNA, 402 bp, Artificial Sequence
  derived and/or modified sequence
atggcttcagaggacattgcgaagctggccgaaacactcgctaaaacacaagtggccggggggcaacttagtttcaagggcaagtccctaaagctgaatactgctgaggacgccaaggacgtaatcaaagagattgaagacttcgattccctggaggccttgcgacttgaaggaaacactgtcggtgtcgaggctgctagagtgattgccaaggcattggagaagaagagtgaactgaaacgctgtcactggagcgacatgtttaccggtagattaagaacagagatcccacctgccctgatttccctgggagaggggctcataactgccggggcccaactggtggaactggatctcagcgacaacgcttttggtccggacggcgttcaggggttcgagtag

SEQ ID NO: 323847 - DNA, 303 bp, Artificial Sequence
  derived and/or modified sequence
atggccagcgaggacatcgccaagctggccgagaccctggccaagacccaggtggccggcggccagctgtccttcaagggcaagagcctgaagctgaacacagcagaagatgccaaggatgtgatcaaggagattgaggactttgacagcctggaggccctgcggctggagggcaacacagtgggcgtggaggccgcccgggtgattgccaaggccctggagaagaagtctgagctgaagcgctgccactggagcgacatgttcaccggccgcctgaggacagagatccccccagccctgtag

SEQ ID NO: 323848 - DNA, 114 bp, Artificial Sequence
  derived and/or modified sequence
atggccagcgaggacatcgccaagctggccgagaccctggccaagacccaggtggccggcggccagctgtccttcaagggcaagagcctgaagctgaacacagctgaggactag

SEQ ID NO: 323849 - DNA, 402 bp, Artificial Sequence
  derived and/or modified sequence
atggccagcgaggacatcgccaagctggccgagaccctggccaagacccaggtggccggcggccagctgtccttcaagggcaagagcctgaagctgaacacagcagaagatgccaaggatgtgatcaaggagattgaggactttgacagcctggaggccctgcggctggagggcaacacagtgggcgtggaggccgcccgggtgattgccaaggccctggagaagaagtctgagctgaagcgctgccactggagcgacatgttcaccggccgcctgaggacagagatccccccagccctgatcagcctgggggagggcctcatcacagctggggcccagctggtggagctggacctgagtgacaatgccttcggcccagatggagtgcagggctttgaatag

SEQ ID NO: 323850 - DNA, 303 bp, Artificial Sequence
  derived and/or modified sequence
atggccagcgaggacatcgccaagctggccgagaccctggccaagactcaggtggcgggcggccagttgagttttaagggcaaatctctgaaactgaacacagcagaggatgccaaggacgtcattaaagaaatcgaagactttgacagcctggaagcactcaggttggagggtaacactgtgggtgtagaggccgccagagtcatagcaaaggctcttgaaaagaagagcgagctgaaaagatgtcattggagcgatatgttcaccggacgtctcagaacagagattccccccgcattgtag

SEQ ID NO: 323851 - DNA, 114 bp, Artificial Sequence
  derived and/or modified sequence
atggccagcgaggacatcgccaagctggccgagaccctggccaagacccaggttgcagggggccagctgagtttcaaaggaaaaagtcttaagctgaatactgctgaggactag

SEQ ID NO: 323852 - DNA, 402 bp, Artificial Sequence
  derived and/or modified sequence
atggccagcgaggacatcgccaagctggccgagaccctggccaagacacaggtggccgggggccaactcagtttcaagggaaagtctctgaagctcaataccgccgaggacgcaaaagacgtaattaaagaaatcgaagactttgacagcttagaggcattgagactggagggaaacactgttggcgtggaggcagcccgggtaatcgctaaagcccttgagaaaaaatcggagctgaagaggtgtcactggagcgacatgttcaccggtcggttgaggactgagatccctccagctctgatcagcctgggcgagggcctcatcaccgcaggggcacaactggtggagctggacctctccgacaatgcttttggtcccgatggcgtccaaggcttcgaatag

SEQ ID NO: 323853 - DNA, 303 bp, Artificial Sequence
  derived and/or modified sequence
atggcctctgaagacattgccaagctagcagagacactcgcaaaaacccaggtggccggaggccaattgtcctttaaaggaaaaagtctaaagttaaacactgctgaagacgccaaggacgtaatcaaagagattgaggatttcgactctcttgaggcgctaagactcgaaggcaataccgttggggtggaggcggctcgggtgatagctaaagcccttgagaagaagagcgagctcaagagatgtcactggtcagacatgttcactgggagattgcgtactgagattcccccagccctgtag

SEQ ID NO: 323854 - DNA, 114 bp, Artificial Sequence
  derived and/or modified sequence
atggctagtgaggacattgccaaactggccgagacgttggccaaaacccaggtcgccggaggacaactctcctttaagggaaaaagcctgaaactcaatactgcagaggactag

SEQ ID NO: 323855 - DNA, 402 bp, Artificial Sequence
  derived and/or modified sequence
atggcctccgaagatattgccaagctggcggagaccctggcaaagacccaggtggcaggcggtcagctcagcttcaagggcaagtctcttaagctgaacacagccgaggacgctaaagatgtgattaaagaaattgaggattttgactcactcgaggctctccggttggaaggtaataccgtcggcgttgaggctgccagagtaattgctaaagcgttagaaaaaaaaagcgaactgaaaaggtgtcattggtcagatatgttcactggccgtctgcggaccgagatccccccagctctgatatctttgggagaggggctcattactgcaggagcacaactggtggagctcgacctttctgataatgctttcggtcctgacggagtgcagggctttgagtag

SEQ ID NO: 323856 - DNA, 1967 bp, Artificial Sequence
  derived and/or modified sequence
gtctcctgcgtggtcccgggagaggaaggggcctggcccggggcggggtgtggagagaggaggaagctcctgccggctgagcgggcctggaggaagtgagcagcggggctcctgcctcccggcctggtccccgaagaccccagaagaacccggaacttgcttccattcggaatccagggaccaccctttgcactcagtaggcctttgttttcctgcgtggaaagcggttgggcttgggaggcgatggagccggagttcttgtacgacctgctgcagctccccaagggggtggagcccccagcggaggaggagctctcaaaaggaggaaagaagaaatacctgccacccacttcccggaaggaccccaaatttgaagaactgcagaaggtgttgatggagtggatcaatgccactcttctccccgagcacattgtggtccgcagcctggaggaggacatgttcgacgggctcatcctacaccacctattccagaggctggcggcgctcaagctggaagcagaggacatcgccctgacagccacaagccagaagcacaagctcacagtggtgctggaggccgtgaaccggagtctgcagctggaggagtggcaggccaagtggagcgtggagagcatcttcaacaaggacctgttgtctaccctgcacctccttgtggccctggccaagcgcttccagcccgacctctccctcccaaccaacgtccaggtggaggtcatcactatcgagagcaccaaaagtggtctgaagtcagagaagttggtggaacagctcactgaatacagcacagacaaggacgagcctccaaaggacgtctttgatgaattatttaagctggctccggagaaagtgaacgcagtgaaagaggccatcgtgaactttgtcaaccagaagctggaccgcctgggcctgtctgtgcagaatctggacacccagtttgcagatggggtcatcttactcttgctgattggacaacttgaaggcttcttcctgcacttaaaggaattctacctcactcccaactctcctgcagaaatgctgcacaacgtcaccctggcgctggagctgctgaaggacgagggcctgctcagctgccctgtcagccctgaagatatcgtgaacaaggatgccaagagcacactgagggtgctctatggtctgttctgcaagcacacgcagaaggcacacagggacaggacgccccatggagccccgaattgaccctcactgcctccaaagcccagagcctgcctgtcagcccagctggagggcccgaggctgcagggtgtcctcccacagtcccgctgtttcctgtgcattcgtgacccgcttccctcccaccctgtctcctgtctccatcgttggattatctttgaacccccttgtgtggatcattttgagccgcctggccttgctcagtttattttaataaaagtatttctgggagggattctgggaacttgacagggtcctgaggagggcccttaaacctgcagcctccctcccatggggtgagtgtgtgtcacatcagtctctcatctctgggcccaggctagtgaccgcccagagaggtggcatcactcagggctggggactctcagggacagggcccacagccccagaccccaccttttccagcccagctccccacacccacctgcttctcactcgggaggatgggccccagagtcaccctccagggcaggagcccgaatggctccatagccatgcccccacccaccgggagaagtggattcagtgactgtcaaagcaacccgggctgtgtcctgcagctgccctcgtgagttttgcccaaaagtcacaaagaagcaatcttcgtggttgattagtgggttcaggtcatctccagtctgtcctcgggagctgtgggttcccactcgctccagtgagacttggcattttctgcacataaagaagagtcgtgtggg

SEQ ID NO: 323857 - DNA, 2148 bp, Artificial Sequence
  derived and/or modified sequence
ctttgtttggctgctgttttaatctttcatgcatttagcagtcatggatggtgccagcgaaggaacaggtgccagggcgttgtgactccacccagcgctgcttcccgggaccttccaattggacaggagctgggggaagagctggttcacagccctttgtgggggatgggactttgggaaccccaaacttctgctgggaccacaaggagaagagggcagcagagtcacagctgcagagaggaggaagctcctgccggctgagcgggcctggaggaagtgagcagcggggctcctgcctcccggcctggtccccgaagaccccagaagaacccggaacttgcttccattcggaatccagggaccaccctttgcactcagtaggcctttgttttcctgcgtggaaagcggttgggcttgggaggcgatggagccggagttcttgtacgacctgctgcagctccccaagggggtggagcccccagcggaggaggagctctcaaaaggaggaaagaagaaatacctgccacccacttcccggaaggaccccaaatttgaagaactgcagaaggtgttgatggagtggatcaatgccactcttctccccgagcacattgtggtccgcagcctggaggaggacatgttcgacgggctcatcctacaccacctattccagaggctggcggcgctcaagctggaagcagaggacatcgccctgacagccacaagccagaagcacaagctcacagtggtgctggaggccgtgaaccggagtctgcagctggaggagtggcaggccaagtggagcgtggagagcatcttcaacaaggacctgttgtctaccctgcacctccttgtggccctggccaagcgcttccagcccgacctctccctcccaaccaacgtccaggtggaggtcatcactatcgagagcaccaaaagtggtctgaagtcagagaagttggtggaacagctcactgaatacagcacagacaaggacgagcctccaaaggacgtctttgatgaattatttaagctggctccggagaaagtgaacgcagtgaaagaggccatcgtgaactttgtcaaccagaagctggaccgcctgggcctgtctgtgcagaatctggacacccagtttgcagatggggtcatcttactcttgctgattggacaacttgaaggcttcttcctgcacttaaaggaattctacctcactcccaactctcctgcagaaatgctgcacaacgtcaccctggcgctggagctgctgaaggacgagggcctgctcagctgccctgtcagccctgaagatatcgtgaacaaggatgccaagagcacactgagggtgctctatggtctgttctgcaagcacacgcagaaggcacacagggacaggacgccccatggagccccgaattgaccctcactgcctccaaagcccagagcctgcctgtcagcccagctggagggcccgaggctgcagggtgtcctcccacagtcccgctgtttcctgtgcattcgtgacccgcttccctcccaccctgtctcctgtctccatcgttggattatctttgaacccccttgtgtggatcattttgagccgcctggccttgctcagtttattttaataaaagtatttctgggagggattctgggaacttgacagggtcctgaggagggcccttaaacctgcagcctccctcccatggggtgagtgtgtgtcacatcagtctctcatctctgggcccaggctagtgaccgcccagagaggtggcatcactcagggctggggactctcagggacagggcccacagccccagaccccaccttttccagcccagctccccacacccacctgcttctcactcgggaggatgggccccagagtcaccctccagggcaggagcccgaatggctccatagccatgcccccacccaccgggagaagtggattcagtgactgtcaaagcaacccgggctgtgtcctgcagctgccctcgtgagttttgcccaaaagtcacaaagaagcaatcttcgtggttgattagtgggttcaggtcatctccagtctgtcctcgggagctgtgggttcccactcgctccagtgagacttggcattttctgcacataaagaagagtcgtgtggg

SEQ ID NO: 323858 - DNA, 1709 bp, Artificial Sequence
  derived and/or modified sequence
aaactcaccatttcagcccggatggtgaagattccagcttgagagaccagctcgggtctgaagtgtttctctatctactgtgctgagatctctccttctcgaaccctgctatgcctttgcatacgctgttttctccacctgccacgttctcaccccttcttcttccactgcaaactcctatgcagccgtcaaggccccattctcctctggaaagccttcccgatccccttggcaacaaccaccaccaatatttattcactgagcccactttgtgccaagcattgttctagacacggagaggaggaagctcctgccggctgagcgggcctggaggaagtgagcagcggggctcctgcctcccggcctggtccccgaagaccccagaagaacccggaacttgcttccattcggaatccagggaccaccctttgcactcagtaggcctttgttttcctgcgtggaaagcggttgggcttgggaggcgatggagccggagttcttgtacgacctgctgcagctccccaagggggtggagcccccagcggaggaggagctctcaaaaggaggaaagaagaaatacctgccacccacttcccggaaggaccccaaatttgaagaactgcagaaggtgttgatggagtggatcaatgccactcttctccccgagcacattgtggtccgcagcctggaggaggacatgttcgacgggctcatcctacaccacctattccagaggctggcggcgctcaagctggaagcagaggacatcgccctgacagccacaagccagaagcacaagctcacagtggtgctggaggccgtgaaccggagtctgcagctggaggagtggcaggccaagtggagcgtggagagcatcttcaacaaggacctgttgtctaccctgcacctccttgtggccctggccaagcgcttccagcccgacctctccctcccaaccaacgtccaggtggaggtcatcactatcgagagcaccaaaagtggtctgaagtcagagaagttggtggaacagctcactgaatacagcacagacaaggacgagcctccaaaggacgtctttgatgaattatttaagctggctccggagaaagtgaacgcagtgaaagaggccatcgtgaactttgtcaaccagaagctggaccgcctgggcctgtctgtgcagaatctggacacccagtttgcagatggggtcatcttactcttgctgattggacaacttgaaggcttcttcctgcacttaaaggaattctacctcactcccaactctcctgcagaaatgctgcacaacgtcaccctggcgctggagctgctgaaggacgagggcctgctcagctgccctgtcagccctgaagatatcgtgaacaaggatgccaagagcacactgagggtgctctatggtctgttctgcaagcacacgcagaaggcacacagggacaggacgccccatggagccccgaattgaccctcactgcctccaaagcccagagcctgcctgtcagcccagctggagggcccgaggctgcagggtgtcctcccacagtcccgctgtttcctgtgcattcgtgacccgcttccctcccaccctgtctcctgtctccatcgttggattatctttgaacccccttgtgtggatcattttgagccgcctggccttgctcagtttattttaataaaagtatttctgggaggga

SEQ ID NO: 323859 - protein, 26 aa, Artificial Sequence
  derived and/or modified sequence
MEPEFLYDLLQLPKGVEPPAEEELSK

SEQ ID NO: 323860 - protein, 137 aa, Artificial Sequence
  derived and/or modified sequence
MVPAKEQVPGRCDSTQRCFPGPSNWTGAGGRAGSQPFVGDGTLGTPNFCWDHKEKRAAESQLQAWEAMEPEFLYDLLQLPKGVEPPAEEELSKGGKKKYLPPTSRKDPKFEELQKHTWPSPVTGTGDTICGLARKTW

SEQ ID NO: 323861 - DNA, 81 bp, Artificial Sequence
  derived and/or modified sequence
atggagcctgaattcctgtatgacttgttgcagctgcccaaaggcgtcgagcccccagctgaagaagaactgagcaaatag

SEQ ID NO: 323862 - DNA, 93 bp, Artificial Sequence
  derived and/or modified sequence
atggagccagaattcctgtacgacctgctccagctcccaaaaggagtggaaccgcccgcggaggaggagctgagtaaaggcgtttgtccctag

SEQ ID NO: 323863 - DNA, 414 bp, Artificial Sequence
  derived and/or modified sequence
atggtgcccgccaaggagcaggttccgggacgctgcgactctacccaacggtgttttccaggcccaagcaactggactggcgcgggcggaagggcggggtctcagccattcgtaggcgacgggaccctgggcactccaaatttctgctgggaccacaaagagaaacgagcagcggagtctcagcttcaggcctgggaagctatggagcctgaattcctgtatgatctcctgcaattgcccaaaggagtggaaccccccgccgaggaggagctgagcaagggggggaagaaaaaatacctgccacctacatccaggaaggaccctaaatttgaagaattgcagaaacacacttggccctcccccgtcaccggaacgggggatacgatctgcggactcgctcgcaagacctggtag

SEQ ID NO: 323864 - DNA, 81 bp, Artificial Sequence
  derived and/or modified sequence
atggagcctgagttcctgtatgacctgctgcagctgcccaagggcgtggagcccccagctgaggaggagctgagcaagtag

SEQ ID NO: 323865 - DNA, 93 bp, Artificial Sequence
  derived and/or modified sequence
atggagcctgagttcctgtatgacctgctgcagctgcccaagggcgtggagcccccagctgaggaggagctgagcaagggcgtgtgcccctag

SEQ ID NO: 323866 - DNA, 414 bp, Artificial Sequence
  derived and/or modified sequence
atggtgcctgccaaggagcaggtgcccggccgctgtgacagcacccagcgctgcttccctggccccagcaactggacaggagctgggggccgggccggcagccagccctttgtgggagatggcaccctgggcacccccaacttctgctgggaccacaaggagaagagagctgctgagagccagctgcaggcctgggaggccatggagcctgagttcctgtatgacctgctgcagctgcccaagggcgtggagcccccagctgaggaggagctgagcaaaggaggcaagaagaagtacctgccccccaccagcaggaaggaccccaagtttgaggagctgcagaagcacacctggcccagccctgtgactggaactggagacaccatctgtggcctggccaggaagacctggtag

SEQ ID NO: 323867 - DNA, 81 bp, Artificial Sequence
  derived and/or modified sequence
atggagcccgagttcctgtacgacctgctgcagctgcccaagggcgtcgagccccccgctgaggaagaattgtctaagtag

SEQ ID NO: 323868 - DNA, 93 bp, Artificial Sequence
  derived and/or modified sequence
atggagcccgagttcctgtacgacctgctgcagctgcccaagggcgtggagccgcctgccgaggaggaactgtccaaaggagtctgcccctag

SEQ ID NO: 323869 - DNA, 414 bp, Artificial Sequence
  derived and/or modified sequence
atggtgcccgccaaggagcaggtgcccggccggtgcgacagcacccagagatgcttccccggcccttccaactggaccggggcaggaggacgcgccgggagtcagccgttcgtgggggatgggacactaggaactccaaacttctgttgggaccacaaagagaaacgagccgctgaaagccaattacaggcttgggaggcgatggaacctgagttcctctacgatctgttgcaactccccaagggggtggaaccccccgccgaagaagaattgtcgaagggtggaaagaaaaaatatctcccccctacatctcgaaaggacccaaagtttgaagagctgcagaagcatacttggccttcccccgtcaccggcaccggggacacaatctgcgggctggcccgcaagacatggtag

SEQ ID NO: 323870 - DNA, 309 bp, Artificial Sequence
  derived and/or modified sequence
ctccacctgccacgttctcaccccttcttcttccactgcaaactcctatgcagccgtcaaggccccattctcctctggaaagccttcccgatccccttggcaacaaccaccaccaatatttattcactgagcccactttgtgccaagcattgttctagacacggggaccaccctttgcactcagtaggcctttgttttcctgcgtggaaagcggttgggcttgggaggcgatggagccggagttcttgtacgacctgctgcagctccccaagggggtggagcccccagcggaggaggagctctcaaaag

SEQ ID NO: 323871 - DNA, 622 bp, Artificial Sequence
  derived and/or modified sequence
gaggaaggggcctggcccggggcggggtgtggaggtgggaggacggcggtgcgggatggagggtggaggccaggctgacagggtgctggtggtgggttgcgggggtcgaccccaggctctggcctatgtagctgccattttggaggtgaacagcctgcggggaaactggcatggtttggggaaggcggggagagggggagaaatgaaagcattgagtttaagtggcctgcagaaccccgggggcccaggcggcacggcgggcgctggggctccgggcagagctttctggaggtttgtggcagcttcactttcacggcatccacccccctcgggccctgccgcagagaggaggaagctcctgccggctgagcgggcctggaggaagtgagcagcggggctcctgcctcccggcctggtccccgaagaccccagaagaacccggaacttgcttccattcggaatccagggaccaccctttgcactcagtaggcctttgttttcctgcgtggaaagcggttgggcttgggaggcgatggagccggagttcttgtacgacctgctgcagctccccaagggggtggagcccccagcggaggaggagctctcaaaaggtgtgtgccca

SEQ ID NO: 323872 - DNA, 907 bp, Artificial Sequence
  derived and/or modified sequence
atggatggtgccagcgaaggaacaggtgccagggcgttgtgactccacccagcgctgcttcccgggaccttccaattggacaggagctgggggaagagctggttcacagccctttgtgggggatgggactttgggaaccccaaacttctgctgggaccacaaggagaagagggcagcagagtcacagctgcaggcttgggaggcgatggagccggagttcttgtacgacctgctgcagctccccaagggggtggagcccccagcggaggaggagctctcaaaaggaggaaagaagaaatacctgccacccacttcccggaaggaccccaaatttgaagaactgcagaagcacacctggcccagccctgtgactggcactggggacaccatctgtggtcttgcccggaagacctggtgaggtgctgacatgtcgtctcagctcggtctcctccacaggctgatccagagacaaggatttggatgccagtagttgagttgggaggttatcccaggggtcatgggagggaaggggccaacacatggttagtgatggagctggtcatggttctgggggctcaagcctgctgggtaccctggagccagcatagagcaagttcagtgcattcctgcccaaggggcgatggagctggggtatttatacaccaccacccctgccccgacaacctcctgacaacctttagtgaacagctgctccctgagaaagggctgggccttgattccctggcactctgaccttttgagcacagcagagtggggacagtttcgagcagagctgcaggtgggagctgggccagtaggcaacagtcaaggagtgggcagggtaccagcagcccccgcattagcttcctagggctactgtaacatgtgaccacagactgaatggctt

SEQ ID NO: 323873 - DNA, 81 bp, Artificial Sequence
  derived and/or modified sequence
atggagccagagttcctctatgatctgttacagctacccaagggcgttgagccacccgctgaggaagagctgagcaagtag

SEQ ID NO: 323874 - DNA, 93 bp, Artificial Sequence
  derived and/or modified sequence
atggaacccgagttcctctatgacttgcttcagctgcccaaaggggttgagcctcccgcagaagaagagttatcgaagggagtctgtccatag

SEQ ID NO: 323875 - DNA, 414 bp, Artificial Sequence
  derived and/or modified sequence
atggtgcccgcaaaggagcaagttcctggaagatgtgactcgacacagcggtgttttcccggtccgtccaattggacaggggcaggaggcagggcaggaagtcagccgtttgtgggagacgggactctgggaactcccaacttttgttgggatcacaaggagaaaagagcagcagagtcgcaactgcaggcctgggaagctatggaaccggagttcctctatgatctgctacagttgcctaaaggagtagagccccctgccgaggaggagttgtctaagggtggcaaaaaaaagtacctcccgccaaccagtcgtaaagatcctaaatttgaggagcttcagaaacacacgtggccctcaccggtgactggcaccggggacacgatttgcggcttggcaaggaagacttggtag

SEQ ID NO: 323876 - DNA, 81 bp, Artificial Sequence
  derived and/or modified sequence
atggagcccgagttcctgtacgacctgctgcagctgcccaagggcgtggagccccccgccgaggaggagctgagcaagtag

SEQ ID NO: 323877 - DNA, 93 bp, Artificial Sequence
  derived and/or modified sequence
atggagcccgagttcctgtacgacctgctgcagctgcccaagggcgtggagccccccgccgaggaggagctgagcaagggcgtgtgcccctag

SEQ ID NO: 323878 - DNA, 414 bp, Artificial Sequence
  derived and/or modified sequence
atggtgcccgccaaggagcaggtgcccggcagatgcgacagcacccagagatgcttccccggccccagcaactggaccggcgccggcggcagagccggcagccagcccttcgtgggcgacggcaccctgggcacccccaacttctgctgggaccacaaggagaagagagccgccgagagccagctgcaggcctgggaggccatggagcccgagttcctgtacgacctgctgcagctgcccaagggcgtggagccccccgccgaggaggagctgagcaagggcggcaagaagaagtacctgccccccaccagcagaaaggaccccaagttcgaggagctgcagaagcacacctggcccagccccgtgaccggcaccggcgacaccatctgcggcctggccagaaagacctggtag

SEQ ID NO: 323879 - protein, 339 aa, Artificial Sequence
  derived and/or modified sequence
MFSEVLHGLIGRTQRSAGVDQNHPRAVLVPSSLRIGIIPAGSTDCVCYSTVGTSDAETSALHIVVGDSLAMDVSSVHHNSTLLRYSVSLLGYGFYGDIIKDSEKKRWLGLARYDFSGLKTFLSHHCYEGTVSFLPAQHTVGSPRDRKPCRAGCFVCRQSKQQLEEEQKKALYGLEAAEDVEEWQVVCGKFLAINATNMSCACRRSPRGLSPAAHLGDGSSDLILIRKCSRFNFLRFLIRHTNQQDQFDFTFVEVYRVKKFQFTSKHMEDEDSDLKEGGKKRFGHICSSHPSCCCTVSNSSWNCDGEVLHSPAIEVRVHCQLVRLFARGIEENPKPDSHS

SEQ ID NO: 323880 - DNA, 1020 bp, Artificial Sequence
  derived and/or modified sequence
atgttcagcgaggtgctgcacggcctgatcggcagaacccagagaagcgccggcgtggaccagaaccaccccagagccgtgctggtgcccagcagcctgagaatcggcatcatccccgccggcagcaccgactgcgtgtgctacagcaccgtgggcaccagcgacgccgagaccagcgccctgcacatcgtggtgggcgacagcctggccatggacgtgagcagcgtgcaccacaacagcaccctgctgagatacagcgtgagcctgctgggctacggcttctacggcgacatcatcaaggacagcgagaagaagagatggctgggcctggccagatacgacttcagcggcctgaagaccttcctgagccaccactgctacgagggcaccgtgagcttcctgcccgcccagcacaccgtgggcagccccagagacagaaagccctgcagagccggctgcttcgtgtgcagacagagcaagcagcagctggaggaggagcagaagaaggccctgtacggcctggaggccgccgaggacgtggaggagtggcaggtggtgtgcggcaagttcctggccatcaacgccaccaacatgagctgcgcctgcagaagaagccccagaggcctgagccccgccgcccacctgggcgacggcagcagcgacctgatcctgatcagaaagtgcagcagattcaacttcctgagattcctgatcagacacaccaaccagcaggaccagttcgacttcaccttcgtggaggtgtacagagtgaagaagttccagttcaccagcaagcacatggaggacgaggacagcgacctgaaggagggcggcaagaagagattcggccacatctgcagcagccaccccagctgctgctgcaccgtgagcaacagcagctggaactgcgacggcgaggtgctgcacagccccgccatcgaggtgagagtgcactgccagctggtgagactgttcgccagaggcatcgaggagaaccccaagcccgacagccacagctag

SEQ ID NO: 323881 - DNA, 1020 bp, Artificial Sequence
  derived and/or modified sequence
atgttttctgaggtgctgcatgggctgattggacgcacccagcggtcagccggcgtggatcagaatcacccacgggcagttttagtgccaagctctctccgcatcgggatcattcctgccggcagtacagattgtgtctgctactcaacagtgggaacctcagatgccgagaccagcgctctccatatagtggtgggagacagcctagcaatggacgtgtcgtccgtgcaccataactcaaccctgctgcgttattcagtctccctgctgggatatggcttttatggcgacattatcaaggacagcgaaaagaagcggtggctaggcctagcacgctacgatttcagcgggctgaaaacctttctttcgcaccactgttatgaaggaacagtatcattccttccagcccagcacaccgttgggagcccccgtgaccgcaagccatgccgtgccggatgcttcgtttgtcgccagagtaagcaacagttagaggaggagcagaaaaaagctctgtacggcttggaggccgccgaggacgtagaggagtggcaagtcgtttgtgggaaatttctcgccattaatgccactaatatgtcttgcgcctgtcgcaggtcaccccgcgggctgtcccctgctgcccatctaggggatggctccagtgatcttattctcatcagaaaatgctcccgctttaacttcttaagatttctgatcaggcatacgaaccagcaagatcagttcgatttcactttcgtggaagtgtacagggtgaagaagtttcagttcacgagcaaacacatggaagatgaggattccgacctgaaagagggtggaaagaagagattcgggcatatctgttctagtcaccccagttgctgctgtacagtctccaatagtagttggaattgcgacggcgaggtgctacacagtcccgccatagaagtgagagtccactgccagcttgtgcggttgtttgctagaggcatagaggagaaccccaagccagactctcacagttag

SEQ ID NO: 323882 - DNA, 1020 bp, Artificial Sequence
  derived and/or modified sequence
atgttttctgaggtgctgcacggcctcatcggccgcacccagaggtctgctggggtggaccagaaccaccccagggctgtgctggtgcccagcagcctgagaattggcatcatcccagctggcagcacagactgtgtgtgctacagcacagtgggcaccagtgatgctgagaccagcgccctgcacatcgtggtgggggacagcctggccatggatgtgtcctctgtgcaccacaacagcaccctgctgcgctacagcgtgtccctgctgggctacggcttctatggagacatcatcaaggacagcgagaagaagcgctggctgggcctggcccgctatgacttcagcggcctgaagaccttcctgagccaccactgctatgagggcaccgtgtccttcctgcctgcccagcacacagtgggcagcccccgggacaggaagccctgcagagctggctgctttgtgtgccggcagagcaagcagcagctggaggaggagcagaagaaggccctgtatggcctggaggccgcagaagatgtggaggagtggcaggtggtgtgtgggaagttcctggccatcaatgccaccaacatgagctgtgcctgcagaagaagcccccggggcctgagccctgctgcccacctgggagatggcagcagtgacctgatcctgatcaggaagtgcagccgcttcaacttcctgcgcttcctgatccgccacaccaaccagcaggaccagtttgacttcacctttgtggaggtgtacagagtgaagaagttccagttcaccagcaagcacatggaggatgaggacagcgacctgaaggagggcggcaagaagcgcttcggccacatctgcagcagccaccccagctgctgctgcaccgtgagcaacagctcctggaactgtgatggagaggtgctgcacagccctgccatcgaggtgcgggtgcactgccagctggtgcggctgtttgcccggggcatcgaggagaaccccaagccagacagccacagctag

SEQ ID NO: 323883 - DNA, 1020 bp, Artificial Sequence
  derived and/or modified sequence
atgttcagcgaggtgctgcacggcctgatcggccggacccagcggtcagccggcgtcgatcaaaaccatccacgggcagtgctggtgcctagttcactgaggattgggataatccctgcaggatcaaccgattgtgtatgctacagcactgtgggcacctcagacgcagagacatcggcgttacatattgtcgtgggagattccctcgcgatggacgtttcaagtgtacaccataactccacacttttacgctactccgttagtctgttgggatacgggttttacggtgacatcatcaaagactctgaaaaaaagcggtggctcggattggcccggtacgatttctctgggctgaagacttttcttagtcatcattgctatgagggcaccgtctcttttttgcctgcccagcacaccgtgggaagcccacgggacagaaagccttgtcgggccggttgcttcgtgtgcaggcagtcaaagcagcaactggaggaggaacaaaaaaaggccttgtacggcctggaggccgctgaggatgtagaagagtggcaggtcgtgtgcgggaaatttcttgccattaacgctactaatatgtcttgcgcgtgccgacggagccctcgggggctgtctcccgcagcccatctcggagatgggagctcagatctcatactaattaggaaatgttcccgattcaacttcctgcgcttcctgatcagacatactaaccagcaagaccagttcgactttacttttgtagaagtgtaccgggtgaaaaagtttcagtttacatcgaagcacatggaagacgaggatagcgatctcaaggagggtggtaagaagaggtttggacacatttgctcatcacatccctcttgctgctgtaccgtgagcaactcttcttggaactgtgacggtgaagtgttacactccccagccatcgaggtcagggtgcactgccagttggtgagattgttcgcaagggggattgaagagaatcctaagccagattcccactcttag

SEQ ID NO: 323884 - DNA, 1020 bp, Artificial Sequence
  derived and/or modified sequence
atgtttagtgaggtcctgcacggcctcattggaagaacgcagagatccgccggagttgatcagaatcacccaagggcagttctggtcccatcctccttacgaatcggcatcatcccagccggaagcaccgactgcgtgtgttattcaacagtgggaacaagtgatgccgagacgtcggctttgcacatcgtggtgggtgactcactggcgatggatgtcagcagcgtgcaccacaactccaccctgcttaggtacagcgtgagcttgcttggctacgggttctacggcgatatcatcaaagactcagagaagaagagatggctcggactggccaggtatgacttctctggtctcaagacatttttatcgcaccattgctatgaggggactgtcagcttcttgcctgcacaacatacggtgggatctcccagggacaggaaaccttgtagggcaggctgttttgtgtgccggcagagtaaacaacaattagaggaagagcagaagaaagcactttatgggctggaggccgctgaggacgtggaagagtggcaggtcgtttgcggaaagtttttagcaattaatgctacaaatatgtcctgtgcctgtagacggtcccctcggggtctcagtcccgcagcacacttgggagatggatcaagcgatctcatcctgatccgtaagtgcagtaggtttaacttcttgcgctttctcattaggcataccaaccagcaggaccaatttgattttacctttgtggaggtgtaccgggtcaaaaagtttcagttcacctctaaacatatggaagacgaagactcagatctgaaagagggtggtaagaagagatttggccatatctgtagtagtcatccaagctgctgttgtactgtgtcaaattcctcctggaactgtgatggcgaagtgctgcacagccctgcaatagaggtgcgagtccactgtcagctggttcggctgttcgcacgaggtatcgaagagaatcctaaaccagactctcacagctag

SEQ ID NO: 323885 - DNA, 114 bp, Artificial Sequence
  derived and/or modified sequence
atggccgacgaggcgctcgcgggcctggatgaaggagcgctgcgcaagcttttagaggtgactgctgacttagccgagcgcagacgaattcgaagtgccatccgcgagttgtag

SEQ ID NO: 323886 - DNA, 114 bp, Artificial Sequence
  derived and/or modified sequence
atggctgatgaggccctggccggcctggatgagggcgccctgaggaagctgctggaggtgacagctgacctggccgagcggcggcgcatccgcagcgccatccgggagctgtag

SEQ ID NO: 323887 - DNA, 114 bp, Artificial Sequence
  derived and/or modified sequence
atggccgacgaggccctggccggcctggacgagggcgccctgcggaagttgctagaggtcactgccgacctggccgagaggcgtagaatccgcagcgctattcgcgaactctag

SEQ ID NO: 323888 - DNA, 114 bp, Artificial Sequence
  derived and/or modified sequence
atggccgacgaagcactggcagggttagatgagggtgcattgaggaaattgcttgaggtgactgctgatcttgcagagcgtcgacgcattcgcagcgctatccgtgagctttag

SEQ ID NO: 323889 - DNA, 114 bp, Artificial Sequence
  derived and/or modified sequence
atggccgacgaggccctggccggcctggacgagggcgccctgagaaagctgctggaggtgaccgccgacctggccgagagaagaagaatcagaagcgccatcagagagctgtag

SEQ ID NO: 323890 - protein, 938 aa, Artificial Sequence
  derived and/or modified sequence
MTCLSHPLQLEVTADLAERRRIRSAIRELQRQELEREEEALASKRFRAERQDNKENWLHSQQREAEQRAALARLAGQLESMNDVEELTALLRSAGEYEERKLIRAAIRRVRAQEIEAATLAGRLYSGRPNSGSREDSKGLAAHRLEQCEVPEREEQEQQAEVSKPTPTPEGTSQDVTTVTLLLRAPPGSTSSSPASPSSSPTPASPEPPLEPAEAQCLTAEVPGSPEPPPSPPKTTSPEPQESPTLPSTEGQVVNKLLSGPKETPAAQSPTRGPSDTKRADVAGPRPCQRSLSVLSPRQPAQNRESTPLASGPSSFQRAGSVRDRVHKFTSDSPMAARLQDGTPQAALSPLTPARLLGPSLTSTTPASSSSGSSSRGPSDTSSRFSKEQRGVAQPLAQLRSCPQEEGPRGRGLAARPLENRAGGPVARSEEPGAPLPVAVGTAEPGGSMKTTFTIEIKDGRGQASTGRVLLPTGNQRAELTLGLRAPPTLLSTSSGGKSTITRVNSPGTLARLGSVTHVTSFSHAPPSSRGGCSIKAAEDAGTPVAHPPAFSTRRRSSTGTTRSTSLMEAEPAEPLAAAVEAANGAEQTRVNKAPEGRSPLSAEELMTIEDEGVLDKMLDQSTDFEERKLIRAALRELRQRKRDQRDKERERRLQEARGRPGEGRGNTATETTTRHSQRAADGSAVSTVTKTERLVHSNDGTRTARTTTVESSFVRRSENGSGSTMMQTKTFSSSSSSKKMGSIFDREDQASPRAGSLAALEKRQAEKKKELMKAQSLPKTSASQARKAMIEKLEKEGAAGSPGGPRAAVQRSTSFGVPNANSIKQMLLDWCRAKTRGYEHVDIQNFSSSWSDGMAFCALVHNFFPEAFDYGQLSPQNRRQNFEVAFSSAETHADCPQLLDTEDMVRLREPDWKCVYTYIQEFYRCLVQKGLVKTKKS

SEQ ID NO: 323891 - DNA, 2817 bp, Artificial Sequence
  derived and/or modified sequence
atgacctgcctgtcacacccactgcagctggaggtgactgctgatctggctgagagaagacgcattaggtcagcaattagagaactgcagcgccaggagctggagcgcgaggaagaggcactggcaagtaaacgattccgcgccgaaagacaagataacaaggagaattggctgcattcccagcagagggaagccgaacaacgggctgcactcgcccgcctggccggccagctggaatctatgaatgacgtggaggagttaacggcactcctgaggtctgccggcgaatatgaggaaagaaagttgattagagccgccatcagaagggtgcgcgcccaagagatcgaagctgccacacttgctggaagactctacagcggtcgaccaaacagcgggtccagggaggacagcaaagggctcgccgctcacaggctggaacaatgtgaagtaccggagcgcgaagagcaggagcaacaggcagaagtatccaagcccacgcccaccccggagggtaccagtcaggatgtcactacggtcaccctgttgttaagagccccccccgggtccactagctcatcccctgcgtcgccctcatcatcaccaaccccagctagccccgagccacccctcgaacccgcggaggctcagtgcctcactgccgaggtgcccggatcacccgaaccgccccccagccctcctaagacaacaagtccagaacctcaggagtcgcccacactgcccagtacagaggggcaggtggttaataagttactctcgggacccaaggaaaccccagcagctcaatcccctacacgtggcccgtctgacacaaagagggcggacgtggcaggtcctcgaccatgtcagaggtccttgtccgtgttgtcaccgcgccagccagcccagaaccgggaatctacccctctcgcttcaggaccttccagcttccagagagccggatcagtcagggaccgcgttcataaattcacatccgattctcccatggcagcacgcctgcaggacggcaccccccaggctgccttgtctcctctgacaccagctcgcctgctcgggccaagtcttacctctacaactcccgcttctagttcaagcgggtcctcatccagaggcccatcagacacaagtagtaggttttccaaggaacagagaggggtagcccaaccactggcccagctgcggagctgtcctcaggaggagggtcctcggggccgcggcctcgccgctcggcctctcgagaacagagccggcggcccagtggctcgctctgaggaaccgggagcccccctgccggtggctgtgggaaccgcagagcccggaggatcaatgaagacaacctttaccatagaaatcaaggatggacgcgggcaggcctcgaccgggagggtactcctgcctacaggcaaccaacgcgccgagttgactctcggcctgcgtgctcctcccactttactgtcaacgagctctgggggcaaatctacaattacacgtgtgaactcacctggaactctcgcgcgccttggctcagtgacgcatgtcaccagcttttcacatgccccaccctcgtcacggggtggatgctccatcaaagctgcggaggatgcaggcacacccgtagcccacccgcctgcgtttagtacaagaaggcggagttctactggcacgactcgcagtactagcttgatggaagcagaaccagctgagccactggccgcagcggtagaagctgccaacggcgccgaacaaacgagagttaacaaagcacctgaggggcggtccccacttagtgcagaggaactgatgactattgaagatgagggggtcctcgataagatgctcgaccagtctactgacttcgaagaacgaaagttaattcgcgccgccctgagggaattgcggcagcgcaagagggatcagagagacaaagagcgggagagacgcctgcaggaagcaagaggccgtcctggggagggacgtggcaacactgccacagaaaccacgaccaggcattcgcagcgcgccgccgacggatctgcagtcagcaccgttaccaaaacagagagactagtgcacagtaacgatggcacacgaactgcaagaactacaacagtagagtctagttttgtgagacgctctgagaacggctccgggtctaccatgatgcaaaccaagacattttcctcgtcttcttcaagtaagaaaatgggctctatcttcgatagagaagatcaggcttccccgcgtgccggctctctcgccgccttggaaaagaggcaggcagagaaaaagaaagagctgatgaaagctcaatcattgccaaagacatctgcatcacaggccaggaaagcgatgatagaaaagttagagaaggagggcgccgctggcagtcctgggggccctcgggcagcagtccaacggtctaccagttttggcgtgccaaatgcaaactcaatcaaacagatgctgctcgactggtgtcgcgcaaaaaccagagggtacgaacatgttgacatccagaacttctccagcagctggtccgacggaatggcgttctgtgcactggtccataatttttttccagaggcattcgattacggccagctgtcacctcagaacagacggcaaaacttcgaagtcgccttctcatccgcagagacccatgccgattgcccacagcttctcgacacagaagacatggtgaggcttagagagcctgattggaaatgcgtctacacttacattcaagagttttaccgttgccttgtccagaaaggcctggtgaagaccaaaaaatcctag

SEQ ID NO: 323892 - DNA, 2817 bp, Artificial Sequence
  derived and/or modified sequence
atgacctgcctgagccaccccctgcagctggaggtgacagctgacctggccgagcggcggcgcatccgcagcgccatccgggagctgcagaggcaggagctggagcgggaggaggaggccctggccagcaagcgcttccgggcagagcggcaggacaacaaggagaactggctgcacagccagcagcgggaggccgagcagagagctgccctggcccggctggccggccagctggagagcatgaatgatgtggaggagctgacagccctgctgcggtctgctggggagtatgaggagaggaagctgatccgggccgccatccggcgggtgcgggcccaggagattgaagctgccaccctggccggccgcctgtacagcggccggcccaacagcggcagccgggaggacagcaagggcctggccgcccaccggctggagcagtgtgaggtgcctgagcgggaggagcaggagcagcaggccgaggtgtccaagcccacccccaccccagagggcaccagccaggatgtgaccaccgtgaccctgctgctgcgggcccctcctggcagcaccagcagcagccctgccagccccagcagcagccccaccccagccagccctgagccccccctggagcctgctgaggcccagtgcctgacagctgaggtgcccggcagccctgagcccccacccagcccccccaagaccaccagccctgagccccaggagagccccaccctgcccagcacagagggccaggtggtgaacaagctgctgagcggccccaaggagaccccagctgcccagagccccacccggggccccagcgacaccaagagagcagatgtggccggcccccggccctgccagaggagcctgtctgtgctgagcccccggcagcctgcccagaaccgggagagcacccccctggccagcggccccagcagcttccagagagctggctctgtgcgggacagagtgcacaagttcaccagtgacagccccatggccgcccggctgcaggacggcaccccccaggccgccctgagccccctgaccccagcccggctgctgggccccagcctgaccagcaccaccccagccagcagcagcagcggcagcagcagccggggccccagcgacaccagcagccgcttcagcaaggagcagaggggcgtggcccagcccctggcccagctgcggagctgcccccaggaggagggcccccggggccggggcctggccgcccggcccctggagaacagagctgggggccctgtggcccggtctgaggagcccggggcccccctgcctgtggccgtgggcacagctgagcccggcggctccatgaagaccaccttcaccatcgagatcaaggatggccggggccaggccagcacaggccgggtgctgctgcccactggaaaccagagagctgagctgaccctgggcctgcgggccccacccaccctgctgagcaccagcagcggcggcaagagcaccatcaccagggtgaacagccctggcaccctggcccggctgggctctgtgacccacgtgaccagcttcagccacgccccacccagcagcagaggaggctgcagcatcaaggccgcagaagatgctggcacccctgtggcccaccccccagccttcagcaccaggagaagaagcagcacaggcaccaccaggagcaccagcctgatggaggccgagcctgctgagcccctggccgctgctgtggaggccgccaacggggctgagcagaccagggtgaacaaggcccctgagggccgcagccccctgtctgctgaggagctgatgaccattgaagatgaaggagtgctggacaagatgctggaccagagcacagactttgaggagaggaagctgatccgggccgccctgcgggagctgcggcagaggaagagggaccagagggacaaggagcgggagcggcggctgcaggaggcccggggccggcctggagagggccggggcaacacagccacagagaccaccaccaggcacagccagagagctgctgatggcagcgctgtgtccacagtgaccaagacagagcggctggtgcacagcaatgatggcaccaggacagcccggaccaccaccgtggagagcagctttgtgcggcggagtgaaaatggcagcggcagcaccatgatgcagaccaagaccttcagcagcagcagcagcagcaagaagatgggcagcatctttgaccgggaggaccaggccagccccagggctggcagcctggccgccctggagaagaggcaggccgagaagaagaaggagctgatgaaggcccagagcctgcccaagaccagcgccagccaggccaggaaggccatgattgagaagctggagaaggagggcgccgccggcagccctgggggccccagggctgctgtgcagaggagcaccagctttggagtgcccaatgccaacagcatcaagcagatgctgctggactggtgccgggccaagacccggggctatgaacatgtggacatccagaacttcagcagctcctggagcgatggcatggccttctgtgccctggtgcacaacttcttccctgaggcctttgattatggccagctgagcccccagaacagacggcagaactttgaggtggccttcagcagcgctgagacccacgccgactgcccccagctgctggacacagaggacatggtgcggctgcgggagccagactggaagtgtgtgtacacctacatccaggagttctaccgctgcctggtgcagaagggcctggtgaagaccaagaagagctag

SEQ ID NO: 323893 - DNA, 2817 bp, Artificial Sequence
  derived and/or modified sequence
atgacctgcctgagccaccccctgcagctggaggtgaccgccgacctcgccgaaagaagaagaatccgatcagctatcagggagttgcagaggcaggagctggagagggaggaggaagcgctcgcctctaagcgatttagagctgagagacaggacaataaagaaaattggctacactcccagcagagagaggcagagcaacgggcagccctcgcaaggcttgccggacagctggagtccatgaacgacgtcgaggagctgaccgcactactgcgaagtgctggggagtacgaagaaaggaagttaattcgcgctgccatccggagggtgcgcgcacaggagattgaggcggctacactcgcaggaagactctactcaggcagaccaaacagcggctcacgtgaggacagcaaaggcttggccgcacaccgcctggaacagtgtgaggtgccagagcgcgaggaacaagaacagcaggccgaggtctcaaagcctactccaacccctgaaggcacaagccaggacgttaccacagtcactcttctgctaagagcaccgccgggctccacttccagcagtcctgcttccccaagtagctcccccactccagcctctcctgaacccccactggaacctgctgaggcccaatgcctcaccgcggaggtccccggtagtccggagcctcctccgtcaccccccaagacgaccagtcccgaaccgcaagaatcccctacgctgcctagtaccgaaggccaggtagtgaataaactcctgagtggcccgaaagaaacccccgcggctcaatcccccacgaggggaccgtctgacaccaaaagagcggacgtggcaggaccacggccttgtcagaggtctctttccgtactaagtcctcgccagccagctcagaatagggaatccacaccacttgcaagcggcccttctagtttccagcgggctggatctgttcgagatcgggtgcacaaatttacttccgattctccaatggccgccaggctgcaagatgggaccccccaggccgcactgtcacccctcactccagcgcgactgctcgggccaagcttgacaagtacaacccccgcctccagtagctccggcagcagcagtaggggcccttcggatacatccagccgcttctctaaggagcagcggggggtggcccagcccctggcacagctgcgtagttgtccacaggaggagggccctcgggggcggggattagctgccagacccctcgaaaaccgggctgggggaccagtggcacggagcgaagagcccggggctcctttaccggttgctgtaggcaccgctgagcccggcggcagcatgaaaactacattcacgatcgagattaaggacggccgaggccaggcaagcacgggacgtgtactcctgcccacagggaaccaacgcgccgaattaaccctgggcctgcgcgccccccccactctgttaagcacgtcctcaggtggcaagtccactatcacccgggtcaacagtcccggcaccctcgcccggttgggctctgtcacacatgtgacctccttcagtcatgccccgccatcgtccagggggggttgctccattaaggctgccgaggatgcaggtacacccgtcgctcatccccccgccttctctacaagacgacgatcctctaccgggaccactaggagcacaagcctcatggaagcggagccagcagagcccctggctgcggcagtggaggccgcaaacggggcagaacagaccagggttaacaaggcaccagaggggcggagtccgctgagcgctgaagaattgatgaccatcgaggacgagggggtactggacaagatgctggaccagagcacagactttgaagagagaaagctcatcagagctgcattgcgcgagctgcggcagcgaaagcgcgatcagagggataaggagcgtgaacgccgtctgcaggaagcccgcggtcggcccggggagggccgagggaacaccgcgacagagacgaccacccgtcactctcagcgagccgcagatggttctgcggtatcgacagtcaccaagacagagaggctggtgcactcaaatgacggaacgcgcacggccaggactactactgtggaatcgtccttcgtgcgcaggtccgaaaatggtagtgggagtacaatgatgcagaccaagaccttttcatcctcatcctcctccaaaaaaatggggagcattttcgacagagaagatcaagcatcgcccagggctggctccctggcggcccttgaaaagcgtcaagccgagaagaaaaaggaactaatgaaagctcaaagcttgccgaagacctccgccagccaggcccgaaaggcaatgatcgagaagctggaaaaggaaggcgcagccggaagccccggaggccccagggctgcggtccagcggagtacttccttcggagtcccaaacgctaattcaattaagcaaatgctgctggactggtgcagggccaaaacccgggggtatgagcacgtggacatccagaatttctcttcttcttggagtgacgggatggctttctgtgcgctcgtgcataacttttttcctgaggcatttgactacggtcagttaagccctcagaaccggcgtcagaacttcgaagtcgctttttcgtccgccgaaacgcatgcagattgtcctcagctgttagatactgaagatatggttaggctgcgagaacctgattggaagtgcgtctacacttacattcaagaattctatcgatgcttggtgcagaagggtttggttaagaccaaaaagagctag

SEQ ID NO: 323894 - DNA, 2817 bp, Artificial Sequence
  derived and/or modified sequence
atgacttgtctctcacaccctttgcaactggaagttacagcggacctagcagagagaagacgaattcgaagcgcaattcgggaacttcagaggcaggaactggagagagaagaggaagcactggcgtccaaacggtttcgcgctgaacggcaggataataaggaaaattggctccacagtcagcagagagaggctgagcagagggcagctctcgcccgtctagccggacaattggagagcatgaatgacgtggaggagctcacagcattactgcgatcagctggggagtacgaggaaaggaagctgatcagggcagccatcagacgcgttcgcgcacaagagattgaagcggcaactctggctggcagattgtattccggaagacccaacagcggttcccgggaagacagcaagggattagctgctcacaggctggagcaatgcgaggtccccgaaagagaggagcaggaacagcaagctgaggtgtctaagccaactccaaccccagagggaacaagccaggacgtgaccacagtcacgctcttgttgcgcgctcctccaggaagcacatcctcaagccccgcttcgccttctagtagtcccacccccgctagccctgaacccccactggaaccggcagaagctcagtgcttaactgccgaggtgcctggcagccccgagccgcctcccagcccaccgaaaaccacttcgcctgagccgcaagaaagtccaacattaccaagtacagagggacaagtcgtcaacaaattgctctcggggccaaaagagacccccgctgcccagagcccaacccgtgggcctagcgacacaaagcgggcagacgtggcaggcccacggccttgtcagagatccctgagtgttctgtccccccgacagcctgcccagaatcgggagagtactcctttagcaagcggcccatccagcttccaaagggcaggatcagttcgggaccgagtgcataaattcacatccgattcaccgatggccgcaaggctgcaggatggcaccccacaagccgctttgagcccattgacacctgccaggctccttggaccaagccttacaagcacaacccccgcaagcagttcatcgggaagttcatcccgaggaccctcagatacatcctcacgcttctccaaggagcaacgcggagtggctcagccgctggcgcagttgcgatcttgtccacaggaagaagggcctcgtggcagagggctagccgcacgaccacttgagaatcgcgctgggggtcccgtggcgagaagcgaggaacccggagcccctctcccagtggcagtgggcaccgcagaacctggcggatccatgaagacgacctttaccatcgaaatcaaggatggacgaggccaggcatccacggggagagtgctgctccccacaggaaatcaacgggctgaactcactcttggacttcgcgctccccctaccctcctgtccacatcttcagggggaaagagcactataactcgtgtgaattcccccggaactctggctcgactcggttccgttacgcatgtgacatccttcagccacgcccctcctagttcacgcggtggttgtagtattaaggcagccgaagacgccggtacccccgttgctcatccccctgcgttctccaccagaagaaggtcctcaaccggcactactcgttctacaagcctcatggaagcagagcccgcagaacccctggcggctgccgtagaggctgccaatggagccgagcagacacgtgtcaacaaggctcccgaaggccgaagtccactctctgccgaggaactgatgaccatcgaagatgaaggcgttctcgataaaatgttagaccagagcactgacttcgaggagaggaaattaattagggccgcactgagagagctgcgacagcggaagcgggatcagcgcgacaaagagagagaaaggaggttgcaggaggcaaggggccgacccggtgagggcagggggaacacagccaccgaaaccacaacgcgtcattctcagcgggcagcggacggctcagctgtgagcaccgtcacaaagacagagcgcctcgtccattcaaatgacggcacacgaaccgccagaactaccacagtcgagtccagcttcgtccggagatctgagaatggcagcgggagcaccatgatgcaaactaagactttttcctctagcagttcttccaagaagatgggtagcatattcgatagagaggaccaagcatcccctagggccggatcccttgctgcacttgagaagcgacaggccgagaaaaagaaggaactcatgaaagcccaatcccttccaaagaccagcgccagccaagccagaaaagctatgattgaaaaattggaaaaggagggtgcggcaggctctcccggagggcctagggccgctgtccagagatctacgtcattcggcgtgcctaatgcaaattcaatcaagcagatgctgctcgattggtgtagggcaaagacgcgaggctatgagcatgtcgatatacaaaacttctcctcttcttggtctgacgggatggctttttgcgctctggtgcacaacttttttcccgaagccttcgactatggtcagctctccccccagaaccgtagacagaattttgaggttgctttctcttctgctgagacacatgcagactgccctcaactcctcgatacagaagatatggtgcgcctccgggaaccagattggaagtgcgtctacacttacattcaggagttctatcggtgtcttgtgcagaaaggactcgtgaagacgaaaaagagttag

SEQ ID NO: 323895 - DNA, 4951 bp, Artificial Sequence
  derived and/or modified sequence
agcgtctggccgatttggggacgcgggcagtcgcttccggccccggctcccgcacattcttgaggattgggccggggatgggaggaatggggacgcctggggacttgcacgccgcgtgcccctccaccacccgccgggacgccctctgcctcggtcccgagttcgagttcgacctccgccactcagctgggtgtcctggggaccttggtttcttccctttagatccggacactgaagcaggcggtagcgggtgtcttcctacctggctaccccttcggcgcctagcgcgaggcagggtgggcgaggcgagggcggcgccctgcgagggagggcggtcgcagaacctgcgggccttcagcgccccctggcgaggcttccctccaccgccgtctctctccctcctcctgactggctagaaccaagtatgggggtgatgcttattgcaactgcagctatgtacaggagaggccaagtcactgttcccaaccccacccactggcaaatgaaaaaaccaagacacagagagtttaagggatatgctcttgatcacccagccaggattggactagggctggaaccaactaagggctctggcctgagtttcagggggtcttctcataattcctcaggaatgtggagcctggagggctcttcccccaagactctccctgctctcttcagactaggacaagctggctcatggctgagttgggccagcccacactccctgctgaaaactatctccatcccatccccacccttgccacctggccttcccgctaagcagaaaggaatgacgggggggcgctaaaaagggagatgatagagggttctttggccctacccctgaatgatttggggggtggggacagaggaaatcaccccgcctttactggctcccgtctggttatcagacccacactggaggcttatctctgccactatcttccaggggaaccctgggccagtcctctctcccttgagccacggaggatctgtatgtagcaggtggctctacatggtggaggtgtgggggaggcaacaggattggctgactcactccagagaaggtgttctttcctgaacctggttagaccagtcacccccaatttcccgggaactgaggggttgagaaccggtagaagcagctgtcacccagggatgccctctataaggccctggggtggcccctagtgccagccaccttatatgtctgggggattggtcctcccactctgcaccctggcttcttccatggtggctaggtccaggccagtgcagtggggacaatagccctcagccaggcaggactcctgagcacctgtcctcagtttccccatctgtggatgaagcagtcaacccccagctgggctgtggtgtttggtgactagaccagggagcctcccttgctcagagggtggacttcatctgtcacctttccctctagggaccctgttagtgacccacagggtggcctccctcctcctcctacaatagctccctgacttttggggatctgggctctgagaggcaggaatcgagttgtagaaaggagtgcctggcttggcacctggcacaagtgggcagtttctggctgtccactcacagttgtgtgctctgtgaaccacaatgcaaagtggactacccaagatccctgaaacagtgggctgggtctacccccgggaccctgcgtgggcaggcaggcacgtgaagagcttgggacacagggagtggacacaggccacacattgtgccctaggcagagccgtgggcagctggtgccagccctccgcccctggcagccaaaatgacctgcctctcgcacccactgcagctggaggtcacagcagatctggcagagcggcggcgcatccgctcagccatccgggaactgcagcggcaggagctggagcgcgaggaggaggccctggcatccaagcgtttccgtgccgagcggcaggacaacaaggagaactggctgcactctcagcagcgggaagctgagcagcgggctgccctggcacggctggcagggcagctggagtccatgaacgatgtggaggaattgactgcactgttgcgaagcgctggtgagtatgaggagcgcaagctgatccgagctgccatccgccgtgtacgggctcaggagattgaggctgccaccttggctgggaggttgtacagcgggcgtcccaacagtggctcaagagaggacagcaaggggctagcggcacacaggctggaacagtgtgaggtgccagagcgagaggaacaggaacagcaggcagaggtttcaaagccaacccccacccctgaaggcaccagccaggatgtgaccacagtgacactcctgctgcgagccccacctgggagcacatccagctcacctgcctcacccagcagttcacccacccctgcctctcctgagcctccattggagcctgccgaggcccagtgccttacagctgaggttccaggcagcccagagccaccccccagcccacccaagaccaccagccctgagcctcaggagtctccaacgctccccagcactgagggccaggtggtcaacaagcttctgtctggccccaaagagacccctgctgcccagagccccaccagaggcccctctgacaccaagagagcagacgtggctggaccccgaccctgccaacgctccctgtcggtgctcagcccccgccaaccagcccagaaccgagagtccaccccccttgccagcggaccttcctcattccagcgggctggctctgtgcgggatcgtgtccacaagttcacatctgattctcctatggctgctaggctccaggatggcacaccccaggctgccctaagtcccctgacccccgcaaggctcctgggcccctccctcaccagcaccacccctgcctcctcctccagcggctcctcctctcggggccccagtgatacctcctcccggttcagcaaggagcaacgaggagtagcccagcccctggcccagcttcgaagctgcccccaggaggagggccccagggggcggggcttggctgctaggccccttgaaaacagagcaggggggcctgtggcacgttcagaggagcctggtgccccgctgcccgtggccgtcggcactgccgagccagggggcagtatgaagaccacattcaccatcgagatcaaggacggccgtggccaggcctccacaggccgggtgctgctgcccacaggcaaccagagggcagaactgacactggggctgcgggcgcccccgaccctactcagcaccagtagtgggggcaagagcaccatcacccgtgtcaacagccctgggaccctggctcggctgggcagtgtcactcatgtcaccagcttcagccatgccccccccagtagccgaggaggctgcagcatcaaggctgccgaggatgccgggacccccgtggcccacccacctgccttcagcacccgccgccgctcctccaccggcaccacccgcagcactagtctcatggaagcagagccagcagagcctctcgctgcagcagtggaagcggccaatggggctgagcagacccgagtgaacaaagcaccagaagggcggagccctctgagcgctgaggagctgatgactattgaggatgaaggagtcttggacaagatgctggatcagagcacggactttgaagagcggaagctcatccgggctgcacttcgtgagctccgacaaaggaagagagaccagcgggacaaggagcgggaacggcggctgcaggaggcacggggccggccaggggaggggcgcggcaacacagccactgagaccaccacgaggcacagccagcgggcagctgatggctctgctgtcagcactgttaccaagactgagcggctcgtccactccaatgatggcacacggacggcccgcaccaccacagtggagtcgagtttcgtgaggcgctcggagaatggcagtggcagcaccatgatgcaaaccaagaccttctcctcttcctcctcatccaagaagatgggcagcatcttcgaccgcgaggaccaggccagcccacgggccggcagcctggcggcgctcgagaaacggcaggccgagaagaagaaagagctgatgaaggcgcagagtctgcccaagacctcagcctcccaggcgcgcaaggccatgattgagaagctggagaaggagggcgcggccggcagccctggcggaccccgcgcagccgtgcagcgatccaccagcttcggggtccccaacgccaacagcatcaagcagatgctgctggactggtgtcgagccaagactcgcggctacgagcacgtcgacatccagaacttctcctccagctggagtgatgggatggccttctgtgccctggtgcacaacttcttccctgaggccttcgactatgggcagcttagccctcagaaccgacgccagaacttcgaggtggccttctcatctgcggagacccatgcggactgcccgcagctcctggatacagaggacatggtgcggcttcgagagcctgactggaagtgcgtgtacacgtacatccaggaattctaccgctgtctggtccagaaggggctggtaaaaaccaaaaagtcctaacccctgctcggggccccacggatgctggtggactgtgtgcccctggtggaggtggacgacatgatgatcatgggcaagaagcctgaccccaagtgtgtcttcacctatgtgcagtcgctctacaaccacctgcgacgccacgaactgcgcctgcgcggcaagaatgtctagcctgcccgcccgcatggccagccagtggcaagctgccgcccccactctccgggcaccgtctcctgcctgtgcgtccgcccaccgctgccctgtctgttgcgacaccctcccccccacatacacacgcagcgttttgataaattattggttttcaac

SEQ ID NO: 323896 - DNA, 2817 bp, Artificial Sequence
  derived and/or modified sequence
atgacctgcctgagccaccccctgcagctggaggtgaccgccgacctggccgagagaagaagaatcagaagcgccatcagagagctgcagagacaggagctggagagagaggaggaggccctggccagcaagagattcagagccgagagacaggacaacaaggagaactggctgcacagccagcagagagaggccgagcagagagccgccctggccagactggccggccagctggagagcatgaacgacgtggaggagctgaccgccctgctgagaagcgccggcgagtacgaggagagaaagctgatcagagccgccatcagaagagtgagagcccaggagatcgaggccgccaccctggccggcagactgtacagcggcagacccaacagcggcagcagagaggacagcaagggcctggccgcccacagactggagcagtgcgaggtgcccgagagagaggagcaggagcagcaggccgaggtgagcaagcccacccccacccccgagggcaccagccaggacgtgaccaccgtgaccctgctgctgagagccccccccggcagcaccagcagcagccccgccagccccagcagcagccccacccccgccagccccgagccccccctggagcccgccgaggcccagtgcctgaccgccgaggtgcccggcagccccgagcccccccccagcccccccaagaccaccagccccgagccccaggagagccccaccctgcccagcaccgagggccaggtggtgaacaagctgctgagcggccccaaggagacccccgccgcccagagccccaccagaggccccagcgacaccaagagagccgacgtggccggccccagaccctgccagagaagcctgagcgtgctgagccccagacagcccgcccagaacagagagagcacccccctggccagcggccccagcagcttccagagagccggcagcgtgagagacagagtgcacaagttcaccagcgacagccccatggccgccagactgcaggacggcaccccccaggccgccctgagccccctgacccccgccagactgctgggccccagcctgaccagcaccacccccgccagcagcagcagcggcagcagcagcagaggccccagcgacaccagcagcagattcagcaaggagcagagaggcgtggcccagcccctggcccagctgagaagctgcccccaggaggagggccccagaggcagaggcctggccgccagacccctggagaacagagccggcggccccgtggccagaagcgaggagcccggcgcccccctgcccgtggccgtgggcaccgccgagcccggcggcagcatgaagaccaccttcaccatcgagatcaaggacggcagaggccaggccagcaccggcagagtgctgctgcccaccggcaaccagagagccgagctgaccctgggcctgagagccccccccaccctgctgagcaccagcagcggcggcaagagcaccatcaccagagtgaacagccccggcaccctggccagactgggcagcgtgacccacgtgaccagcttcagccacgccccccccagcagcagaggcggctgcagcatcaaggccgccgaggacgccggcacccccgtggcccacccccccgccttcagcaccagaagaagaagcagcaccggcaccaccagaagcaccagcctgatggaggccgagcccgccgagcccctggccgccgccgtggaggccgccaacggcgccgagcagaccagagtgaacaaggcccccgagggcagaagccccctgagcgccgaggagctgatgaccatcgaggacgagggcgtgctggacaagatgctggaccagagcaccgacttcgaggagagaaagctgatcagagccgccctgagagagctgagacagagaaagagagaccagagagacaaggagagagagagaagactgcaggaggccagaggcagacccggcgagggcagaggcaacaccgccaccgagaccaccaccagacacagccagagagccgccgacggcagcgccgtgagcaccgtgaccaagaccgagagactggtgcacagcaacgacggcaccagaaccgccagaaccaccaccgtggagagcagcttcgtgagaagaagcgagaacggcagcggcagcaccatgatgcagaccaagaccttcagcagcagcagcagcagcaagaagatgggcagcatcttcgacagagaggaccaggccagccccagagccggcagcctggccgccctggagaagagacaggccgagaagaagaaggagctgatgaaggcccagagcctgcccaagaccagcgccagccaggccagaaaggccatgatcgagaagctggagaaggagggcgccgccggcagccccggcggccccagagccgccgtgcagagaagcaccagcttcggcgtgcccaacgccaacagcatcaagcagatgctgctggactggtgcagagccaagaccagaggctacgagcacgtggacatccagaacttcagcagcagctggagcgacggcatggccttctgcgccctggtgcacaacttcttccccgaggccttcgactacggccagctgagcccccagaacagaagacagaacttcgaggtggccttcagcagcgccgagacccacgccgactgcccccagctgctggacaccgaggacatggtgagactgagagagcccgactggaagtgcgtgtacacctacatccaggagttctacagatgcctggtgcagaagggcctggtgaagaccaagaagagctag

SEQ ID NO: 323897 - DNA, 2754 bp, Artificial Sequence
  derived and/or modified sequence
atggcagatgaagcattagccgggctggatgaaggggcgctccgcaaattgctggaggtgaccgccgaccttgcagaaagacgcaggatcagaagcgccatccgggaattgcaaagacaggagttagagcgggaagaggaagctttggcaagtaagcggttccgggcggagcgccaggataataaggaaaattggctccattcacagcagagggaagccgaacagagagccgctttggcccggctggccggacagctggagtctatgaatgatgttgaggagttgaccgcattactccgctctgctggagagtacgaagagagaaaattaatcagggcagcaatcagacgggtgcgcgcacaggagatcgaggcggcaaccctcgcgggtaggctgtactcaggacggcctaacagcgggagtcgtgaggatagtaaagggctcgcggcccacagattagaacaatgtgaagtcccagaacgggaagagcaagagcagcaagctgaagtgtcaaaacctaccccgactcccgagggcacctcccaggacgtcaccaccgtgacattgcttttgcgagcaccacctggaagcaccagttcatctcccgcctcaccgagctctagccctactcctgcctcgccagaaccccctttagagccagccgaggcccagtgcctgaccgccgaagtcccaggctctcccgaacccccaccatccccccctaagacaacaagcccggaaccgcaggagtcaccaactttacccagtacggagggccaggtggtgaacaagctgctgtctggtcccaaagagacgcccgccgcccaatcacccactagagggccgtctgataccaagagggcagacgtagcgggtccccgcccatgccaacgctccctgagcgttctatctcctagacagcctgcccagaaccgtgagtcaaccccactggcctccggaccatcttcctttcagagggccgggtcggtgcgagatagagtgcacaaatttacctctgatagccccatggctgctagactgcaggacgggacaccccaagccgcactatcccccctgactcctgcccgactattaggtccaagccttacctcgaccaccccagccagcagttccagtgggtccagcagtcgggggccctctgatactagctctaggttctctaaggagcagaggggcgttgcccagccgctagcccagctgcgctcatgccctcaggaagaaggccctcggggacgtggtcttgccgccagacctctggagaatagagcgggcggacccgtggcccgctccgaggagcccggcgcaccacttcccgtggcggttggcactgccgaaccagggggatcaatgaaaacaacattcaccattgagattaaggatggccgcggacaggcctctaccggcagagtactgctcccaacaggaaaccaaagagctgagcttacactcggactgagggcgcctccaacgctcctgagcacctccagcggaggaaaatccactattacacgcgtgaacagtccaggaacactggctcgcctgggatctgttacccatgtgacatcattctctcacgcccctccttccagcaggggcggatgtagtattaagatggaagccgagcccgctgaacctctggcggcagctgttgaagccgccaatggcgccgaacagacaagggtgaataaggctcctgaagggcggagccccctttcggccgaagaactgatgaccattgaggacgagggcgttttggacaaaatgttggatcaatccaccgatttcgaggagagaaaattgattcgagctgcgctacgggaattgagacagcggaagcgcgatcagagggacaaggagagggaaaggaggctacaggaagcaaggggccgcccaggcgaagggagggggaataccgcaaccgagacaacaacaagacacagccagagggccgccgatggaagtgccgtgtccaccgttacaaagactgagcggcttgtccattccaacgacgggactcggactgcaaggacgacgaccgtcgagtcttcctttgtgaggagaagtgagaacggtagtggcagcactatgatgcagactaagaccttctcttcctcatcctctagtaagaagatgggaagcatcttcgacagagaggaccaagcatcccctcgggcaggtagtctggcagcactggagaagcgacaggccgaaaagaagaaggaactcatgaaagcacagagccttcctaaaacttcagcctctcaggcgaggaaggctatgattgaaaaactcgagaaggagggcgcagccgggtctccaggcgggcctagagcagcagtccagaggtccacttcatttggcgtgcctaatgccaattctataaagcagatgttattagactggtgccgtgcaaaaaccaggggctatgaacatgtggacatacaaaattttagctctagctggtcagatgggatggcattctgcgcactcgtgcataatttctttcctgaggctttcgactacggccagcttagtccgcagaatagaagacagaatttcgaagttgcgttcagttcggcagaaatgttagtggactgcgtgcccctggtggaagtcgacgacatgatgataatggggaagaagccggatcctaagtgtgtgttcacctacgttcagagtctgtacaatcacctgaggaggcacgagctgagactgcgtgggaaaaacgtgtag

SEQ ID NO: 323898 - DNA, 2754 bp, Artificial Sequence
  derived and/or modified sequence
atggctgatgaggccctggccggcctggatgagggcgccctgaggaagctgctggaggtgacagctgacctggccgagcggcggcgcatccgcagcgccatccgggagctgcagaggcaggagctggagcgggaggaggaggccctggccagcaagcgcttccgggcagagcggcaggacaacaaggagaactggctgcacagccagcagcgggaggccgagcagagagctgccctggcccggctggccggccagctggagagcatgaatgatgtggaggagctgacagccctgctgcggtctgctggggagtatgaggagaggaagctgatccgggccgccatccggcgggtgcgggcccaggagattgaagctgccaccctggccggccgcctgtacagcggccggcccaacagcggcagccgggaggacagcaagggcctggccgcccaccggctggagcagtgtgaggtgcctgagcgggaggagcaggagcagcaggccgaggtgtccaagcccacccccaccccagagggcaccagccaggatgtgaccaccgtgaccctgctgctgcgggcccctcctggcagcaccagcagcagccctgccagccccagcagcagccccaccccagccagccctgagccccccctggagcctgctgaggcccagtgcctgacagctgaggtgcccggcagccctgagcccccacccagcccccccaagaccaccagccctgagccccaggagagccccaccctgcccagcacagagggccaggtggtgaacaagctgctgagcggccccaaggagaccccagctgcccagagccccacccggggccccagcgacaccaagagagcagatgtggccggcccccggccctgccagaggagcctgtctgtgctgagcccccggcagcctgcccagaaccgggagagcacccccctggccagcggccccagcagcttccagagagctggctctgtgcgggacagagtgcacaagttcaccagtgacagccccatggccgcccggctgcaggacggcaccccccaggccgccctgagccccctgaccccagcccggctgctgggccccagcctgaccagcaccaccccagccagcagcagcagcggcagcagcagccggggccccagcgacaccagcagccgcttcagcaaggagcagaggggcgtggcccagcccctggcccagctgcggagctgcccccaggaggagggcccccggggccggggcctggccgcccggcccctggagaacagagctgggggccctgtggcccggtctgaggagcccggggcccccctgcctgtggccgtgggcacagctgagcccggcggctccatgaagaccaccttcaccatcgagatcaaggatggccggggccaggccagcacaggccgggtgctgctgcccactggaaaccagagagctgagctgaccctgggcctgcgggccccacccaccctgctgagcaccagcagcggcggcaagagcaccatcaccagggtgaacagccctggcaccctggcccggctgggctctgtgacccacgtgaccagcttcagccacgccccacccagcagcagaggaggctgcagcatcaagatggaggccgagcctgctgagcccctggccgctgctgtggaggccgccaatggagctgagcagaccagggtgaacaaggcccctgagggccgcagccccctgtctgctgaggagctgatgaccattgaagatgagggcgtgctggacaagatgctggaccagagcacagactttgaggagaggaagctgatccgggccgccctgcgggagctgcggcagaggaagagggaccagagggacaaggagcgggagcggcggctgcaggaggcccggggccggcctggagagggccggggcaacacagccacagagaccaccaccaggcacagccagagagctgctgatggcagcgctgtgtccacagtgaccaagacagagcggctggtgcacagcaatgatggcaccaggacagcccggaccaccaccgtggagagcagctttgtgagaagaagtgaaaatggaagtggcagcaccatgatgcagaccaagaccttcagcagcagcagcagcagcaagaagatgggcagcatctttgaccgggaggaccaggccagcccccgggccggcagcctggccgccctggagaagaggcaggccgagaagaagaaggagctgatgaaggcccagagcctgcccaagaccagcgccagccaggccaggaaggccatgattgagaagctggagaaggagggcgctgctggcagccctgggggccccagggctgctgtgcagaggagcaccagctttggagtgcccaatgccaacagcatcaagcagatgctgctggactggtgccgggccaagacccggggctatgagcacgtggacatccagaacttcagcagctcctggagcgatggcatggccttctgtgccctggtgcacaacttcttccctgaggcctttgattatggccagctgagcccccagaacagacggcagaactttgaggtggccttcagcagcgctgagatgctggtggactgtgtgcccctggtggaggtggatgacatgatgatcatgggcaagaagccagaccccaagtgtgtgttcacctacgtgcagagcctgtacaaccacctgcggagacatgagctgcggctgcggggcaagaatgtgtag

SEQ ID NO: 323899 - DNA, 2754 bp, Artificial Sequence
  derived and/or modified sequence
atggccgacgaggccctggccggcctggacgagggcgccctgcggaagctgttagaggtgacagctgatctggccgaacggagaaggatcagaagtgccatccgagaattgcagcgacaagagctggagcgcgaagaggaggcgctcgccagtaagaggttccgggccgagcgacaggataacaaagagaattggctccactctcagcagagggaggccgaacaaagagccgccctggcccgcctggcaggtcaactggaaagtatgaatgacgtggaggagctaacagccttgttgcggtctgccggagaatacgaagagaggaagctgatcagagccgctatccgtcgtgtgagggcccaggaaatagaggctgccaccctcgccgggagactttattcagggaggcccaattctggctctagggaagactctaaaggtcttgcggcccataggctggagcagtgcgaagtgcctgagcgggaagaacaagagcaacaggccgaggtcagcaaacctacacctactccggagggtacctcccaggacgttacaaccgtgactcttctgttgcgcgcgccccctgggtctaccagctccagccctgcctctcccagtagtagccccacgcccgcctcccctgagccgcctctcgaaccagcagaagctcagtgtctgaccgcagaagtgcccgggtctccggagccaccaccatccccacctaaaacaacatcacccgagccccaagagtcccccacactgccctcaacggagggccaggtggttaacaagctcctctcaggacctaaagagactcctgctgcccaaagccccacacgtggaccttctgacaccaaacgggcggacgtggctggaccgaggccttgccaacgctccttgagtgtgcttagtccccgccagccggctcagaatcgagaatccactcccctcgcctctggtccctcatctttccaaagagccgggtccgtgcgagacagggtgcataagttcacgagcgactctcccatggccgccaggctgcaagatgggacaccgcaggcagccctctctcccttgacccctgcccgattgttaggcccatctctgaccagcacaactccagcttcgagcagtagcgggtcttcgtctcgcggccccagtgacactagcagcaggttttccaaggagcagcgtggggtggcccagccactcgctcagttgcgcagctgcccccaggaggaaggccctcgcggccgcgggctagcggcccgcccccttgagaaccgggctgggggacctgttgccagaagcgaagagccaggggctcccctccccgtggctgttggtactgccgaacccggggggtccatgaaaaccaccttcaccattgagatcaaggacggccgaggtcaggcatccactggaagagtactgctgcccactggaaatcagagggccgagttgaccctggggctccgtgcccctccgacactgctatctacgagctctggcggtaaaagcaccataactcgggtgaattccccggggacgctggcccgcctggggtccgtgactcacgttacctcgttctctcacgctccgccctcaagtagaggcggatgttccataaagatggaggctgaacctgccgagcctctggccgccgccgtggaggccgccaacggggcggagcagacacgcgttaataaggccccggaaggcaggtcacccctatccgccgaagagctaatgacgatagaagatgaaggcgtgctagacaaaatgctggaccagtctactgacttcgaggagagaaagctaatccgcgcggctctgcgagagcttcgccaaaggaagcgcgatcaacgcgataaagaaagggagcgacgcctgcaggaggctcgaggacgcccgggagagggaagggggaacacagccactgaaaccacgacaagacattcacagagggccgcggacggaagcgccgtcagcaccgtgacaaaaactgagagactagtgcactcgaacgacggcacccgcacagctcgcaccacaacagtggagtcatcttttgtccgccgcagtgaaaatggctctggaagtactatgatgcagactaaaacattctctagctcttcttccagtaagaaaatggggagcatcttcgacagagaagatcaagcctccccgcgtgccgggagcctggccgctctcgagaagcgtcaggcagaaaaaaagaaggagctgatgaaagcacaatcccttcctaagacttccgcatcccaagccaggaaggctatgatcgaaaaactagaaaaggagggagccgcaggctccccaggcggccccagagctgcagtgcagcgtagcacctccttcggcgtgcctaatgctaacagtattaaacagatgctgctcgattggtgtagggctaagactcgcggctacgagcacgtggatatccagaatttctcttcttcctggtccgacggcatggccttttgcgccctggtgcacaatttttttccagaagcttttgattatggtcagctttcgccacagaacaggcgccaaaacttcgaagtagcgttttcctcagcggagatgctggtggattgcgttccactagttgaggtagatgacatgatgattatgggcaaaaagcccgaccccaaatgcgttttcacgtacgttcaatccctatacaatcacctccgtaggcacgagttgagattgcgcggtaagaatgtgtag

SEQ ID NO: 323900 - DNA, 2754 bp, Artificial Sequence
  derived and/or modified sequence
atggctgatgaagccctcgctggcctggacgaaggagcactgagaaaactgctggaggtcaccgccgacctcgctgaaagacggagaatccggagtgctattcgagaattgcagaggcaagaactggagcgggaagaagaggctctcgccagcaaaaggtttcgtgccgagcgtcaggacaacaaggagaactggttgcattcacaacagcgcgaggcagagcaacgcgcagcgctagccagactggcaggacaactagagagcatgaatgatgtggaagaactcacagccctcctacgttccgcaggcgaatatgaagagcggaagctcattagggcagctataaggagagtgcgcgctcaggaaatcgaggcagccactttggccggtaggctgtactctggtcgtccgaattccggctcacgggaagatagcaaaggcctggcggcacacaggctggaacagtgtgaagtccccgagcgcgaggaacaggaacagcaggccgaagtcagtaagcctaccccaacacccgagggcacttcacaagacgtgacaacggtgactctcttgctcagggcacccccagggtcaacaagctcaagccctgctagtccgtctagctcacccactccagcttctcctgaacccccactcgaaccggcagaggcacagtgtctaaccgctgaagtaccaggtagccccgagccaccaccgagtccgccaaaaacaacatctccggaacctcaggaaagccccaccttgccatccacggagggacaggttgtaaataaactgctgtcagggcctaaggaaacacctgcagcacaatctcctacgcgcggaccctccgacaccaagagggcagatgtggctggcccacggccatgtcaacgatctctgtctgtgcttagtccacggcaaccagcccagaaccgggaatctactcctctggcaagcggaccctcaagcttccagcgagcgggttcggtgcgggatcgggtccataagttcacctccgactcccctatggccgcaaggcttcaggacggaaccccgcaggctgccctcagcccacttacgcctgccaggctccttgggcctagtctcacatcgaccacccctgcctcctcctcttcgggtagctcaagcagaggtccttccgatacatcttctcggttcagtaaagagcagcggggtgttgcccagccattggcacagctgcgaagctgtcctcaagaggagggacccaggggaagaggactcgctgcacggcctctagagaatcgtgctgggggacccgtggctaggtccgaggaacctggtgccccattgccagtcgctgtgggcacagcggagccaggcggaagtatgaagactacctttaccattgagataaaagacgggcgtgggcaggcctcaactggtcgggtgctgctacccaccggcaatcagcgagccgaactcacgttgggtctacgggctcctcccacacttctgagcacctcctcaggcggtaagagcactattactcgggttaactcaccagggaccctggccagactcggtagcgttacacacgttaccagcttcagccatgctccacccagctctcggggaggctgctctatcaaaatggaagctgaacctgcggagcccctggcggcagctgtggaggcggcaaatggtgcggagcagaccagagtcaacaaagctcccgaaggccgtagcccactgtccgcagaggagctgatgaccatcgaagacgagggcgttttggataaaatgctcgatcagagcactgatttcgaagagcgcaagctgatacgagcagctttacgcgagctgcggcaaaggaagagagaccagagagataaggaacgggaaaggaggctgcaggaggcccgtggacggccaggggaaggccgaggcaacaccgccacagagacaaccacgcggcactcgcagcgagccgctgatggatctgcagtcagcacagtaacgaaaactgaacggctcgttcactcgaacgacggcacacgtacagccaggactacaacagtcgaaagctcctttgtgaggcggagtgagaacgggagcggtagtaccatgatgcagacaaaaactttcagctcatcgagcagctcgaagaaaatgggttcaatcttcgacagagaggatcaagcctctccccgagcgggttctctggcagctctggaaaagcggcaggctgagaagaagaaagagcttatgaaggcccagtccctcccaaaaacaagtgcctcacaggctcgcaaggcaatgattgagaaactcgaaaaggagggcgcagccggatctcctggaggcccacgtgccgcagtccagcggtcaacttccttcggcgtgcccaacgcgaactctatcaaacagatgctcctggattggtgccgcgcaaagactcggggatatgagcatgttgacatccaaaacttttcaagtagctggagtgacggtatggctttctgcgcccttgttcataatttcttcccagaggcgttcgactacgggcagctcagtccccagaatagaagacagaatttcgaagtggcattcagcagtgctgagatgctggtggactgcgtccctctagtggaggtggatgatatgatgattatgggaaagaaacccgatcccaaatgcgtgtttacatacgtccagtccctttataaccacctccggcgacacgaactgcgattgaggggtaaaaatgtgtag

SEQ ID NO: 323901 - DNA, 3130 bp, Artificial Sequence
  derived and/or modified sequence
cagaatccaggggacggttgctgagcgggcctgggacagcgggtcgcggcacctccggcctgcgcgtgtctaatccgtctgtcgggtcccgaaagagctaagccgagcctgcgccggacgggtgggctggactgagagaattctctgagctggtgacaggtgccacaggcactggggatctcaccagaaaggaaccgacggagctaggggccagcgagatggcggacgaggccttagctgggctggatgagggagcccttcggaagctgctggaggtcacagcagatctggcagagcggcggcgcatccgctcagccatccgggaactgcagcggcaggagctggagcgcgaggaggaggccctggcatccaagcgtttccgtgccgagcggcaggacaacaaggagaactggctgcactctcagcagcgggaagctgagcagcgggctgccctggcacggctggcagggcagctggagtccatgaacgatgtggaggaattgactgcactgttgcgaagcgctggtgagtatgaggagcgcaagctgatccgagctgccatccgccgtgtacgggctcaggagattgaggctgccaccttggctgggaggttgtacagcgggcgtcccaacagtggctcaagagaggacagcaaggggctagcggcacacaggctggaacagtgtgaggtgccagagcgagaggaacaggaacagcaggcagaggtttcaaagccaacccccacccctgaaggcaccagccaggatgtgaccacagtgacactcctgctgcgagccccacctgggagcacatccagctcacctgcctcacccagcagttcacccacccctgcctctcctgagcctccattggagcctgccgaggcccagtgccttacagctgaggttccaggcagcccagagccaccccccagcccacccaagaccaccagccctgagcctcaggagtctccaacgctccccagcactgagggccaggtggtcaacaagcttctgtctggccccaaagagacccctgctgcccagagccccaccagaggcccctctgacaccaagagagcagacgtggctggaccccgaccctgccaacgctccctgtcggtgctcagcccccgccaaccagcccagaaccgagagtccaccccccttgccagcggaccttcctcattccagcgggctggctctgtgcgggatcgtgtccacaagttcacatctgattctcctatggctgctaggctccaggatggcacaccccaggctgccctaagtcccctgacccccgcaaggctcctgggcccctccctcaccagcaccacccctgcctcctcctccagcggctcctcctctcggggccccagtgatacctcctcccggttcagcaaggagcaacgaggagtagcccagcccctggcccagcttcgaagctgcccccaggaggagggccccagggggcggggcttggctgctaggccccttgaaaacagagcaggggggcctgtggcacgttcagaggagcctggtgccccgctgcccgtggccgtcggcactgccgagccagggggcagtatgaagaccacattcaccatcgagatcaaggacggccgtggccaggcctccacaggccgggtgctgctgcccacaggcaaccagagggcagaactgacactggggctgcgggcgcccccgaccctactcagcaccagtagtgggggcaagagcaccatcacccgtgtcaacagccctgggaccctggctcggctgggcagtgtcactcatgtcaccagcttcagccatgccccccccagtagccgaggaggctgcagcatcaagatggaagcagagccagcagagcctctcgctgcagcagtggaagcggccaatggggctgagcagacccgagtgaacaaagcaccagaagggcggagccctctgagcgctgaggagctgatgactattgaggatgaaggagtcttggacaagatgctggatcagagcacggactttgaagagcggaagctcatccgggctgcacttcgtgagctccgacaaaggaagagagaccagcgggacaaggagcgggaacggcggctgcaggaggcacggggccggccaggggaggggcgcggcaacacagccactgagaccaccacgaggcacagccagcgggcagctgatggctctgctgtcagcactgttaccaagactgagcggctcgtccactccaatgatggcacacggacggcccgcaccaccacagtggagtcgagtttcgtgaggcgctcggagaatggcagtggcagcaccatgatgcaaaccaagaccttctcctcttcctcctcatccaagaagatgggcagcatcttcgaccgcgaggaccaggccagcccacgggccggcagcctggcggcgctcgagaaacggcaggccgagaagaagaaagagctgatgaaggcgcagagtctgcccaagacctcagcctcccaggcgcgcaaggccatgattgagaagctggagaaggagggcgcggccggcagccctggcggaccccgcgcagccgtgcagcgatccaccagcttcggggtccccaacgccaacagcatcaagcagatgctgctggactggtgtcgagccaagactcgcggctacgagcacgtcgacatccagaacttctcctccagctggagtgatgggatggccttctgtgccctggtgcacaacttcttccctgaggccttcgactatgggcagcttagccctcagaaccgacgccagaacttcgaggtggccttctcatctgcggagatgctggtggactgtgtgcccctggtggaggtggacgacatgatgatcatgggcaagaagcctgaccccaagtgtgtcttcacctatgtgcagtcgctctacaaccacctgcgacgccacgaactgcgcctgcgcggcaagaatgtctagcctgcccgcccgcatggccagccagtggcaagctgccgcccccactctccgggcaccgtctcctgcctgtgcgtccgcccaccgctgccctgtctgttgcgacaccctcccccccacatacacacgcagcgttttgataaattattggttttcaacga

SEQ ID NO: 323902 - DNA, 2754 bp, Artificial Sequence
  derived and/or modified sequence
atggccgacgaggccctggccggcctggacgagggcgccctgagaaagctgctggaggtgaccgccgacctggccgagagaagaagaatcagaagcgccatcagagagctgcagagacaggagctggagagagaggaggaggccctggccagcaagagattcagagccgagagacaggacaacaaggagaactggctgcacagccagcagagagaggccgagcagagagccgccctggccagactggccggccagctggagagcatgaacgacgtggaggagctgaccgccctgctgagaagcgccggcgagtacgaggagagaaagctgatcagagccgccatcagaagagtgagagcccaggagatcgaggccgccaccctggccggcagactgtacagcggcagacccaacagcggcagcagagaggacagcaagggcctggccgcccacagactggagcagtgcgaggtgcccgagagagaggagcaggagcagcaggccgaggtgagcaagcccacccccacccccgagggcaccagccaggacgtgaccaccgtgaccctgctgctgagagccccccccggcagcaccagcagcagccccgccagccccagcagcagccccacccccgccagccccgagccccccctggagcccgccgaggcccagtgcctgaccgccgaggtgcccggcagccccgagcccccccccagcccccccaagaccaccagccccgagccccaggagagccccaccctgcccagcaccgagggccaggtggtgaacaagctgctgagcggccccaaggagacccccgccgcccagagccccaccagaggccccagcgacaccaagagagccgacgtggccggccccagaccctgccagagaagcctgagcgtgctgagccccagacagcccgcccagaacagagagagcacccccctggccagcggccccagcagcttccagagagccggcagcgtgagagacagagtgcacaagttcaccagcgacagccccatggccgccagactgcaggacggcaccccccaggccgccctgagccccctgacccccgccagactgctgggccccagcctgaccagcaccacccccgccagcagcagcagcggcagcagcagcagaggccccagcgacaccagcagcagattcagcaaggagcagagaggcgtggcccagcccctggcccagctgagaagctgcccccaggaggagggccccagaggcagaggcctggccgccagacccctggagaacagagccggcggccccgtggccagaagcgaggagcccggcgcccccctgcccgtggccgtgggcaccgccgagcccggcggcagcatgaagaccaccttcaccatcgagatcaaggacggcagaggccaggccagcaccggcagagtgctgctgcccaccggcaaccagagagccgagctgaccctgggcctgagagccccccccaccctgctgagcaccagcagcggcggcaagagcaccatcaccagagtgaacagccccggcaccctggccagactgggcagcgtgacccacgtgaccagcttcagccacgccccccccagcagcagaggcggctgcagcatcaagatggaggccgagcccgccgagcccctggccgccgccgtggaggccgccaacggcgccgagcagaccagagtgaacaaggcccccgagggcagaagccccctgagcgccgaggagctgatgaccatcgaggacgagggcgtgctggacaagatgctggaccagagcaccgacttcgaggagagaaagctgatcagagccgccctgagagagctgagacagagaaagagagaccagagagacaaggagagagagagaagactgcaggaggccagaggcagacccggcgagggcagaggcaacaccgccaccgagaccaccaccagacacagccagagagccgccgacggcagcgccgtgagcaccgtgaccaagaccgagagactggtgcacagcaacgacggcaccagaaccgccagaaccaccaccgtggagagcagcttcgtgagaagaagcgagaacggcagcggcagcaccatgatgcagaccaagaccttcagcagcagcagcagcagcaagaagatgggcagcatcttcgacagagaggaccaggccagccccagagccggcagcctggccgccctggagaagagacaggccgagaagaagaaggagctgatgaaggcccagagcctgcccaagaccagcgccagccaggccagaaaggccatgatcgagaagctggagaaggagggcgccgccggcagccccggcggccccagagccgccgtgcagagaagcaccagcttcggcgtgcccaacgccaacagcatcaagcagatgctgctggactggtgcagagccaagaccagaggctacgagcacgtggacatccagaacttcagcagcagctggagcgacggcatggccttctgcgccctggtgcacaacttcttccccgaggccttcgactacggccagctgagcccccagaacagaagacagaacttcgaggtggccttcagcagcgccgagatgctggtggactgcgtgcccctggtggaggtggacgacatgatgatcatgggcaagaagcccgaccccaagtgcgtgttcacctacgtgcagagcctgtacaaccacctgagaagacacgagctgagactgagaggcaagaacgtgtag

SEQ ID NO: 323903 - DNA, 2742 bp, Artificial Sequence
  derived and/or modified sequence
atggccgatgaagctctggcgggcctggatgagggcgccttgcgaaagctacttgaagtaaccgctgatctcgctgagcggcggcgtattcgcagcgccatccgcgaactgcagagacaagagctagagcgggaagaagaagcactggcttctaagagatttcgggcagaaaggcaggacaacaaggaaaattggctgcacagtcagcagcgagaggctgagcagcgcgccgccctggctcggctggcagggcagctggaatccatgaatgacgttgaggagctcacggccttgctgaggagtgccggcgagtatgaagaacgcaagttaatcagagcagccatacgacgcgtgcgggcacaggaaatcgaggccgcaactctggcggggcggctgtattctggtcgtcccaactctggaagcagagaagactctaagggcctagcagcccacaggttagagcagtgcgaagtgccagagcgggaagaacaggagcagcaagctgaagtctccaaaccaaccccaaccccggagggaactagccaggacgtaactaccgtgactttgctgctgagagccccgcccggctccacaagcagctcccccgccagtcccagctcttctcctacacccgcttcaccggaacctcctttggaacctgctgaggcacagtgtctgaccgccgaggtccctggatctccagaacctcctccaagtccaccaaaaaccacttccccagagcctcaggagagcccaactctccctagtacagagggtcaggtggtcaataagctgctgtcaggcccaaaggagactcccgcagcccaatcgcccacgagaggaccaagcgacactaaacgagccgatgttgccggaccccgcccctgtcagcggtcgctgtcagtgctatcacctaggcaacccgctcagaacagagaaagtacccctctcgcgagcgggccgtctagttttcaacgcgccgggtctgttcgggatcgcgttcacaaatttaccagcgattcaccaatggcagctaggctgcaggatggaaccccccaagcagccctttcccctctgcctcgtaaggcacccggccctctgccccatcagcatcacccatgtcttttgttacagcgcctgttgctctcaggccccgacaccagcagccggtttagtaaggagcaaaggggtgtggcgcaacccttagcccagcttcgtagttgtccacaggaggaaggacccaggggccgaggccttgccgcccggcctctggagaatcgggcaggaggaccagtcgcacgctccgaagagcctggagcaccgctaccagttgcggtgggcaccgcagaacccggcggaagcatgaaaacaaccttcaccatagaaattaaagatggccgaggacaagctagcaccggccgcgtcctgttacctacaggaaatcagcgagctgagttgacactggggttaagagctcctcctaccctgctgtcgacatcttctggaggaaaatctacaattactcgagtgaattcccctggcacactcgcgaggctgggctccgtaactcatgtgacatccttctcacacgccccccccagctctcgcggagggtgtagcatcaagatggaggctgagcctgctgagcctctggctgccgctgttgaagctgcaaatggtgccgagcagacccgggtcaacaaagcaccagagggacgctcccctctgtccgccgaggagctgatgaccattgaggacgagggcgttcttgataagatgttggatcagtctacagacttcgaggagagaaagttgattcgtgccgccctcagagaactgcgacaaaggaagcgagatcagagggataaggagcgggagcgcaggcttcaggaagctaggggcagacctggcgagggccgcgggaacaccgcgactgaaacgaccactcgccatagtcaacgcgcagcagacggctcagccgtgagtaccgtgacgaagacagaacgcttggtccacagcaatgacggcaccagaaccgcccgtacaaccactgtcgaaagtagctttgttcggcgtagcgaaaatggcagtggctcgacaatgatgcagaccaaaacctttagcagttcttcttcctccaaaaaaatgggttccattttcgaccgggaagaccaagcatccccgagggcgggctctctcgccgccttggagaagcgacaagcagaaaagaagaaagagttgatgaaagcacagagcctcccaaagacctcggcgtctcaggctcgtaaagccatgatcgaaaaattagagaaggaaggtgcagccggctccccaggaggcccccgagctgccgtccagaggagcactagctttggcgtgcctaacgctaactccatcaagcagatgctgctcgactggtgccgggccaaaactcggggttatgagcacgtggacattcaaaacttttcttcttcttggtctgatggtatggccttctgcgccttggtgcataacttcttcccagaggcctttgactacgggcagcttagtcctcagaatcggcgccagaactttgaggtcgcgttttcctcagcagagacacacgccgactgcccccaactattagacacggaggacatggttcggctccgggagccagattggaagtgcgtctacacgtacattcaggagttttatcgatgtctggtgcagaagggactcgtaaagacaaaaaagtcttag

SEQ ID NO: 323904 - DNA, 2748 bp, Artificial Sequence
  derived and/or modified sequence
atggcagacgaggcattagcagggttagacgagggtgctctgcggaagctgctggaagtgaccgcggatttagctgagcgtcgcagaattaggtctgctatccgcgaattgcaaaggcaggaactggagcgcgaggaagaggcattggccagcaagcgatttagggccgagaggcaggataacaaggagaattggttgcacagccagcagcgcgaggcagagcaacgtgccgcccttgccagattggcgggccagttggagagtatgaacgatgtcgaggagctgacagcactgctccggtcggctggagaatatgaagagaggaaactaattcgcgctgccatccgccgagtcagagctcaggagatcgaggcagccaccctcgccggaaggctgtatagcggcaggccaaacagcggctcccgagaagatagcaaaggtctggcggctcaccgcctagaacagtgtgaggtgcccgaacgtgaggaacaggagcagcaagctgaggtgagcaagccaacaccaacccccgaaggaacttcccaagacgtgaccacggtgaccttactcctcagggctccacccggttcaacttcctccagcccggccagtccgagcagcagtccaacgcccgcaagcccggaaccacccctcgagccggcagaagctcaatgtctcaccgctgaagtgcctggttcccctgagcctccgccctcccccccgaaaacaacatctcctgagccacaagagagccctacattaccctcaactgaggggcaggtggttaacaagctcctgtctggacccaaagagacaccggctgcccaatcccccaccagggggcccagcgatactaaaagggctgatgtcgccggacctcgtccctgccagcgcagcctaagcgttctttccccccgtcagccggctcagaaccgtgaatctacccccctagcaagtggtccgtcctccttccaacgggccgggtccgtacgcgaccgagtgcataagtttactagcgactcccccatggccgctcggttgcaggatggcacaccacaggcggccctctcccccctgacgccagcacgtctgctgggaccaagcctgaccagcacaacgcctgcgtcttctagcagcggctcaagtagtagagggccctccgatactagttctcggttctctaaggagcagaggggtgtcgcacagccccttgctcagctgcgatcctgtccccaggaagagggtccacggggtagaggtctcgccgccagacctctggagaaccgagcaggcggcccagttgccagaagcgaagagccaggcgctcccctgcctgttgccgttggcacagctgaacccggcggctccatgaagacgacattcacaatcgagattaaggacgggcgaggacaggcttccactggacgagtccttctgcctacaggcaatcagagggccgaactgactctaggactacgagccccgccgaccttgctgagcacctctagtgggggaaagagcactattacgagagttaattcccccgggacacttgcccgcttaggatcagtgactcatgtcacctcgttctctcacgcccccccctcttcacgcggaggctgctccatcaaaatggaagctgaacctgcagagccattagcagcagcagtggaagcagctaacggagcagagcaaactcgggtcaataaagcccccgaggggcgaagtccactctctgccgaggagctcatgaccattgaggatgagggtgtcctggacaaaatgctggaccagagtacagacttcgaagaacgcaaactgattcgggctgcccttcgagagcttcgacaacggaagcgcgatcagcgcgataaagagcgagaaagacgactacaagaagccaggggaagaccaggagaggggcgtggaaacactgctaccgaaacgaccactcgccactcacagagagctgctgatggcagcgccgtctcaactgtgaccaaaacagagagactggtgcactcgaatgatggtaccagaaccgcgcggacaactaccgtggaaagttcatttgtccgccgcagtgaaaacggctcggggagcacgatgatgcagacgaagactttttcaagctcctcctcaagcaaaaagatgggcagtattttcgatcgagaagatcaggcttccccccgagctggcagcctcgcagcgctagagaagagacaggccgaaaagaagaaagagcttatgaaggcccagagcctgcccaaaacctcggctagccaggcgcggaaggctatgatcgagaagctcgagaaggaaggagctgccggttctcccgggggccctcgcgccgcagtccaaaggagtacaagttttggagtgccgaatgcaaactcaattaagcagatgctcctggattggtgccgcgctaaaactcgcggatacgaacacgtagatatacaaaacttttcaagttcttggagcgacggcatggccttctgcgcgctggtgcacaacttttttccagaagccttcgattatggccaactaagtcctcaaaatagacggcagaacttcgaggtcgctttttctagtgcagaaacccatgccgattgtcctcaactcttagacaccgaggatatggtgaggcttagggagcctgattggaagtgcgtgtatacttatatccaggagttctatcgctgtctagtacagaaaggcctggttaaaacaaaaaaatcttag

SEQ ID NO: 323905 - DNA, 2742 bp, Artificial Sequence
  derived and/or modified sequence
atggctgatgaggccctggccggcctggatgagggcgccctgaggaagctgctggaggtgacagctgacctggccgagcggcggcgcatccgcagcgccatccgggagctgcagaggcaggagctggagcgggaggaggaggccctggccagcaagcgcttccgggcagagcggcaggacaacaaggagaactggctgcacagccagcagcgggaggccgagcagagagctgccctggcccggctggccggccagctggagagcatgaatgatgtggaggagctgacagccctgctgcggtctgctggggagtatgaggagaggaagctgatccgggccgccatccggcgggtgcgggcccaggagattgaagctgccaccctggccggccgcctgtacagcggccggcccaacagcggcagccgggaggacagcaagggcctggccgcccaccggctggagcagtgtgaggtgcctgagcgggaggagcaggagcagcaggccgaggtgtccaagcccacccccaccccagagggcaccagccaggatgtgaccaccgtgaccctgctgctgcgggcccctcctggcagcaccagcagcagccctgccagccccagcagcagccccaccccagccagccctgagccccccctggagcctgctgaggcccagtgcctgacagctgaggtgcccggcagccctgagcccccacccagcccccccaagaccaccagccctgagccccaggagagccccaccctgcccagcacagagggccaggtggtgaacaagctgctgagcggccccaaggagaccccagctgcccagagccccacccggggccccagcgacaccaagagagcagatgtggccggcccccggccctgccagaggagcctgtctgtgctgagcccccggcagcctgcccagaaccgggagagcacccccctggccagcggccccagcagcttccagagagctggctctgtgcgggacagagtgcacaagttcaccagtgacagccccatggccgcccggctgcaggacggcaccccccaggccgccctgagccccctgcccaggaaggcccctggccccctgccccaccagcaccacccctgcctgctgctgcagaggctgctgctgagcggccctgacaccagcagccgcttcagcaaggagcagaggggcgtggcccagcccctggcccagctgcggagctgcccccaggaggagggcccccggggccggggcctggccgcccggcccctggagaacagagctgggggccctgtggcccggtctgaggagcccggggcccccctgcctgtggccgtgggcacagctgagcccggcggctccatgaagaccaccttcaccatcgagatcaaggatggccggggccaggccagcacaggccgggtgctgctgcccactggaaaccagagagctgagctgaccctgggcctgcgggccccacccaccctgctgagcaccagcagcggcggcaagagcaccatcaccagggtgaacagccctggcaccctggcccggctgggctctgtgacccacgtgaccagcttcagccacgccccacccagcagcagaggaggctgcagcatcaagatggaggccgagcctgctgagcccctggccgctgctgtggaggccgccaatggagctgagcagaccagggtgaacaaggcccctgagggccgcagccccctgtctgctgaggagctgatgaccattgaagatgagggcgtgctggacaagatgctggaccagagcacagactttgaggagaggaagctgatccgggccgccctgcgggagctgcggcagaggaagagggaccagagggacaaggagcgggagcggcggctgcaggaggcccggggccggcctggagagggccggggcaacacagccacagagaccaccaccaggcacagccagagagctgctgatggcagcgctgtgtccacagtgaccaagacagagcggctggtgcacagcaatgatggcaccaggacagcccggaccaccaccgtggagagcagctttgtgagaagaagtgaaaatggaagtggcagcaccatgatgcagaccaagaccttcagcagcagcagcagcagcaagaagatgggcagcatctttgaccgggaggaccaggccagcccccgggccggcagcctggccgccctggagaagaggcaggccgagaagaagaaggagctgatgaaggcccagagcctgcccaagaccagcgccagccaggccaggaaggccatgattgagaagctggagaaggagggcgctgctggcagccctgggggccccagggctgctgtgcagaggagcaccagctttggagtgcccaatgccaacagcatcaagcagatgctgctggactggtgccgggccaagacccggggctatgagcacgtggacatccagaacttcagcagctcctggagcgatggcatggccttctgtgccctggtgcacaacttcttccctgaggcctttgattatggccagctgagcccccagaacagacggcagaactttgaggtggccttcagcagcgctgagacccatgctgactgcccccagctgctggacacagaggacatggtgcggctgcgggagccagactggaagtgtgtgtacacctacatccaggagttctaccgctgcctggtgcagaagggcctggtgaagaccaagaagagctag

SEQ ID NO: 323906 - DNA, 2748 bp, Artificial Sequence
  derived and/or modified sequence
atggctgatgaggccctggccggcctggatgagggcgccctgaggaagctgctggaggtgacagctgacctggccgagcggcggcgcatccgcagcgccatccgggagctgcagaggcaggagctggagcgggaggaggaggccctggccagcaagcgcttccgggcagagcggcaggacaacaaggagaactggctgcacagccagcagcgggaggccgagcagagagctgccctggcccggctggccggccagctggagagcatgaatgatgtggaggagctgacagccctgctgcggtctgctggggagtatgaggagaggaagctgatccgggccgccatccggcgggtgcgggcccaggagattgaagctgccaccctggccggccgcctgtacagcggccggcccaacagcggcagccgggaggacagcaagggcctggccgcccaccggctggagcagtgtgaggtgcctgagcgggaggagcaggagcagcaggccgaggtgtccaagcccacccccaccccagagggcaccagccaggatgtgaccaccgtgaccctgctgctgcgggcccctcctggcagcaccagcagcagccctgccagccccagcagcagccccaccccagccagccctgagccccccctggagcctgctgaggcccagtgcctgacagctgaggtgcccggcagccctgagcccccacccagcccccccaagaccaccagccctgagccccaggagagccccaccctgcccagcacagagggccaggtggtgaacaagctgctgagcggccccaaggagaccccagctgcccagagccccacccggggccccagcgacaccaagagagcagatgtggccggcccccggccctgccagaggagcctgtctgtgctgagcccccggcagcctgcccagaaccgggagagcacccccctggccagcggccccagcagcttccagagagctggctctgtgcgggacagagtgcacaagttcaccagtgacagccccatggccgcccggctgcaggacggcaccccccaggccgccctgagccccctgaccccagcccggctgctgggccccagcctgaccagcaccaccccagccagcagcagcagcggcagcagcagccggggccccagcgacaccagcagccgcttcagcaaggagcagaggggcgtggcccagcccctggcccagctgcggagctgcccccaggaggagggcccccggggccggggcctggccgcccggcccctggagaacagagctgggggccctgtggcccggtctgaggagcccggggcccccctgcctgtggccgtgggcacagctgagcccggcggctccatgaagaccaccttcaccatcgagatcaaggatggccggggccaggccagcacaggccgggtgctgctgcccactggaaaccagagagctgagctgaccctgggcctgcgggccccacccaccctgctgagcaccagcagcggcggcaagagcaccatcaccagggtgaacagccctggcaccctggcccggctgggctctgtgacccacgtgaccagcttcagccacgccccacccagcagcagaggaggctgcagcatcaagatggaggccgagcctgctgagcccctggccgctgctgtggaggccgccaatggagctgagcagaccagggtgaacaaggcccctgagggccgcagccccctgtctgctgaggagctgatgaccattgaagatgagggcgtgctggacaagatgctggaccagagcacagactttgaggagaggaagctgatccgggccgccctgcgggagctgcggcagaggaagagggaccagagggacaaggagcgggagcggcggctgcaggaggcccggggccggcctggagagggccggggcaacacagccacagagaccaccaccaggcacagccagagagctgctgatggcagcgctgtgtccacagtgaccaagacagagcggctggtgcacagcaatgatggcaccaggacagcccggaccaccaccgtggagagcagctttgtgagaagaagtgaaaatggaagtggcagcaccatgatgcagaccaagaccttcagcagcagcagcagcagcaagaagatgggcagcatctttgaccgggaggaccaggccagcccccgggccggcagcctggccgccctggagaagaggcaggccgagaagaagaaggagctgatgaaggcccagagcctgcccaagaccagcgccagccaggccaggaaggccatgattgagaagctggagaaggagggcgctgctggcagccctgggggccccagggctgctgtgcagaggagcaccagctttggagtgcccaatgccaacagcatcaagcagatgctgctggactggtgccgggccaagacccggggctatgagcacgtggacatccagaacttcagcagctcctggagcgatggcatggccttctgtgccctggtgcacaacttcttccctgaggcctttgattatggccagctgagcccccagaacagacggcagaactttgaggtggccttcagcagcgctgagacccatgctgactgcccccagctgctggacacagaggacatggtgcggctgcgggagccagactggaagtgtgtgtacacctacatccaggagttctaccgctgcctggtgcagaagggcctggtgaagaccaagaagagctag

SEQ ID NO: 323907 - DNA, 2742 bp, Artificial Sequence
  derived and/or modified sequence
atggccgacgaggccctggccggcctggacgagggcgccctgcggaaattactggaggtgaccgccgatcttgctgagaggaggcgcatcagatccgcaatcagagaactgcagcgacaagagctcgaaagggaagaggaagccctcgcttctaagcggttccgggcagagcgacaggataacaaggagaactggttacactcacaacagcgggaggccgagcagagagccgccctggccaggcttgcaggccagttggagagcatgaacgatgtggaagagctcaccgctctgttgcggtctgccggcgagtatgaggaacgcaaattaatccgcgcagccattcgccgggtgcgtgcccaggaaatcgaggcagctaccctcgctggcagactgtacagcggcaggcctaattctggcagtcgagaagacagtaagggccttgccgcacacaggttggaacagtgtgaggttccagagagggaagaacaggagcagcaggcagaagtcagcaaaccgacaccgacacccgagggaacgtctcaggatgtcactacagtaacactcctgttgagggctcctcccggctctacgagctcgagcccagctagtccatcctcctctcctacacccgcctcaccagaaccgccgttagagccagctgaagcacaatgtttgaccgcagaggtccctggaagccccgagcccccaccttcacctcctaagacgacatccccagaaccccaggaatcacctacccttccttcaacagaagggcaggtagttaacaagctgctgtctggcccaaaagagactccggcggcacagagccccacaagaggcccgagtgataccaagcgtgcggatgtggcgggcccaagaccttgtcagaggagtttgagcgtgctatctccacggcagccagcgcagaatcgggagtctacccctctggcctctgggccatcctccttccagcgcgctggatcagtccgcgatagagtgcataagttcacatcggacagtcctatggcagcgcgactgcaggatgggaccccgcaggccgccttgtccccactgccacgcaaggcccccgggccactgccccaccagcaccacccctgtctgctgttgcagcgcctgttactgagcggacctgatacatcatcaagattctctaaagaacagcggggcgtggcgcagcccttggcacagctccgatcctgccctcaggaggaggggccccggggacgcgggctggccgctaggcctctggaaaatcgcgcaggaggccctgtcgcacgaagcgaagaacccggtgccccactgccagttgcggtgggcacagctgagccagggggcagcatgaagactacattcacgattgagatcaaagatgggcgcggtcaggcctccacagggcgggtgctgttgccaaccggcaatcagcgggcagaacttacactggggctgagggcccccccgacattgctgtccacgtcctcaggcggaaagagcactattacaagagtgaactcccctgggacattggccagactgggatctgttacgcacgtgacaagtttctctcatgcccctccttcttcccggggaggatgctcgatcaaaatggaggctgagccagcagagccccttgctgccgccgtggaggcagccaacggcgccgagcaaacacgggtgaataaggcacccgaggggaggagccctctgtctgccgaggagttaatgacaatagaggatgaaggcgtgctggacaagatgctggatcagtcgacagactttgaagagcgcaaactgatcagagccgccttaagggaactaaggcaacgaaagcgggatcagagagataaggagcgagagcgtcgcctccaagaggcaaggggaaggccaggagagggccgaggcaatacggcgacggagaccacaacccgccacagccagcgggccgctgatggatcagccgtgtcaacagtaacaaagactgagagactggtgcatagcaatgacggaaccagaacggccagaacgacgacggtggagtcaagttttgtgcggagatctgaaaacgggtcagggagtaccatgatgcaaaccaagacgtttagctccagctcttccagcaaaaaaatgggcagtattttcgacagggaggaccaggcgtccccgagggccggttcactcgctgcactggagaagcggcaggcggagaagaagaaagaactaatgaaggcccagagtctccccaaaaccagtgccagccaggctcggaaagcaatgatcgaaaagctggagaaggaaggcgcagcgggatctccagggggacctagggccgcagtgcagcgcagcacaagttttggagtgccaaacgccaactctatcaagcaaatgctgctggattggtgcagagctaaaactcggggctatgaacacgtcgacatccagaatttcagctcctcctggtccgatgggatggcattctgcgccctcgtgcacaacttcttcccggaggcctttgactatggccagctctccccacagaatcgcagacagaattttgaggtagctttttcaagtgcagaaacacatgccgattgcccgcaactgctggacacagaggatatggtaaggcttcgtgaacctgactggaagtgcgtgtacacatacattcaggaattctatcgctgcttggtccaaaagggcctggtcaagactaagaagtcctag

SEQ ID NO: 323908 - DNA, 2748 bp, Artificial Sequence
  derived and/or modified sequence
atggccgacgaggccctggccggcctggacgagggcgccctgcggaagctgctggaggttaccgcggacctggctgagaggcgaagaataagatcagcaatcagggagctgcagaggcaggagctggagagggaggaggaagccctggcctctaaaaggtttcgagccgagcgacaggataacaaagaaaactggctgcacagccaacaaagagaggccgaacagagagccgccttggccagactggctggccagctggagtcgatgaatgatgtcgaggagctgacagctttgttaagatccgcaggagagtacgaggaaaggaagctgatcagagctgccatacgacgtgtccgcgctcaggagatcgaggccgcaactttggccggcaggctgtatagtggtcggcccaacagtggctcacgcgaagactctaagggactggctgcacatagactggaacagtgcgaagtgccggagcgcgaggagcaggagcaacaggcggaagtcagcaaaccaacccctacacctgaagggacctcccaagatgtaacaacagtgaccctccttctgagggctcctcccggcagcacttccagtagcccagcttcaccgtctagtagcccaacacccgcttctccggagcccccgctcgagccggctgaagcccagtgcctcacggccgaagtgccaggatctccagagcccccaccgtctccccctaaaactaccagtcctgaaccgcaggagtcgccgaccttgccttctacagaaggccaggttgtgaacaagctgcttagcggtcccaaggagacgccagccgcacagtcaccaacccgtggtccttcggacactaagagggccgacgtggccggaccacgcccgtgccaaaggtcactgagcgtgctgtctccaagacagccagcccagaacagagagagcactccccttgcctccggtccttcctctttccagcgtgctggcagcgtcagggacagggtccacaaattcacgagtgactctccaatggccgcacggctccaagacggaaccccgcaagccgccttaagccccctcaccccagctcggctactaggtcctagtctcacaagcactactcccgcttcttcctcgagtggcagttcctcccggggcccttcagatacctcttctagatttagcaaggaacagagaggcgtcgctcagcctctcgcacagcttcggtcttgcccccaggaagaggggcctcggggtagaggactggcagccaggccactcgagaacagagcggggggacccgtggctcggtcagaggaacctggcgcccccctgccagtggctgtgggcaccgccgaacctgggggcagcatgaagacaacctttacaatcgaaatcaaagatggtagaggccaagccagcaccggccgagtactactgcccacaggcaaccaaagggccgaattgaccctggggctgagagcccctccaacgttactttctacatctagcggaggaaaatcaaccattacccgggtgaacagtcccggcacactggcacgactggggagtgtgacgcatgttaccagtttctcccacgcccctcccagcagtcggggaggctgctcaatcaaaatggaggctgaaccagcagaaccactcgctgccgctgtggaggctgcgaatggggccgaacagactagggtgaataaggcacctgaaggaagaagtccactgtctgccgaagagctaatgaccattgaggacgagggagtacttgacaaaatgttggatcagtcaacggattttgaagagcgtaagctgatccgcgccgcactcagagagttgcgtcagagaaagagggatcagagggataaggaaagagaacggcgactgcaggaggcccgggggcgcccaggggaagggaggggcaacacagccacagaaaccactactcgacatagccagagggcggccgacggcagcgcggtcagcactgtaacaaagacagagagactggtccattccaacgacggcactcggacagcacgcacaacaacagtcgagagctcttttgtgcgtaggtccgagaacggatccgggtcgacaatgatgcagaccaagacctttagtagctcttcttcaagcaaaaaaatgggctcaatctttgacagggaggaccaagccagcccacgcgccgggagtctcgccgccttggagaaacgccaggccgagaaaaaaaaggagctgatgaaagcacaatcacttcctaagacatctgcttcccaagcgcgaaaagccatgatagagaagctcgaaaaggagggcgccgccggaagtccgggtggccctagagccgcagtgcagcgctccacctctttcggagtacctaacgccaattccatcaaacaaatgctcctggattggtgtcgggcaaaaacccgagggtatgaacatgtggacattcaaaatttttctagctcttggtcggacgggatggcgttctgcgctctggtccacaatttttttcccgaggcgtttgactatggacaattatctccgcagaatcggaggcagaattttgaagtggctttctcttctgccgaaacacatgccgactgccctcagttactcgacacagaggacatggtgcggctccgggagccagattggaagtgcgtgtacacatacattcaggagttttacaggtgccttgtgcagaagggcctggtaaaaactaagaagtcctag

SEQ ID NO: 323909 - DNA, 2742 bp, Artificial Sequence
  derived and/or modified sequence
atggcagacgaggcgctggcagggctcgatgagggggcactgcggaaactgctcgaagtcaccgctgacctagctgaaaggagacgcataaggagtgcaattcgtgagctgcagcggcaggagctggaacgggaggaggaagcactagcctcaaagaggttcagagccgaacgacaggacaacaaggagaactggctgcacagtcagcaaagagaggctgagcagcgagccgcactggccagactggcaggccagttagaaagcatgaacgatgtggaggagctgaccgcacttcttcggtccgctggagagtacgaagaaagaaagctgatccgagctgcaatcaggagggtgcgtgcacaagaaattgaggctgccacacttgcagggaggctgtattcagggcgaccaaactctggcagtcgcgaggactcaaagggcctggcagcgcatcgcctggaacagtgcgaagtgcccgaacgggaggagcaggagcaacaggcggaagtcagcaaacctacacccacgccggaaggtacttctcaggatgtcacgaccgtgacattgctccttcgggcacccccaggctctacttcctccagtcctgctagtccaagcagctccccaacaccagcgagccctgagccccctctggagcccgctgaggcccagtgcctgaccgccgaggtgccaggtagccccgaaccgccaccttcaccgccaaagactacttccccagaaccacaggagtctcctaccctgccaagcacagaggggcaagtggttaacaagttgctgtcggggccaaaggaaacacccgcagctcagtctcctacccgaggaccaagcgacacaaagcgtgccgatgtcgcaggcccaagaccttgtcagaggtctctctcagtgttatcacctagacagcctgcccaaaaccgggaaagtactcccctcgcttcaggccctagctctttccagcgggcaggcagcgtccgggatagggtgcataagttcacctctgactcgccaatggccgcacgcttgcaggatggcacgccacaggccgcactctcaccgttacccaggaaggctcccggacctctccctcaccagcatcacccgtgcctccttctccagaggcttcttctgtccggaccagatacctcttcacgtttttctaaggagcagcgcggtgtcgctcagccacttgcccaactccgcagctgcccccaggaagagggtcctaggggtagggggctggccgctaggcctctggaaaatagggctggcggacctgtggctcgaagtgaggagcctggcgcaccgctccctgtggcagttggcaccgccgagccgggtggcagtatgaagaccacctttacgatagagataaaagacgggcgtggacaggctagcactggacgggtcctgctgcctacaggcaaccagcgagccgaactgaccctgggtcttcgcgcacccccaaccctcctgagcacctctagcggtggcaaatctaccataactcgagtcaatagtccagggacactcgccaggctgggatcagtcacccatgtcacatcgtttagccacgctcccccatccagtagaggaggctgtagcattaaaatggaagctgagccggcagagcctctggctgcggctgtggaggctgccaacggagcggaacagactagagtaaacaaagccccagaggggaggagccccctttccgcagaggaacttatgaccatcgaagatgagggggtgctggataagatgctcgaccagagcactgactttgaagagcgaaagctgatccgtgcagccctgcgcgagctccggcagagaaaaagggatcagagagacaaggagagggagcgtcgtctccaggaagcgaggggacgtcccggtgaaggtcgaggaaacactgccactgagaccaccacacgacattcccagcgcgctgccgacggaagcgccgtgagcacagtcaccaagactgaaagactggtccactccaatgatggcacaaggaccgccaggactacgacagtggagtctagctttgtgaggcgatccgagaacgggtcaggaagcacaatgatgcagaccaagaccttctcttccagcagcagcagcaagaagatgggcagcattttcgatagagaagatcaagctagccccagagcagggagcctcgccgctctggaaaagcgccaagctgagaagaagaaggaactcatgaaagcccagtccctgcccaagacatcagcttcacaggctcgaaaagctatgatcgagaagttagagaaggagggcgctgcagggtctcctggtgggcctcgagctgccgtccaacgctccacctcgtttggcgttcccaacgcaaattctatcaagcagatgctgttagattggtgtcgggcaaagactaggggatacgaacacgttgacatccagaacttctctagctcttggtccgatggtatggccttttgcgccctcgtccataactttttccccgaggctttcgattacggtcagttgtccccccagaataggaggcagaattttgaggtcgctttctcgtcagccgaaacccacgccgactgcccccaactcttagatactgaagacatggtgcgcctgcgcgaacctgattggaagtgtgtgtatacatatattcaggaattttacaggtgccttgtgcagaagggcctggtgaaaacgaagaaaagctag

SEQ ID NO: 323910 - DNA, 2748 bp, Artificial Sequence
  derived and/or modified sequence
atggccgatgaggccctcgccggactggacgagggagcccttcgtaagttgctggaggtaacagcagacctcgccgagagaaggcggatacgcagtgcgatcagagaattgcagaggcaagaactggagcgcgaggaggaagctctcgccagcaaaaggttccgtgccgagaggcaggataataaggagaactggttgcacagccaacagagagaggcagagcagcgggcagcgcttgccagattggccggtcagcttgaaagtatgaacgacgtcgaggagcttactgccctccttcgatccgccggagagtacgaagaacgaaagctgattagggccgcaatcaggcgtgtaagggcgcaggagattgaagcagctacactggctggcaggctgtatagtggcaggcctaattcagggtccagggaggactccaaaggcctggccgcacacaggctagaacagtgtgaagtgcccgagagggaggagcaggaacaacaggcagaggttagtaaaccaacccctacacccgaggggacttcacaggatgtaacaaccgtgacacttctgcttcgagccccaccaggcagtaccagctcctcccccgcaagtcccagcagctcacccactcctgcgagccccgaaccccctctcgaaccggctgaagcacagtgccttacagcagaggtgcccggaagccctgaaccgcctcccagcccccctaagaccaccagcccagaaccacaggaaagtcctactctgccttccacagagggccaggtggtcaacaagctgctatctggacctaaggagacccccgctgcgcagtctccgactagggggcctagcgatacaaagagggcagacgtcgctggaccaagaccatgccagcgcagtctgagtgtcctctcgccacggcaaccagcacagaaccgtgagtcaacaccactggcgagtggtccgagcagcttccagcgcgctggctcagtgcgcgaccgggtgcacaaatttacatctgactccccgatggcagccaggcttcaagacggaactccccaggccgctttaagcccgcttactcccgcacggctgctggggccatctctgacttccacgacaccggctagttcgtcatccgggagctcttctagaggacctagcgatacaagcagcagattctcgaaagaacagcgcggtgttgcacaacctctggctcagctgcggtcttgtcctcaagaggaaggtcccaggggccgagggctggctgcccgtccactcgagaacagggccggaggaccggtagcaaggtccgaagagcctggcgcacctttaccagttgctgtgggtacagccgagcccggaggttcaatgaaaacaacattcaccattgagattaaggacgggcgaggtcaagcttccacaggaagagttcttcttccgaccggaaaccaacgggcagagctcacgttgggcctacgcgcaccgccaactttattgtcaacgtcttcggggggaaagtcaacaatcactcgggtcaacagccctggcactctcgccagacttggctcggtgacccatgtgacttcgttctcccatgcaccaccttctagtaggggtggttgcagtataaagatggaagccgagcctgcagaacctctggctgcagctgtagaagcagctaacggcgcagaacagacacgcgtaaataaggcacccgagggacgctcacctctgtccgcggaagagctcatgaccattgaggacgagggcgtactggataagatgttagaccaaagtacagattttgaagagaggaagctcatcagggccgcacttcgagaactaagacagcggaaaagggaccaacgggacaaggagcgcgaacgaaggctacaagaagcgagggggaggcccggagaagggaggggtaataccgctacagaaacaactactcggcactcacaacgcgctgctgacggatccgctgtgtcaacagtaaccaaaacagagcggctggtgcattcgaatgatggcactcgaaccgcccgaaccactaccgtggagtcctcttttgtaagaaggagcgagaatggatcgggctcaacaatgatgcaaaccaagaccttctcgtcttcgagtagttccaaaaagatggggtcaatcttcgatcgagaagatcaggcctccccacgcgctggcagcctcgccgcattagagaaacgccaggctgaaaagaagaaagaacttatgaaggctcagtccctgccaaaaaccagcgccagccaggccagaaaagctatgatcgaaaagctcgagaaggaaggagctgccggatctcctggcggacccagagctgcagttcaaagatcaacaagttttggggttccgaacgccaacagcataaagcaaatgctgctggattggtgcagggcaaaaacgcgcggatatgaacatgtcgatatccagaacttttcctcctcttggagcgacggcatggccttttgtgctcttgtccataatttctttcccgaagctttcgactacggccaactgtctccacagaacaggagacagaactttgaggtagctttttcctctgccgaaacgcatgctgactgtcctcagctgctggacaccgaggatatggtgaggttacgggagccagactggaagtgtgtgtatacttatatccaggaattttataggtgtttggtgcaaaaaggactcgtgaagactaaaaagtcttag

SEQ ID NO: 323911 - DNA, 3288 bp, Artificial Sequence
  derived and/or modified sequence
cagaatccaggggacggttgctgagcgggcctgggacagcgggtcgcggcacctccggcctgcgcgtgtctaatccgtctgtcgggtcccgaaagagctaagccgagcctgcgccggacgggtgggctggactgagagaattctctgagctggtgacaggtgccacaggcactggggatctcaccagaaaggaaccgacggagctaggggccagcgagatggcggacgaggccttagctgggctggatgagggagcccttcggaagctgctggaggtcacagcagatctggcagagcggcggcgcatccgctcagccatccgggaactgcagcggcaggagctggagcgcgaggaggaggccctggcatccaagcgtttccgtgccgagcggcaggacaacaaggagaactggctgcactctcagcagcgggaagctgagcagcgggctgccctggcacggctggcagggcagctggagtccatgaacgatgtggaggaattgactgcactgttgcgaagcgctggtgagtatgaggagcgcaagctgatccgagctgccatccgccgtgtacgggctcaggagattgaggctgccaccttggctgggaggttgtacagcgggcgtcccaacagtggctcaagagaggacagcaaggggctagcggcacacaggctggaacagtgtgaggtgccagagcgagaggaacaggaacagcaggcagaggtttcaaagccaacccccacccctgaaggcaccagccaggatgtgaccacagtgacactcctgctgcgagccccacctgggagcacatccagctcacctgcctcacccagcagttcacccacccctgcctctcctgagcctccattggagcctgccgaggcccagtgccttacagctgaggttccaggcagcccagagccaccccccagcccacccaagaccaccagccctgagcctcaggagtctccaacgctccccagcactgagggccaggtggtcaacaagcttctgtctggccccaaagagacccctgctgcccagagccccaccagaggcccctctgacaccaagagagcagacgtggctggaccccgaccctgccaacgctccctgtcggtgctcagcccccgccaaccagcccagaaccgagagtccaccccccttgccagcggaccttcctcattccagcgggctggctctgtgcgggatcgtgtccacaagttcacatctgattctcctatggctgctaggctccaggatggcacaccccaggctgccctaagtcccctgccccgcaaggctcctgggcccctccctcaccagcaccacccctgcctcctcctccagcggctcctcctctcggggcccgatacctcctcccggttcagcaaggagcaacgaggagtagcccagcccctggcccagcttcgaagctgcccccaggaggagggccccagggggcggggcttggctgctaggccccttgaaaacagagcaggggggcctgtggcacgttcagaggagcctggtgccccgctgcccgtggccgtcggcactgccgagccagggggcagtatgaagaccacattcaccatcgagatcaaggacggccgtggccaggcctccacaggccgggtgctgctgcccacaggcaaccagagggcagaactgacactggggctgcgggcgcccccgaccctactcagcaccagtagtgggggcaagagcaccatcacccgtgtcaacagccctgggaccctggctcggctgggcagtgtcactcatgtcaccagcttcagccatgccccccccagtagccgaggaggctgcagcatcaagatggaagcagagccagcagagcctctcgctgcagcagtggaagcggccaatggggctgagcagacccgagtgaacaaagcaccagaagggcggagccctctgagcgctgaggagctgatgactattgaggatgaaggagtcttggacaagatgctggatcagagcacggactttgaagagcggaagctcatccgggctgcacttcgtgagctccgacaaaggaagagagaccagcgggacaaggagcgggaacggcggctgcaggaggcacggggccggccaggggaggggcgcggcaacacagccactgagaccaccacgaggcacagccagcgggcagctgatggctctgctgtcagcactgttaccaagactgagcggctcgtccactccaatgatggcacacggacggcccgcaccaccacagtggagtcgagtttcgtgaggcgctcggagaatggcagtggcagcaccatgatgcaaaccaagaccttctcctcttcctcctcatccaagaagatgggcagcatcttcgaccgcgaggaccaggccagcccacgggccggcagcctggcggcgctcgagaaacggcaggccgagaagaagaaagagctgatgaaggcgcagagtctgcccaagacctcagcctcccaggcgcgcaaggccatgattgagaagctggagaaggagggcgcggccggcagccctggcggaccccgcgcagccgtgcagcgatccaccagcttcggggtccccaacgccaacagcatcaagcagatgctgctggactggtgtcgagccaagactcgcggctacgagcacgtcgacatccagaacttctcctccagctggagtgatgggatggccttctgtgccctggtgcacaacttcttccctgaggccttcgactatgggcagcttagccctcagaaccgacgccagaacttcgaggtggccttctcatctgcggagacccatgcggactgcccgcagctcctggatacagaggacatggtgcggcttcgagagcctgactggaagtgcgtgtacacgtacatccaggaattctaccgctgtctggtccagaaggggctggtaaaaaccaaaaagtcctaacccctgctcggggccccacggatgctggtggactgtgtgcccctggtggaggtggacgacatgatgatcatgggcaagaagcctgaccccaagtgtgtcttcacctatgtgcagtcgctctacaaccacctgcgacgccacgaactgcgcctgcgcggcaagaatgtctagcctgcccgcccgcatggccagccagtggcaagctgccgcccccactctccgggcaccgtctcctgcctgtgcgtccgcccaccgctgccctgtctgttgcgacaccctcccccccacatacacacgcagcgttttgataaattattggttttcaacg

SEQ ID NO: 323912 - DNA, 3295 bp, Artificial Sequence
  derived and/or modified sequence
cagaatccaggggacggttgctgagcgggcctgggacagcgggtcgcggcacctccggcctgcgcgtgtctaatccgtctgtcgggtcccgaaagagctaagccgagcctgcgccggacgggtgggctggactgagagaattctctgagctggtgacaggtgccacaggcactggggatctcaccagaaaggaaccgacggagctaggggccagcgagatggcggacgaggccttagctgggctggatgagggagcccttcggaagctgctggaggtcacagcagatctggcagagcggcggcgcatccgctcagccatccgggaactgcagcggcaggagctggagcgcgaggaggaggccctggcatccaagcgtttccgtgccgagcggcaggacaacaaggagaactggctgcactctcagcagcgggaagctgagcagcgggctgccctggcacggctggcagggcagctggagtccatgaacgatgtggaggaattgactgcactgttgcgaagcgctggtgagtatgaggagcgcaagctgatccgagctgccatccgccgtgtacgggctcaggagattgaggctgccaccttggctgggaggttgtacagcgggcgtcccaacagtggctcaagagaggacagcaaggggctagcggcacacaggctggaacagtgtgaggtgccagagcgagaggaacaggaacagcaggcagaggtttcaaagccaacccccacccctgaaggcaccagccaggatgtgaccacagtgacactcctgctgcgagccccacctgggagcacatccagctcacctgcctcacccagcagttcacccacccctgcctctcctgagcctccattggagcctgccgaggcccagtgccttacagctgaggttccaggcagcccagagccaccccccagcccacccaagaccaccagccctgagcctcaggagtctccaacgctccccagcactgagggccaggtggtcaacaagcttctgtctggccccaaagagacccctgctgcccagagccccaccagaggcccctctgacaccaagagagcagacgtggctggaccccgaccctgccaacgctccctgtcggtgctcagcccccgccaaccagcccagaaccgagagtccaccccccttgccagcggaccttcctcattccagcgggctggctctgtgcgggatcgtgtccacaagttcacatctgattctcctatggctgctaggctccaggatggcacaccccaggctgccctaagtcccctgacccccgcaaggctcctgggcccctccctcaccagcaccacccctgcctcctcctccagcggctcctcctctcggggccccagtgatacctcctcccggttcagcaaggagcaacgaggagtagcccagcccctggcccagcttcgaagctgcccccaggaggagggccccagggggcggggcttggctgctaggccccttgaaaacagagcaggggggcctgtggcacgttcagaggagcctggtgccccgctgcccgtggccgtcggcactgccgagccagggggcagtatgaagaccacattcaccatcgagatcaaggacggccgtggccaggcctccacaggccgggtgctgctgcccacaggcaaccagagggcagaactgacactggggctgcgggcgcccccgaccctactcagcaccagtagtgggggcaagagcaccatcacccgtgtcaacagccctgggaccctggctcggctgggcagtgtcactcatgtcaccagcttcagccatgccccccccagtagccgaggaggctgcagcatcaagatggaagcagagccagcagagcctctcgctgcagcagtggaagcggccaatggggctgagcagacccgagtgaacaaagcaccagaagggcggagccctctgagcgctgaggagctgatgactattgaggatgaaggagtcttggacaagatgctggatcagagcacggactttgaagagcggaagctcatccgggctgcacttcgtgagctccgacaaaggaagagagaccagcgggacaaggagcgggaacggcggctgcaggaggcacggggccggccaggggaggggcgcggcaacacagccactgagaccaccacgaggcacagccagcgggcagctgatggctctgctgtcagcactgttaccaagactgagcggctcgtccactccaatgatggcacacggacggcccgcaccaccacagtggagtcgagtttcgtgaggcgctcggagaatggcagtggcagcaccatgatgcaaaccaagaccttctcctcttcctcctcatccaagaagatgggcagcatcttcgaccgcgaggaccaggccagcccacgggccggcagcctggcggcgctcgagaaacggcaggccgagaagaagaaagagctgatgaaggcgcagagtctgcccaagacctcagcctcccaggcgcgcaaggccatgattgagaagctggagaaggagggcgcggccggcagccctggcggaccccgcgcagccgtgcagcgatccaccagcttcggggtccccaacgccaacagcatcaagcagatgctgctggactggtgtcgagccaagactcgcggctacgagcacgtcgacatccagaacttctcctccagctggagtgatgggatggccttctgtgccctggtgcacaacttcttccctgaggccttcgactatgggcagcttagccctcagaaccgacgccagaacttcgaggtggccttctcatctgcggagacccatgcggactgcccgcagctcctggatacagaggacatggtgcggcttcgagagcctgactggaagtgcgtgtacacgtacatccaggaattctaccgctgtctggtccagaaggggctggtaaaaaccaaaaagtcctaacccctgctcggggccccacggatgctggtggactgtgtgcccctggtggaggtggacgacatgatgatcatgggcaagaagcctgaccccaagtgtgtcttcacctatgtgcagtcgctctacaaccacctgcgacgccacgaactgcgcctgcgcggcaagaatgtctagcctgcccgcccgcatggccagccagtggcaagctgccgcccccactctccgggcaccgtctcctgcctgtgcgtccgcccaccgctgccctgtctgttgcgacaccctcccccccacatacacacgcagcgttttgataaattattggttttcaacga

SEQ ID NO: 323913 - DNA, 2742 bp, Artificial Sequence
  derived and/or modified sequence
atggccgacgaggccctggccggcctggacgagggcgccctgagaaagctgctggaggtgaccgccgacctggccgagagaagaagaatcagaagcgccatcagagagctgcagagacaggagctggagagagaggaggaggccctggccagcaagagattcagagccgagagacaggacaacaaggagaactggctgcacagccagcagagagaggccgagcagagagccgccctggccagactggccggccagctggagagcatgaacgacgtggaggagctgaccgccctgctgagaagcgccggcgagtacgaggagagaaagctgatcagagccgccatcagaagagtgagagcccaggagatcgaggccgccaccctggccggcagactgtacagcggcagacccaacagcggcagcagagaggacagcaagggcctggccgcccacagactggagcagtgcgaggtgcccgagagagaggagcaggagcagcaggccgaggtgagcaagcccacccccacccccgagggcaccagccaggacgtgaccaccgtgaccctgctgctgagagccccccccggcagcaccagcagcagccccgccagccccagcagcagccccacccccgccagccccgagccccccctggagcccgccgaggcccagtgcctgaccgccgaggtgcccggcagccccgagcccccccccagcccccccaagaccaccagccccgagccccaggagagccccaccctgcccagcaccgagggccaggtggtgaacaagctgctgagcggccccaaggagacccccgccgcccagagccccaccagaggccccagcgacaccaagagagccgacgtggccggccccagaccctgccagagaagcctgagcgtgctgagccccagacagcccgcccagaacagagagagcacccccctggccagcggccccagcagcttccagagagccggcagcgtgagagacagagtgcacaagttcaccagcgacagccccatggccgccagactgcaggacggcaccccccaggccgccctgagccccctgcccagaaaggcccccggccccctgccccaccagcaccacccctgcctgctgctgcagagactgctgctgagcggccccgacaccagcagcagattcagcaaggagcagagaggcgtggcccagcccctggcccagctgagaagctgcccccaggaggagggccccagaggcagaggcctggccgccagacccctggagaacagagccggcggccccgtggccagaagcgaggagcccggcgcccccctgcccgtggccgtgggcaccgccgagcccggcggcagcatgaagaccaccttcaccatcgagatcaaggacggcagaggccaggccagcaccggcagagtgctgctgcccaccggcaaccagagagccgagctgaccctgggcctgagagccccccccaccctgctgagcaccagcagcggcggcaagagcaccatcaccagagtgaacagccccggcaccctggccagactgggcagcgtgacccacgtgaccagcttcagccacgccccccccagcagcagaggcggctgcagcatcaagatggaggccgagcccgccgagcccctggccgccgccgtggaggccgccaacggcgccgagcagaccagagtgaacaaggcccccgagggcagaagccccctgagcgccgaggagctgatgaccatcgaggacgagggcgtgctggacaagatgctggaccagagcaccgacttcgaggagagaaagctgatcagagccgccctgagagagctgagacagagaaagagagaccagagagacaaggagagagagagaagactgcaggaggccagaggcagacccggcgagggcagaggcaacaccgccaccgagaccaccaccagacacagccagagagccgccgacggcagcgccgtgagcaccgtgaccaagaccgagagactggtgcacagcaacgacggcaccagaaccgccagaaccaccaccgtggagagcagcttcgtgagaagaagcgagaacggcagcggcagcaccatgatgcagaccaagaccttcagcagcagcagcagcagcaagaagatgggcagcatcttcgacagagaggaccaggccagccccagagccggcagcctggccgccctggagaagagacaggccgagaagaagaaggagctgatgaaggcccagagcctgcccaagaccagcgccagccaggccagaaaggccatgatcgagaagctggagaaggagggcgccgccggcagccccggcggccccagagccgccgtgcagagaagcaccagcttcggcgtgcccaacgccaacagcatcaagcagatgctgctggactggtgcagagccaagaccagaggctacgagcacgtggacatccagaacttcagcagcagctggagcgacggcatggccttctgcgccctggtgcacaacttcttccccgaggccttcgactacggccagctgagcccccagaacagaagacagaacttcgaggtggccttcagcagcgccgagacccacgccgactgcccccagctgctggacaccgaggacatggtgagactgagagagcccgactggaagtgcgtgtacacctacatccaggagttctacagatgcctggtgcagaagggcctggtgaagaccaagaagagctag

SEQ ID NO: 323914 - DNA, 2748 bp, Artificial Sequence
  derived and/or modified sequence
atggccgacgaggccctggccggcctggacgagggcgccctgagaaagctgctggaggtgaccgccgacctggccgagagaagaagaatcagaagcgccatcagagagctgcagagacaggagctggagagagaggaggaggccctggccagcaagagattcagagccgagagacaggacaacaaggagaactggctgcacagccagcagagagaggccgagcagagagccgccctggccagactggccggccagctggagagcatgaacgacgtggaggagctgaccgccctgctgagaagcgccggcgagtacgaggagagaaagctgatcagagccgccatcagaagagtgagagcccaggagatcgaggccgccaccctggccggcagactgtacagcggcagacccaacagcggcagcagagaggacagcaagggcctggccgcccacagactggagcagtgcgaggtgcccgagagagaggagcaggagcagcaggccgaggtgagcaagcccacccccacccccgagggcaccagccaggacgtgaccaccgtgaccctgctgctgagagccccccccggcagcaccagcagcagccccgccagccccagcagcagccccacccccgccagccccgagccccccctggagcccgccgaggcccagtgcctgaccgccgaggtgcccggcagccccgagcccccccccagcccccccaagaccaccagccccgagccccaggagagccccaccctgcccagcaccgagggccaggtggtgaacaagctgctgagcggccccaaggagacccccgccgcccagagccccaccagaggccccagcgacaccaagagagccgacgtggccggccccagaccctgccagagaagcctgagcgtgctgagccccagacagcccgcccagaacagagagagcacccccctggccagcggccccagcagcttccagagagccggcagcgtgagagacagagtgcacaagttcaccagcgacagccccatggccgccagactgcaggacggcaccccccaggccgccctgagccccctgacccccgccagactgctgggccccagcctgaccagcaccacccccgccagcagcagcagcggcagcagcagcagaggccccagcgacaccagcagcagattcagcaaggagcagagaggcgtggcccagcccctggcccagctgagaagctgcccccaggaggagggccccagaggcagaggcctggccgccagacccctggagaacagagccggcggccccgtggccagaagcgaggagcccggcgcccccctgcccgtggccgtgggcaccgccgagcccggcggcagcatgaagaccaccttcaccatcgagatcaaggacggcagaggccaggccagcaccggcagagtgctgctgcccaccggcaaccagagagccgagctgaccctgggcctgagagccccccccaccctgctgagcaccagcagcggcggcaagagcaccatcaccagagtgaacagccccggcaccctggccagactgggcagcgtgacccacgtgaccagcttcagccacgccccccccagcagcagaggcggctgcagcatcaagatggaggccgagcccgccgagcccctggccgccgccgtggaggccgccaacggcgccgagcagaccagagtgaacaaggcccccgagggcagaagccccctgagcgccgaggagctgatgaccatcgaggacgagggcgtgctggacaagatgctggaccagagcaccgacttcgaggagagaaagctgatcagagccgccctgagagagctgagacagagaaagagagaccagagagacaaggagagagagagaagactgcaggaggccagaggcagacccggcgagggcagaggcaacaccgccaccgagaccaccaccagacacagccagagagccgccgacggcagcgccgtgagcaccgtgaccaagaccgagagactggtgcacagcaacgacggcaccagaaccgccagaaccaccaccgtggagagcagcttcgtgagaagaagcgagaacggcagcggcagcaccatgatgcagaccaagaccttcagcagcagcagcagcagcaagaagatgggcagcatcttcgacagagaggaccaggccagccccagagccggcagcctggccgccctggagaagagacaggccgagaagaagaaggagctgatgaaggcccagagcctgcccaagaccagcgccagccaggccagaaaggccatgatcgagaagctggagaaggagggcgccgccggcagccccggcggccccagagccgccgtgcagagaagcaccagcttcggcgtgcccaacgccaacagcatcaagcagatgctgctggactggtgcagagccaagaccagaggctacgagcacgtggacatccagaacttcagcagcagctggagcgacggcatggccttctgcgccctggtgcacaacttcttccccgaggccttcgactacggccagctgagcccccagaacagaagacagaacttcgaggtggccttcagcagcgccgagacccacgccgactgcccccagctgctggacaccgaggacatggtgagactgagagagcccgactggaagtgcgtgtacacctacatccaggagttctacagatgcctggtgcagaagggcctggtgaagaccaagaagagctag

SEQ ID NO: 323915 - protein, 295 aa, Artificial Sequence
  derived and/or modified sequence
MEAEPAEPLAAAVEAANGAEQTRVNKAPEGRSPLSAEELMTIEDEGVLDKMLDQSTDFEERKLIRAALRELRQRKRDGSGSTMMQTKTFSSSSSSKKMGSIFDREDQASPRAGSLAALEKRQAEKKKELMKAQSLPKTSASQARKAMIEKLEKEGAAGSPGGPRAAVQRSTSFGVPNANSIKQMLLDWCRAKTRGYEHVDIQNFSSSWSDGMAFCALVHNFFPEAFDYGQLSPQNRRQNFEVAFSSAETHADCPQLLDTEDMVRLREPDWKCVYTYIQEFYRCLVQKGLVKTKKS

SEQ ID NO: 323916 - DNA, 888 bp, Artificial Sequence
  derived and/or modified sequence
atggaagccgaacccgctgaacccttagccgccgcagtcgaagccgctaacggcgctgaacaaactcgggtcaacaaggcaccggaaggcaggagtccgctgtccgccgaagaactgatgaccattgaagatgagggagttttagacaagatgctggatcaaagcaccgacttcgaagaacgcaaattaatccgggcagcacttcgtgaactaaggcaacggaaacgagacggctccggatccacgatgatgcagacaaaaaccttctccagctcgtcttcgtctaaaaagatgggcagtatatttgatagagaagatcaggcttctccccgggccggttcactcgccgctttggaaaagaggcaggcggaaaaaaagaaggagctgatgaaagcccaaagcctgccgaagaccagcgccagtcaggctagaaaagccatgattgaaaagctggaaaaggaaggagctgccggcagtcctggtggcccgcgggctgcagtgcagcgctctacctctttcggggttcccaacgcgaattctattaaacaaatgctgctcgattggtgcagggctaagacacggggctatgaacacgttgacatccagaatttctcgtccagctggtctgatgggatggctttctgcgctctagtgcacaactttttcccggaagccttcgattacggtcagctctcccctcagaaccggcgtcagaactttgaagtggccttttcctcagccgagacccacgcagattgtccccagcttctcgacacagaggacatggttcgcctgcgcgaacccgattggaaatgcgtgtacacttatatccaggaattttaccggtgcctcgtgcagaagggccttgtgaagacaaaaaagtcctag

SEQ ID NO: 323917 - DNA, 888 bp, Artificial Sequence
  derived and/or modified sequence
atggaggccgagcctgctgagcccctggccgctgctgtggaggccgccaatggagctgagcagaccagggtgaacaaggcccctgagggccgcagccccctgtctgctgaggagctgatgaccattgaagatgagggcgtgctggacaagatgctggaccagagcacagactttgaggagaggaagctgatccgggccgccctgcgggagctgcggcagaggaagagagatggcagcggcagcaccatgatgcagaccaagaccttcagcagcagcagcagcagcaagaagatgggcagcatctttgaccgggaggaccaggccagcccccgggccggcagcctggccgccctggagaagaggcaggccgagaagaagaaggagctgatgaaggcccagagcctgcccaagaccagcgccagccaggccaggaaggccatgattgagaagctggagaaggagggcgctgctggcagccctgggggccccagggctgctgtgcagaggagcaccagctttggagtgcccaatgccaacagcatcaagcagatgctgctggactggtgccgggccaagacccggggctatgagcacgtggacatccagaacttcagcagctcctggagcgatggcatggccttctgtgccctggtgcacaacttcttccctgaggcctttgattatggccagctgagcccccagaacagacggcagaactttgaggtggccttcagcagcgctgagacccatgctgactgcccccagctgctggacacagaggacatggtgcggctgcgggagccagactggaagtgtgtgtacacctacatccaggagttctaccgctgcctggtgcagaagggcctggtgaagaccaagaagagctag

SEQ ID NO: 323918 - DNA, 888 bp, Artificial Sequence
  derived and/or modified sequence
atggaggccgagcccgccgagcccctggccgccgccgtggaggccgcaaacggagccgagcagactagagttaataaggcccctgaaggcagatcacccttaagtgctgaggaacttatgaccatcgaagacgagggcgtgctcgataaaatgttagaccagtcaaccgatttcgaagagcggaagttaatcagggctgcattgcgggagctaagacaacgcaagagagacggcagtgggagcaccatgatgcagacgaagaccttcagcagctcctctagctcaaagaagatggggagtatattcgaccgtgaggaccaagcatcaccgcgtgctggcagccttgccgcactggaaaagcgccaggccgagaagaagaaggaactgatgaaagcgcaaagcctgcccaagaccagtgcaagccaagcgaggaaggcgatgattgagaagctggagaaagagggcgctgctggatctcctgggggacctcgagctgcagttcaacgctcgacctccttcggcgtcccaaatgccaactccataaagcagatgctcctggattggtgcagagccaagacgcgaggttacgagcacgttgatatccagaactttagttcctcatggtctgatggaatggcgttttgtgcactggtgcataactttttccctgaagcttttgactacggccaacttagcccccaaaacaggcgacagaattttgaggtcgcattctcctctgccgaaacccatgccgattgtccacagctgttagatacagaagacatggtgagattaagggaaccagattggaagtgcgtgtacacttatatccaggagttctatcgatgcctggtgcaaaaaggcctggtgaagaccaagaaatcttag

SEQ ID NO: 323919 - DNA, 888 bp, Artificial Sequence
  derived and/or modified sequence
atggaggctgagcccgcagagcctcttgccgcagcggtagaagccgctaatggtgccgaacagactcgcgtgaataaagcaccagagggcaggtcacctctgtcagccgaggagctcatgacaattgaggatgagggggtgctggacaagatgctggatcagtccacggacttcgaagagcggaagctcatacgtgctgccctcagagagttgcggcagcggaaacgcgacggtagtggcagcaccatgatgcagacaaaaacgtttagttccagcagctcatctaagaagatgggttccatcttcgatagagaggaccaggcttcgccaagggccggatcgctagcagcacttgaaaaaagacaggcagagaagaaaaaagagctaatgaaggcacagagcctcccaaaaacgtccgctagccaggctcggaaagccatgattgagaaacttgaaaaagagggcgcagcaggctctccgggagggccacgggcagcagtccagaggtctacctcattcggggtccctaacgccaactcgattaagcaaatgctcctggattggtgtcgtgctaaaaccagaggatatgagcacgtggacatccagaatttcagttcctcatggagcgatggcatggccttttgcgctctagtgcacaatttctttccagaggcatttgattacggccaattgagtccccagaatcgaagacagaacttcgaagtggccttcagctccgctgaaacacatgccgattgtccccaacttctagataccgaggacatggtccgcttacgtgagccagactggaaatgtgtgtacacatatatacaggagttctacaggtgtttagtgcagaaaggtttagtaaagacaaagaagagctag

SEQ ID NO: 323920 - DNA, 1508 bp, Artificial Sequence
  derived and/or modified sequence
actcagccagagacagcagcccctgccactgccccaccattaccccccatagagtccccaccagcaccatgccgggggtaccagggcctgggcctgagctggccgcagcccttgaggagcagttgggccgggcactggaggagctgcgggcggtggctgaagcaggccgggtggcagtgacccaggcagccgaggtagctgtagccaccgtggagccggtggcccgggcagctgaagagctgcgggcagagagagccgctcctccaccggcaccacccgcagcactagtctcatggaagcagagccagcagagcctctcgctgcagcagtggaagcggccaatggggctgagcagacccgagtgaacaaagcaccagaagggcggagccctctgagcgctgaggagctgatgactattgaggatgaaggagtcttggacaagatgctggatcagagcacggactttgaagagcggaagctcatccgggctgcacttcgtgagctccgacaaaggaagagagatggcagtggcagcaccatgatgcaaaccaagaccttctcctcttcctcctcatccaagaagatgggcagcatcttcgaccgcgaggaccaggccagcccacgggccggcagcctggcggcgctcgagaaacggcaggccgagaagaagaaagagctgatgaaggcgcagagtctgcccaagacctcagcctcccaggcgcgcaaggccatgattgagaagctggagaaggagggcgcggccggcagccctggcggaccccgcgcagccgtgcagcgatccaccagcttcggggtccccaacgccaacagcatcaagcagatgctgctggactggtgtcgagccaagactcgcggctacgagcacgtcgacatccagaacttctcctccagctggagtgatgggatggccttctgtgccctggtgcacaacttcttccctgaggccttcgactatgggcagcttagccctcagaaccgacgccagaacttcgaggtggccttctcatctgcggagacccatgcggactgcccgcagctcctggatacagaggacatggtgcggcttcgagagcctgactggaagtgcgtgtacacgtacatccaggaattctaccgctgtctggtccagaaggggctggtaaaaaccaaaaagtcctaacccctgctcggggccccacggatgctggtggactgtgtgcccctggtggaggtggacgacatgatgatcatgggcaagaagcctgaccccaagtgtgtcttcacctatgtgcagtcgctctacaaccacctgcgacgccacgaactgcgcctgcgcggcaagaatgtctagcctgcccgcccgcatggccagccagtggcaagctgccgcccccactctccgggcaccgtctcctgcctgtgcgtccgcccaccgctgccctgtctgttgcgacaccctcccccccacatacacacgcagcgttttgataaattattggttttcaacg

SEQ ID NO: 323921 - DNA, 888 bp, Artificial Sequence
  derived and/or modified sequence
atggaggccgagcccgccgagcccctggccgccgccgtggaggccgccaacggcgccgagcagaccagagtgaacaaggcccccgagggcagaagccccctgagcgccgaggagctgatgaccatcgaggacgagggcgtgctggacaagatgctggaccagagcaccgacttcgaggagagaaagctgatcagagccgccctgagagagctgagacagagaaagagagacggcagcggcagcaccatgatgcagaccaagaccttcagcagcagcagcagcagcaagaagatgggcagcatcttcgacagagaggaccaggccagccccagagccggcagcctggccgccctggagaagagacaggccgagaagaagaaggagctgatgaaggcccagagcctgcccaagaccagcgccagccaggccagaaaggccatgatcgagaagctggagaaggagggcgccgccggcagccccggcggccccagagccgccgtgcagagaagcaccagcttcggcgtgcccaacgccaacagcatcaagcagatgctgctggactggtgcagagccaagaccagaggctacgagcacgtggacatccagaacttcagcagcagctggagcgacggcatggccttctgcgccctggtgcacaacttcttccccgaggccttcgactacggccagctgagcccccagaacagaagacagaacttcgaggtggccttcagcagcgccgagacccacgccgactgcccccagctgctggacaccgaggacatggtgagactgagagagcccgactggaagtgcgtgtacacctacatccaggagttctacagatgcctggtgcagaagggcctggtgaagaccaagaagagctag

SEQ ID NO: 323922 - protein, 37 aa, Artificial Sequence
  derived and/or modified sequence
MADEALAGLDEGALRKLLEVTADLAERRRIRSAIREL

SEQ ID NO: 323923 - DNA, 566 bp, Artificial Sequence
  derived and/or modified sequence
gtaacaacatggcagctcccatgagaacggcatggttggagtcagaagaggaagaagcagaactgggcaggactccagaccccatcctcccaactccacccactttagtctccatggagacccaagggcggctttagggcctctggcactgaagatggaatagctttgccttgtggatctgacctcctgggtaccctggctgattccttgtttggtcttggacatgtcagctctctctgggcctcaatttcccccttttgctgaatgacagcctggactccatattccctatttaggactccagcgctcctaaaggcagactctcagggcttggaaggtagaagcatgctacaagaaggcaatgtctgttcaaagaattctctgagctggtgacaggtgccacaggcactggggatctcaccagaaaggaaccgacggagctaggggccagcgagatggcggacgaggccttagctgggctggatgagggagcccttcggaagctgctggaggtcacagcagatctggcagagcggcggcgcatccgctcagccatccgggaactg

SEQ ID NO: 323924 - protein, 215 aa, Artificial Sequence
  derived and/or modified sequence
MHASLPGKADGQQSSFCHCERASGHLWSSLNVSGATSDPALNHVVQLLTCDLLLSLRTALWQKQASASQAVGETYHASGAELAGFQRDLGSLRRLAHSFRPAYRKVFLHEATVRLMAGASPTRTHQLLEHSLRRRTTQSTKHGEVDAWPGQRERATAILLACRHLPLSFLSSPGQRAVLLAEAARTLEKVGDRRSCNDCQQMIVKLGGGTAIAAS

SEQ ID NO: 323925 - DNA, 648 bp, Artificial Sequence
  derived and/or modified sequence
atgcacgccagcctgcccggcaaggccgacggccagcagagcagcttctgccactgcgagagagccagcggccacctgtggagcagcctgaacgtgagcggcgccaccagcgaccccgccctgaaccacgtggtgcagctgctgacctgcgacctgctgctgagcctgagaaccgccctgtggcagaagcaggccagcgccagccaggccgtgggcgagacctaccacgccagcggcgccgagctggccggcttccagagagacctgggcagcctgagaagactggcccacagcttcagacccgcctacagaaaggtgttcctgcacgaggccaccgtgagactgatggccggcgccagccccaccagaacccaccagctgctggagcacagcctgagaagaagaaccacccagagcaccaagcacggcgaggtggacgcctggcccggccagagagagagagccaccgccatcctgctggcctgcagacacctgcccctgagcttcctgagcagccccggccagagagccgtgctgctggccgaggccgccagaaccctggagaaggtgggcgacagaagaagctgcaacgactgccagcagatgatcgtgaagctgggcggcggcaccgccatcgccgccagctag

SEQ ID NO: 323926 - DNA, 648 bp, Artificial Sequence
  derived and/or modified sequence
atgcacgccagtctgcccggaaaggccgacggccagcaatcctccttctgtcactgtgagagagcttcgggtcacttatggtcatctctaaacgtgagcggagccacaagtgaccccgcccttaaccatgtagttcagctcctgacatgtgatctgctattgtcattacgtaccgccctctggcagaaacaggcaagcgctagccaggccgtgggggaaacctatcatgccagcggagctgaactcgccggcttccagcgcgacctcggtagcttgagacgactggcccattcctttcgcccagcatacaggaaagtgtttctgcacgaagccactgttcgtcttatggccggtgcaagtcccacacggactcaccagttactggaacacagcttgcgccgacgaacaacacagagtacgaagcacggggaggttgacgcctggccgggtcagagggagcgcgcaactgctattttgcttgcctgtaggcacctcccattaagctttctttcaagcccaggtcaaagggccgtgctgctagctgaggccgcgcgcacactcgagaaagtaggggacagacgctcatgtaatgattgccagcagatgattgtgaaactgggcggcgggacggccattgccgcctcctag

SEQ ID NO: 323927 - DNA, 648 bp, Artificial Sequence
  derived and/or modified sequence
atgcacgccagcctgcccgggaaggcagatggccagcagagcagcttctgccactgtgagcgggccagcggccacctgtggagcagcctgaatgtgtctggggccaccagtgaccctgccctgaaccacgtggtgcagctgctgacctgtgacctgctgctgagcctgaggacagccctgtggcagaagcaggccagcgccagccaggccgtgggggagacctaccacgccagcggggctgagctggccggcttccagagggacctgggcagcctgcggcggctggcccacagcttccggcctgcctacaggaaggtgttcctgcacgaggccaccgtgcggctgatggccggggccagccccaccaggacccaccagctgctggagcacagcctgcggcggaggaccacccagagcaccaagcacggggaggtggatgcctggccaggccagcgggagcgggccacagccatcctgctggcctgccgccacctgcccctgtccttcctgagcagccctggccagagagctgtgctgctggccgaggccgcccggaccctggagaaggtgggggacagaagaagctgcaatgactgccagcagatgattgtgaagctgggcggcggcacagccatcgccgccagctag

SEQ ID NO: 323928 - DNA, 648 bp, Artificial Sequence
  derived and/or modified sequence
atgcacgccagcctgcccggcaaggccgacggccagcagagcagcttttgccattgcgagagggcctccggacacttatggtcatccctgaatgtgtccggggccacatctgatcctgcactgaaccatgtcgtgcaactgctcacttgcgaccttctactgtccttacgtaccgccctgtggcagaagcaggcctctgcttcacaggccgtgggggagacatatcacgcaagcggagccgagctcgctggtttccagagggacttagggtccctgagacgtctggcacattcctttcgtcccgcttatcgaaaagtgttcttgcatgaggcaacggtgcgccttatggcaggggcaagtccaacacgcacacaccaactgctagaacacagcttaagaagacggacgacccagtccactaagcatggagaagtggatgcctggcccggacagagagaaagggccacagcgatactgctcgcctgtaggcacctgcctctgagctttctgtcttcccccgggcagcgcgcggtcctcctggctgaagcggcccgaactctcgagaaagtgggcgaccgacgatcctgcaacgactgccaacaaatgatagtgaagctgggggggggaaccgccattgctgcctcgtag

SEQ ID NO: 323929 - DNA, 648 bp, Artificial Sequence
  derived and/or modified sequence
atgcatgctagcttaccgggaaaagctgacggacagcaatccagcttctgtcactgtgagagagcctcaggtcacctgtggtcgtctctgaatgtgtccggggcaaccagcgatcctgcactgaaccacgtggtgcaactgcttacctgcgatctcctcctgagtttgagaaccgccctctggcagaagcaagcaagcgcctctcaggccgtcggagagacataccatgcatcaggagcagaactcgcgggatttcaacgcgacctgggctctctgagaaggctcgcccattcctttcgtccagcttatagaaaggtatttctgcacgaagccaccgtgcgcttgatggctggagcgtctccaaccagaacacaccagctcctggagcatagcctgcgccgaaggacaacccaaagcaccaagcacggtgaggttgatgcatggccaggacaacgggaaagagctaccgccattctactcgcgtgcagacatttacccctaagctttttatcctcccccggacagcgggcagtgctgcttgctgaagccgctcggaccctggagaaagttggggataggaggtcatgcaacgactgccagcagatgatcgtcaaactggggggaggcacagccatcgcagcgagctag

SEQ ID NO: 323930 - DNA, 3106 bp, Artificial Sequence
  derived and/or modified sequence
cctagctaggagccaggcttgggaactctcaaatgggtaattcccggtccttgttatcagctagctcacaacatgctgacctcaggctttctcttactctagcagaaacaggtatgttttactttgtgtcccactatggatagactgctgaatacatcaggtatgttcaagcattaccacatctctatttgtttccgtatctcagtaacagcagagatgagctgagaatgaatcagaacgtgccctgtagtgacattgatatatttcctgaggtacatcacgatagtctaggggacaaagggcgcagggaagcccagtgtactctttatgtctacacttgatcttagccagaaggctgagaagtgatactttttatgtcttacctctgtttctggtgactacagataagagactcatcccttgattcactcattcagcaaatatgactgagcaccgtctctaagcaggacatttgccttgtcctcagggagcatagttggcaaggaatctagacagcagcccttcttgagcttgacattgatcttctcatgaggaggactgggctccagatcttcctgggaccaggtcttcaggacagtgtgagctaggttatcagctcagattcagtgagtgctttgtggaaggttggcagagggtcgcgagggtcctctacatttgttctccagtatccagtatcaacactggttaccaaagaggaaggacggactattggtgcccctggtcccagtgattagaaatagctacttcctcagccgagcccagagcctgtgtggccccgagcacagtgctgttcctgactccctgcgctggctctgccaccccctgggccagaagtttttcatggagcggagctggtctgtgaagtcagctgccaaggagagtctatactgtgcccagaggaacccagctgaccccattgcgcaggtccaccaggccttctgcaagaacctgctggagcgagctatagagtccttggtgaaacctcaggccaagaagaaggctggagaccaggaagaagagagctgtgaattctccagtgctctggagtacttgaaattacttcattcttttgtggactctgtgggggttatgagccccccactctccaggagctccgtgctcaagtccgccctgggtccagacatcatctgtcggtggtggacgtctgcaatcactgtggccatcagctggctccagggagacgatgcagctgtgcgctctcattttaccaaagtggaacgcatccccaaggccctggaagtgacagaccacctccacccccaccatcaaccctggcaactttgtcctgtaactaaaatagcctttagcacatggcataaccggagagcttttgacattcctctttggagattcatgtctgcgtcttgggggcattcggcactagtgatgggcagccctgcctgctgactccccggctgtttctaattggatctgagtattctaagagaaactgtaaaatgctccaagacagaaaggccccacgaggtcctatccttagagccaaggctgtagcatttcctatcaagcagacccttaaccggcgcacaggaaggagctgagaagagtgagtatactgtggggcgtggcagtcactggcttgggcccctctgcctgtcacgcaggtgacacatagtgacctgcctctcgactccctgtcactgctgcaggagccccctggtgaaggccatcttccatgcctgcagagccatgcatgcctcactccctgggaaagcagatgggcagcagagttccttctgccattgcgagagggccagtggccacctatggagcagcctcaacgtcagtggggccacctctgaccctgccctcaaccacgtggtccagctgctcacctgtgacctgctactgtcgctacggacagcgctctggcaaaaacaggccagtgccagccaggctgtgggggagacctaccacgcgtcaggcgctgaactggcgggcttccaacgggacctgggcagcctgcgcaggctggcacacagcttccgcccagcataccgcaaggtgttcctgcatgaagccaccgtgcgcctgatggcaggagccagccccacccgcacccaccagctgctggaacacagcctgcggcggcgcaccacgcagagcaccaagcacggagaggtggatgcctggcccggccagcgagagcgggccaccgccatcctgctggcctgccgccacctgcccctctccttcctctcctccccgggccagcgggcagtgctgctggccgaagctgcccgcaccctggagaaggtgggcgaccggcgctcctgcaacgactgccagcagatgattgttaagctgggtggtggcactgccattgccgcctcctgaccaccaggctcagcccacccctccacctctctctcgatttctctctctccccctcagcatcttcccgctgagagtggtggggaagagccttgtcttcttagctgtcacctgccgaggcttctgggccactcaggccagtgcacccctgggcagagccccttaaagctgctgtcactagatgcccatggtccagggcctggtgggcgtgagaggataggtggcagggcagaaactgggcagccctgacttgatagcagcagggggagctcccaagctgccaagcccctgcctccagccttcctgagtttctctctcctgaaccctactctctcctttttgcttcctcagtttttatcaggctttctctgggggacagcagtctctgagcaccagggagcagttgccctcaggcctgtgcccagcatgccctcccctttttatacgaatgttttctaccagtgtgcttgggtttgccatgatgcgaggctgagttgctgtagcgtcttgattctctccctgggtctgcgttccctcccctgggcctgactgagcctgctcattgtttttccctttattacacaggacagccaggggaggaggggggcccagccctgggaggctggtgggaggcagggggcaggcctgcggatgcatgaaataatgttggcattattttttaattttttaaaaaataaatggtatcttattt

SEQ ID NO: 323931 - protein, 353 aa, Artificial Sequence
  derived and/or modified sequence
MLLLSPRSALVSVYCPQIFLLLSSGSYLALSSVVALGANIICNKIPGLAPRQRAICQSRPDAIIVIGEGAQMGINECQYQFRFGRWNCSALGEKTVFGQELRVGSREAAFTYAITAAGVAHAVTAACSQGNLSNCGCDREKQGYYNQAEGWKWGGCSADVRYGIDFSRRFVDAREIKKNARRLMNLHNNEAGRKVLEDRMQLECKCHGVSGSCTTKTCWTTLPKFREVGHLLKEKYNAAVQVEVVRASRLRQPTFLRIKQLRSYQKPMETDLVYIEKSPNYCEEDAATGSVGTQGRLCNRTSPGADGCDTMCCGRGYNTHQYTKVWQCNCKFHWCCFVKCNTCSERTEVFTCK

SEQ ID NO: 323932 - protein, 333 aa, Artificial Sequence
  derived and/or modified sequence
MSAPPFYRALSSVVALGANIICNKIPGLAPRQRAICQSRPDAIIVIGEGAQMGINECQYQFRFGRWNCSALGEKTVFGQELRVGSREAAFTYAITAAGVAHAVTAACSQGNLSNCGCDREKQGYYNQAEGWKWGGCSADVRYGIDFSRRFVDAREIKKNARRLMNLHNNEAGRKVLEDRMQLECKCHGVSGSCTTKTCWTTLPKFREVGHLLKEKYNAAVQVEVVRASRLRQPTFLRIKQLRSYQKPMETDLVYIEKSPNYCEEDAATGSVGTQGRLCNRTSPGADGCDTMCCGRGYNTHQYTKVWQCNCKFHWCCFVKCNTCSERTEVFTCK

SEQ ID NO: 323933 - protein, 57 aa, Artificial Sequence
  derived and/or modified sequence
MGINECQYQFRFGRWNCSALGEKTVFGQELRVGSREAAFTYAITAAGVAHAVTAACS

SEQ ID NO: 323934 - DNA, 1062 bp, Artificial Sequence
  derived and/or modified sequence
atgctgctgctgagccccagaagcgccctggtgagcgtgtactgcccccagatcttcctgctgctgagcagcggcagctacctggccctgagcagcgtggtggccctgggcgccaacatcatctgcaacaagatccccggcctggcccccagacagagagccatctgccagagcagacccgacgccatcatcgtgatcggcgagggcgcccagatgggcatcaacgagtgccagtaccagttcagattcggcagatggaactgcagcgccctgggcgagaagaccgtgttcggccaggagctgagagtgggcagcagagaggccgccttcacctacgccatcaccgccgccggcgtggcccacgccgtgaccgccgcctgcagccagggcaacctgagcaactgcggctgcgacagagagaagcagggctactacaaccaggccgagggctggaagtggggcggctgcagcgccgacgtgagatacggcatcgacttcagcagaagattcgtggacgccagagagatcaagaagaacgccagaagactgatgaacctgcacaacaacgaggccggcagaaaggtgctggaggacagaatgcagctggagtgcaagtgccacggcgtgagcggcagctgcaccaccaagacctgctggaccaccctgcccaagttcagagaggtgggccacctgctgaaggagaagtacaacgccgccgtgcaggtggaggtggtgagagccagcagactgagacagcccaccttcctgagaatcaagcagctgagaagctaccagaagcccatggagaccgacctggtgtacatcgagaagagccccaactactgcgaggaggacgccgccaccggcagcgtgggcacccagggcagactgtgcaacagaaccagccccggcgccgacggctgcgacaccatgtgctgcggcagaggctacaacacccaccagtacaccaaggtgtggcagtgcaactgcaagttccactggtgctgcttcgtgaagtgcaacacctgcagcgagagaaccgaggtgttcacctgcaagtag

SEQ ID NO: 323935 - DNA, 1002 bp, Artificial Sequence
  derived and/or modified sequence
atgagcgccccccccttctacagagccctgagcagcgtggtggccctgggcgccaacatcatctgcaacaagatccccggcctggcccccagacagagagccatctgccagagcagacccgacgccatcatcgtgatcggcgagggcgcccagatgggcatcaacgagtgccagtaccagttcagattcggcagatggaactgcagcgccctgggcgagaagaccgtgttcggccaggagctgagagtgggcagcagagaggccgccttcacctacgccatcaccgccgccggcgtggcccacgccgtgaccgccgcctgcagccagggcaacctgagcaactgcggctgcgacagagagaagcagggctactacaaccaggccgagggctggaagtggggcggctgcagcgccgacgtgagatacggcatcgacttcagcagaagattcgtggacgccagagagatcaagaagaacgccagaagactgatgaacctgcacaacaacgaggccggcagaaaggtgctggaggacagaatgcagctggagtgcaagtgccacggcgtgagcggcagctgcaccaccaagacctgctggaccaccctgcccaagttcagagaggtgggccacctgctgaaggagaagtacaacgccgccgtgcaggtggaggtggtgagagccagcagactgagacagcccaccttcctgagaatcaagcagctgagaagctaccagaagcccatggagaccgacctggtgtacatcgagaagagccccaactactgcgaggaggacgccgccaccggcagcgtgggcacccagggcagactgtgcaacagaaccagccccggcgccgacggctgcgacaccatgtgctgcggcagaggctacaacacccaccagtacaccaaggtgtggcagtgcaactgcaagttccactggtgctgcttcgtgaagtgcaacacctgcagcgagagaaccgaggtgttcacctgcaagtag

SEQ ID NO: 323936 - DNA, 1062 bp, Artificial Sequence
  derived and/or modified sequence
atgctactgttgtctcccaggagtgctctcgtgagtgtctactgtccacagattttcctgctcttatcgtctggtagctacctcgctcttagtagcgtggtggctttgggtgctaatataatctgcaacaaaataccaggcctcgcaccgcgtcaaagagccatttgccagagtcgccccgatgcaattatcgtcatcggagagggcgcccagatgggcattaacgagtgccagtaccaattcaggttcggccgatggaattgcagcgctctgggggaaaaaactgtgtttggccaagagttgagagtggggtctagagaagcggctttcacctatgcaatcactgccgcgggcgtggcccacgctgtgaccgccgcctgtagccaagggaatctttctaattgtgggtgcgatcgcgagaaacagggttactataaccaagctgagggctggaagtggggcggatgttccgccgacgtgcgttacgggatagactttagccgaaggtttgtcgacgcgcgggaaataaagaaaaatgccagaaggctgatgaaccttcataataacgaggctggtcggaaagttctggaggatagaatgcagctggaatgcaagtgccacggggtatcaggcagctgcaccacaaaaacatgctggaccactctgccaaagtttcgggaagtggggcacctgttaaaggaaaagtacaatgctgcagtgcaggtggaagtagtacgtgcgagtcggctccgtcagccaacattcctccggattaagcagcttaggtcttaccagaaacccatggagactgacctggtatatatagagaagtcccccaattactgcgaggaagacgccgccaccgggagcgttggtactcagggacggttatgcaatcgtaccagtcccggcgctgatggctgcgacacaatgtgctgtgggcgcgggtataacacccatcagtacaccaaagtgtggcagtgtaactgtaaattccactggtgctgtttcgtaaagtgcaacacctgctccgagcgcacagaagtatttacttgcaagtag

SEQ ID NO: 323937 - DNA, 1002 bp, Artificial Sequence
  derived and/or modified sequence
atgagtgcgccacccttttacagggccctcagcagtgtcgtggccttaggggctaatattatctgtaacaagatccctgggctagcaccccgacagcgggccatatgccagtcccggccagacgcaatcatcgtgattggagagggggcacagatgggaattaacgaatgtcagtaccaatttaggttcggtcggtggaattgcagtgccctaggcgagaagacagtcttcggacaggaactgcgcgtgggctctagagaagcggcgttcacctacgccatcactgccgcgggagtcgcccacgcggtgactgctgcttgttctcaaggaaatctttctaactgcgggtgcgaccgagaaaagcagggttactacaaccaggctgagggctggaaatggggcggctgctctgcagatgtccggtacgggattgacttcagtcgcagattcgtagatgctagagaaatcaaaaaaaacgcgagaagactgatgaacctgcacaacaatgaggccggccgtaaggtattggaggatcggatgcagctcgagtgcaaatgccacggggtgagtggatcctgcacaaccaagacttgttggaccaccttgccaaaatttcgggaggttggtcatctcctgaaagagaaatacaatgcggccgtacaggtcgaggtggtccgcgccagcaggctgcgccaacccacttttctgcggatcaagcaactgcggtcttaccaaaaacccatggagaccgatctggtttacatcgagaagagccctaactactgcgaggaagatgcagctaccgggagtgtcgggactcaagggcgactatgtaacagaacctcccccggcgcagacggatgcgacaccatgtgctgtgggcgagggtacaacacccatcagtatacaaaagtttggcagtgcaactgtaagtttcattggtgctgcttcgttaagtgcaacacctgctcggagcggactgaagtgttcacgtgcaagtag

SEQ ID NO: 323938 - DNA, 1062 bp, Artificial Sequence
  derived and/or modified sequence
atgctgctgctgagccccaggtctgccctggtgtctgtgtactgcccccagatcttcctgctgctgagcagcggcagctacctggccctgagctctgtggtggccctgggcgccaacatcatctgcaacaagatccctggcctggccccccggcagagggccatctgccagagcaggccagatgccatcatcgtcatcggggagggcgcccagatgggcatcaatgaatgccagtaccagttccgcttcggccgctggaactgcagcgccctgggggagaagacagtgtttggccaggagctgcgggtgggcagccgggaggccgccttcacctacgccatcacagctgctggggtggcccatgctgtgacagctgcctgcagccagggcaacctgagcaactgtggctgtgaccgggagaagcagggctactacaaccaggccgagggctggaagtggggcggctgcagcgcagatgtgcgctatggcatcgacttcagccgccgctttgtggatgcccgggagatcaagaagaatgcccggcggctgatgaacctgcacaacaatgaagctggcaggaaggtgctggaggacaggatgcagctggagtgcaagtgccacggcgtgtctggcagctgcaccaccaagacctgctggaccaccctgcccaagttccgggaggtgggccacctgctgaaggagaagtacaatgctgctgtgcaggtggaggtggtgcgggccagccggctgcggcagcccaccttcctgcgcatcaagcagctgcggagctaccagaagcccatggagacagacctggtgtacatcgagaagagccccaactactgtgaggaggatgctgccaccggctctgtgggcacccagggccgcctgtgcaacagaaccagccctggagcagatggctgtgacaccatgtgctgcggccggggctacaacacccaccagtacaccaaggtgtggcagtgcaactgcaagttccactggtgctgctttgtgaagtgcaacacctgcagcgagaggacagaggtgttcacctgcaagtag

SEQ ID NO: 323939 - DNA, 1002 bp, Artificial Sequence
  derived and/or modified sequence
atgtctgccccacccttctaccgggccctgagctctgtggtggccctgggcgccaacatcatctgcaacaagatccctggcctggccccccggcagagggccatctgccagagcaggccagatgccatcatcgtcatcggggagggcgcccagatgggcatcaatgaatgccagtaccagttccgcttcggccgctggaactgcagcgccctgggggagaagacagtgtttggccaggagctgcgggtgggcagccgggaggccgccttcacctacgccatcacagctgctggggtggcccatgctgtgacagctgcctgcagccagggcaacctgagcaactgtggctgtgaccgggagaagcagggctactacaaccaggccgagggctggaagtggggcggctgcagcgcagatgtgcgctatggcatcgacttcagccgccgctttgtggatgcccgggagatcaagaagaatgcccggcggctgatgaacctgcacaacaatgaagctggcaggaaggtgctggaggacaggatgcagctggagtgcaagtgccacggcgtgtctggcagctgcaccaccaagacctgctggaccaccctgcccaagttccgggaggtgggccacctgctgaaggagaagtacaatgctgctgtgcaggtggaggtggtgcgggccagccggctgcggcagcccaccttcctgcgcatcaagcagctgcggagctaccagaagcccatggagacagacctggtgtacatcgagaagagccccaactactgtgaggaggatgctgccaccggctctgtgggcacccagggccgcctgtgcaacagaaccagccctggagcagatggctgtgacaccatgtgctgcggccggggctacaacacccaccagtacaccaaggtgtggcagtgcaactgcaagttccactggtgctgctttgtgaagtgcaacacctgcagcgagaggacagaggtgttcacctgcaagtag

SEQ ID NO: 323940 - DNA, 1062 bp, Artificial Sequence
  derived and/or modified sequence
atgctgctgctgagcccccggagcgccctggtgagcgtgtactgccctcagatttttctgttactgtcttccggtagctaccttgccctgtctagtgtggtcgctttaggcgccaatattatttgcaataagattcctggcctcgcccccagacagcgggccatctgtcaaagcagacccgacgcaattattgtgattggcgagggggctcaaatgggtattaatgagtgccagtaccaatttcgctttggcaggtggaattgtagtgcccttggggaaaagaccgtgtttggtcaggagttgcgcgtgggatctcgcgaagcggcatttacttatgctatcacagcagccggcgtagcgcacgctgtcacagcagcctgctcccaagggaacctgtcaaactgcggttgtgaccgggaaaagcaggggtattataatcaggccgaaggctggaagtgggggggatgctcagctgatgtgagatacggcattgattttagcagaagatttgtggacgccagggaaatcaaaaaaaacgcacgccggttgatgaatctgcacaacaatgaggctggacgtaaggtgctggaagatcggatgcaattggaatgtaagtgtcacggtgtgagcggctcctgcaccaccaagacatgttggacaacactgccaaaatttcgcgaggtcggccacctactgaaagagaagtataacgcagccgtgcaggtggaagtggtgcgcgcttcaaggctccgccagcctaccttcctcaggattaagcagctgcgaagctaccagaaaccaatggagaccgacctggtctacattgagaaatcacctaactattgtgaggaggacgctgctaccggctccgttggcacccagggccgactctgtaaccgaaccagcccaggcgccgacggatgcgatacaatgtgctgcggcagaggatataacactcaccagtacaccaaggtgtggcaatgcaactgcaagttccattggtgctgctttgttaagtgtaatacatgctcagaacgtactgaggtcttcacatgcaaatag

SEQ ID NO: 323941 - DNA, 1002 bp, Artificial Sequence
  derived and/or modified sequence
atgagcgccccccccttctaccgggccctgagcagcgtggtggccctcggggcaaacattatctgcaacaaaattcctgggctggcaccccgtcaaagagccatttgccagtcccggcccgacgcgataatcgtcataggcgaaggtgcccaaatgggcataaacgaatgccagtaccaatttagattcggccgctggaattgtagcgccttaggggaaaagactgttttcgggcaggagcttcgggtgggaagccgggaggctgcattcacttacgcaattactgctgcgggggtcgcccacgctgtgacagccgcgtgctcacaaggcaatctcagtaactgcgggtgcgatagagaaaagcaaggatattacaaccaggctgagggctggaagtggggcggctgttctgcagatgtgaggtatggcatcgatttcagtcggaggtttgtggacgctcgtgagatcaaaaagaatgctaggaggttgatgaatctgcacaacaacgaggcaggccggaaagtactggaagaccgcatgcagttagagtgcaaatgccacggggtgagcggcagttgcaccactaagacctgctggacaaccttgcctaagttccgcgaagttgggcatctgttgaaagagaagtacaatgctgcagtgcaagttgaagtagtacgagcaagtagactacgccagccaacctttctgcgaatcaagcagctgcggagctatcaaaaacctatggagaccgacttagtctatatagagaagtctcccaattattgcgaggaagatgcggctactggcagtgttggcacccagggacgactgtgcaacaggacctcacctggcgctgacggatgtgataccatgtgctgtggcagaggctataatacacaccagtatactaaagtttggcagtgcaattgcaagttccattggtgctgtttcgtgaaatgtaatacatgctccgagcgaacggaggtgtttacctgcaagtag

SEQ ID NO: 323942 - DNA, 1062 bp, Artificial Sequence
  derived and/or modified sequence
atgcttctacttagtcctaggtccgcattggtgtctgtttactgcccccagatattcctgcttctgtctagcgggagttacttggctctgagtagtgtggtcgctctgggtgccaacattatttgcaataagattccaggcctggctcctcggcagcgggctatttgtcaatcccgcccagacgccatcatcgtcattggcgaaggcgcacagatgggcatcaatgaatgtcaataccagttccgttttggcagatggaactgcagcgcgctcggcgagaagacagttttcggccaggaactgcgggtgggcagtcgtgaagctgccttcacctacgccattaccgcagccggtgtggcacatgccgttactgctgcttgcagccagggaaatctcagcaactgcggctgcgaccgggagaagcagggatactacaatcaggcggaaggctggaagtgggggggatgctcagccgatgtgcgatacggaatcgactttagcaggaggtttgtggatgccagggagatcaaaaaaaatgcacgcagactgatgaacttgcataataatgaggccggaagaaaagtgttagaggacaggatgcaactggagtgcaaatgccacggcgtgtcaggaagctgcacaactaaaacctgttggactacactgccgaagtttagggaagtgggccatctgctcaaggaaaagtacaacgcggcagtgcaagtggaagtggtgcgggcaagtcgcctgcggcagcctaccttcctgcggatcaagcagctgcgcagctaccagaaacctatggagacagatctggtgtatatcgagaagtcacccaactattgtgaagaagacgctgcaacaggatccgtgggtacccaaggacgcctctgcaaccggactagccctggagctgacggatgcgacacaatgtgttgcgggaggggatacaacacacatcagtatactaaagtttggcagtgcaattgtaaatttcattggtgctgcttcgtgaaatgtaacacctgcagtgaacgcaccgaggttttcacttgtaagtag

SEQ ID NO: 323943 - DNA, 1002 bp, Artificial Sequence
  derived and/or modified sequence
atgtcggcccctcctttttatcgggctctgtcctctgttgtggctcttggcgcaaacatcatctgtaataaaattcctggcctggccccaagacagagggccatctgccagtcacggcctgacgccataatagtaataggggagggggctcagatgggaattaatgagtgtcaataccagttccgtttcgggagatggaactgctcggcccttggggagaaaactgtgttcggccaggagctgcgtgtcggatccagggaggccgcttttacctacgctatcacagccgcaggggtcgcccacgcagttaccgccgcttgtagccagggcaacctctctaattgtggatgtgatagggagaaacagggatactataaccaggctgaggggtggaagtggggcggatgcagcgcggatgttagatatggcatcgatttttcccgtcgatttgtcgatgcccgagagattaaaaagaacgctaggagactgatgaatctgcacaacaatgaggctggcaggaaggtcttggaggatcggatgcagttagagtgcaagtgtcacggcgtatccggatcatgcacgacgaagacctgctggactaccctgccaaagttccgagaagtagggcacttgttaaaggaaaagtataacgccgctgtgcaggtcgaggtcgtgcgcgcttcacggcttagacagccgacattcctccgcattaagcagctgcggtcctatcagaagcccatggaaacggatctggtgtatatcgagaagagtcctaattactgcgaggaagatgcggctacaggcagcgttggcacccagggtcgcttgtgcaatagaacctcccccggtgccgacggctgtgataccatgtgctgtggtcggggttacaacacccatcagtacactaaggtctggcaatgcaattgcaaatttcattggtgctgcttcgtcaaatgtaatacgtgcagtgagaggacggaagtgtttacctgtaaatag

SEQ ID NO: 323944 - DNA, 1062 bp, Artificial Sequence
  derived and/or modified sequence
atgcttctactgagtccccgaagtgcactcgtgtctgtgtactgtccccaaatctttcttcttttatcctctggatcttaccttgccctgtccagtgtggtggctttgggagctaacataatctgtaacaagatacccggccttgctccgcgacaacgcgcaatttgccaatcccgccctgacgctatcattgttatcggagaaggtgcccagatgggcatcaatgaatgtcagtatcagtttaggttcgggaggtggaactgctctgcactaggtgagaaaaccgtgttcggacaggagctgcgggtcggcagccgggaggccgctttcacctatgccattaccgccgctggagtggcccatgctgtgacggcagcttgcagccaaggcaacctcagcaactgtgggtgcgatcgtgaaaagcaaggatattacaaccaagcagaaggttggaagtggggtgggtgtagcgccgacgttcggtacggaatcgatttttcaagacggttcgttgatgcacgcgaaatcaagaagaatgctcgccgcttaatgaacctgcacaacaatgaggccggccggaaagttctagaggatcgaatgcagctcgagtgtaagtgtcatggagtctctgggagctgtacaaccaaaacgtgctggacaacactccccaagtttcgggaagtgggacatctgttaaaggagaagtataatgccgccgtgcaggttgaagtggtccgagcatctagactcagacagcctaccttcctgcgtatcaaacagctgcgctcatatcagaagccaatggagaccgaccttgtctacatcgaaaaaagtcctaactattgcgaagaggatgcggctaccgggtcagttggcacccagggaaggctctgcaacaggacgagcccaggcgcagatggatgcgacacaatgtgttgtggaagggggtataatacccatcagtataccaaggtgtggcaatgtaactgcaagtttcactggtgttgctttgtgaagtgcaatacttgttctgaaagaaccgaagtgtttacatgtaagtag

SEQ ID NO: 323945 - DNA, 1002 bp, Artificial Sequence
  derived and/or modified sequence
atgtctgctcctccattttatcgggccctttcctcggtggtggcgctgggagccaacataatctgcaacaaaatccctggacttgctccccgtcaaagagccatttgtcagtccagaccagacgctattattgtgattggcgagggtgctcagatgggaataaacgaatgccagtaccaattcaggttcggacggtggaattgctctgccctgggggaaaaaactgtctttggccaggagctgcgtgtggggtcaagggaggcagcattcacatacgctatcaccgccgcaggagtggcccacgctgtcactgcagcttgctctcaaggcaacctttctaactgcggctgcgatcgagaaaaacagggttattacaatcaggcagaaggctggaaatgggggggctgctccgccgatgtgaggtacggaattgacttttctagaaggttcgtagatgcacgggaaatcaaaaaaaacgctcgcaggctgatgaacctgcataacaacgaggccggtcgcaaagttttggaggacaggatgcaattagagtgcaaatgccacggagtgtctggatcatgtaccacaaaaacatgttggacgacactgcctaagtttcgtgaggtcggtcatctgctgaaagaaaaatacaatgccgccgttcaggtggaagtcgtaagggcaagccgcttgcggcaaccaactttcctccggataaagcaactcagaagctaccagaaaccaatggaaaccgacttagtttacattgagaaaagccccaattactgtgaagaggatgctgcaacaggttcagtgggaacccaaggcaggttatgtaaccgcacctcgccgggggctgatggttgcgacactatgtgctgtggtcgaggttataatacgcatcagtataccaaggtgtggcagtgtaattgcaaattccactggtgttgtttcgtgaagtgcaacacctgttctgaaagaactgaggtgtttacctgcaaatag

SEQ ID NO: 323946 - DNA, 1062 bp, Artificial Sequence
  derived and/or modified sequence
atgttgctgctctcacccagatccgccctcgtaagtgtctactgccctcaaatttttcttttactgtcttcaggctcatatctcgctcttagctccgtggtcgcgttaggcgccaatatcatatgcaacaaaatccctggcctcgctccgaggcaacgcgctatctgtcagtcccgcccggacgccatcatcgtcattggggagggagcccaaatgggtattaacgagtgtcagtaccagttccggtttggacggtggaactgttcggcccttggtgaaaaaacggtgttcggacaggaactgagagttggaagccgagaggcagcattcacttacgccatcactgccgcaggcgtggcccatgcagtcaccgcagcttgcagccaagggaacctgtctaattgcggctgtgaccgggaaaaacaaggatattataatcaggccgaaggatggaaatggggggggtgctccgccgatgtcagatatggcatcgacttcagtaggcggtttgtggacgcaagggagatcaaaaaaaacgcaagacggctcatgaacctccataataatgaggccggtagaaaagtacttgaggatagaatgcagctagagtgtaaatgtcatggagtcagtggaagctgcaccacaaagacgtgttggactaccctgccaaagttccgggaagtcggacatctgctcaaggaaaaatataacgctgcagttcaagtggaggtagtgcgggcatcccggctgcggcaaccgaccttcttgaggatcaagcagttacgatcataccagaagccaatggaaactgaccttgtctatattgagaagtcacccaattactgtgaggaggatgctgccaccggaagtgtaggaacccaaggtagactgtgtaaccggactagtcctggcgcagatgggtgcgataccatgtgctgtgggagaggctacaacactcatcaatacaccaaagtctggcagtgtaattgtaagttccattggtgctgcttcgttaaatgtaatacctgctcagagcgaactgaagttttcacttgtaaatag

SEQ ID NO: 323947 - DNA, 1002 bp, Artificial Sequence
  derived and/or modified sequence
atgtccgctccaccattctacagagccctgtcgtctgtggttgccctgggggccaacatcatctgcaataaaatccctggactggccccaaggcagagagccatctgtcagagccgcccagacgctattattgtcatcggcgaaggagcccagatgggcattaatgagtgccaataccaattcagatttggacgatggaattgctccgccctgggagagaaaaccgtattcggacaagagctaagggtgggatccagagaagccgcatttacttacgccattaccgcagccggcgtcgcacacgctgtcactgcagcttgctctcaaggcaacctttctaactgcggctgcgatcgagaaaaacagggttattacaatcaggcagaaggctggaaatgggggggctgctccgccgatgtgaggtacggaattgacttttctagaaggttcgtagatgcacgggaaatcaaaaaaaacgctcgcaggctgatgaacctgcataacaacgaggccggtcgcaaagttttggaggacaggatgcaattagagtgcaaatgccacggagtgtctggatcatgtaccacaaaaacatgttggacgacactgccgaaattcagagaggtcggtcacttactgaaggagaaatataacgccgccgtccaggtagaagtggtacgggcgtcccgcctgaggcaacctacgttcttacgaatcaagcagctccggtcataccaaaaacctatggaaaccgacctggtttacatcgagaagtcacctaattactgtgaggaagacgcagccaccggatctgttgggacacaggggagactgtgtaataggacctcaccaggagcagacggatgtgacacaatgtgctgtggccggggctataatacacaccaatatacaaaggtgtggcaatgcaattgcaaattccactggtgctgcttcgtgaaatgcaacacttgctctgaaagaactgaggtctttacatgtaaatag

SEQ ID NO: 323948 - DNA, 2285 bp, Artificial Sequence
  derived and/or modified sequence
gggtgtcccagccaaggcaacttgggcaagccctggaggcggctcccaccgcacgctccggtcagcctcccctttaaaaaaacccgccgggggaggaggcggatgtaggggcggcccgtccaatggcagctgcgcgcctcgggagacttggagaagtgagccagagcgagcgacagagccggttcgcaccgacagacggacggaggtccagaccgcagccaaggcgcgcccgctgcccccggccgggtccccgccccgcactccagccccagctcccgccgctgccccagacccagcgccatgcgcggccctagcggcggggcacgggcgacaactgcgcccgggcccacgagacccggcccctagcgcccagcgccgccgccctgcatcggggagctccgcggggaccccggcctcagctggcccaggcgcccggcccgcggagcctgttcagccccgccaggcacgccggcccaccatgcttctactgtcgccgcgcagcgcgctcgtctccgtctattgcccgcagatctttctcctcctgtccagcggcagctacttagcactgtcatccgtggtggccctgggagccaacatcatctgcaacaagattcctggcctagccccgcggcagcgtgccatctgccagagtcggcccgatgccatcattgtgattggggagggggcgcagatgggcatcaacgagtgccagtaccagttccgcttcggacgctggaactgctctgccctcggcgagaagaccgtcttcgggcaagagctccgagtagggagccgtgaggctgccttcacgtacgccatcaccgcggctggcgtggcgcacgccgtcaccgctgcctgcagccaagggaacctgagcaactgcggctgcgaccgcgagaagcagggctactacaaccaagccgagggctggaagtggggcggctgctcggccgacgtgcgttacggcatcgacttctcccggcgcttcgtggacgctcgggagatcaagaagaacgcgcggcgcctcatgaacctgcataacaatgaggccggcaggaaggttctagaggaccggatgcagctggagtgcaagtgccacggcgtgtctggctcctgcaccaccaaaacctgctggaccacgctgcccaagttccgagaggtgggccacctgctgaaggagaagtacaacgcggccgtgcaggtggaggtggtgcgggccagccgtctgcggcagcccaccttcctgcgcatcaaacagctgcgcagctatcagaagcccatggagacagacctggtgtacattgagaagtcgcccaactactgcgaggaggacgcggccacgggcagcgtgggcacgcagggccgtctctgcaaccgcacgtcgcccggcgcggacggctgtgacaccatgtgctgcggccgaggctacaacacccaccagtacaccaaggtgtggcagtgcaactgcaaattccactggtgctgcttcgtcaagtgcaacacctgcagcgagcgcaccgaggtcttcacctgcaagtgaggccaggcccggaggcggccgcgggcaccctggaacccggcggcattttgcacatccactcctcaccttccctgccttggtgctgccagcagcagacatagacgggtgcagaagcggggagctccaggtgcaggagggcaccggccggggcccacgccctctgcccgcctccctggggctccttcctgccacctcctcccatcacctcctgcggcagaacagcacccgtgacccacccagagagcaaggccaggggtcttggtgctccccgacggggcccggcaagttctctttcttctctctgggaaaatgaacgtccaggacacacctgtatcccagagagcaaagtgatgaggagactgagcgtccccagccccacctggcggcatggacacagaaaagctacgccggctggcctctccagaccagttcccaggctgggtctgccgctgggccctggggcggtggggacagatgttgacacaaattatttatgttttcttagtatcagaagaggattctcggcactaacacatagccagtcctaactccgtactctgtgtcagcccatcccctagacaccctctgtttcctttcccggccccacctggccggccctctgcccctgcagagctgaggcagcctggggttgatggggaccacgcggtgcctgcaggtcctagaagtgagctgggcaggggctcttcagaccacacagccctgaccgggccttggaggagagcca

SEQ ID NO: 323949 - DNA, 2202 bp, Artificial Sequence
  derived and/or modified sequence
ctggcgcggcccggcgggcgggcgcccggcgagccgcgctagctgctctctgcggtagctgctccgagtcgtatttccacattcctgaacccagccgagtccttacctgttgagccgcgatctcctttagacagaatctgtctcggcttcgctcgaagtgggggtggagaaacggcgtgacggagagggggtgcggtgcacctcgcctggggcgcccaccgcccgctgctggccccgcgctcctcgcacctgcggggacccgggccccgccgcgccctgcgcgcctactgtgcgccgccggctgccccgaggcgagccccgtccaggccacaggcaaggcggtgaacagacccgcgggaggggcaggtgcaggtaccactggtgggagacgcggcttcccaggcggagaggtggaagcaggcgctgggaatcgtctctccatcaccctccatcccatgtctgccccgccattttacagagcactgtcatccgtggtggccctgggagccaacatcatctgcaacaagattcctggcctagccccgcggcagcgtgccatctgccagagtcggcccgatgccatcattgtgattggggagggggcgcagatgggcatcaacgagtgccagtaccagttccgcttcggacgctggaactgctctgccctcggcgagaagaccgtcttcgggcaagagctccgagtagggagccgtgaggctgccttcacgtacgccatcaccgcggctggcgtggcgcacgccgtcaccgctgcctgcagccaagggaacctgagcaactgcggctgcgaccgcgagaagcagggctactacaaccaagccgagggctggaagtggggcggctgctcggccgacgtgcgttacggcatcgacttctcccggcgcttcgtggacgctcgggagatcaagaagaacgcgcggcgcctcatgaacctgcataacaatgaggccggcaggaaggttctagaggaccggatgcagctggagtgcaagtgccacggcgtgtctggctcctgcaccaccaaaacctgctggaccacgctgcccaagttccgagaggtgggccacctgctgaaggagaagtacaacgcggccgtgcaggtggaggtggtgcgggccagccgtctgcggcagcccaccttcctgcgcatcaaacagctgcgcagctatcagaagcccatggagacagacctggtgtacattgagaagtcgcccaactactgcgaggaggacgcggccacgggcagcgtgggcacgcagggccgtctctgcaaccgcacgtcgcccggcgcggacggctgtgacaccatgtgctgcggccgaggctacaacacccaccagtacaccaaggtgtggcagtgcaactgcaaattccactggtgctgcttcgtcaagtgcaacacctgcagcgagcgcaccgaggtcttcacctgcaagtgaggccaggcccggaggcggccgcgggcaccctggaacccggcggcattttgcacatccactcctcaccttccctgccttggtgctgccagcagcagacatagacgggtgcagaagcggggagctccaggtgcaggagggcaccggccggggcccacgccctctgcccgcctccctggggctccttcctgccacctcctcccatcacctcctgcggcagaacagcacccgtgacccacccagagagcaaggccaggggtcttggtgctccccgacggggcccggcaagttctctttcttctctctgggaaaatgaacgtccaggacacacctgtatcccagagagcaaagtgatgaggagactgagcgtccccagccccacctggcggcatggacacagaaaagctacgccggctggcctctccagaccagttcccaggctgggtctgccgctgggccctggggcggtggggacagatgttgacacaaattatttatgttttcttagtatcagaagaggattctcggcactaacacatagccagtcctaactccgtactctgtgtcagcccatcccctagacaccctctgtttcctttcccggccccacctggccggccctctgcccctgcagagctgaggcagcctggggttgatggggaccacgcggtgcctgcaggtcctagaagtgagctgggcaggggctcttcagaccacacagccctgaccgggccttggaggagagcca

SEQ ID NO: 323950 - protein, 618 aa, Artificial Sequence
  derived and/or modified sequence
METEAASTAVRTQTQAPRVVATRSTPSTQTVARASRRAQSITEAATGHARTQPLACDAAAPLDSHCSRTGRHAKTSTSAWSTTEAATTSAATPWAASSAAAGRATSCSPTSAPARTSTSAPSSGPVTTSASTPQARAKETARQPLLDHCHVTFVTLKCDSSKKRRRGRKSPSKEVSHITAEFEIETKMEEASDTCEADCLRKRAEQSLQAAIKTLRKSIGRQQFYVQVSGTEYEVAQRPAKALEGQGACGAGQVLQDSKCVACGPGTHFGGELGQCVSCMPGTYQDMEGQLSCTPCPSSDGLGLPGARNVSECGGQCSPGFFSADGFKPCQACPVGTYQPEPGRTGCFPCGGGLLTKHEGTTSFQDCEAKVHCSPGHHYNTTTHRCIRCPVGTYQPEFGQNHCITCPGNTSTDFDGSTNVTHCKNQHCGGELGDYTGYIESPNYPGDYPANAECVWHIAPPPKRRILIVVPEIFLPIEDECGDVLVMRKSASPTSITTYETCQTYERPIAFTSRSRKLWIQFKSNEGNSGKGFQVPYVTYDEDYQQLIEDIVRDGRLYASENHQEILKDKKLIKALFDVLAHPQNYFKYTAQESKEMFPRSFIKLLRSKVSRFLRPYK

SEQ ID NO: 323951 - protein, 175 aa, Artificial Sequence
  derived and/or modified sequence
  misc_feature (1)..(1): Xaa can be any naturally occurring amino acid
XRETPKGGVACDCRPGFDLAQNQKDCTLTCNYGNGGCQHSCEDTDTGPTCGCHQKYALHSDGRTCIEKDEAAIERSQFNATSVADVDKRVKRRLLMETCAVNNGGCDRTCKDTATGVRCSCPVGFTLQPDGKTCKDINECLVNNGGCDHFCRNTVGSFECGCRKGYKLLTDERTC

SEQ ID NO: 323952 - DNA, 1857 bp, Artificial Sequence
  derived and/or modified sequence
atggaaactgaggccgcctcgactgccgtgcgcacccagacacaggcaccccgcgtagtggctacacggtccacccccagcacccagactgtggccagggccagcaggcgggcccaaagtattactgaggccgccactgggcatgctcgcacccaaccactcgcctgtgatgctgcagcaccattggatagtcattgttctcggacggggagacacgccaaaacatccacctcagcatggtccacaacagaagccgccacaacttctgccgccactccgtgggcagctagctcagcagccgccgggcgcgctaccagttgcagcccaacctctgcacctgctagaactagcactagtgccccctcatcaggccccgtgactacgagtgcaagcactccccaagcaagggcaaaggaaaccgcacggcagccgctgctggaccactgtcatgtgacatttgtgacgctcaagtgcgatagttcaaaaaaaaggaggcgtggcaggaaatcacctagtaaggaagtgtctcatattactgctgagtttgaaatcgaaacaaagatggaagaagccagcgacacctgcgaagcagattgcctaaggaaacgagcagagcaatctctccaggccgccattaagacccttcgtaaaagtatcggaaggcagcagttctatgttcaagtgtccgggacagagtatgaggtagcccaacgccccgcaaaagctctcgaaggccagggcgcctgcggggccgggcaggtgttgcaagatagcaaatgcgtggcatgcgggcccggaactcacttcgggggcgagctgggccagtgcgtttcttgtatgccaggcacctaccaggacatggaaggacagttgtcctgtactccctgtccaagcagtgacgggctgggactgcctggtgcccgaaatgtgagcgagtgcggaggccagtgcagtcccggattcttctccgcagatggattcaaaccttgtcaggcatgcccggtaggaacctatcagccagagccagggcgtaccggctgcttcccttgtggtggcggcctgctgaccaaacatgaggggacaacctcctttcaggattgtgaggctaaggtgcactgttcacctggtcaccactataatacaactactcacaggtgcatccggtgcccagttgggacatatcagccagagttcggccagaaccactgcataacatgccctggcaatacaagtacagattttgacggaagtacgaacgttacacactgcaagaaccagcactgtggtggtgaactaggggactatacaggatacattgagagcccaaattaccccggggattatcctgccaacgctgagtgtgtgtggcatatcgctcccccacccaaacggcggattctgattgtcgtgcccgagatttttctgccgatcgaagatgagtgtggggacgtgctggtgatgcgcaaatcagcgagccccacatcgattaccacttacgagacgtgtcagacctatgaacgaccgatagcgtttacctctcgaagcaggaaactctggatccaattcaaatctaatgaaggaaatagcggcaaggggttccaggtaccatatgtcacttatgatgaggactaccagcagctaatcgaagacattgtgcgggacggccgcctctatgcaagcgaaaaccatcaagagatcttgaaggataaaaagctcataaaggcactcttcgatgtgctcgcccacccccagaattacttcaaatatacagcacaagaaagcaaagagatgtttccccggtcttttataaaactgctaaggtcaaaagtgtctcggtttctccggccttacaagtag

SEQ ID NO: 323953 - DNA, 528 bp, Artificial Sequence
  derived and/or modified sequence
tagagagagactcctaaaggtggggtggcctgcgattgtcgtcctggcttcgacttggctcaaaaccaaaaggactgtacgcttacgtgtaattacggcaatggaggctgtcaacacagttgcgaagacacagacactggcccgacttgtggctgtcatcagaaatatgcccttcacagtgatggaaggacctgcatcgagaaggacgaggcagctatcgagaggtcccaatttaatgctacatcagtcgcagatgtggataagcgagtcaagagaaggctccttatggaaacctgtgcagtaaacaatgggggctgcgaccgaacctgtaaagacacagccactggcgtgagatgcagctgccccgtgggtttcactctacagcccgacggcaagacctgcaaagatatcaacgagtgcctcgtgaacaatgggggctgtgaccatttctgtaggaacaccgtaggctcatttgagtgtggatgccgcaagggatataagcttctaaccgacgagcggacctgctag

SEQ ID NO: 323954 - DNA, 1857 bp, Artificial Sequence
  derived and/or modified sequence
atggagacagaagctgccagcacagctgtgaggacccagacccaggccccccgggtggtggccaccaggagcacccccagcacccagacagtggcccgggccagccggcgggcccagagcatcacagaggccgccaccggccacgcccggacccagcccctggcctgtgatgctgctgcccccctggacagccactgcagcaggactggaagacatgccaagaccagcaccagcgcctggagcaccacagaagctgccaccaccagcgctgccaccccctgggccgccagcagcgctgctgctggccgggccaccagctgcagccccaccagcgccccagcccggaccagcaccagcgcccccagcagcggccctgtgaccaccagcgccagcaccccccaggcccgggccaaggagacagcccggcagcccctgctggaccactgccacgtgacctttgtgaccctgaagtgtgacagcagcaagaagagaagaagaggaaggaagagccccagcaaggaggtgagccacatcacagctgagtttgaaattgagaccaagatggaggaggccagtgacacctgtgaggccgactgcctgaggaagagagctgagcagagcctgcaggccgccatcaagaccctgaggaagagcatcggccggcagcagttctacgtgcaggtgtctggaacagaatatgaggtggcccagaggcctgccaaggccctggagggccagggcgcctgtggggccggccaggtgctgcaggacagcaaatgtgtggcctgtggccctggcacccactttggaggagagctgggccagtgtgtgtcctgcatgcctggcacctaccaggacatggagggccagctgagctgcaccccctgccccagcagtgatggcctgggcctgcccggggccagaaatgtgtctgaatgtggcggccagtgcagccctggcttcttcagcgcagatggcttcaagccctgccaggcctgccctgtgggcacctaccagcctgagcccggccgcacaggctgcttcccctgtggcggcggcctgctgaccaagcatgagggcaccaccagcttccaggactgtgaggccaaggtgcactgcagccctggccaccactacaacaccaccacccaccgctgcatccgctgccctgtgggcacctaccagcctgagtttggccagaaccactgcatcacctgccccggcaacaccagcacagactttgatggcagcaccaacgtgacccactgcaagaaccagcactgcggcggggagctgggggactacacaggctacatcgagagccccaactacccaggggactacccagccaatgcagaatgtgtgtggcacatcgcccccccacccaagaggcgcatcctgattgtggtgcctgagatcttcctgcccattgaagatgaatgtggagatgtgctggtgatgaggaagagcgccagccccaccagcatcaccacctatgagacctgccagacctatgagcggcccatcgccttcaccagccgcagcaggaagctgtggatccagttcaagagcaatgaaggcaacagcggcaagggcttccaggtgccctacgtgacctatgatgaggactaccagcagctgattgaagatattgtgagagatggccgcctgtatgccagcgagaaccaccaggagatcctgaaggacaagaagctgatcaaggccctgtttgatgtgctggcccacccccagaactacttcaagtacacagcccaggagagcaaggagatgttccccaggagcttcatcaagctgctgcggagcaaggtgagccgcttcctgcggccctacaagtag

SEQ ID NO: 323955 - DNA, 528 bp, Artificial Sequence
  derived and/or modified sequence
tgaagagagacccccaagggcggcgtggcctgtgactgcaggcctggctttgacctggcccagaaccagaaggactgcaccctgacctgcaactatggaaatggaggctgccagcacagctgtgaggacacagacaccggccccacctgtggctgccaccagaagtatgccctgcacagtgatggccgcacctgcatcgagaaggatgaagctgccatcgagaggagccagttcaatgccacctctgtggctgatgtggacaagagggtgaagaggcggctgctgatggagacctgtgctgtgaacaatggaggctgtgacaggacctgcaaggacacagccactggagtgcgctgcagctgccctgtgggcttcaccctgcagccagatggcaagacctgcaaggacatcaatgaatgtctggtgaacaacggcggctgtgaccacttctgcaggaacacagtgggcagctttgaatgtggctgcaggaagggctacaagctgctgacagatgagaggacctgctag

SEQ ID NO: 323956 - DNA, 1857 bp, Artificial Sequence
  derived and/or modified sequence
atggagaccgaggccgccagcaccgccgtgcggacccagacccaggctcctagagtcgtagccacacgtagcactccgagcacccagaccgtggctcgggcttcgcggagagctcagagcattaccgaggcggccaccggtcacgctcggactcaaccacttgcttgcgacgccgcggccccgcttgattcacactgcagcagaactggacgccacgctaaaacctctacatccgcttggtctacaacagaggccgcaacaacctctgcagcaacaccgtgggccgcatcctccgccgccgccggaagggctacgtcttgttcccctacatctgcccccgcccgtacgagcacttccgcaccttcttccggacccgtgactactagcgcctccactccacaggcgcgggcaaaagaaaccgccagacagcccctgctggaccactgtcatgtgactttcgtgacattgaagtgcgactctagcaagaagcgcaggcggggacgcaaatcgccgtctaaggaggttagtcatatcacagcagagttcgagatcgaaaccaagatggaagaggccagcgatacttgtgaagctgattgtcttaggaagcgcgctgaacagagcctgcaggctgccattaaaactctgcgaaaaagtatcggccggcaacagttttacgtgcaggtaagcggcactgagtacgaggtagcccagcgaccggcaaaggcactggaggggcaaggggcatgtggggccgggcaggtgttgcaggatagcaaatgtgtggcttgtggccctggaactcacttcggcggggagctcgggcaatgtgtgagttgcatgcctgggacataccaggatatggaaggacaactgtcgtgcaccccttgtccatctagtgacggactcggcctgccaggggcccgcaatgtaagcgagtgcggcgggcagtgcagccctggattctttagtgcggacggttttaagccgtgccaagcctgcccagttggaacgtaccaacctgaaccaggcagaaccgggtgctttccatgcggaggcggcctgctgacaaagcacgaagggaccacatcattccaggattgtgaagctaaggtgcattgctccccaggacaccactataacacgaccactcaccgttgcatacgttgccccgtaggcacataccagccagagtttggccagaatcattgtattacctgtccaggtaacaccagtactgatttcgatgggtctacaaacgtgacacactgtaaaaatcagcattgtggcggagaattgggtgactacaccgggtacatcgagagcccaaattaccctggcgattaccccgcaaatgctgaatgtgtttggcacatagctcccccacccaaacgacgcatcctgatcgtcgtccccgaaattttcctgcccatcgaggatgaatgtggagatgtgttggtcatgaggaagtcagccagccctaccagcattacaacctacgagacctgccagacttatgagagacccattgcttttacctcccgctctcgaaaactctggatccaattcaagagtaatgaaggaaacagcggaaagggcttccaggtgccctacgtcacatatgacgaagactaccagcagttgatcgaagacatcgtgagggatgggagactctacgcatctgaaaatcatcaggagattcttaaggacaagaagcttatcaaggccctgttcgatgtgttagcgcaccctcagaactattttaaatacactgcccaggagtccaaggagatgttcccgcgcagctttataaagctgttgaggtctaaggtgagtcgatttttaagaccttataaatag

SEQ ID NO: 323957 - DNA, 528 bp, Artificial Sequence
  derived and/or modified sequence
tgacgggagacccccaagggcggcgtggcctgcgactgccggcccgggttcgacctggcccaaaatcaaaaagactgcaccctgacatgtaactacggtaacggcggatgtcagcatagttgcgaagatacagacaccggtcctacttgcggatgtcatcagaagtacgccctgcatagcgacggtcgcacctgtattgagaaagacgaggctgcaatagaacggtcccaattcaatgccaccagcgtcgccgacgtggataaaagggtcaagcgaaggctactgatggaaacatgtgctgtgaacaacggtggctgcgaccggacctgtaaggatactgcgaccggtgttcgttgctcttgtcccgtcgggttcaccttacagcccgacggtaagacatgtaaagacattaatgaatgtctggtgaacaacgggggatgcgaccatttctgtaggaatactgtgggttctttcgaatgtgggtgcaggaaagggtacaaattgctcaccgacgagcgtacatgttag

SEQ ID NO: 323958 - DNA, 1857 bp, Artificial Sequence
  derived and/or modified sequence
atggagacggaggcggcttccactgcagtcagaactcagacgcaggccccaagggtggtggcgaccagatcaacccctagcactcagacggttgccagggcctccaggagagcccagtcaatcactgaggccgcaaccggccacgcacggacgcagcctctggcctgcgatgcggctgccccactagactcgcattgttcacgcacaggtcgccacgccaagacctctacttctgcttggtctacaaccgaggccgcaaccacttccgctgctactccatgggcagcttccagcgccgctgccggacgagcaacatcctgcagtcccacttccgcccctgctcggaccagtacatcggccccatcgtccgggccagtgacaacttctgcatcaacccctcaggctagagccaaggagacagcacgacaacctctgctagatcactgtcacgtgactttcgtcacactaaagtgcgacagttccaagaaaagaagaagaggtaggaaaagtccctccaaagaagtgagtcatatcactgccgaatttgagatcgaaacgaaaatggaagaagcttctgacacttgcgaagccgattgcttgcgtaaacgcgctgagcagtccctccaggctgccatcaagacactgagaaagagcattgggagacagcagttctacgttcaagtttctggtaccgaatatgaggtggcacaacgaccagcgaaggccctggaaggccaaggggcatgcggggctggacaagtgttacaagattcaaagtgtgtggcgtgcgggcctggcactcacttcggcggagaactgggccagtgcgtgagttgtatgcccggtacgtaccaggatatggaaggtcaactctcttgcaccccgtgtccctcctcagatggactggggctgcctggtgcccgaaacgtgagcgagtgtggtggtcaatgctctcctggctttttttcggccgatggattcaagccgtgtcaagcttgccccgttggtacttaccagcccgaaccagggcgaacaggctgctttccatgcggtggcggacttttgaccaaacatgagggtacaacttcttttcaggactgcgaggcaaaggtccattgtagtccagggcaccactataatactaccactcatcgctgcattaggtgcccagtgggcacctatcagcctgagtttggccaaaaccactgtatcacctgccccggaaacaccagtacagactttgacgggagcaccaatgtgacgcattgcaagaatcagcattgtggcggagagctcggagactacactggctatattgaatcgcctaactatccaggcgattatcctgccaatgcagagtgtgtgtggcatattgcccctccacctaaacgacgcatcctgattgtcgtgcccgagatctttctgccgatagaggacgaatgtggcgatgtgctcgtcatgcgtaaatccgccagcccgacttcaatcacaacttacgagacgtgccagacatatgaaagaccaatcgcctttacaagcagaagcaggaagctgtggattcaatttaaatccaatgaaggaaatagtggcaaggggttccaggttccttacgtaacgtacgacgaggactaccagcaactgatcgaggatattgtgagagacggcaggctgtacgctagtgagaatcaccaggagattctaaaggacaaaaagctcatcaaggccctcttcgacgtcctggctcatcctcagaactattttaaatacactgctcaggagtcgaaggagatgtttccgagaagcttcattaaactgctgcggtccaaggtgagcagattcttgcgtccctacaagtag

SEQ ID NO: 323959 - DNA, 528 bp, Artificial Sequence
  derived and/or modified sequence
taacgcgaaaccccgaaaggaggtgtggcgtgcgactgtcgcccaggattcgacctcgctcaaaaccaaaaagactgtactcttacttgtaattatgggaatgggggatgtcagcactcttgtgaggacacagacaccggcccaacctgcggctgccaccagaaatacgcacttcactcagatgggagaacctgcatcgagaaagacgaagccgctatagagcgctctcagttcaatgccacatccgtggcagatgtcgataaacgggtgaaacgtcgattactgatggagacctgtgccgtgaataacggcggatgcgacaggacttgcaaagatacagccacaggggttcgctgctcatgtcctgtaggctttacactgcagcccgacgggaagacctgtaaagatatcaatgagtgcctggttaataatggtggctgcgaccacttttgccgtaacacagtggggtcattcgagtgcggctgccgcaaaggttataaacttcttactgacgagagaacgtgctag

SEQ ID NO: 323960 - DNA, 3340 bp, Artificial Sequence
  derived and/or modified sequence
gagcagcgagcagcgcctgcgggagcggccggtcggtcgggtccccgcgccccgcacgcccgcacgcccagcggggcccgcattgagcatgggcgcggcggccgtgcgctggcacttgtgcgtgctgctggccctgggcacacgcgggcggctggccgggggcagcgggctcccagggtcagtcgacgtggatgagtgctcagagggcacagatgactgccacatcgatgccatctgtcagaacacgcccaagtcctacaaatgcctctgcaagccaggctacaagggggaaggcaagcagtgtgaagacattgacgagtgtgagaatgactactacaatgggggctgtgtccacgagtgcatcaacatcccggggaactacaggtgtacctgctttgatggcttcatgctggcacacgatggacacaactgcctggatgtggacgagtgtcaggacaataatggtggctgccagcagatctgcgtcaatgccatgggcagctacgagtgtcagtgccacagtggcttcttccttagtgacaaccagcatacctgcatccaccgctccaatgagggtatgaactgcatgaacaaagaccatggctgtgcccacatctgccgggagacgcccaaaggtggggtggcctgcgactgcaggcccggctttgaccttgcccaaaaccagaaggactgcacactaacctgtaattatggaaacggaggctgccagcacagctgtgaggacacagacacaggccccacgtgtggttgccaccagaagtacgccctccactcagacggtcgcacgtgcatcgagacgtgcgcagtcaataacggaggctgcgaccggacatgcaaggacacagccactggcgtgcgatgcagctgccccgttggattcacactgcagccggacgggaagacatgcaaagacatcaacgagtgcctggtcaacaacggaggctgcgaccacttctgccgcaacaccgtgggcagcttcgagtgcggctgccggaagggctacaagctgctcaccgacgagcgcacctgccaggacatcgacgagtgctccttcgagcggacctgtgaccacatctgcatcaactccccaggcacgagcaaaggagaccgccaggcagccgctgctggaccactgccatgtgactttcgtgaccctcaagtgtgactcctccaagaagaggcgccgtggccgcaagtccccatccaaggaggtgtcccacatcacagcagagtttgagatcgagacaaagatggaagaggcctcagacacatgcgaagcggactgcttgcggaagcgagcagaacagagcctgcaggccgccatcaagaccctgcgcaagtccatcggccggcagcagttctatgtccaggtctcaggcactgagtacgaggtagcccagaggccagccaaggcgctggaggggcagggggcatgtggcgcaggccaggtgctacaggacagcaaatgcgttgcctgtgggcctggcacccacttcggtggtgagctcggccagtgtgtgtcatgtatgccaggaacataccaggacatggaaggccagctcagttgcacaccgtgccccagcagcgacgggcttggtctgcctggtgcccgcaacgtgtcggaatgtggaggccagtgttctccaggcttcttctcggccgatggcttcaagccctgccaggcctgccccgtgggcacgtaccagcctgagcccgggcgcaccggctgcttcccctgtggagggggtttgctcaccaaacacgaaggcaccacctccttccaggactgcgaggctaaagtgcactgctcccccggccaccactacaacaccaccacccaccgctgcatccgctgccccgtcggcacctaccagcccgagtttggccagaaccactgcatcacctgtccgggcaacaccagcacagacttcgatggctccaccaacgtcacacactgcaaaaaccagcactgcggcggcgagcttggtgactacaccggctacatcgagtcccccaactaccctggcgactacccagccaacgctgaatgcgtctggcacatcgcgcctcccccaaagcgcaggatcctcatcgtggtccctgagatcttcctgcccatcgaggatgagtgcggcgatgttctggtcatgaggaagagtgcctctcccacgtccatcaccacctatgagacctgccagacctacgagaggcccatcgccttcacctcccgctcccgcaagctctggatccagttcaaatccaatgaaggcaacagcggcaaaggcttccaagtgccctatgtcacctacgatgaggactaccagcaactcatagaggacatcgtgcgcgatgggcgcctgtacgcctcggagaaccaccaggaaattttgaaagacaagaagctgatcaaggccctcttcgacgtgctggcgcatccccagaactacttcaagtacacagcccaggaatccaaggagatgttcccacggtccttcatcaaactgctgcgctccaaagtgtctcggttcctgcggccctacaaataaccggggggagcggccctgcctgggggtggcctggtccgcggagggtgcacctgccctccacagtgggagctgcatgggcctccacaccaccttgggaaccccatggcactgcccttcagggaagccgaccagcccatggagaccgagcccaggcacccttcggacccgctgcccctgtgggagcaccctgcttcaggaagcctccctccctccctctgcctcccttccccaggacaccaagagcgccctctcctgagccctggcagaccgactgcaggtagcaggattgcaggaccctctgcctggcctggcgtttcaggagagaggggaagtggggcctgtgctctgggaggcgtggtcatccgagacaggagtccaggggagagaggaggggacaaaggcgccgtctgggggaggtcgatgagcctgtgctggcatccgcgggccccacgctttgccaactcctccagccacaggcaaggccacggctccgggctgttgcgctctaagggttctgtgattggatggaacagagctgctggggaggagactggaagtttctgcattccttcaacagaacatttaatgaagtactctatatatatatataaatatatatataaatatatatatatacttctatttgtgggtactttaggaaaatgccctttggtcactgtaaatatgaattgtgaccccatcccttcccgcatgagcccagtgagtcccagcagctatcagcctccctgaacgattaaacagctcctcccagc

SEQ ID NO: 323961 - DNA, 524 bp, Artificial Sequence
  derived and/or modified sequence
ccgggagacgcccaaaggtggggtggcctgcgactgcaggcccggctttgaccttgcccaaaaccagaaggactgcacactaacctgtaattatggaaacggaggctgccagcacagctgtgaggacacagacacaggccccacgtgtggttgccaccagaagtacgccctccactcagacggtcgcacgtgcatcgagaaggatgaggctgcaattgagcgctctcagttcaatgccacgtcagtagctgatgtggacaagcgggtgaaacggcggctactcatggagacgtgcgcagtcaataacggaggctgcgaccggacatgcaaggacacagccactggcgtgcgatgcagctgccccgttggattcacactgcagccggacgggaagacatgcaaagacatcaacgagtgcctggtcaacaacggaggctgcgaccacttctgccgcaacaccgtgggcagcttcgagtgcggctgccggaagggctacaagctgctcaccgacgagcgcacctgcc

SEQ ID NO: 323962 - DNA, 1857 bp, Artificial Sequence
  derived and/or modified sequence
atggagaccgaggccgccagcaccgccgtgagaacccagacccaggcccccagagtggtggccaccagaagcacccccagcacccagaccgtggccagagccagcagaagagcccagagcatcaccgaggccgccaccggccacgccagaacccagcccctggcctgcgacgccgccgcccccctggacagccactgcagcagaaccggcagacacgccaagaccagcaccagcgcctggagcaccaccgaggccgccaccaccagcgccgccaccccctgggccgccagcagcgccgccgccggcagagccaccagctgcagccccaccagcgcccccgccagaaccagcaccagcgcccccagcagcggccccgtgaccaccagcgccagcaccccccaggccagagccaaggagaccgccagacagcccctgctggaccactgccacgtgaccttcgtgaccctgaagtgcgacagcagcaagaagagaagaagaggcagaaagagccccagcaaggaggtgagccacatcaccgccgagttcgagatcgagaccaagatggaggaggccagcgacacctgcgaggccgactgcctgagaaagagagccgagcagagcctgcaggccgccatcaagaccctgagaaagagcatcggcagacagcagttctacgtgcaggtgagcggcaccgagtacgaggtggcccagagacccgccaaggccctggagggccagggcgcctgcggcgccggccaggtgctgcaggacagcaagtgcgtggcctgcggccccggcacccacttcggcggcgagctgggccagtgcgtgagctgcatgcccggcacctaccaggacatggagggccagctgagctgcaccccctgccccagcagcgacggcctgggcctgcccggcgccagaaacgtgagcgagtgcggcggccagtgcagccccggcttcttcagcgccgacggcttcaagccctgccaggcctgccccgtgggcacctaccagcccgagcccggcagaaccggctgcttcccctgcggcggcggcctgctgaccaagcacgagggcaccaccagcttccaggactgcgaggccaaggtgcactgcagccccggccaccactacaacaccaccacccacagatgcatcagatgccccgtgggcacctaccagcccgagttcggccagaaccactgcatcacctgccccggcaacaccagcaccgacttcgacggcagcaccaacgtgacccactgcaagaaccagcactgcggcggcgagctgggcgactacaccggctacatcgagagccccaactaccccggcgactaccccgccaacgccgagtgcgtgtggcacatcgcccccccccccaagagaagaatcctgatcgtggtgcccgagatcttcctgcccatcgaggacgagtgcggcgacgtgctggtgatgagaaagagcgccagccccaccagcatcaccacctacgagacctgccagacctacgagagacccatcgccttcaccagcagaagcagaaagctgtggatccagttcaagagcaacgagggcaacagcggcaagggcttccaggtgccctacgtgacctacgacgaggactaccagcagctgatcgaggacatcgtgagagacggcagactgtacgccagcgagaaccaccaggagatcctgaaggacaagaagctgatcaaggccctgttcgacgtgctggcccacccccagaactacttcaagtacaccgcccaggagagcaaggagatgttccccagaagcttcatcaagctgctgagaagcaaggtgagcagattcctgagaccctacaagtag

SEQ ID NO: 323963 - DNA, 528 bp, Artificial Sequence
  derived and/or modified sequence
tgaagagagacccccaagggcggcgtggcctgcgactgcagacccggcttcgacctggcccagaaccagaaggactgcaccctgacctgcaactacggcaacggcggctgccagcacagctgcgaggacaccgacaccggccccacctgcggctgccaccagaagtacgccctgcacagcgacggcagaacctgcatcgagaaggacgaggccgccatcgagagaagccagttcaacgccaccagcgtggccgacgtggacaagagagtgaagagaagactgctgatggagacctgcgccgtgaacaacggcggctgcgacagaacctgcaaggacaccgccaccggcgtgagatgcagctgccccgtgggcttcaccctgcagcccgacggcaagacctgcaaggacatcaacgagtgcctggtgaacaacggcggctgcgaccacttctgcagaaacaccgtgggcagcttcgagtgcggctgcagaaagggctacaagctgctgaccgacgagagaacctgctag

SEQ ID NO: 323964 - protein, 580 aa, Artificial Sequence
  derived and/or modified sequence
MNFLRRRLSDSSFMANLPNGYMTDLQRPDSSTSSPASPAMERRHPQPLAASFSSPGSSLFSSLSSAMKQAPQATSGLMEPPGPSTPIVQRPRILLVIDDAHTDWSKYFHGKKVNGEIEIRVEQAEFSELNLAAYVTGGCMVDMQVVRNGTKVVSRSFKPDFILVRQHAYSMALGEDYRSLVIGLQYGGLPAVNSLYSVYNFCSKPWVFSQLIKIFHSLGPEKFPLVEQTFFPNHKPMVTAPHFPVVVKLGHAHAGMGKIKVENQLDFQDITSVVAMAKTYATTEAFIDSKYDIRIQKIGSNYKAYMRTSISGNWKANTGSAMLEQVAMTERYRLWVDSCSEMFGGLDICAVKAVHSKDGRDYIIEVMDSSMPLIGEHVEEDRQLMADLVVSKMSQLPMPGGTAPSPLRPWAPQIKSAKSPGQAQLGPQLGQPQPRPPPQGGPRQAQSPQPQRSGSPSQQRLSPQGQQPLSPQSGSPQQQRSPGSPQLSRASSGSSPNQASKPGATLASQPRPPVQGRSTSQQGEESKKPAPPHPHLNKSQSLTNSLSTSDTSQRGTPSEDEAKAETIRNLRKSFASLFSD

SEQ ID NO: 323965 - protein, 186 aa, Artificial Sequence
  derived and/or modified sequence
MDSSMPLIGEHVEEDRQLMADLVVSKMSQLPMPGGTAPSPLRPWAPQIKSAKSPGQAQLGPQLGQPQPRPPPQGGPRQAQSPQQQRSPGSPQLSRASSGSSPNQASKPGATLASQPRPPVQGRSTSQQGEESKKPAPPHPHLNKSQSLTNSLSTSDTSQRGTPSEDEAKAETIRNLRKSFASLFSD

SEQ ID NO: 323966 - DNA, 561 bp, Artificial Sequence
  derived and/or modified sequence
atggacagcagcatgcccctgatcggcgagcacgtggaggaggacagacagctgatggccgacctggtggtgagcaagatgagccagctgcccatgcccggcggcaccgcccccagccccctgagaccctgggccccccagatcaagagcgccaagagccccggccaggcccagctgggcccccagctgggccagccccagcccagaccccccccccagggcggccccagacaggcccagagcccccagcagcagagaagccccggcagcccccagctgagcagagccagcagcggcagcagccccaaccaggccagcaagcccggcgccaccctggccagccagcccagaccccccgtgcagggcagaagcaccagccagcagggcgaggagagcaagaagcccgcccccccccacccccacctgaacaagagccagagcctgaccaacagcctgagcaccagcgacaccagccagagaggcacccccagcgaggacgaggccaaggccgagaccatcagaaacctgagaaagagcttcgccagcctgttcagcgactag

SEQ ID NO: 323967 - DNA, 561 bp, Artificial Sequence
  derived and/or modified sequence
atggattcgagcatgccactgatcggggagcatgtggaagaggacaggcaattaatggctgacctggtggtgagcaagatgagccagctgcccatgccgggtggcacggcccctagtccactgcgcccatgggccccacaaatcaaaagcgccaaatcccccggccaagcccagctgggcccacagctggggcaaccccaacctcgccccccaccccaaggcgggcccagacaggcacagtctccccagcaacagaggtcccctggatctcctcagttaagccgggcctccagcgggtcgtcgccaaaccaggcctctaagccaggcgcaacactggccagccaaccccgcccacccgtacaggggcgctcaacctcgcagcagggcgaggaatcgaagaagccagcacctccccacccccacctgaataagtcccagagtctaaccaactccctcagtacctctgacacaagccagcgcgggactccaagcgaagatgaggccaaagccgagacaatccgtaacctccggaaaagtttcgctagtttattttctgattag

SEQ ID NO: 323968 - DNA, 561 bp, Artificial Sequence
  derived and/or modified sequence
atggacagctccatgcccctcatcggggagcacgtggaggaggaccggcagctgatggctgacctggtggtgtccaagatgagccagctgcccatgcctgggggcacagcccccagccccctgcggccctgggccccccagatcaagagcgccaagagccctggccaggcccagctgggcccccagctgggccagccccagccccggcccccaccccagggcggcccccggcaggcccagagcccccagcagcagaggagccctggcagcccccagctgagccgggccagcagcggcagcagccccaaccaggccagcaagccaggggccaccctggccagccagccccggccccctgtgcagggccgcagcaccagccagcagggcgaggagagcaagaagccagccccaccccacccccacctgaacaagagccagagcctgaccaacagcctgagcaccagtgacaccagccagaggggcacccccagtgaagatgaggccaaggccgagaccatccggaacctgaggaagagctttgccagcctcttcagtgactag

SEQ ID NO: 323969 - DNA, 561 bp, Artificial Sequence
  derived and/or modified sequence
atggacagcagcatgcccctgatcggcgagcacgtggaggaggacaggcagctgatggctgacctagtcgtttcgaaaatgtctcagttacccatgcctggaggaacagccccaagtcccctgcggccctgggccccccaaatcaagagtgctaaatctccaggccaggctcaactagggccacagctgggccagcctcagccaaggcctcctcctcaggggggcccccgacaagctcagtctcctcagcagcaaagatcccccggttctccccagttgtcaagagccagcagcggctcgagtcccaatcaggcctccaagcccggtgcgacactggcctcacagcctcggcctccagtccaaggcaggagcacttcccaacagggcgaggagtccaagaagccagccccaccccatcctcatctcaacaaatctcagtccttgacaaactcactgagtacaagtgacacctcacagcggggaaccccttcagaagacgaggcaaaagccgagaccattcggaacctcaggaagtcattcgcttctctcttttccgattag

SEQ ID NO: 323970 - DNA, 561 bp, Artificial Sequence
  derived and/or modified sequence
atggactctagcatgccactcattggagaacatgtggaggaggacagacagttaatggcagacctcgtggtttctaagatgagccagctccctatgcctgggggaactgctccctccccccttagaccctgggcaccgcaaataaagagtgctaaaagtcctggacaggcccagcttggaccacagctgggacagccccaacccagaccgccaccacaggggggtccacgccaggcccagtcaccccagcagcaacggagccctggctcccctcagctgtccagggcatcatctggcagcagtccaaaccaggcctcaaaacccggagccaccctggcctcccagcctcggccacctgtacaagggcgaagcaccagccagcagggcgaagagtctaaaaagcctgctcctcctcatccccacctaaataagagccagagcctgaccaatagcctctctacatctgatacatcccaacgaggcacacccagcgaagatgaagctaaagccgagactattaggaatttgcggaagagttttgctagcctgtttagcgattag

SEQ ID NO: 323971 - DNA, 974 bp, Artificial Sequence
  derived and/or modified sequence
gcttatcacaagggcgtcttattcctccactaaacaggtgtctgtggagggcacacctgcttagcaggacacggggcccattcctaaccttgggggctcccagtctggtggtggagacatagtaagcaaggggtgacagtgccgtggataagctgtcccgtgtgaaaccaggtaatggacagctcaatgccgctgattggagagcatgtggaagaggacagacagctgatggccgaccttgttgtctccaaaatgagccagctcccgatgccaggaggcacagcgccctcccccctcagaccttgggctccacagattaaatcagcgaaatccccagggcaagcccagctggggcctcagctaggccagccccagccacgcccacctccgcaaggaggccctcgccaagctcaatctccacagcagcaaaggtcaccaggctctccgcagctatcccgggcatccagtggcagctccccaaaccaggcctccaagccaggtgccaccctcgcctcacagccccggccccctgtgcagggccgtagtacctcccagcagggtgaagagtccaagaagccagcaccaccccatccgcatctcaacaaatctcagtccctgactaacagcctcagcacatccgacacctcccagcgtgggaccccaagtgaagacgaggccaaggctgaaaccatccgcaacctgaggaagtcttttgccagcctgttctctgactaacgccatccaggctgggaggggaagagtgctctgctacactcgtccccctcctgcctcatcttccttctcagccttggttcctgatgggaacagaatggagggcctgagaacatactttctaaatgcctttgacccaggaaccgattatctatatttgttcccattttccttcaccgtgacattccagcattgtctgactgtgaggtgggcctttgagagcctccaggttcctcaaaaca

SEQ ID NO: 323972 - protein, 113 aa, Artificial Sequence
  derived and/or modified sequence
MNFLRRRLSDSSFMANLPNGYMTDLQRPDSSTSSPASPAMERRHPQPLAASFSSPGSSLFSSLSSAMKQAPQATSGLMEPPGPSTPIVQRPRILLVIDDAHTDWSKYFHGKKV

SEQ ID NO: 323973 - protein, 123 aa, Artificial Sequence
  derived and/or modified sequence
MNFLRRRLSDSSFMANLPNGYMTDLQRPDSSTSSPASPAMERRHPQPLAASFSSPGSSLFSSLSSAMKQAPQATSGLMEPPGPSTPIVQRPRILLVIDDAHTDWSKYFHGKKVNGEIEIRVEQ

SEQ ID NO: 323974 - DNA, 342 bp, Artificial Sequence
  derived and/or modified sequence
atgaacttcctgagaagaagactgagcgacagcagcttcatggccaacctgcccaacggctacatgaccgacctgcagagacccgacagcagcaccagcagccccgccagccccgccatggagagaagacacccccagcccctggccgccagcttcagcagccccggcagcagcctgttcagcagcctgagcagcgccatgaagcaggccccccaggccaccagcggcctgatggagccccccggccccagcacccccatcgtgcagagacccagaatcctgctggtgatcgacgacgcccacaccgactggagcaagtacttccacggcaagaaggtgtag

SEQ ID NO: 323975 - DNA, 372 bp, Artificial Sequence
  derived and/or modified sequence
atgaacttcctgagaagaagactgagcgacagcagcttcatggccaacctgcccaacggctacatgaccgacctgcagagacccgacagcagcaccagcagccccgccagccccgccatggagagaagacacccccagcccctggccgccagcttcagcagccccggcagcagcctgttcagcagcctgagcagcgccatgaagcaggccccccaggccaccagcggcctgatggagccccccggccccagcacccccatcgtgcagagacccagaatcctgctggtgatcgacgacgcccacaccgactggagcaagtacttccacggcaagaaggtgaacggcgagatcgagatcagagtggagcagtag

SEQ ID NO: 323976 - DNA, 342 bp, Artificial Sequence
  derived and/or modified sequence
atgaactttctgagacggcgactatccgactcttcttttatggcaaatctgcccaacggctatatgaccgatttacagcggcctgatagtagtacctcatcaccggcctctccggcgatggaaaggagacaccctcagcctctggcggcctccttctcttccccagggtccagtttgttctcaagcctgtcttccgcgatgaaacaggccccacaggctactagtggcctgatggaaccccctggacctagcacccctatagtgcaacgccctcggatcctgctggtgattgatgatgcacacaccgactggagtaaatattttcacggaaagaaggtgtag

SEQ ID NO: 323977 - DNA, 372 bp, Artificial Sequence
  derived and/or modified sequence
atgaacttcctccggaggcggctgtccgacagttcattcatggcaaacctacctaacgggtatatgactgacctgcagcgaccggactcctctacttcttcacccgcttcgcccgcaatggagaggagacacccccagcccctggcggcttccttttccagcccaggatccagcctcttcagctcactcagctccgcgatgaaacaggctccccaagccacctcgggcctgatggagccacctggccccagcacaccaatcgtacagcggccaagaatcctactcgtgattgacgacgcccacaccgactggtccaagtacttccatgggaaaaaggtcaatggggaaatcgaaattagagtggaacagtag

SEQ ID NO: 323978 - DNA, 342 bp, Artificial Sequence
  derived and/or modified sequence
atgaacttcctgcggcggcggctgagtgacagcagcttcatggccaacctgcccaacggctacatgacagacctgcagaggccagacagcagcaccagcagccctgccagccctgccatggagcggcggcacccccagcccctggccgccagcttcagcagccctggcagcagcctcttcagcagcctgagcagcgccatgaagcaggccccccaggccaccagcggcctgatggagcccccaggccccagcacccccatcgtgcagaggccccgcatcctgctggtgattgatgatgcccacacagactggagcaagtacttccacggcaagaaggtgtag

SEQ ID NO: 323979 - DNA, 372 bp, Artificial Sequence
  derived and/or modified sequence
atgaacttcctgcggcggcggctgagtgacagcagcttcatggccaacctgcccaacggctacatgacagacctgcagaggccagacagcagcaccagcagccctgccagccctgccatggagcggcggcacccccagcccctggccgccagcttcagcagccctggcagcagcctcttcagcagcctgagcagcgccatgaagcaggccccccaggccaccagcggcctgatggagcccccaggccccagcacccccatcgtgcagaggccccgcatcctgctggtgattgatgatgcccacacagactggagcaagtacttccacggcaagaaggtgaatggagaaattgagatccgggtggagcagtag

SEQ ID NO: 323980 - DNA, 342 bp, Artificial Sequence
  derived and/or modified sequence
atgaacttcctgcggcggcggctgagcgacagcagcttcatggccaacctccccaacggatacatgactgatctgcagcggccagactcttcaaccagtagcccagcgtcccctgcaatggagagacggcacccccaacccctggccgcctccttttccagccctgggtcaagcctcttcagcagcttgtcttcagcgatgaaacaggcgcctcaggccacctcgggcctaatggagccccccggtccgtccacgcctatagtccaacgaccacggatcctacttgtgattgatgacgcacacaccgactggtccaagtatttccacggcaagaaagtgtag

SEQ ID NO: 323981 - DNA, 372 bp, Artificial Sequence
  derived and/or modified sequence
atgaacttcctgcggcggcggctgagcgacagcagcttcatggccaacctgcccaatggctatatgactgacttacagcgccctgacagtagcacctctagccctgcctctcccgcgatggagaggagacacccacagccgctcgccgccagcttttccagcccggggagctcactcttctctagtctttccagcgccatgaaacaggcaccccaggccactagtggcctgatggaaccgccggggccctcaactcctatcgtgcagagaccacgaatcctactcgtgattgacgatgctcatacagactggtccaaatatttccacggcaaaaaggtgaacggggagatcgagataagggtggaacagtag

SEQ ID NO: 323982 - DNA, 342 bp, Artificial Sequence
  derived and/or modified sequence
atgaattttctaagaaggcggctttctgattcctcatttatggccaacctccctaatggttacatgaccgacctacagagacccgactctagtacatcttcacccgcatctcccgcaatggagcgcaggcaccctcagcccctagcagcttcattctcgtccccaggtagtagtcttttcagttcgctatcctctgccatgaaacaagcccctcaggccacctctggactgatggagcctcccggaccttcaacccctattgtgcagcggccacgcatcctcctggtcattgacgacgcccacacagactggtctaagtacttccacggcaaaaaagtttag

SEQ ID NO: 323983 - DNA, 372 bp, Artificial Sequence
  derived and/or modified sequence
atgaacttcttaagacggcgacttagtgatagcagctttatggcgaacctccctaacggttatatgacagacctgcagaggcccgattcgtctacctcatcaccagcatctcctgccatggagagacgccaccctcagcctttggccgcaagcttctcgagccccggatcctctctcttcagttctctatctagcgctatgaaacaagctccgcaagccacttctggcttgatggagcctccgggtccatcaaccccaatagtccagagacctcggattcttctggtgattgacgatgctcacactgattggtcaaaatacttccacgggaagaaggtgaacggggagattgagatccgcgtagaacaatag

SEQ ID NO: 323984 - DNA, 632 bp, Artificial Sequence
  derived and/or modified sequence
ggattacaggcgtgagccaccctgtccggcgggaatgtaaattaatacggccattatggaaaacggcatggaggttcctcagaaaactaaaaatagaactaccatatgatccagcaggctcacttctggcaggtaaataaaggcagctaaagctgactgctggttgcgcaaaatccccctggctcttctggctaaagtcctaccactccctgtacctggcagcagcctgtcttctgggcctcacctacacacgtctgggtaggagccagtcatctccatccatccacagccatgaatttcctccggcgacgtctctctgacagcagcttcatggccaacctgcctaatggctatatgacggacctgcaacgcccagatagctccaccagctcacctgcttcccccgccatggagaggaggcacccccagcccctggctgcctccttctcctctccaggatccagcctttttagctccctctccagtgccatgaagcaggcccctcaggccacctcaggactgatggagcctccaggtccctccacgcccattgttcaaagacccaggatcctgttggtgatcgatgatgcccatacagactggtcgaagtatttccatgggaagaaggtgaa

SEQ ID NO: 323985 - DNA, 855 bp, Artificial Sequence
  derived and/or modified sequence
ttgggtttgggaggtcaggtttgtcatgccatttccgatttccagtcatcctgggggcaggatgaaatttcagagtggtttcctggccaagctagaagcagagaatagctatggatacagcacctcgtgtatctatccagcacttacttggctttttctgagtgccaggaactgtgccaagccctagcagcatgaagaatggcctttggggagcttctggggctaagagggacagtaggaggagcaattgcagtgcagggtagtgcggaagactcgagatggagaagaggacggtgaggaagccaggaaggtttcagagaggagcaggtaaataaaggcagctaaagctgactgctggttgcgcaaaatccccctggctcttctggctaaagtcctaccactccctgtacctggcagcagcctgtcttctgggcctcacctacacacgtctgggtaggagccagtcatctccatccatccacagccatgaatttcctccggcgacgtctctctgacagcagcttcatggccaacctgcctaatggctatatgacggacctgcaacgcccagatagctccaccagctcacctgcttcccccgccatggagaggaggcacccccagcccctggctgcctccttctcctctccaggatccagcctttttagctccctctccagtgccatgaagcaggcccctcaggccacctcaggactgatggagcctccaggtccctccacgcccattgttcaaagacccaggatcctgttggtgatcgatgatgcccatacagactggtcgaagtatttccatgggaagaaggtgaatggagagattgagatccgagtggagcag

SEQ ID NO: 323986 - protein, 566 aa, Artificial Sequence
  derived and/or modified sequence
MFVSDFRKEFYEVVQSQRVLLFVASDVDALCACKILQALFQCDHVQYTLVPVSGWQELETAFLEHKEQFHYFILINCGANVDLLDILQPDEDTIFFVCDTHRPVNVVNVYNDTQIKLLIKQDDDLEVPAYEDIFRDEEEDEEHSGNDSDGSEPSEKRTRLEEEIVEQTMRRRQRREWEARRRDILFDYEQYEYHGTSSAMVMFELAWMLSKDLNDMLWWAIVGLTDQWVQDKITQMKYVTDVGVLQRHVSRHNHRNEDEENTLSVDCTRISFEYDLRLVLYQHWSLHDSLCNTSYTAARFKLWSVHGQKRLQEFLADMGLPLKQVKQKFQAMDISLKENLREMIEESANKFGMKDMRVQTFSIHFGFKHKFLASDVVFATMSLMESPEKDGSGTDHFIQALDSLSRSNLDKLYHGLELAKKQLRATQQTIASCLCTNLVISQGPFLYCSLMEGTPDVMLFSRPASLSLLSKHLLKSFVCSTKNRRCKLLPLVMAAPLSMEHGTVTVVGIPPETDSSDRKNFFGRAFEKAAESTSSRMLHNHFDLSVIELKAEDRSKFLDALISLLS

SEQ ID NO: 323987 - DNA, 339 bp, Artificial Sequence
  derived and/or modified sequence
atgttcgtgagcgacttcagaaaggagttctacgaggtggtgcagagccagagagtgctgctgttcgtggccagcgacgtggacgccctgtgcgcctgcaagatcctgcaggccctgttccagtgcgaccacgtgcagtacaccctggtgcccgtgagcggctggcaggagctggagaccgccttcctggagcacaaggagcagttccactacttcatcctgatcaactgcggcgccaacgtggacctgctggacatcctgcagcccgacgaggacaccatcttcttcgtgtgcgacacccacagacccgtgaacgtggtgaacgtgtacaacgactag

SEQ ID NO: 323988 - DNA, 1701 bp, Artificial Sequence
  derived and/or modified sequence
atgttcgtctccgactttcggaaggagttctatgaggtggtgcagagccagagggtcctactgtttgtggcctccgacgtagatgctctctgtgcctgtaagatactgcaagccctttttcaatgtgaccacgtccaatacacgctcgtgccagtgagtggatggcaggagctggaaaccgcttttctggaacacaaggaacagttccactactttattctcatcaattgcggtgcaaacgtggatcttctggatattctgcagcccgacgaggacactatcttttttgtgtgcgacactcaccgaccagtaaacgtggtgaacgtgtataacgatacccagatcaaactgcttatcaagcaggacgacgatttagaagtcccagcctatgaggacattttccgggacgaagaagaagacgaagagcattctggaaatgatagtgacggatccgaaccctccgaaaaaaggactaggctggaggaagagatcgtcgagcaaactatgagacgtcgccagagacgcgaatgggaagctcgtcgcagagacattcttttcgactacgaacaatacgaatatcacggaacaagttcagctatggtgatgttcgagctggcctggatgctctcaaaagacctgaacgatatgctctggtgggccatcgtgggcctgaccgaccagtgggtgcaagacaaaatcacacagatgaagtacgtgactgacgtcggggtactccagcgccatgttagccgccataatcacaggaacgaggacgaagaaaacaccctgtcggtcgattgcacccgaatctccttcgagtacgatttacgcctggtgctctaccagcactggtctctgcacgattctctgtgtaataccagctacaccgcagccaggtttaagctgtggagtgttcacgggcaaaagcggctgcaggaattcttggcagacatgggtttgcccctgaagcaggtgaaacagaaattccaggcgatggatatttcacttaaggaaaatttaagagagatgatcgaggagtcggctaacaagttcgggatgaaagacatgcgtgtccaaaccttctctattcacttcggctttaagcataaatttcttgccagcgatgttgtgtttgccacaatgtctctgatggagtcaccggagaaagatgggtctggaactgaccatttcatccaggcattggatagtctgtcaagaagcaatctggacaaactctaccatggacttgagcttgctaaaaaacagcttagagcgacgcagcagacgattgccagctgtttatgcacaaatcttgttatatcacaggggcctttcctgtactgcagcctcatggagggtacaccagatgtcatgctcttcagcaggccggccagcctgagtctcctctcgaaacatctcctgaaaagctttgtgtgttccacgaaaaataggcgttgtaaactgctgcccctggtgatggctgcccccttgagcatggaacacggcacggtcacagttgtcggtatcccccccgaaacagatagcagtgacaggaaaaacttctttggacgggctttcgaaaaggctgccgaatctacatcttctaggatgctgcacaatcacttcgatttaagcgtgattgaactcaaagctgaggaccgatcaaagttcctggacgcacttatctcattgttatcttag

SEQ ID NO: 323989 - DNA, 1701 bp, Artificial Sequence
  derived and/or modified sequence
atgtttgtgtccgatttcaggaaggaattctacgaagtcgttcagtcccagcgcgtgctgctatttgtggctagcgatgtggatgcgctctgcgcatgcaaaatactgcaggccctgtttcagtgtgaccacgttcagtacacactggtgcccgtgagcggttggcaagagctcgagacagcattcttggagcataaagaacagttccactacttcatcctgataaactgcggggccaatgtcgacttattggacatactgcagccagatgaggacacaatatttttcgtgtgcgatacacatcggcctgtcaacgtagtcaacgtatataatgacacgcagattaagctactcattaagcaagacgacgacctcgaggtccccgcctacgaggatatatttagagacgaagaagaggacgaagagcattccgggaacgatagcgacgggtctgagccatccgagaagaggacaaggttggaggaagagattgtagagcagactatgagacgtcgacaacgacgggagtgggaggcaaggcggcgagatattttgttcgattacgagcagtatgagtaccacggcacttccagcgctatggtcatgttcgagcttgcatggatgctctccaaagacctgaacgatatgctgtggtgggccattgtggggcttaccgatcaatgggtgcaggataaaattacacaaatgaagtacgtgaccgacgtgggggttttacagaggcatgtctcgcgccacaaccataggaatgaggatgaagagaacactctgagcgtggactgcacaaggatctccttcgaatacgatcttagacttgtactttatcaacattggagcttacacgattctctttgcaataccagttatactgccgccagattcaagttatggtctgtgcacggtcagaaacgcctgcaagaatttctggctgacatgggtctcccacttaagcaggtcaaacagaaatttcaagccatggacatcagcctgaaggagaatttgcgagaaatgattgaggagtcggccaacaagttcggcatgaaggacatgagagtgcagacttttagcatccactttggcttcaagcacaagttcctggcctctgacgtcgtgtttgcgaccatgtccctcatggaatctccagagaaggatggctccggtaccgatcattttatccaggctttagacagtctgagcaggtcaaacctggacaaattgtatcacgggttagaattggccaagaaacaattgagggctactcagcagaccattgcctcttgcctctgcacaaacttagtaatatctcagggcccttttctttattgttcactgatggaaggcacccctgacgttatgctcttctcaaggccggcctctctaagcctcctgtccaaacatctcctgaaatcctttgtctgctctacgaagaacagacgatgcaagttactgccactagtgatggccgcccctctcagcatggaacatggaactgtgacggtggtcggcattccaccagaaacagacagctcagaccgcaaaaatttctttgggcgcgcgtttgagaaggccgcggaatccacttcttctcggatgttgcacaaccactttgacctgtctgtgattgagttgaaggctgaggatcgctctaaatttttagatgcactcatctcactgctgtcctag

SEQ ID NO: 323990 - DNA, 339 bp, Artificial Sequence
  derived and/or modified sequence
atgttcgtgtctgattttcggaaagagttttacgaggtagtacaaagccagcgggtcctcctctttgttgctagcgatgtggacgccctttgcgcctgcaaaattctgcaagctttgttccagtgcgatcatgtccagtacacgctcgtgcctgtgtcaggctggcaggaactagagacggctttcctggagcataaggagcagtttcattattttattctcatcaactgcggagccaacgtcgaccttttagacatactacagccagatgaggacacaatattcttcgtttgtgacactcacagacccgtcaacgtggtcaacgtgtataatgactag

SEQ ID NO: 323991 - DNA, 1701 bp, Artificial Sequence
  derived and/or modified sequence
atgtttgtgtctgacttcaggaaggagttctatgaggtggtgcagagccagagggtgctgctgtttgtggccagtgatgtggatgccctgtgtgcctgcaagatcctgcaggccctcttccagtgtgaccacgtgcagtacaccctggtgcctgtgtctggctggcaggagctggagacagccttcctggagcacaaggagcagttccactacttcatcctgatcaactgtggggccaacgtggacctgctggacatcctgcagccagatgaggacaccatcttctttgtgtgtgacacccacaggcctgtgaatgtggtgaatgtgtacaatgacacccagatcaagctgctgatcaagcaggatgatgacctggaggtgcctgcctatgaggacatcttcagagatgaggaggaggatgaggagcacagcggaaatgacagtgatggcagcgagcccagcgagaagaggacccggctggaggaggagatcgtggagcagaccatgagaagacggcagaggcgggagtgggaggccaggagaagagacatcctgtttgattatgagcagtatgagtaccacggcaccagcagcgccatggtgatgtttgagctggcctggatgctgagcaaggacctgaatgacatgctgtggtgggccatcgtgggcctgacagaccagtgggtgcaggacaagatcacccagatgaagtatgtgacagatgtgggcgtgctgcagagacatgtgagccgccacaaccacagaaatgaagatgaggagaacaccctgtctgtggactgcacccgcatcagctttgaatatgacctgcggctggtgctgtaccagcactggagcctgcatgacagcctgtgcaacaccagctacacagctgcccgcttcaagctgtggagcgtgcacggccagaagaggctgcaggagttcctggccgacatgggcctgcccctgaagcaggtgaagcagaagttccaggccatggacatcagcctgaaggagaacctgcgggagatgattgaggagagcgccaacaagtttggcatgaaggacatgagggtgcagaccttcagcatccacttcggcttcaagcacaagttcctggccagtgatgtggtgtttgccaccatgagcctgatggagagccctgagaaggatggcagcggcacagaccacttcatccaggccctggacagcctgagccgcagcaacctggacaagctgtaccacggcctggagctggccaagaagcagctgcgggccacccagcagaccatcgccagctgcctgtgcaccaacctggtgatcagccagggccccttcctgtactgcagcctgatggagggcaccccagatgtgatgctgttcagcaggcctgccagcctgagcctgctgagcaagcacctgctgaagagctttgtgtgcagcaccaagaacagacgctgcaagctgctgcccctggtgatggccgcccccctgtccatggagcacggcaccgtgacagtggtgggcatccccccagagacagacagcagtgacaggaagaacttcttcggccgggcctttgagaaggctgctgagagcaccagcagcaggatgctgcacaaccactttgacctgtctgtgattgagctgaaggccgaggacaggagcaagttcctggatgccctgatcagcctgctgtcctag

SEQ ID NO: 323992 - DNA, 339 bp, Artificial Sequence
  derived and/or modified sequence
atgtttgtgtctgacttcaggaaggagttctatgaggtggtgcagagccagagggtgctgctgtttgtggccagtgatgtggatgccctgtgtgcctgcaagatcctgcaggccctcttccagtgtgaccacgtgcagtacaccctggtgcctgtgtctggctggcaggagctggagacagccttcctggagcacaaggagcagttccactacttcatcctgatcaactgtggggccaacgtggacctgctggacatcctgcagccagatgaggacaccatcttctttgtgtgtgacacccacaggcctgtgaatgtggtgaatgtgtacaatgactag

SEQ ID NO: 323993 - DNA, 1701 bp, Artificial Sequence
  derived and/or modified sequence
atgttcgtgagcgacttccggaaggagttctacgaggtggtgcagagccagcgagtgttactgtttgtcgcctccgacgttgacgccctctgcgcctgtaagatactgcaagctcttttccagtgcgaccatgtgcagtatacgctcgtccccgtgtccggatggcaggagctggagactgccttccttgagcacaaggagcagttccattactttatcctcattaattgtggtgccaatgtggatctcctggacatcctacaacccgatgaggacacgatcttcttcgtctgcgacacacacaggcctgtcaacgtcgtgaatgtgtacaacgacacccagattaaattgctgatcaaacaagacgatgacctggaggtccccgcctacgaggatatctttagagacgaagaagaggacgaggagcactcgggaaacgactccgacggttccgaaccctctgagaagcggacgcggctggaagaggaaatcgtggaacagaccatgagacgccgccagaggcgggagtgggaagccagaagacgcgatatcttgtttgactacgaacagtatgaataccacggcactagttccgcaatggtgatgttcgagcttgcctggatgctgtctaaagacctaaatgatatgttgtggtgggccattgtggggcttaccgatcagtgggttcaggataaaatcacacagatgaagtacgtgaccgacgtgggcgttctccaacgccacgttagtcggcacaaccaccgtaatgaagacgaagagaacactctgtcggttgattgcactagaatttccttcgagtacgatctgcgacttgtgctctatcagcattggagcttgcatgattctctatgtaatacaagctacactgccgctagatttaagttgtggtcagtgcacggccaaaagaggctccaagaattcttggctgacatgggcctgcctctgaagcaggtgaagcaaaagtttcaagccatggatatcagtctgaaagaaaacttaagggagatgatagaggaaagtgccaacaaattcggcatgaaagacatgagagtgcagacattcagcattcacttcgggtttaaacataaattcctggcgagcgacgtcgtctttgccaccatgtcattgatggagtcacccgaaaaagacgggagtggaactgatcacttcattcaggccttggacagcctatcaagatcaaatctggataaactctatcatggtcttgagctcgccaagaaacagcttagggcgactcagcagactattgcatcttgcctgtgcacaaatctagtcatcagtcagggacctttcctttactgtagcttgatggaaggtacacccgatgtaatgctgttttctaggccagcttcactatcgttactatccaagcatctgttgaagagtttcgtgtgttccaccaagaatcggcggtgcaagctgctgcccctggtcatggcagctcctcttagtatggagcacgggaccgtgactgttgtgggaattccgcctgagaccgacagttccgatagaaagaatttcttcggacgcgcattcgaaaaagccgctgagtcgacatctagcaggatgctccataatcacttcgacttgagcgtcatagaactcaaggctgaggacaggagcaaattcctcgatgccttgatcagccttctgtcctag

SEQ ID NO: 323994 - DNA, 1701 bp, Artificial Sequence
  derived and/or modified sequence
atgttcgtgagcgacttccggaaggagttctacgaggtggtgcagagccagagggtattgctgtttgtggctagcgacgtcgacgctttgtgcgcatgtaagattcttcaggccctcttccaatgcgaccatgtgcagtataccttagttccagtgtcaggctggcaagagcttgaaacggcctttctggagcacaaagagcagtttcactattttatccttatcaactgtggggccaatgtcgaccttttagacattctgcagccagacgaggatacgatctttttcgtctgtgatacccaccggcctgttaatgtggtaaacgtgtacaatgatacacaaatcaagctgttgatcaagcaagatgatgacctggaagtcccagcttacgaggacatctttcgcgacgaggaggaggacgaagaacattcaggcaatgatagtgatggttccgaaccttccgaaaaaagaacccgcctggaggaggaaatagtggaacaaactatgagacgccggcaacgaagggagtgggaggccagaaggagagacatcctcttcgattacgaacagtatgagtatcacgggacttcctctgccatggttatgttcgagctcgcttggatgctgtctaaagatttaaacgacatgctgtggtgggcgattgtggggctgaccgatcaatgggttcaagataagatcactcagatgaagtacgtgacagatgtgggggtgctgcagcgtcacgtaagtagacacaaccaccgaaacgaagatgaagagaatacgcttagtgttgattgtactcgtatctctttcgaatacgatcttcgactggttctgtatcaacactggtccctgcacgattcgctgtgcaacacttcctataccgccgcacgttttaagctgtggagcgtccatggccaaaaaagattacaggaattccttgcggacatggggttacccctgaagcaggtgaagcagaaatttcaggcaatggacatctcccttaaagagaacctgcgggagatgatcgaagaaagcgctaacaagtttggcatgaaagacatgagagtgcagactttctctatccatttcggcttcaaacacaaatttttggcttccgacgtagtttttgcaaccatgtcgctcatggagtcacccgaaaaagatggatctggaaccgaccattttatccaggctctggactccctgtcacgctccaatctcgacaaactgtaccatgggctggagcttgcaaagaaacagctgcgggccacacagcagacaattgccagttgcctgtgcacaaacttagtgatttcccagggcccgtttctctactgctccctgatggaggggacacccgatgtcatgctgttcagcaggcccgccagcctctcactgctcagcaagcatctgctcaaatcttttgtgtgcagcaccaaaaacagacgctgcaagctgctccccctggttatggcagccccactctctatggagcatgggaccgtaactgtggttggcatccctccggagaccgacagctcagatcgaaagaatttcttcgggcgcgctttcgagaaggcagcagaatctacgagtagtcgtatgttacataatcatttcgacctaagcgttatagaattgaaagctgaggatcgatcaaaatttctcgatgctcttattagtctattaagctag

SEQ ID NO: 323995 - DNA, 339 bp, Artificial Sequence
  derived and/or modified sequence
atgttcgtgagcgacttccggaaggagttctacgaggtggtgcagagtcaacgcgtgctgctctttgttgctagcgatgtggatgcactctgcgcatgcaaaatcctgcaggctttgttccagtgtgaccacgttcagtacactctagtgcctgtgagcggttggcaggagctcgaaaccgctttcctggagcacaaagagcagttccattacttcatcctcatcaactgtggcgccaacgttgacctgctggatatcttacagccagacgaagacacaattttctttgtatgcgacactcacagacccgtaaatgtggtaaatgtttacaacgattag

SEQ ID NO: 323996 - DNA, 2090 bp, Artificial Sequence
  derived and/or modified sequence
actacccagactgcctctgcttcagccatcgaggactcgggcggaactaagctacaaatccttcttcaaaccacaccaaaaacctattgcaaacgtaaatgctgccccattggaaagaaaggaaggctgggaactaagaagctattggttggtgatccctggaccaatcggaggagccgtgatttggcgggagtcttgaccgccgccgggctcttggtacctcagcgcgagcgccaggcgtccggccgccgtggctatgttcgtgtccgatttccgcaaagagttctacgaggtggtccagagccagagggtccttctcttcgtggcctcggacgtggatgctctgtgtgcgtgcaagatccttcaggccttgttccagtgtgaccacgtgcaatatacgctggttccagtttctgggtggcaagaacttgaaactgcatttcttgagcataaagaacagtttcattattttattctcataaactgtggagctaatgtagacctattggatattcttcaacctgatgaagacactatattctttgtgtgtgacacccataggccagtcaatgtcgtcaatgtatacaacgatacccagatcaaattactcattaaacaagatgatgaccttgaagttcccgcctatgaagacatcttcagggatgaagaggaggatgaagagcattcaggaaatgacagtgatgggtcagagccttctgagaagcgcacacggttagaagaggagatagtggagcaaaccatgcggaggaggcagcggcgagagtgggaggcccggagaagagacatcctctttgactacgagcagtatgaatatcatgggacatcgtcagccatggtgatgtttgagctggcttggatgctgtccaaggacctgaatgacatgctgtggtgggccatcgttggactaacagaccagtgggtgcaagacaagatcactcaaatgaaatacgtgactgatgttggtgtcctgcagcgccacgtttcccgccacaaccaccggaacgaggatgaggagaacacactctccgtggactgcacacggatctcctttgagtatgacctccgcctggtgctctaccagcactggtccctccatgacagcctgtgcaacaccagctataccgcagccaggttcaagctgtggtctgtgcatggacagaagcggctccaggagttccttgcagacatgggtcttcccctgaagcaggtgaagcagaagttccaggccatggacatctccttgaaggagaatttgcgggaaatgattgaagagtctgcaaataaatttgggatgaaggacatgcgcgtgcagactttcagcattcattttgggttcaagcacaagtttctggccagcgacgtggtctttgccaccatgtctttgatggagagccccgagaaggatggctcagggacagatcacttcatccaggctctggacagcctctccaggagtaacctggacaagctgtaccatggcctggaactcgccaagaagcagctgcgagccacccagcagaccattgccagctgcctttgcaccaacctcgtcatctcccaggggcctttcctgtactgctctctcatggagggcactccagatgtcatgctgttctctaggccggcatccctaagcctgctcagcaaacacctgctcaagtcctttgtgtgttcgacaaagaaccggcgctgcaaactgctgcccctggtgatggctgcccccctgagcatggagcatggcacagtgaccgtggtgggcatccccccagagaccgacagctcggacaggaagaacttttttgggagggcgtttgagaaggcagcggaaagcaccagctcccggatgctgcacaaccattttgacctctcagtaattgagctgaaagctgaggatcggagcaagtttctggacgcacttatttccctcctgtcctaggaatttgattcttccagaatgaccttcttatttatgtaactggctttcatttagattgtaagttatggacatgatttgagatgtagaagccattttttattaaataaaatgcttattttaggctccgtcccca

SEQ ID NO: 323997 - DNA, 1701 bp, Artificial Sequence
  derived and/or modified sequence
atgttcgtctctgatttccgcaaggaattctatgaggtggttcagtctcagcgtgtactgctctttgtcgcttcagatgtggatgccctgtgtgcttgcaagatcttacaggctctgtttcagtgtgaccacgtgcagtatacactggtgcctgtgtcagggtggcaggagctggagacggccttcctggagcataaagaacagttccattattttattctaataaactgtggcgcaaacgtggacctcctggatatcctgcagcctgatgaggataccatcttctttgtatgcgatactcaccggcctgtcaatgtggtcaacgtctacaacgacacccagattaagctcctgataaaacaggacgatgatctcgaggtgcccgcatacgaggacatcttccgcgatgaagaggaggacgaggaacattctggtaacgatagcgacggttcggaaccctcagaaaagagaacccgtctggaggaggaaattgtggaacagacgatgaggcggcgtcagcggcgagagtgggaggccaggaggcgcgacatcctctttgactacgaacagtatgaataccacggcacttcctccgcaatggtgatgtttgagctcgcttggatgctctctaaggacctcaacgacatgctgtggtgggcaattgtgggcttgacagatcaatgggtccaggacaaaattacacaaatgaaatatgtcacggatgtcggagtgttgcagcggcatgttagtcggcataaccaccgcaatgaggacgaggaaaacaccctatcagttgattgtacacggatcagtttcgaatacgatttgcgtcttgtcctgtaccaacactggagcctccacgactcgctgtgcaatactagctatacagctgcacggttcaaactgtggtccgtacacgggcagaagagactgcaggagtttctggccgacatgggactgcccctgaaacaggtgaagcagaaatttcaggctatggacatctctcttaaagagaatcttcgcgagatgattgaggaatctgccaataaattcggaatgaaggatatgagagttcaaaccttcagtatccacttcgggttcaagcacaaatttcttgccagcgacgtggtgttcgccaccatgagcctgatggagagccctgaaaaggacggttccgggacagatcattttatccaagcgctagattctctgagtcgctctaatctagataagttataccacggactggaactcgcgaagaaacagctccgagctacgcaacaaacaattgcgtcgtgtttatgcaccaacctggtaatttcccaagggccatttttgtattgtagtcttatggaggggactcctgacgtgatgctgttcagccgtccagcaagtctctctctgctgagcaagcacctgcttaagtcattcgtgtgcagcactaaaaatcggaggtgcaagctgttgccactagtcatggccgctcctctttcaatggagcacggtactgtaaccgtcgttggaatcccaccagagaccgactcttccgatcgcaagaacttttttggacgagcgttcgaaaaagccgctgagtctacatcaagccggatgttacacaaccacttcgaccttagcgtgatcgaattgaaggctgaggacagatctaaattccttgatgctttgatctccttgctgagttag

SEQ ID NO: 323998 - DNA, 1701 bp, Artificial Sequence
  derived and/or modified sequence
atgttcgtctccgactttcggaaggaattttatgaagtggtgcagagccagcgcgtgcttctcttcgtggcctctgatgtcgacgccctgtgcgcatgtaagatcctgcaggcactgttccagtgtgaccacgtacagtacacacttgtgcccgtgagcggatggcaagaattagagaccgccttcttggaacacaaagaacagttccactactttattctgatcaactgtggggcaaacgtggatctccttgatatcttgcaacctgatgaggatactatctttttcgtgtgcgacacccacaggcctgttaatgtcgtgaacgtgtacaatgatacccagatcaagctgctgatcaaacaagatgatgatttagaagtacctgcatacgaggatatcttccgcgatgaggaggaggacgaggagcacagtgggaacgacagtgacggcagtgagccatctgaaaaacgcaccaggctggaggaagaaatcgtagagcaaacaatgagaagaagacagcggcgagagtgggaagccaggcgtcgggacattctgtttgactatgagcagtatgagtatcatggaacatccagcgctatggtgatgttcgagctcgcatggatgctgagcaaggacctcaacgatatgctgtggtgggccattgtgggactgaccgaccagtgggtgcaggataagattacccagatgaaatatgtaacagacgtgggagtgctgcaacgccatgtgagcaggcacaaccatagaaatgaagatgaggaaaataccttatctgtggattgtacccgcatttcattcgagtacgatttgcgcctggtgctgtaccagcactggtcacttcatgactccctgtgtaacacctcttataccgccgctcgcttcaaactgtggagcgtgcacggacagaaaaggctgcaggagttcctcgccgatatgggactgcccttgaaacaggttaagcagaaattccaggctatggatatcagcctgaaagagaatttacgcgaaatgattgaggagagcgcaaacaaattcggcatgaaggacatgcgggtgcagactttttctatccatttcgggtttaaacacaagtttctggccagcgacgtggtctttgctactatgtcattgatggaatctccggaaaaagatggttccggcaccgatcacttcattcaggcacttgatagtttatcccgctcaaacctagataaactataccacggattggagctggcgaagaaacagctgagggccactcagcagaccatcgcgtcttgtctctgtaccaatctggttatatcccagggcccatttctctactgttcgctgatggagggaaccccagacgtgatgcttttctcacgcccagcctccttatccctgctgtcgaagcacctgttgaagagttttgtctgttctaccaaaaatcgacgctgcaagctcctcccacttgtaatggctgcgcctttatccatggaacatggaacggtgacggtcgttggtatcccacctgaaaccgactcaagtgaccgcaaaaacttcttcggacgagcgttcgagaaggccgctgagtcgacttctagccgaatgctgcacaaccactttgacctgtccgtgatcgaactgaaagcagaagatcggtccaagtttctagatgccctgatcagcttgttgagctag

SEQ ID NO: 323999 - DNA, 339 bp, Artificial Sequence
  derived and/or modified sequence
atgttcgtgagtgatttccgtaaggagttctatgaagtggtgcagtcacaaagggtcctactgttcgtcgcatcggatgtggacgccctctgtgcctgcaagattctccaagccctcttccagtgtgatcacgtccagtataccctggtgccagtatcgggctggcaggagctggaaactgcctttcttgagcacaaagagcagttccactacttcatccttattaactgcggcgctaatgtcgacctcctcgacatccttcagccggacgaagatacaattttcttcgtttgtgatacccaccgtcctgttaatgtagtgaatgtgtacaacgattag

SEQ ID NO: 324000 - DNA, 568 bp, Artificial Sequence
  derived and/or modified sequence
agaggtgacgcttctttgggggcgggctggagttttctggccgtgaatggcagagcgctaatggccgcctccaatgtggcccaatcagaaagaaaggaaggctgggaactaagaagctattggttggtgatccctggaccaatcggaggagccgtgatttggcgggagtcttgaccgccgccgggctcttggtacctcagcgcgagcgccaggcgtccggccgccgtggctatgttcgtgtccgatttccgcaaagagttctacgaggtggtccagagccagagggtccttctcttcgtggcctcggacgtggatgctctgtgtgcgtgcaagatccttcaggccttgttccagtgtgaccacgtgcaatatacgctggttccagtttctgggtggcaagaacttgaaactgcatttcttgagcataaagaacagtttcattattttattctcataaactgtggagctaatgtagacctattggatattcttcaacctgatgaagacactatattctttgtgtgtgacacccataggccagtcaatgtcgtcaatgtatacaacgata

SEQ ID NO: 324001 - DNA, 1909 bp, Artificial Sequence
  derived and/or modified sequence
gatttggcgggagtcttgaccgccgccgggctcttggtacctcagcgcgagcgccaggcgtccggccgccgtggctatgttcgtgtccgatttccgcaaagagttctacgaggtggtccagagccagagggtccttctcttcgtggcctcggacgtggatgctctgtgtgcgtgcaagatccttcaggccttgttccagtgtgaccacgtgcaatatacgctggttccagtttctgggtggcaagaacttgaaactgcatttcttgagcataaagaacagtttcattattttattctcataaactgtggagctaatgtagacctattggatattcttcaacctgatgaagacactatattctttgtgtgtgacacccataggccagtcaatgtcgtcaatgtatacaacgatacccagatcaaattactcattaaacaagatgatgaccttgaagttcccgcctatgaagacatcttcagggatgaagaggaggatgaagagcattcaggaaatgacagtgatgggtcagagccttctgagaagcgcacacggttagaagaggagatagtggagcaaaccatgcggaggaggcagcggcgagagtgggaggcccggagaagagacatcctctttgactacgagcagtatgaatatcatgggacatcgtcagccatggtgatgtttgagctggcttggatgctgtccaaggacctgaatgacatgctgtggtgggccatcgttggactaacagaccagtgggtgcaagacaagatcactcaaatgaaatacgtgactgatgttggtgtcctgcagcgccacgtttcccgccacaaccaccggaacgaggatgaggagaacacactctccgtggactgcacacggatctcctttgagtatgacctccgcctggtgctctaccagcactggtccctccatgacagcctgtgcaacaccagctataccgcagccaggttcaagctgtggtctgtgcatggacagaagcggctccaggagttccttgcagacatgggtcttcccctgaagcaggtgaagcagaagttccaggccatggacatctccttgaaggagaatttgcgggaaatgattgaagagtctgcaaataaatttgggatgaaggacatgcgcgtgcagactttcagcattcattttgggttcaagcacaagtttctggccagcgacgtggtctttgccaccatgtctttgatggagagccccgagaaggatggctcagggacagatcacttcatccaggctctggacagcctctccaggagtaacctggacaagctgtaccatggcctggaactcgccaagaagcagctgcgagccacccagcagaccattgccagctgcctttgcaccaacctcgtcatctcccaggggcctttcctgtactgctctctcatggagggcactccagatgtcatgctgttctctaggccggcatccctaagcctgctcagcaaacacctgctcaagtcctttgtgtgttcgacaaagaaccggcgctgcaaactgctgcccctggtgatggctgcccccctgagcatggagcatggcacagtgaccgtggtgggcatccccccagagaccgacagctcggacaggaagaacttttttgggagggcgtttgagaaggcagcggaaagcaccagctcccggatgctgcacaaccattttgacctctcagtaattgagctgaaagctgaggatcggagcaagtttctggacgcacttatttccctcctgtcctaggaatttgattcttccagaatgaccttcttatttatgtaactggctttcatttagattgtaagttatggacatgatttgagatgtagaagccattttttattaaataaaatgcttattttaggctccgtcccc

SEQ ID NO: 324002 - DNA, 1701 bp, Artificial Sequence
  derived and/or modified sequence
atgttcgtgagcgacttcagaaaggagttctacgaggtggtgcagagccagagagtgctgctgttcgtggccagcgacgtggacgccctgtgcgcctgcaagatcctgcaggccctgttccagtgcgaccacgtgcagtacaccctggtgcccgtgagcggctggcaggagctggagaccgccttcctggagcacaaggagcagttccactacttcatcctgatcaactgcggcgccaacgtggacctgctggacatcctgcagcccgacgaggacaccatcttcttcgtgtgcgacacccacagacccgtgaacgtggtgaacgtgtacaacgacacccagatcaagctgctgatcaagcaggacgacgacctggaggtgcccgcctacgaggacatcttcagagacgaggaggaggacgaggagcacagcggcaacgacagcgacggcagcgagcccagcgagaagagaaccagactggaggaggagatcgtggagcagaccatgagaagaagacagagaagagagtgggaggccagaagaagagacatcctgttcgactacgagcagtacgagtaccacggcaccagcagcgccatggtgatgttcgagctggcctggatgctgagcaaggacctgaacgacatgctgtggtgggccatcgtgggcctgaccgaccagtgggtgcaggacaagatcacccagatgaagtacgtgaccgacgtgggcgtgctgcagagacacgtgagcagacacaaccacagaaacgaggacgaggagaacaccctgagcgtggactgcaccagaatcagcttcgagtacgacctgagactggtgctgtaccagcactggagcctgcacgacagcctgtgcaacaccagctacaccgccgccagattcaagctgtggagcgtgcacggccagaagagactgcaggagttcctggccgacatgggcctgcccctgaagcaggtgaagcagaagttccaggccatggacatcagcctgaaggagaacctgagagagatgatcgaggagagcgccaacaagttcggcatgaaggacatgagagtgcagaccttcagcatccacttcggcttcaagcacaagttcctggccagcgacgtggtgttcgccaccatgagcctgatggagagccccgagaaggacggcagcggcaccgaccacttcatccaggccctggacagcctgagcagaagcaacctggacaagctgtaccacggcctggagctggccaagaagcagctgagagccacccagcagaccatcgccagctgcctgtgcaccaacctggtgatcagccagggccccttcctgtactgcagcctgatggagggcacccccgacgtgatgctgttcagcagacccgccagcctgagcctgctgagcaagcacctgctgaagagcttcgtgtgcagcaccaagaacagaagatgcaagctgctgcccctggtgatggccgcccccctgagcatggagcacggcaccgtgaccgtggtgggcatcccccccgagaccgacagcagcgacagaaagaacttcttcggcagagccttcgagaaggccgccgagagcaccagcagcagaatgctgcacaaccacttcgacctgagcgtgatcgagctgaaggccgaggacagaagcaagttcctggacgccctgatcagcctgctgagctag

SEQ ID NO: 324003 - protein, 520 aa, Artificial Sequence
  derived and/or modified sequence
MFVSDFRKEFYEVVQSQRVLLFVASDVDALCACKILQALFQCDHVQYTLVPVSGWQELETAFLEHKEQIKLLIKQDDDLEVPAYEDIFRDEEEDEEHSGNDSDGSEPSEKRTRLEEEIVEQTMRRRQRREWEARRRDILFDYEQYEYHGTSSAMVMFELAWMLSKDLNDMLWWAIVGLTDQWVQDKITQMKYVTDVGVLQRHVSRHNHRNEDEENTLSVDCTRISFEYDLRLVLYQHWSLHDSLCNTSYTAARFKLWSVHGQKRLQEFLADMGLPLKQVKQKFQAMDISLKENLREMIEESANKFGMKDMRVQTFSIHFGFKHKFLASDVVFATMSLMESPEKDGSGTDHFIQALDSLSRSNLDKLYHGLELAKKQLRATQQTIASCLCTNLVISQGPFLYCSLMEGTPDVMLFSRPASLSLLSKHLLKSFVCSTKNRRCKLLPLVMAAPLSMEHGTVTVVGIPPETDSSDRKNFFGRAFEKAAESTSSRMLHNHFDLSVIELKAEDRSKFLDALISLLS

SEQ ID NO: 324004 - DNA, 1563 bp, Artificial Sequence
  derived and/or modified sequence
atgttcgtgagcgacttcagaaaggagttctacgaggtggtgcagagccagagagtgctgctgttcgtggccagcgacgtggacgccctgtgcgcctgcaagatcctgcaggccctgttccagtgcgaccacgtgcagtacaccctggtgcccgtgagcggctggcaggagctggagaccgccttcctggagcacaaggagcagatcaagctgctgatcaagcaggacgacgacctggaggtgcccgcctacgaggacatcttcagagacgaggaggaggacgaggagcacagcggcaacgacagcgacggcagcgagcccagcgagaagagaaccagactggaggaggagatcgtggagcagaccatgagaagaagacagagaagagagtgggaggccagaagaagagacatcctgttcgactacgagcagtacgagtaccacggcaccagcagcgccatggtgatgttcgagctggcctggatgctgagcaaggacctgaacgacatgctgtggtgggccatcgtgggcctgaccgaccagtgggtgcaggacaagatcacccagatgaagtacgtgaccgacgtgggcgtgctgcagagacacgtgagcagacacaaccacagaaacgaggacgaggagaacaccctgagcgtggactgcaccagaatcagcttcgagtacgacctgagactggtgctgtaccagcactggagcctgcacgacagcctgtgcaacaccagctacaccgccgccagattcaagctgtggagcgtgcacggccagaagagactgcaggagttcctggccgacatgggcctgcccctgaagcaggtgaagcagaagttccaggccatggacatcagcctgaaggagaacctgagagagatgatcgaggagagcgccaacaagttcggcatgaaggacatgagagtgcagaccttcagcatccacttcggcttcaagcacaagttcctggccagcgacgtggtgttcgccaccatgagcctgatggagagccccgagaaggacggcagcggcaccgaccacttcatccaggccctggacagcctgagcagaagcaacctggacaagctgtaccacggcctggagctggccaagaagcagctgagagccacccagcagaccatcgccagctgcctgtgcaccaacctggtgatcagccagggccccttcctgtactgcagcctgatggagggcacccccgacgtgatgctgttcagcagacccgccagcctgagcctgctgagcaagcacctgctgaagagcttcgtgtgcagcaccaagaacagaagatgcaagctgctgcccctggtgatggccgcccccctgagcatggagcacggcaccgtgaccgtggtgggcatcccccccgagaccgacagcagcgacagaaagaacttcttcggcagagccttcgagaaggccgccgagagcaccagcagcagaatgctgcacaaccacttcgacctgagcgtgatcgagctgaaggccgaggacagaagcaagttcctggacgccctgatcagcctgctgagctag

SEQ ID NO: 324005 - DNA, 1563 bp, Artificial Sequence
  derived and/or modified sequence
atgttcgtctccgatttcaggaaggaattctacgaagtggtccaatcccagcgcgttctcttgttcgtggctagcgatgtcgacgccctgtgcgcttgcaaaatactacaggccttgttccagtgcgaccatgttcagtatactctggtgcccgtgagtgggtggcaggagctggagacggcattcctcgagcacaaagaacagatcaagcttctgataaagcaggatgatgatcttgaggttcccgcttatgaagatattttcagggatgaggaggaggacgaggagcattcgggaaatgattctgacgggagcgagcccagtgagaaaagaacccggctcgaggaagagattgtggaacaaactatgcgccgcaggcagagaagagagtgggaagcaaggcgcagggatattctgtttgattacgagcaatacgagtatcacggcacctccagcgccatggttatgtttgaactagcctggatgctttctaaggatctgaatgatatgttatggtgggccattgtcggcctgacagatcagtgggtccaggataaaatcacccagatgaagtacgtaactgatgtgggggttctgcagaggcatgtatcgagacacaaccataggaatgaggacgaggaaaacacactgagcgttgattgtactcgcatcagcttcgaatatgatctgaggctggtcctctatcagcactggagcttgcacgactctctttgtaatacaagctatacagctgcaaggtttaaattatggtccgtgcacggacagaagcggctgcaggaattccttgccgatatggggctgcccttaaagcaagtgaagcagaaattccaggcaatggatataagcctaaaggagaatttgcgcgagatgatcgaagaatctgcaaataaattcgggatgaaagacatgagggtgcaaacatttagcattcattttgggtttaagcacaaatttctggcttccgacgtcgtgttcgccactatgagcctcatggagagtcccgaaaaggacggaagcgggaccgatcactttatccaggcactagacagcctctcccggagcaatttggataagctctatcacggactggagctcgccaagaaacagctccgtgccacgcagcaaacaattgcttcctgcctgtgtaccaacttggttatcagccagggaccatttttatactgttcacttatggagggaacacctgatgttatgctgttttctcggcccgctagtctctccttattgagcaaacacctcttgaaatccttcgtctgttccaccaagaatagaaggtgtaaacttctacctttagttatggctgcgcccctgtccatggagcacggaaccgtgaccgttgtgggaataccacccgagaccgactcctctgacaggaaaaacttcttcgggagggcttttgaaaaggcggcagagtccacctctagccgcatgctgcataaccattttgacctgagcgtaatagaactgaaagcagaggacagatcaaaatttctcgatgccctcatttcccttttgtcttag

SEQ ID NO: 324006 - DNA, 1563 bp, Artificial Sequence
  derived and/or modified sequence
atgtttgtgtctgacttcaggaaggagttctatgaggtggtgcagagccagagggtgctgctgtttgtggccagtgatgtggatgccctgtgtgcctgcaagatcctgcaggccctcttccagtgtgaccacgtgcagtacaccctggtgcctgtgtctggctggcaggagctggagacagccttcctggagcacaaggagcagatcaagctgctgatcaagcaggatgatgacctggaggtgcctgcctatgaggacatcttcagagatgaggaggaggatgaggagcacagcggaaatgacagtgatggcagcgagcccagcgagaagaggacccggctggaggaggagatcgtggagcagaccatgagaagacggcagaggcgggagtgggaggccaggagaagagacatcctgtttgattatgagcagtatgagtaccacggcaccagcagcgccatggtgatgtttgagctggcctggatgctgagcaaggacctgaatgacatgctgtggtgggccatcgtgggcctgacagaccagtgggtgcaggacaagatcacccagatgaagtatgtgacagatgtgggcgtgctgcagagacatgtgagccgccacaaccacagaaatgaagatgaggagaacaccctgtctgtggactgcacccgcatcagctttgaatatgacctgcggctggtgctgtaccagcactggagcctgcatgacagcctgtgcaacaccagctacacagctgcccgcttcaagctgtggagcgtgcacggccagaagaggctgcaggagttcctggccgacatgggcctgcccctgaagcaggtgaagcagaagttccaggccatggacatcagcctgaaggagaacctgcgggagatgattgaggagagcgccaacaagtttggcatgaaggacatgagggtgcagaccttcagcatccacttcggcttcaagcacaagttcctggccagtgatgtggtgtttgccaccatgagcctgatggagagccctgagaaggatggcagcggcacagaccacttcatccaggccctggacagcctgagccgcagcaacctggacaagctgtaccacggcctggagctggccaagaagcagctgcgggccacccagcagaccatcgccagctgcctgtgcaccaacctggtgatcagccagggccccttcctgtactgcagcctgatggagggcaccccagatgtgatgctgttcagcaggcctgccagcctgagcctgctgagcaagcacctgctgaagagctttgtgtgcagcaccaagaacagacgctgcaagctgctgcccctggtgatggccgcccccctgtccatggagcacggcaccgtgacagtggtgggcatccccccagagacagacagcagtgacaggaagaacttcttcggccgggcctttgagaaggctgctgagagcaccagcagcaggatgctgcacaaccactttgacctgtctgtgattgagctgaaggccgaggacaggagcaagttcctggatgccctgatcagcctgctgtcctag

SEQ ID NO: 324007 - DNA, 1563 bp, Artificial Sequence
  derived and/or modified sequence
atgttcgtgagcgacttccggaaggagttctacgaggtggtgcagagccagcgagtactcctgttcgtcgctagcgatgtggatgccctctgtgcatgtaaaatcctgcaggcgcttttccagtgcgaccacgtgcagtatacattggtaccggtatccgggtggcaggaattggagacagccttcctcgaacacaaggaacagatcaaacttctgataaagcaagatgacgacttggaggtcccagcatatgaggatattttccgagatgaagaggaggatgaggagcattcaggaaacgacagtgatggcagcgagccaagcgagaagcggacgcgtctggaagaagaaatcgtagaacaaactatgcgccgcagacagcgtcgggagtgggaggctcgcaggagagacattctgtttgactatgaacagtacgagtatcacggcacgagctccgcgatggttatgttcgagctggcttggatgctgagcaaggatctgaatgatatgctctggtgggcaatcgtcggcctgactgatcaatgggttcaggataaaatcactcaaatgaaatatgtcacagacgtgggggttctacagcgtcacgtcagcagacacaaccatcgtaacgaagacgaagaaaataccctctcggtcgattgtacgagaatctcctttgagtatgatcttcggctagttctgtatcagcactggtccctgcacgactccttgtgcaacaccagctataccgctgctaggtttaaactgtggtcagttcatgggcagaagcggctccaggaattcctcgcggatatgggcctgccactcaagcaggtgaaacagaagttccaggccatggacatttcgctaaaagagaacctccgcgagatgattgaggaaagtgcgaacaaatttgggatgaaggatatgcgggttcagacattctctatccatttcgggttcaaacacaagttcctggcatcggatgttgtgtttgctacaatgtctctaatggagtcaccagagaaggatggatccgggacagaccatttcattcaagcgttggactctctttcacgtagtaacctggacaaactgtaccatggcttagagcttgcgaagaaacagcttcgcgcaacccaacagacaatcgcatcgtgtttatgcaccaatctggtgatttctcaggggcccttcttgtactgtagcttgatggagggcacccctgatgtgatgctgttcagccgacccgcgtctctgtccctcttgtcaaaacaccttctgaagtcttttgtctgttcaacaaaaaataggaggtgtaaacttttaccactagtgatggctgcccccctatccatggagcatggtaccgtcaccgtcgtggggatcccacctgagaccgatagctcagaccgtaagaacttctttggcagggccttcgaaaaagccgccgagagcacatcgagtcgaatgctgcacaatcatttcgatctatctgtgattgaattgaaggccgaagatagatcaaagttcctggatgccctgatttccctgctcagctag

SEQ ID NO: 324008 - DNA, 1693 bp, Artificial Sequence
  derived and/or modified sequence
cgcgagcgccaggcgtccggccgccgtggctatgttcgtgtccgatttccgcaaagagttctacgaggtggtccagagccagagggtccttctcttcgtggcctcggacgtggatgctctgtgtgcgtgcaagatccttcaggccttgttccagtgtgaccacgtgcaatatacgctggttccagtttctgggtggcaagaacttgaaactgcatttcttgagcataaagaacagatcaaattactcattaaacaagatgatgaccttgaagttcccgcctatgaagacatcttcagggatgaagaggaggatgaagagcattcaggaaatgacagtgatgggtcagagccttctgagaagcgcacacggttagaagaggagatagtggagcaaaccatgcggaggaggcagcggcgagagtgggaggcccggagaagagacatcctctttgactacgagcagtatgaatatcatgggacatcgtcagccatggtgatgtttgagctggcttggatgctgtccaaggacctgaatgacatgctgtggtgggccatcgttggactaacagaccagtgggtgcaagacaagatcactcaaatgaaatacgtgactgatgttggtgtcctgcagcgccacgtttcccgccacaaccaccggaacgaggatgaggagaacacactctccgtggactgcacacggatctcctttgagtatgacctccgcctggtgctctaccagcactggtccctccatgacagcctgtgcaacaccagctataccgcagccaggttcaagctgtggtctgtgcatggacagaagcggctccaggagttccttgcagacatgggtcttcccctgaagcaggtgaagcagaagttccaggccatggacatctccttgaaggagaatttgcgggaaatgattgaagagtctgcaaataaatttgggatgaaggacatgcgcgtgcagactttcagcattcattttgggttcaagcacaagtttctggccagcgacgtggtctttgccaccatgtctttgatggagagccccgagaaggatggctcagggacagatcacttcatccaggctctggacagcctctccaggagtaacctggacaagctgtaccatggcctggaactcgccaagaagcagctgcgagccacccagcagaccattgccagctgcctttgcaccaacctcgtcatctcccaggggcctttcctgtactgctctctcatggagggcactccagatgtcatgctgttctctaggccggcatccctaagcctgctcagcaaacacctgctcaagtcctttgtgtgttcgacaaagaaccggcgctgcaaactgctgcccctggtgatggctgcccccctgagcatggagcatggcacagtgaccgtggtgggcatccccccagagaccgacagctcggacaggaagaacttttttgggagggcgtttgagaaggcagcggaaagcaccagctcccggatgctgcacaaccattttgacctctcagtaattgagctgaaagctgaggatcggagcaagtttctggacgcacttatttccctcctgtcctaggaatttgattcttccagaatgaccttcttatttatgtaactggctttcatttagattgtaagttatggacatgatttgagatgtagaagccatttttta

SEQ ID NO: 324009 - DNA, 1563 bp, Artificial Sequence
  derived and/or modified sequence
atgtttgtgagcgattttagaaaagagttttatgaggtggtccaatcccagcgcgtactattgtttgtggccagcgacgtggatgcgctatgcgcttgcaaaatcttgcaggcattatttcagtgcgaccacgtgcagtacaccctggtccccgtgtcggggtggcaggagctagagacagcctttcttgaacacaaggaacaaattaagctgctgataaagcaggacgatgacctggaggttcccgcatatgaggacatttttcgtgacgaagaggaggacgaggaacatagcggcaacgatagtgacgggagtgaaccgtctgaaaagcgcactagactggaggaagaaatcgttgaacagaccatgaggagacggcagcgtcgggagtgggaggcccgacggagggacattttgttcgactatgaacagtacgaatatcacgggacatcctccgctatggttatgtttgagctcgcctggatgcttagcaaagatctcaatgatatgttgtggtgggctatcgttggtcttactgaccagtgggtccaggataagattacacagatgaagtacgtcaccgatgttggggtcttacaacgccatgtcagtcgacacaaccacaggaatgaagacgaggagaacacactgtcagtagactgtacgcgaatatcgttcgagtatgacttgcgccttgtgctgtatcagcattggtctctccatgacagcctgtgcaacacctcctataccgccgcacggttcaaattgtggagcgttcatgggcagaaaagactgcaggagtttctggccgacatgggacttcccctaaaacaggtgaaacagaagttccaagcgatggacatctctctcaaagagaatctccgtgaaatgattgaagagtccgccaacaagttcggtatgaaggacatgcgggtgcagaccttcagtatacactttgggtttaaacacaagttcctggcatctgacgtggttttcgctactatgtcactgatggaatctccagagaaggatgggtccggaacagatcatttcatacaggccctggattccctgagtcgctctaacctcgataagttgtaccacggtctggagctcgccaaaaaacagctccgcgctactcagcaaaccatcgcttcttgtctgtgcaccaacctggttattagccagggacccttcctgtactgttccctgatggagggcacaccagacgttatgctgttctccaggccagcatccctcagtctgttgagtaagcatctcctgaagtcattcgtatgctcaaccaaaaatcgtaggtgtaaattactccctttagtgatggccgctcctctgtcgatggagcacgggaccgtgaccgtggtgggcattcccccagaaacggatagttccgatcgcaaaaacttcttcggcagagctttcgagaaagcagcggaaagcacgtcgagccgcatgctgcataaccatttcgacctctccgtaatagagctgaaggccgaggatagaagcaagtttctggatgcactgataagccttttgagctag

SEQ ID NO: 324010 - protein, 288 aa, Artificial Sequence
  derived and/or modified sequence
  misc_feature (1)..(1): Xaa can be any naturally occurring amino acid
XRPHLQNQWRKRKMTTWSCLVAMIVSGVITAVWAVRAAPIWRSQVKQKMRIGKQGNCRPPRCICSALGLLAPWMAVVLSQGKPPTKKAKVLHKAAWSAKIGAFLHSQGTGQLADGTPTGQDALVLGFDWGKFLKDHSYKAAPVSCFKHVPLYDQWEDVMKGMKVEVLNSDAVLPSRVYWIASVIQTAGYRVLLRYEGFENDASHDFWCNLGTVDVHPIGWCAINSKILVPPRTIHAKFTDWKGYLMKRLVGSRTLPVDFHIKVGSEPLTDVPPSALPFFCILHATHWS

SEQ ID NO: 324011 - DNA, 867 bp, Artificial Sequence
  derived and/or modified sequence
taaagaccacacctgcagaatcagtggcgtaagagaaagatgactacttggtcttgcctcgtcgctatgatcgtctccggcgttattaccgccgtatgggccgtgcgtgctgcccccatttggagaagccaggtgaagcagaagatgcgaattggaaaacaaggcaattgtcgccctccacggtgcatctgtagcgccctgggtctgttagcaccatggatggccgtggtgctcagccagggaaagccaccgaccaaaaaagccaaggtcttacataaggccgcctggtcagccaagatcggagcctttctacattctcagggaacaggccagttagccgatggcacgcccacggggcaagacgcgcttgtcctcggttttgactggggaaaattcctgaaggaccattcttataaagccgcccctgtgtcttgcttcaaacacgttcctctgtatgatcagtgggaagacgtgatgaaagggatgaaggtcgaggtgttgaacagtgacgccgtgttaccttctagagtttactggatcgcatctgttattcagaccgccggttaccgggttctgcttcgatatgagggatttgaaaatgacgcaagccatgatttttggtgtaatctaggaacggtggacgtccacccgattggatggtgcgctatcaattcaaaaatcctggtaccaccccgcactattcacgccaagtttacagattggaagggatacctgatgaagcgcctggtcgggagccgtacgctgccagtggatttccatataaaagttggatctgagccactgaccgacgtgccgccatctgccctgccctttttctgtatcctccacgccacccactggtcttag

SEQ ID NO: 324012 - DNA, 864 bp, Artificial Sequence
  derived and/or modified sequence
gagaccccatcttcagaaccaatggaggaagaggaagatgacgacttggagctgtttggtggctatgatagtttccggagttataacagcagtgtgggcagtgagagcagctcctatctggaggagtcaagtgaagcagaaaatgaggatcgggaagcaggggaactgccgacctccccgctgcatttgctcagccctgggactcctcgctccttggatggcagtggttctgagccagggaaaaccaccgaccaaaaaagccaaagtcctgcacaaggctgcctggtctgccaaaattggagccttcctccactctcaagggacaggacagctggcagatgggacaccaacaggacaagacgctctggtcttgggcttcgactgggggaagttcctgaaggatcacagttacaaggctgctcccgtcagctgtttcaagcacgtcccactctatgaccagtgggaggatgtgatgaaagggatgaaggtggaggtgctcaacagtgatgctgtgctccccagccgggtgtactggatcgcctctgtcatccagacagcagggtatcgggtgctgcttcggtatgaaggctttgaaaatgacgccagccatgacttctggtgcaacctgggaacagtggatgtccaccccattggctggtgtgccatcaacagcaagatcctagtgcccccacggaccatccatgccaagttcaccgactggaagggctacctcatgaaacggctggtgggctccaggacgcttcccgtggatttccacatcaaggtcggcagtgagcccttaactgatgtgcctccttccgctcttccatttttctgcatcctgcatgccactcactggagcat

SEQ ID NO: 324013 - DNA, 867 bp, Artificial Sequence
  derived and/or modified sequence
tgaagaccccacctgcagaaccagtggaggaagaggaagatgaccacctggagctgcctggtggccatgattgtgtctggagtcatcacagctgtgtgggccgtgcgggccgcccccatctggaggagccaggtgaagcagaagatgagaattggcaagcagggcaactgcaggcctccccgctgcatctgcagcgccctgggcctgctggccccctggatggctgtggtgctgagccagggcaagccacccaccaagaaggccaaggtgctgcacaaggccgcctggagcgccaagatcggggccttcctgcacagccagggcaccggccagctggctgatggcacccccaccggccaggatgccctggtgctgggctttgactggggcaagttcctgaaggaccacagctacaaggccgcccctgtgtcctgcttcaagcacgtgcccctgtatgaccagtgggaggatgtgatgaagggcatgaaggtggaggtgctgaacagtgatgctgtgctgcccagccgggtgtactggatcgccagcgtcatccagacagctggctacagagtgctgctgcgctatgagggctttgaaaatgatgccagccatgacttctggtgcaacctgggcaccgtggatgtgcaccccatcggctggtgtgccatcaacagcaagatcctggtgccccccaggaccatccacgccaagttcacagactggaagggctacctgatgaagaggctggtgggcagcaggaccctgcctgtggacttccacatcaaggtgggcagcgagcccctgacagatgtgccccccagcgccctgcccttcttctgcatcctgcacgccacccactggagctag

SEQ ID NO: 324014 - DNA, 867 bp, Artificial Sequence
  derived and/or modified sequence
tgacggccccacctgcagaaccagtggcggaagcggaagatgaccacctggagttgtctcgtggcaatgatcgtgtccggcgtaatcaccgctgtgtgggccgtgagagcagctccaatttggcgctctcaagtcaagcagaagatgaggatcggcaaacagggaaactgtagaccaccgcgatgtatttgtagtgctctgggtcttctggcgccctggatggctgtggtgttgagccagggcaagcctcctacaaaaaaagccaaagttttgcacaaggccgcctggtcagccaagatcggggccttcctccacagccaggggacaggccagctggccgacggcactccgacagggcaggatgccctggtcttaggattcgattggggaaagttcctcaaggaccattcatataaggccgcccctgtgtcttgtttcaagcacgtgcccctgtacgaccagtgggaggacgttatgaaaggtatgaaagtggaggtgttgaactcggatgccgtgcttccttcacgggtgtactggattgcgtcagtgatacagactgcaggctatagggtattgttaaggtacgaaggctttgaaaacgatgcttctcatgacttttggtgtaacctgggcacagttgatgtccatcccataggctggtgcgcaatcaattcaaagatccttgttcccccccgcaccatccatgccaaattcactgattggaagggttatctgatgaagcgactcgtgggcagcagaacgctccccgtggacttccacatcaaggtcggcagcgagcccctcaccgacgttcctcctagtgctttgccctttttttgtatcttacacgccacgcattggtcctag

SEQ ID NO: 324015 - DNA, 867 bp, Artificial Sequence
  derived and/or modified sequence
tgacggccacatctgcagaatcagtggcgcaaaaggaagatgaccacttggtcatgtctcgtagctatgattgtgagcggtgtcatcaccgccgtttgggcagtccgtgcggcaccaatttggcgcagccaggtcaaacagaagatgcggatcggaaaacaggggaattgtcggcctccacgatgcatctgttccgctctcggactgctcgcaccatggatggccgttgtcctgtcccaggggaagccccctactaagaaggctaaggtgctgcacaaggccgcttggagcgccaagatcggggctttcctgcacagtcagggcacagggcagctagctgacggaacccccacgggtcaggatgccctggttctaggcttcgactggggtaaattcttaaaggaccattcatacaaagccgcacccgtgtcttgttttaagcatgtcccgctgtacgaccagtgggaggacgtgatgaagggcatgaaggttgaagtactgaacagcgacgctgtgttaccatcccgcgtgtactggatagcatctgtcattcagaccgctgggtaccgggttctgctgaggtacgaaggctttgagaacgacgcttcccatgatttctggtgtaaccttggaacagtagacgtgcaccctattggctggtgcgccatcaattctaagattctcgtgccccctcgtactattcacgccaagtttacagactggaagggatatctgatgaaacggctggttggaagcagaactctgcccgtggattttcatataaaggtgggatccgaaccactaaccgacgtgccgccaagcgccctcccatttttctgcatcctgcacgccacacactggagctag

SEQ ID NO: 324016 - DNA, 867 bp, Artificial Sequence
  derived and/or modified sequence
tgaagaccccacctgcagaaccagtggagaaagagaaagatgaccacctggagctgcctggtggccatgatcgtgagcggcgtgatcaccgccgtgtgggccgtgagagccgcccccatctggagaagccaggtgaagcagaagatgagaatcggcaagcagggcaactgcagaccccccagatgcatctgcagcgccctgggcctgctggccccctggatggccgtggtgctgagccagggcaagccccccaccaagaaggccaaggtgctgcacaaggccgcctggagcgccaagatcggcgccttcctgcacagccagggcaccggccagctggccgacggcacccccaccggccaggacgccctggtgctgggcttcgactggggcaagttcctgaaggaccacagctacaaggccgcccccgtgagctgcttcaagcacgtgcccctgtacgaccagtgggaggacgtgatgaagggcatgaaggtggaggtgctgaacagcgacgccgtgctgcccagcagagtgtactggatcgccagcgtgatccagaccgccggctacagagtgctgctgagatacgagggcttcgagaacgacgccagccacgacttctggtgcaacctgggcaccgtggacgtgcaccccatcggctggtgcgccatcaacagcaagatcctggtgccccccagaaccatccacgccaagttcaccgactggaagggctacctgatgaagagactggtgggcagcagaaccctgcccgtggacttccacatcaaggtgggcagcgagcccctgaccgacgtgccccccagcgccctgcccttcttctgcatcctgcacgccacccactggagctag

SEQ ID NO: 324017 - protein, 667 aa, Artificial Sequence
  derived and/or modified sequence
MQFFGRLVNTFSGVTNLFSNPFRVKEVAVADYTSSDRVREEGQLILFQNTPNRTWDCVLVNPRNSQSGFRLFQLELEADALVNFHQYSSQLGKQEMVRVLLLCNARCNIMGPNGYPIHSAMKFSQKGCAEMIISMDSSQIHSKDPRYGASPLHWAKNAEMARMLLKRGCNVNSTSSAGNTALHVAVMRNRFDCAIVLLTHGANADARGEHGNTPLHLAMSKDNVEMIKALIVFGAEVDTPNDFGETPTFLASKIGRLVTRKAILTLLRTVGAEYCFPPIHGVPAEQGSAAPHHPFSLERAQPPPISLNNLELQDLMHISRARKPAFILGSMRDEKRTHDHLLCLDGGGVKGLIIIQLLIAIEKASGVATKDLFDWVAGTSTGGILALAILHSKSMAYMRGMYFRMKDEVFRGSRPYESGPLEEFLKREFGEHTKMTDVRKPKVMLTGTLSDRQPAELHLFRNYDAPETVREPRFNQNVNLRPPAQPSDQLVWRAARSSGAAPTYFRPNGRFLDGGLLANNPTLDAMTEIHEYNQDLIRKGQANKVKKLSIVVSLGTGRSPQVPVTCVDVFRPSNPWELAKTVFGAKELGKMVVDCCTDPDGRAVDRARAWCEMVGIQYFRLNPQLGTDIMLDEVSDTVLVNALWETEVYIYEHREEFQKLIQLLLSP

SEQ ID NO: 324018 - protein, 80 aa, Artificial Sequence
  derived and/or modified sequence
MQFFGRLVNTFSGVTNLFSNPFRVKEVAVADYTSSDRVREEGQLILFQNTPNRTWDCVLVNPRNSQSGFRLFQLELEADA

SEQ ID NO: 324019 - protein, 432 aa, Artificial Sequence
  derived and/or modified sequence
MQFFGRLVNTFSGVTNLFSNPFRVKEVAVADYTSSDRVREEGQLILFQNTPNRTWDCVLVNPRNSQSGFRLFQLELEADALVNFHQYSSQLLPFYESSPQVLHTEVLQHLTDLIRNHPSWSVAHLAVELGIRECFHHSRIIRVRSAHQVPGLWELISTHHEIEFSQPPQAVPIARRTRRAAHPCTWPAARVMGRSWWSWCSTATLRWMSPTTRERPSSIMLSRVTILRCCRCAEMIISMDSSQIHSKDPRYGASPLHWAKNAEMARMLLKRGCNVNSTSSAGNTALHVAVMRNRFDCAIVLLTHGANADARGEHGNTPLHLAMSKDNVEMIKALIVFGAEVDTPNDFGETPTFLASKIGRLVTRKAILTLLRTVGAEYCFPPIHGVPAEQGSAAPHHPFSLERAQPPPISLNNLGSHPSQAGWWAWGAASDG

SEQ ID NO: 324020 - DNA, 1299 bp, Artificial Sequence
  derived and/or modified sequence
atgcagttcttcggcagactggtgaacaccttcagcggcgtgaccaacctgttcagcaaccccttcagagtgaaggaggtggccgtggccgactacaccagcagcgacagagtgagagaggagggccagctgatcctgttccagaacacccccaacagaacctgggactgcgtgctggtgaaccccagaaacagccagagcggcttcagactgttccagctggagctggaggccgacgccctggtgaacttccaccagtacagcagccagctgctgcccttctacgagagcagcccccaggtgctgcacaccgaggtgctgcagcacctgaccgacctgatcagaaaccaccccagctggagcgtggcccacctggccgtggagctgggcatcagagagtgcttccaccacagcagaatcatcagagtgagaagcgcccaccaggtgcccggcctgtgggagctgatcagcacccaccacgagatcgagttcagccagcccccccaggccgtgcccatcgccagaagaaccagaagagccgcccacccctgcacctggcccgccgccagagtgatgggcagaagctggtggagctggtgcagcaccgccaccctgagatggatgagccccaccaccagagagagacccagcagcatcatgctgagcagagtgaccatcctgagatgctgcagatgcgccgagatgatcatcagcatggacagcagccagatccacagcaaggaccccagatacggcgccagccccctgcactgggccaagaacgccgagatggccagaatgctgctgaagagaggctgcaacgtgaacagcaccagcagcgccggcaacaccgccctgcacgtggccgtgatgagaaacagattcgactgcgccatcgtgctgctgacccacggcgccaacgccgacgccagaggcgagcacggcaacacccccctgcacctggccatgagcaaggacaacgtggagatgatcaaggccctgatcgtgttcggcgccgaggtggacacccccaacgacttcggcgagacccccaccttcctggccagcaagatcggcagactggtgaccagaaaggccatcctgaccctgctgagaaccgtgggcgccgagtactgcttcccccccatccacggcgtgcccgccgagcagggcagcgccgccccccaccaccccttcagcctggagagagcccagcccccccccatcagcctgaacaacctgggcagccaccccagccaggccggctggtgggcctggggcgccgccagcgacggctag

SEQ ID NO: 324021 - DNA, 1299 bp, Artificial Sequence
  derived and/or modified sequence
atgcaattcttcggtcggttggtaaacacattcagtggtgtcacaaacctgttcagtaaccccttccgggtgaaggaagttgccgtggccgactatacctcctccgaccgggtacgcgaggagggtcagctgatcctatttcagaacacaccgaaccgaacgtgggattgcgtgttggtgaaccctagaaatagccagtctggcttcaggctcttccaactcgagctggaggctgacgctctggtcaactttcatcagtatagtagccagctgcttcctttttatgaatctagtcctcaggtgctgcacacagaggtgctgcagcatctgacggacctgatccgcaatcacccaagctggtctgtggctcacctggcagttgaactaggcatccgcgagtgtttccatcactctcgaatcattagggtgcggtcagcccatcaagtgccaggcctgtgggaactgataagtactcaccacgagatagagttttcacagcctcctcaggctgtgcccattgccaggcgtaccaggagagctgcacatccatgcacctggcctgccgctcgcgtaatgggccgaagttggtggagttggtgtagcacagccacactacggtggatgtctcccacaacccgcgagaggccgagctccataatgctgagtagggtcacaattctgcgatgctgtcggtgtgcggagatgatcatttctatggatagctcccagattcatagtaaggacccgcggtacggggctagtcccctccactgggccaaaaatgctgaaatggccaggatgctgttgaaaaggggctgtaatgtgaactccacctcaagcgccgggaataccgccctccatgtggctgtgatgcgcaaccgttttgattgcgcgatcgtgctgctgacccatggggccaacgcagatgccaggggcgaacacggcaacaccccgctgcatctcgccatgtcgaaggataacgtagagatgatcaaagcactcatcgtgttcggcgctgaggtcgacacccctaatgactttggcgagacccctacgttccttgcaagcaagatcggtcgtctggtcacgagaaaagctattctaaccctactgagaacagtcggggccgagtattgcttcccccctattcatggcgttccagcagaacaggggagcgccgccccccatcacccatttagtcttgagagggcccagcctcccccaatatcgctgaacaatctcggatctcatcctagccaagccgggtggtgggcgtggggagcagcctcagacggctag

SEQ ID NO: 324022 - DNA, 1299 bp, Artificial Sequence
  derived and/or modified sequence
atgcagttcttcggccgcctggtgaacaccttcagcggcgtgaccaacctcttcagcaaccccttccgggtgaaggaggtggccgtggccgactacaccagcagtgacagagtgcgggaggagggccagctgatcctcttccagaacacccccaacagaacctgggactgtgtgctggtgaaccccaggaacagccagagcggcttccgcctcttccagctggagctggaggctgatgccctggtgaacttccaccagtacagcagccagctgctgcccttctatgagagcagcccccaggtgctgcacacagaggtgctgcagcacctgacagacctgatccggaaccaccccagctggagcgtggcccacctggccgtggagctgggcatccgggagtgcttccaccacagccgcatcatccgggtgcgcagcgcccaccaggtgcccggcctgtgggagctgatcagcacccaccacgagattgagttcagccagcccccccaggccgtgcccatcgcccggaggacccggcgggccgcccacccctgcacctggccagctgcccgggtgatgggccgctcctggtggagctggtgcagcacagccaccctgcgctggatgagccccaccacccgggagcggcccagcagcatcatgctgagccgggtgaccatcctgcgctgctgccgctgtgccgagatgatcatctccatggacagcagccagatccacagcaaggaccccaggtatggagccagccccctgcactgggccaagaatgctgagatggccaggatgctgctgaagaggggctgcaatgtgaacagcaccagcagcgctggcaacacagccctgcacgtggccgtgatgaggaacagatttgactgtgccatcgtgctgctgacccacggggccaatgctgatgcccggggggagcacggcaacacccccctgcacctggccatgagcaaggacaacgtggagatgatcaaggccctgattgtgtttggagctgaggtggacaccccaaatgactttggagagacccccaccttcctggccagcaagattggccgcctggtgaccaggaaggccatcctgaccctgctgaggacagtgggcgctgagtactgcttcccccccatccacggcgtgcctgctgagcagggcagcgctgccccccaccaccccttcagcctggagcgggcccagcccccacccatcagcctgaacaacctgggcagccaccccagccaggccggctggtgggcctggggcgccgccagtgatggatag

SEQ ID NO: 324023 - DNA, 1299 bp, Artificial Sequence
  derived and/or modified sequence
atgcagttcttcggccggctggtgaacaccttcagcggcgtgaccaaccttttctcgaatcccttccgcgtgaaggaagtggctgttgccgattacacctcatcagatagagtgcgcgaggaaggccagctgattctgtttcagaatacgccaaataggacctgggactgcgttctggtgaatccccggaactcccagagcggcttccgattgttccagcttgagttggaggctgatgcactggtaaattttcaccaatactccagccaactccttccattctatgagagctctcctcaggtgcttcacaccgaggtcctgcagcacttaaccgatttgattcgcaaccatcccagctggtccgtagcccacttagccgtcgaactcggcatccgtgagtgtttccatcactccagaatcatccgcgttcgctcagctcatcaggtgcccggcctgtgggagctcattagtacgcaccacgaaatagagttcagccaaccgccccaggctgtgcctatcgcgagaagaaccaggcgtgccgcccacccatgcacctggcctgcagcaagagtaatggggagaagctggtggagttggtgcagcacagctacgctgcgttggatgtcgcctaccactcgggagcggccatcaagcatcatgctgtcccgcgtgacaatcctacgttgctgcaggtgtgccgaaatgataattagcatggatagcagccagatccactccaaagacccccgctatggggcttcgccactgcactgggcgaaaaatgccgaaatggcccggatgctacttaagaggggctgtaacgtcaattctacctcctccgcgggtaacacagcacttcacgtggcagtgatgagaaatagattcgattgcgccatagtcctgcttacacacggcgctaacgctgacgccaggggagaacacggtaatacccctctgcatctagctatgagcaaagacaacgtggaaatgattaaggctttgattgtcttcggggcggaggttgacacccctaacgactttggcgagacgcctaccttcctggcctctaagatcggcaggctagtgacgcgcaaggcaattctgaccttactgcggaccgtaggagccgaatactgctttcctcctatccatggagtgccagctgagcaggggagtgctgccccccaccaccctttttcactcgaacgggcacagcctccaccaatctctctcaacaatttgggatcccaccctagccaggcaggatggtgggcctggggggctgcctcagacggttag

SEQ ID NO: 324024 - DNA, 1299 bp, Artificial Sequence
  derived and/or modified sequence
atgcagttctttggtcggctcgtgaacacattcagtggcgttaccaatctgttttctaatccattcagagttaaggaggtggcggtcgctgactatacaagctctgacagggtgcgcgaggagggtcaactcattctgtttcagaatacccctaatcggacctgggactgcgtgttggttaacccacgaaatagccaaagcggcttccggttatttcaactcgagctcgaggccgatgccctggtgaactttcatcagtactcatcacagctacttcctttttacgagagctctcctcaggtgctgcataccgaggtgttgcagcatctaacggaccttataagaaaccacccaagctggtcagtggctcaccttgccgtcgagctgggcatcagagagtgcttccaccattcccgcattatccgcgtgcgctccgctcatcaggttccaggcctgtgggagctgatttcgacccaccacgagatcgagttctcccagccacctcaggccgtacccatcgccaggagaactcgcagggccgctcacccctgcacatggcctgccgcaagagtgatgggccgttcttggtggtcgtggtgctccacagctacgttgcgttggatgtctccaaccacccgggaacggccaagctccattatgcttagccgagtgacgattcttcggtgctgtagatgcgcagaaatgatcatttctatggatagctcccagattcacagcaaagatccacgctacggagcctctccactgcattgggccaagaacgctgagatggcacgcatgctgctaaagaggggctgtaacgtgaatagcaccagttcagccggaaataccgcactacacgtggctgttatgcgcaatagatttgactgtgcgatcgtgctcctgacacacggagctaacgcggatgctaggggcgagcacgggaatacaccgctgcacctggccatgtccaaagataacgtagaaatgattaaggccctgatcgttttcggggctgaagtggataccccgaatgactttggggaaactcccactttcctcgcgtccaagataggacgcctggtaacaagaaaggcaatacttaccctgctcagaacagtgggcgctgagtattgctttccacctatccatggcgtccccgctgaacaagggtccgcagcaccccatcatcctttcagtctcgagagagcgcagccccctccaatcagcctgaacaatctggggtctcacccttcccaagctggctggtgggcgtggggggctgcgagtgatgggtag

SEQ ID NO: 324025 - DNA, 1652 bp, Artificial Sequence
  derived and/or modified sequence
gtttgtttgcggaagtaggaggaagtagaagtgctgagtaagccgagacagagggggaagacggtggggcctccccacctgccccgcagaagatgcagttctttggccgcctggtcaataccttcagtggcgtcaccaacttgttctctaacccattccgggtgaaggaggtggctgtggccgactacacctcgagtgaccgagttcgggaggaagggcagctgattctgttccagaacactcccaaccgcacctgggactgcgtcctggtcaaccccaggaactcacagagtggattccgactcttccagctggagttggaggctgacgccctagtgaatttccatcagtattcttcccagctgctacccttctatgagagctcccctcaggtcctgcacactgaggtcctgcagcacctgaccgacctcatccgtaaccaccccagctggtcagtggcccacctggctgtggagctagggatccgcgagtgcttccatcacagccgtatcatcagagtccggagtgctcaccaggtgccaggtctgtgggagctgatttctacccaccatgaaattgaattttcccaacccccacaagctgtgccaattgcgcggagaacgaggagggctgcacacccctgcacctggcctgccgcaagggtgatggggagatcctggtggagctggtgcagtactgccacactcagatggatgtcaccgactacaagggagagaccgtcttccattatgctgtccagggtgacaattctcaggtgctgcaggtgtgcggagatgatcatcagcatggacagcagccagatccacagcaaagacccccgttacggagccagccccctccactgggccaagaacgcagagatggcccgcatgctgctgaaacggggctgcaacgtgaacagcaccagctccgcggggaacacggccctgcacgtggcggtgatgcgcaaccgcttcgactgtgccatagtgctgctgacccacggggccaacgcggatgcccgcggagagcacggcaacaccccgctgcacctggccatgtcgaaagacaacgtggagatgatcaaggccctcatcgtgttcggagcagaagtggacaccccgaatgactttggggagactcctacattcctagcctccaaaatcggcagacttgtcaccaggaaggcgatcttgactctgctgagaaccgtgggggccgaatactgcttcccacccatccacggggtccccgcggagcagggctctgcagcgccacatcatcccttctccctggaaagagctcagcccccaccgatcagcctaaacaacctaggcagtcacccaagccaggccggatggtgggcctggggtgcggcgtcagatgggtaacgccctgggcctggagaggccaccgagcctagccatgcggcattagctctagctctcactccctaatccgtccttcttagctgcgcacacaccacacgccccctcccctgcaccctgtccccggcctctctcagccactcttctgcttcccttgttcactgtggagccgtgtgccctggggagggggagacaccgcttcgcagccctcggttctgctttgctgcttctagactctgcacagtggtggggggctgtcagagt

SEQ ID NO: 324026 - DNA, 501 bp, Artificial Sequence
  derived and/or modified sequence
atgcagttcttcggcagactggtgaacaccttcagcggcgtgaccaacctgttcagcaaccccttcagagtgaaggaggtggccgtggccgactacaccagcagcgacagagtgagagaggagggccagctgatcctgttccagaacacccccaacagaacctgggactgcgtgctggtgaaccccagaaacagccagagcggcttcagatgcgccaactgcgccgagaacgaggagggctgcacccccctgcacctggcctgcagaaagggcgacggcgagatcctggtggagctggtgcagtactgccacacccagatggacgtgaccgactacaagggcgagaccgtgttccactacgccgtgcagggcgacaacagccaggtgctgcagctgctgggcagaaacgccgtggccggcctgaaccaggtgaacaaccagggcctgacccccctgcacctggcctgccagctgggcaagcaggagatggtgagagtgtag

SEQ ID NO: 324027 - DNA, 243 bp, Artificial Sequence
  derived and/or modified sequence
atgcagttcttcggcagactggtgaacaccttcagcggcgtgaccaacctgttcagcaaccccttcagagtgaaggaggtggccgtggccgactacaccagcagcgacagagtgagagaggagggccagctgatcctgttccagaacacccccaacagaacctgggactgcgtgctggtgaaccccagaaacagccagagcggcttcagactgttccagctggagctggaggccgacgcctag

SEQ ID NO: 324028 - DNA, 501 bp, Artificial Sequence
  derived and/or modified sequence
atgcaattctttggacgactagtcaacactttttccggcgtgacaaatctgttttctaaccccttcagggtaaaggaagtggccgtggcagattacacctcatccgacagagtacgggaagaaggacagctgatcctgttccaaaatacgcctaaccgtacctgggactgtgttctcgtcaaccccagaaattcccagtctggcttccggtgcgccaattgcgcagagaacgaggaagggtgtacaccattgcacttggcatgccgcaaaggggatggcgagatcttggtggagctggttcaatactgtcatacacagatggatgtgaccgattataaaggcgagactgtgttccactatgccgttcaaggtgacaatagtcaggtgttacagttgctgggacgcaacgccgtggccgggctgaaccaggtcaacaaccagggactgactcctctgcatttagcgtgtcaactaggcaagcaggaaatggtgcgagtgtag

SEQ ID NO: 324029 - DNA, 243 bp, Artificial Sequence
  derived and/or modified sequence
atgcagtttttcggacggctggtaaatactttctctggagtcaccaaccttttttccaatcctttcagggtcaaagaagtggccgtggccgactacacctcaagtgatagggtccgcgaggagggccagcttatcctgttccagaacacgccaaacagaacatgggactgtgtcctggttaatcccaggaattctcaatccggctttaggctgtttcagctagaactggaagctgatgcctag

SEQ ID NO: 324030 - DNA, 501 bp, Artificial Sequence
  derived and/or modified sequence
atgcagttcttcggccgcctggtgaacaccttcagcggcgtgaccaacctcttcagcaaccccttccgggtgaaggaggtggccgtggccgactacaccagcagtgacagagtgcgggaggagggccagctgatcctcttccagaacacccccaacagaacctgggactgtgtgctggtgaaccccaggaacagccagagcggcttccgctgtgccaactgtgccgagaatgaggagggctgcacccccctgcacctggcctgcaggaaaggagatggagagatcctggtggagctggtgcagtactgccacacccagatggatgtgacagactacaagggggagaccgtcttccactatgctgtgcagggcgacaacagccaggtgctgcagctgctgggcagaaatgctgtggccggcctgaaccaggtgaacaaccagggcctgacccccctgcacctggcctgccagctgggcaagcaggagatggtgcgggtgtag

SEQ ID NO: 324031 - DNA, 243 bp, Artificial Sequence
  derived and/or modified sequence
atgcagttcttcggccgcctggtgaacaccttcagcggcgtgaccaacctcttcagcaaccccttccgggtgaaggaggtggccgtggccgactacaccagcagtgacagagtgcgggaggagggccagctgatcctcttccagaacacccccaacagaacctgggactgtgtgctggtgaaccccaggaacagccagagcggcttccgcctcttccagctggagctggaggctgatgcctag

SEQ ID NO: 324032 - DNA, 501 bp, Artificial Sequence
  derived and/or modified sequence
atgcagttcttcggccggctggtgaacaccttcagcggcgtgaccaatctgtttagcaacccttttcgagtgaaggaggtagcagttgccgactacacatcctccgatcgcgtgcgggaggaaggacagctgatcttgttccagaacacccccaacaggacctgggattgtgtcttggtcaatcccagaaatagccagtcgggctttaggtgtgcaaattgcgcagagaatgaggaaggatgcactccacttcatctcgcctgtaggaagggcgatggggaaatcctggtcgaattagtgcagtactgccatacacagatggatgttacagattacaaaggtgaaaccgtttttcattatgcggtacagggggacaactcgcaagtgttgcagctgttaggaaggaacgcagtcgctggactgaaccaagtcaataaccagggtctcacaccactgcacttagcatgccagctcggcaaacaagagatggtcagagtatag

SEQ ID NO: 324033 - DNA, 243 bp, Artificial Sequence
  derived and/or modified sequence
atgcagttcttcggccggctggtgaacaccttcagcggcgtgaccaatctgttctctaatcccttccgtgtgaaggaggttgccgtggctgattatacttcctccgatagagtccgagaggaggggcagctaatactttttcagaacacgcctaatcgaacttgggattgtgtccttgttaatccccgaaattcccaatctggcttcaggctgtttcaactcgaactcgaagccgacgcttag

SEQ ID NO: 324034 - DNA, 501 bp, Artificial Sequence
  derived and/or modified sequence
atgcaattcttcggaaggctggttaacacattttcaggcgtgacaaatcttttttcaaacccattccgggtgaaagaagttgccgtggccgactacacatcttctgacagagttagagaggaagggcagctgatcctatttcagaacacacccaaccggacatgggattgtgtgctagttaatcctaggaatagccagagcggtttcagatgtgccaactgcgccgagaacgaggaaggctgtacaccgttacacctcgcctgcagaaagggcgacggagagattctggtggaattagtccagtattgtcacacccagatggatgtgactgactacaaaggagaaacagtgttccactatgccgtgcagggcgacaactcccaagtactccaactgctgggtcgtaacgcagttgccggactgaaccaggttaacaaccagggactgactccactccacctggcatgccaactgggcaaacaggaaatggtcagggtatag

SEQ ID NO: 324035 - DNA, 243 bp, Artificial Sequence
  derived and/or modified sequence
atgcagttctttgggaggttggtcaacacctttagtggcgtgacaaacctttttagcaaccctttccgcgtaaaggaagtggcagttgccgactacacctctagcgatagggtgcgagaggagggtcagctcatattgttccagaatactccgaatagaacctgggactgcgtcctggtgaaccctcgcaacagccagtcaggtttcagattattccagttagagctcgaggcagacgcttag

SEQ ID NO: 324036 - DNA, 656 bp, Artificial Sequence
  derived and/or modified sequence
agtgacctcgcgggtgggcggggcctgggggtccgttccccaacttcctcggcgctccggactcccaagtctccgccggaccctcctttggatattcctcgtgtctccgattctgagagggggaagacggtggggcctccccacctgccccgcagaagatgcagttctttggccgcctggtcaataccttcagtggcgtcaccaacttgttctctaacccattccgggtgaaggaggtggctgtggccgactacacctcgagtgaccgagttcgggaggaagggcagctgattctgttccagaacactcccaaccgcacctgggactgcgtcctggtcaaccccaggaactcacagagtggattccgctgtgccaattgcgcggagaacgaggagggctgcacacccctgcacctggcctgccgcaagggtgatggggagatcctggtggagctggtgcagtactgccacactcagatggatgtcaccgactacaagggagagaccgtcttccattatgctgtccagggtgacaattctcaggtgctgcagctccttggaaggaacgcagtggctggcctgaaccaggtgaataaccaagggctgaccccgctgcacctggcctgccagctggggaagcaggagatggtccgcgtg

SEQ ID NO: 324037 - DNA, 364 bp, Artificial Sequence
  derived and/or modified sequence
atgagttgcttgaggtcacaccgatgaggttgaagctggaatctgacaccagagcctgtgtgattgtcctgatgtgtaagacagagggggaagacggtggggcctccccacctgccccgcagaagatgcagttctttggccgcctggtcaataccttcagtggcgtcaccaacttgttctctaacccattccgggtgaaggaggtggctgtggccgactacacctcgagtgaccgagttcgggaggaagggcagctgattctgttccagaacactcccaaccgcacctgggactgcgtcctggtcaaccccaggaactcacagagtggattccgactcttccagctggagttggaggctgacgc

SEQ ID NO: 324038 - protein, 475 aa, Artificial Sequence
  derived and/or modified sequence
MAPPAARLALLSAAALTLAARPAPSPGLGPGPECFTANGADYRGTQNWTALQGGKPCLFWNETFQHPYNTLKYPNGEGGLGEHNYCRNPDGDVSPWCYVAEHEDGVYWKYCEIPACQMPGNLGCYKDHGNPPPLTGTSKTSNKLTIQTCISFCRSQRFKFAGMESGYACFCGNNPDYWKYGEAASTECNSVCFGDHTQPCGGDGRIILFDTLVGACGGNYSAMSSVVYSPDFPDTYATGRVCYWTIRVPGASHIHFSFPLFDIRDSADMVELLDGYTHRVLARFHGRSRPPLSFNVSLDFVILYFFSDRINQAQGFAVLYQAVKEELPQERPAVNQTVAEVITEQANLSVSAARSSKVLYVITTSPSHPPQTVPGSNSWAPPMGAGSHRVEGWTVYGLATLLILTVTAIVAKILLHVTFKSHRVPASGDLRDCHQPGTSGEIWSIFYKPSTSISIFKKKLKGQSQQDDRNPLVSD

SEQ ID NO: 324039 - protein, 473 aa, Artificial Sequence
  derived and/or modified sequence
MAPPAARLALLSAAALTLAARPAPSPGLGPECFTANGADYRGTQNWTALQGGKPCLFWNETFQHPYNTLKYPNGEGGLGEHNYCRNPDGDVSPWCYVAEHEDGVYWKYCEIPACQMPGNLGCYKDHGNPPPLTGTSKTSNKLTIQTCISFCRSQRFKFAGMESGYACFCGNNPDYWKYGEAASTECNSVCFGDHTQPCGGDGRIILFDTLVGACGGNYSAMSSVVYSPDFPDTYATGRVCYWTIRVPGASHIHFSFPLFDIRDSADMVELLDGYTHRVLARFHGRSRPPLSFNVSLDFVILYFFSDRINQAQGFAVLYQAVKEELPQERPAVNQTVAEVITEQANLSVSAARSSKVLYVITTSPSHPPQTVPGSNSWAPPMGAGSHRVEGWTVYGLATLLILTVTAIVAKILLHVTFKSHRVPASGDLRDCHQPGTSGEIWSIFYKPSTSISIFKKKLKGQSQQDDRNPLVSD

SEQ ID NO: 324040 - DNA, 1428 bp, Artificial Sequence
  derived and/or modified sequence
atggccccccccgccgccagactggccctgctgagcgccgccgccctgaccctggccgccagacccgcccccagccccggcctgggccccggccccgagtgcttcaccgccaacggcgccgactacagaggcacccagaactggaccgccctgcagggcggcaagccctgcctgttctggaacgagaccttccagcacccctacaacaccctgaagtaccccaacggcgagggcggcctgggcgagcacaactactgcagaaaccccgacggcgacgtgagcccctggtgctacgtggccgagcacgaggacggcgtgtactggaagtactgcgagatccccgcctgccagatgcccggcaacctgggctgctacaaggaccacggcaaccccccccccctgaccggcaccagcaagaccagcaacaagctgaccatccagacctgcatcagcttctgcagaagccagagattcaagttcgccggcatggagagcggctacgcctgcttctgcggcaacaaccccgactactggaagtacggcgaggccgccagcaccgagtgcaacagcgtgtgcttcggcgaccacacccagccctgcggcggcgacggcagaatcatcctgttcgacaccctggtgggcgcctgcggcggcaactacagcgccatgagcagcgtggtgtacagccccgacttccccgacacctacgccaccggcagagtgtgctactggaccatcagagtgcccggcgccagccacatccacttcagcttccccctgttcgacatcagagacagcgccgacatggtggagctgctggacggctacacccacagagtgctggccagattccacggcagaagcagaccccccctgagcttcaacgtgagcctggacttcgtgatcctgtacttcttcagcgacagaatcaaccaggcccagggcttcgccgtgctgtaccaggccgtgaaggaggagctgccccaggagagacccgccgtgaaccagaccgtggccgaggtgatcaccgagcaggccaacctgagcgtgagcgccgccagaagcagcaaggtgctgtacgtgatcaccaccagccccagccaccccccccagaccgtgcccggcagcaacagctgggccccccccatgggcgccggcagccacagagtggagggctggaccgtgtacggcctggccaccctgctgatcctgaccgtgaccgccatcgtggccaagatcctgctgcacgtgaccttcaagagccacagagtgcccgccagcggcgacctgagagactgccaccagcccggcaccagcggcgagatctggagcatcttctacaagcccagcaccagcatcagcatcttcaagaagaagctgaagggccagagccagcaggacgacagaaaccccctggtgagcgactag

SEQ ID NO: 324041 - DNA, 1422 bp, Artificial Sequence
  derived and/or modified sequence
atggccccccccgccgccagactggccctgctgagcgccgccgccctgaccctggccgccagacccgcccccagccccggcctgggccccgagtgcttcaccgccaacggcgccgactacagaggcacccagaactggaccgccctgcagggcggcaagccctgcctgttctggaacgagaccttccagcacccctacaacaccctgaagtaccccaacggcgagggcggcctgggcgagcacaactactgcagaaaccccgacggcgacgtgagcccctggtgctacgtggccgagcacgaggacggcgtgtactggaagtactgcgagatccccgcctgccagatgcccggcaacctgggctgctacaaggaccacggcaaccccccccccctgaccggcaccagcaagaccagcaacaagctgaccatccagacctgcatcagcttctgcagaagccagagattcaagttcgccggcatggagagcggctacgcctgcttctgcggcaacaaccccgactactggaagtacggcgaggccgccagcaccgagtgcaacagcgtgtgcttcggcgaccacacccagccctgcggcggcgacggcagaatcatcctgttcgacaccctggtgggcgcctgcggcggcaactacagcgccatgagcagcgtggtgtacagccccgacttccccgacacctacgccaccggcagagtgtgctactggaccatcagagtgcccggcgccagccacatccacttcagcttccccctgttcgacatcagagacagcgccgacatggtggagctgctggacggctacacccacagagtgctggccagattccacggcagaagcagaccccccctgagcttcaacgtgagcctggacttcgtgatcctgtacttcttcagcgacagaatcaaccaggcccagggcttcgccgtgctgtaccaggccgtgaaggaggagctgccccaggagagacccgccgtgaaccagaccgtggccgaggtgatcaccgagcaggccaacctgagcgtgagcgccgccagaagcagcaaggtgctgtacgtgatcaccaccagccccagccaccccccccagaccgtgcccggcagcaacagctgggccccccccatgggcgccggcagccacagagtggagggctggaccgtgtacggcctggccaccctgctgatcctgaccgtgaccgccatcgtggccaagatcctgctgcacgtgaccttcaagagccacagagtgcccgccagcggcgacctgagagactgccaccagcccggcaccagcggcgagatctggagcatcttctacaagcccagcaccagcatcagcatcttcaagaagaagctgaagggccagagccagcaggacgacagaaaccccctggtgagcgactag

SEQ ID NO: 324042 - DNA, 1428 bp, Artificial Sequence
  derived and/or modified sequence
atggccccacccgcggcccggttagcacttctgtcggctgccgctcttactctagccgcgcgcccagctccctcccctggcctgggtccaggccccgaatgctttaccgcgaacggggccgattatcgaggcacccagaattggaccgctctacaggggggtaagccgtgtctgttctggaacgaaaccttccagcatccctacaatactctgaagtatcccaacggggaaggcggcctgggcgaacataattattgtagaaacccagacggcgatgtgtctccttggtgttatgtagccgaacacgaggatggcgtgtattggaagtattgtgagatccctgcttgccaaatgcctggaaacctgggctgctacaaggatcacgggaatccgccccccctgaccggcacaagcaagacctctaataagctcactatacagacatgcatatccttctgccgctcccagaggttcaagtttgcgggaatggagtcagggtacgcatgtttttgtggaaacaaccccgactattggaagtacggcgaagcagcaagcacagagtgcaatagtgtatgctttggcgatcatactcagccttgcggcggcgacgggcgcattatactgtttgatacactagtcggagcatgcggcgggaattacagcgccatgtcaagtgtcgtgtattccccggatttcccggacacatacgctactggcagggtatgctactggactattcgtgtgcctggtgcgagccacatccatttcagttttcccctgtttgacataagagattcagcggacatggtcgagctcctggatggctacacgcaccgagtcctggccagattccacggtagatcgcgcccccccctctcattcaatgtctccctcgattttgtaatcctttacttttttagtgatcgaatcaaccaggcccagggctttgcggtcttatatcaagccgtgaaggaagaactcccccaggaaaggccggcagtcaaccagacagtagcagaagtgattactgaacaagccaatcttagcgtgtccgccgccaggagctctaaggtgttatacgttatcactaccagcccttcccatccaccccagaccgtccccggaagtaactcctgggcgccacctatgggggcaggttctcatcgggtggagggctggactgtttacggactggccactctcctgatcctgactgtgaccgctattgtggccaagattctgctccacgtcactttcaagtcccatagagtgcccgctagcggagacctccgtgactgccatcaacctggcacatcaggtgagatctggtccatcttctacaaaccctccacttccattagcatcttcaaaaagaaacttaagggccagtctcagcaagacgatcgcaaccctctggtttctgactag

SEQ ID NO: 324043 - DNA, 1422 bp, Artificial Sequence
  derived and/or modified sequence
atggcacccccggctgcccgcctagctcttctgtcggctgccgcactgaccctggccgccaggccagcaccatctccggggctgggacccgagtgtttcaccgcgaacggagctgactacaggggcactcagaattggactgcacttcagggcggcaaaccttgcttgttttggaacgagacattccagcacccctacaacactctaaagtatcccaacggtgaaggcgggttaggggagcacaactactgtaggaaccctgacggggacgtgtctccctggtgttacgtagcggaacatgaggatggtgtttattggaaatactgcgaaattcccgcctgccagatgccagggaacctggggtgctacaaagaccatggcaaccctcctcctctgacgggtacgagtaagaccagcaacaagctgaccattcagacctgcatcagcttttgcaggtctcaacgcttcaaattcgcaggtatggaatccggctacgcatgtttctgtggaaacaatcctgactattggaagtacggcgaggcagccagcacggaatgcaattcagtctgttttggggatcatacccagccatgtggcggtgacggacggattatactattcgatacactggttggagcctgcgggggcaactacagtgcaatgtcatccgtcgtctacagcccagacttccctgacacttatgctacagggcgtgtctgctactggactatcagagtccccggagctagtcacatccatttcagctttccattgttcgacattagagacagcgccgatatggttgagctgctggatggctacacacaccgcgtgctcgctcgatttcacgggcgatccaggccccctctctcttttaacgtctccctggactttgtgatactttactttttctcagacagaattaatcaggcacagggctttgctgtgctctatcaagccgtaaaagaagaactgcctcaggagcgccccgccgtgaaccagacagtggcagaagtgatcacggagcaggccaatctctctgtgagtgccgccaggtccagcaaagtgctgtatgtaattaccaccagtcccagtcacccaccccagaccgttcccggatcaaattcgtgggccccccctatgggcgcaggcagtcaccgagtagaaggctggactgtctatggtttggcgaccctcctcatcttgactgtaacagctatcgtcgccaaaattctcttgcacgtgacctttaaaagtcacagggtacctgcttcgggcgacctgcgcgattgccaccaacccgggacctccggagaaatttggagtattttttataagccttcgacaagtatcagcatctttaagaagaagctaaaaggccagtctcaacaggatgaccgaaaccccctggtgagtgattag

SEQ ID NO: 324044 - DNA, 6182 bp, Artificial Sequence
  derived and/or modified sequence
cgcgctgccccctttaccccgggccgcgccccggggccccgcactgacggcccatggcgccgccagccgcccgcctcgccctgctctccgccgcggcgctcacgctggcggcccggcccgcgcctagccccggcctcggccccggacccgagtgtttcacagccaatggtgcggattataggggaacacagaactggacagcactacaaggcgggaagccatgtctgttttggaacgagactttccagcatccatacaacactctgaaataccccaacggggaggggggcctgggtgagcacaactattgcagaaatccagatggagacgtgagcccctggtgctatgtggcagagcacgaggatggtgtctactggaagtactgtgagatacctgcttgccagatgcctggaaaccttggctgctacaaggatcatggaaacccacctcctctaactggcaccagtaaaacgtccaacaaactcaccatacaaacttgcatcagtttttgtcggagtcagaggttcaagtttgctgggatggagtcaggctatgcttgcttctgtggaaacaatcctgattactggaagtacggggaggcagccagtaccgaatgcaacagcgtctgcttcggggatcacacccaaccctgtggtggcgatggcaggatcatcctctttgatactctcgtgggcgcctgcggtgggaactactcagccatgtcttctgtggtctattcccctgacttccccgacacctatgccacggggagggtctgctactggaccatccgggttccgggggcctcccacatccacttcagcttccccctatttgacatcagggactcggcggacatggtggagcttctggatggctacacccaccgtgtcctagcccgcttccacgggaggagccgcccacctctgtccttcaacgtctctctggacttcgtcatcttgtatttcttctctgatcgcatcaatcaggcccagggatttgctgttttataccaagccgtcaaggaagaactgccacaggagaggcccgctgtcaaccagacggtggccgaggtgatcacggagcaggccaacctcagtgtcagcgctgcccggtcctccaaagtcctctatgtcatcaccaccagccccagccacccacctcagactgtcccaggtagcaattcctgggcgccacccatgggggctggaagccacagagttgaaggatggacagtctatggtctggcaactctcctcatcctcacagtcacagccattgtagcaaagatacttctgcacgtcacattcaaatcccatcgtgttcctgcttcaggggaccttagggattgtcatcaaccagggacttcgggggaaatctggagcattttttacaagccttccacttcaatttccatctttaagaagaaactcaagggtcagagtcaacaagatgaccgcaatccccttgtgagtgactaaaaaccccactgtgcctaggacttgaggtccctctttgagctcaaggctgccgtggtcaacctctcctgtggttcttctctgacagactcttcccctcctctccctctgcctcggcctcttcggggaaaccctcctcctacagactaggaagaggcaccctgctgccagggcaggcagagcctggattcctcctgcttcatcgattgcacttaggagagagactcaaagccctggggcccggccctctctgcatctctctctgatctagctagcagtgggggtgtcaggacagtgaggctgagatgacagaggtggtcatggctggcacagggctcaggtacattctagatggctgtcaggtggtgggtagctttagttacattgaatttttcttgcttctctatttttgtccacacacaaatcagtttctcctgatctttatgtcttggaacagggccagacagggagaactctcaggtactcttgggagttggtcccatacaagtgcggactcctggacattagcgaggtgtaaagagggcagtgtctgtgctgccccggcagctttgctctccagatgctggactagggtgggcctccttcagcctgggagggtctgagaataagatctagtgacccccatttatatcaaacctgataccttacacatgggcttctttctagattcttctttccatagctcatggagctgcagggaaagctttaagagctttggtcatataaaacatccattcagctgggcgcgatggctcatgcctgtaatcccagcactgtgggaggctgaggcgggcagatcacctgaggtcaggagttcgagaccagcctggccaacatggtgaaaccccgtctctactaaaaatataaaaattagtcaggcgtggtggcaggcgcctgtaatcccagctactcagaaggctgagacagaagaacagcttgaacccaggaggctgagattgcagtgagccgagatcgcaccactgcactccagcctgggtgacaagagtgagactctgtctcaaaaaaacaaaacacaaataaacaaaaaaaatccattcatttactcatgcaataaattctcctgcaagcttttatgggcactcagtaagtactcaggattggctttatcagccttgccactgagcagctcatggtcctatggaacctgagccaggcctcagtctctccatgattggctcagctaactctcagttcagagtggagagtatcaatcttgtgtttttgcccttaggcagcactatatgagacatggggcctgtggtccttccttctggtgtcccccgtgttaaaagataaaaaacaccccaagggccgggcgcggtggctcatgcctgtaatcccagcactttgggaggctgaggcgggtggatcacgaggtcaggtgatcgaaaccatcctggctaagatggtgaaaccccgtctctactaaaaatacaaaaaattagctgggtgtggtggtgggcgcctgtagtcccagctgctcgggaggctgaggcaggagaatggcgtgaacccgggaggcggagcttgcagtgagcagagatcacgccactgcactccagcctgggtgacagtgcaagactctgtctcaaaaaaaaaaaaaacactccaagggccatccgtgctctctgcccctcctgtggggaccaagtggggttaggaatggctcagtggggaaggagagcactcttgtccccagtcccttgccaccctgtcccttagatagggaggtgggctgcagagattggtgccagaagagggtgggtttgggaattggagctcctccaaggagctcctcctaagattgagtgctgcagctgtagtggctgctggttgggagagtaagtgccatcactaatttaaaagtccttgccatctggaatcaggctttgtcaacagcagctgagaaaagcagcctgtgcctctgctggccaggcctaggccctcgtcagagcgtgcctctccacaaggcacttgggcctgggtgattgttgcgcctctggctttggcgtttcctctttgcagcactttgcctacctcccccaagccctgagccactgcctgctggggctcctactgaggttctggaaacacctctgcacctgccgcccctgggaggaaagagggccacacaggaagtgtctgcagggagaggtggcactcggcagcctgagttcaggagaggtgcttggagcttcaggcagaggggccttcagaggagggaaacggagcaatgtgtcacaggcaggcaggggcaggactgccaccccaggccccgtgggaggcctgctgagggcacagagctgctcggtgcagccttcatgctttgatctggaaagagcagctgtccgcaggcctctgtctccaagaggcctgtcacacaggaggaccgctggaaacataccaacacgtgcagtctcccctccaagctattcatgctgtttgtggaatctctctcaaacataagtgtcaggtgtgtgtcgtcccaacgggtcctgtgctgtgaatagatccatgtgcagcacaaagggaatgtggcacgtggccccaggaagagttcacccggccagggggcagttgttcagttgcctggggctgacactgaccactggcctctggggtgtcctgcagcccaaatgcccaccttgccctcctcacatctcagtcaggggaggccatgcccaagccaatgtgctgtcacagcctgcagcgggggcagcacttcctcggagggcctgggaggtgctggggatgccccagcgcttctcttcctgcctcgccctggcatggcccagcgcctctaggatcaacttacgatccgtggagcagccccgggaaacccaaatctggctcaggacagcgtacgggcaggagggctgtaaatcatcccaggctaagcctccgtgggcactggctcctgccgcagcctggctatggactcagttagaaccaggtagaaagtcagcgacaccccacagaaggccactgcggctaggtaaacacctgagaaagaaactgctccagaagagatgacgtgggcttccaggagcatggaggaggtggcacttgaacttttaggaaactccttagatgagataaagtgggggttggaggtggcgaaaagagggtaaccctgggaaagtcagtcagaacccatggcagaagactgcaggagaggcaggggaggggcttcggggaccactgtggacagagctctgaaagcaccctggccaaagcccctcctgaggtgacagagcgtgggaggaggctgcactgggcctgcgtgccatcctcacccctgttccccgctggcgccaggccctgccttcttggtacctgtgccaacaggagagccctcaccagccgatcttgtcactctccgtggtgacagtgtcttggccagctgtggcccctagtttctagcagcgtttctcagtgtccttggcccttctgagaaggcaggcgggaggcacacggtgccctgttcttccccgtttgtccagttgcttgcaaagcagagaatgagtaggagtgaacccgagtgacttcacccgccctgtcccccacgtcaggacaggcttgaggcctctctgggcgtgagcgaggaaaccaggctgctctaacttctgaagagtgggctctggctcaagactccaatcggccagaagcccacagagatcaaagcactagcaagttcagctgtcctggccctcgggtagaacccacgggcgtgcctgggtgcggctccacccacatgccccactgtcagcccaggcaggagccttcctggccgggctcaggatctgcctgcagcccagccaggccatcacccagccccgatgcatcctggcactgcacgcttactcttcacaagcacttatacgcggatggcctccgagaccctgcctccctggtctgctgaggtcaggccaggtctcccacggagccgggcagctccacaccccaccacctggcaccgttaggtttcagatctcccgtgtggtgtttgatgtcggcttttgttcctaccttgggagtttggattgtttcctctggtgtctttgtttaccttcctcactgttctacctcctggccaggtctcagcttagcttccctggtgtggggtgtttttcaagccttccagccacagctgtctcccctcaggctggacggctccggggtgacagggcttcaccctctgcctgcagacccctggtgggcacatctcacaggcttccgtcttgctgagttgggtacggaggcagaagtggggtgtggaggaaagtcagagggaaatctgcttcagaaaggaagggtctttagacacaaagactggaggcccttccccgcccgcacgggagctgccatcgtgggtctcatgcacgtcaagaccttcccacatccaaactcagcttccagcagggattttgactttggatgacaaggctttatttgtaaatatgctcttaatatgcaactttgagaataaaatagaaacatcatgtattttaaaatataagatgaagtgtgacgcactgtatacaatttaatatatatttttagggttttgttatttaagaaaatggaatgtaatggtacttttacaaacgagaaaaaatgttatttttactttctggaaaaaataaatattctcattgttgt

SEQ ID NO: 324045 - DNA, 1422 bp, Artificial Sequence
  derived and/or modified sequence
atggcgccgccagccgcccgcctcgccctgctctccgccgcggcgctcacgctggcggcccggcccgcgcctagccccggcctcggccccgagtgtttcacagccaatggtgcggattataggggaacacagaactggacagcactacaaggcgggaagccatgtctgttttggaacgagactttccagcatccatacaacactctgaaataccccaacggggaggggggcctgggtgagcacaactattgcagaaatccagatggagacgtgagcccctggtgctatgtggcagagcacgaggatggtgtctactggaagtactgtgagatacctgcttgccagatgcctggaaaccttggctgctacaaggatcatggaaacccacctcctctaactggcaccagtaaaacgtccaacaaactcaccatacaaacttgcatcagtttttgtcggagtcagaggttcaagtttgctgggatggagtcaggctatgcttgcttctgtggaaacaatcctgattactggaagtacggggaggcagccagtaccgaatgcaacagcgtctgcttcggggatcacacccaaccctgtggtggcgatggcaggatcatcctctttgatactctcgtgggcgcctgcggtgggaactactcagccatgtcttctgtggtctattcccctgacttccccgacacctatgccacggggagggtctgctactggaccatccgggttccgggggcctcccacatccacttcagcttccccctatttgacatcagggactcggcggacatggtggagcttctggatggctacacccaccgtgtcctagcccgcttccacgggaggagccgcccacctctgtccttcaacgtctctctggacttcgtcatcttgtatttcttctctgatcgcatcaatcaggcccagggatttgctgttttataccaagccgtcaaggaagaactgccacaggagaggcccgctgtcaaccagacggtggccgaggtgatcacggagcaggccaacctcagtgtcagcgctgcccggtcctccaaagtcctctatgtcatcaccaccagccccagccacccacctcagactgtcccaggtagcaattcctgggcgccacccatgggggctggaagccacagagttgaaggatggacagtctatggtctggcaactctcctcatcctcacagtcacagccattgtagcaaagatacttctgcacgtcacattcaaatcccatcgtgttcctgcttcaggggaccttagggattgtcatcaaccagggacttcgggggaaatctggagcattttttacaagccttccacttcaatttccatctttaagaagaaactcaagggtcagagtcaacaagatgaccgcaatccccttgtgagtgactaa

SEQ ID NO: 324046 - DNA, 1428 bp, Artificial Sequence
  derived and/or modified sequence
atggcccctcctgctgcccggctggccctgctgtctgctgctgccctgaccctggccgcccggcctgcccccagccctggcctgggccctggccctgagtgcttcaccgccaacggggctgactaccggggcacccagaactggacagccctgcagggcggcaagccctgcctcttctggaatgagaccttccagcacccctacaacaccctgaagtacccaaatggagagggcggcctgggggagcacaactactgcagaaatccagatggagatgtgagcccctggtgctacgtggccgagcatgaagatggagtgtactggaagtactgtgagatcccagcctgccagatgcctggcaacctgggctgctacaaggaccacggcaaccccccacccctgaccggcaccagcaagaccagcaacaagctgaccatccagacctgcatctccttctgccgcagccagcgcttcaagtttgctggcatggagagcggctacgcctgcttctgtggcaacaacccagactactggaagtacggggaggccgccagcacagagtgcaacagcgtgtgctttggagaccacacccagccctgtggaggagatggccgcatcatcctgtttgacaccctggtgggcgcctgtggcggcaactacagcgccatgagctctgtggtgtacagcccagacttcccagacacctacgccaccggccgggtgtgctactggaccatccgggtgcctggggccagccacatccacttctccttccccctgtttgacatccgggacagcgctgacatggtggagctgctggatggctacacccaccgggtgctggcccgcttccacggccgcagccggccccccctgtccttcaacgtgtccctggactttgtgatcctgtacttcttcagtgaccgcatcaaccaggcccagggctttgctgtgctgtaccaggccgtgaaggaggagctgccccaggagaggcctgctgtgaaccagacagtggccgaggtgatcacagagcaggccaacctgtctgtgtctgctgcccggagcagcaaggtgctgtatgtgatcaccaccagccccagccaccccccccagacagtgcccggcagcaacagctgggccccacccatgggcgccggcagccaccgggtggagggctggacagtgtatggcctggccaccctgctgatcctgactgtgacagccatcgtggccaagatcctgctgcacgtgaccttcaagagccaccgggtgcctgccagcggggacctgcgggactgccaccagcccggcaccagcggggagatctggagcatcttctacaagcccagcaccagcatcagcatcttcaagaagaagctgaagggccagagccagcaggatgacaggaaccccctggtgtctgactag

SEQ ID NO: 324047 - DNA, 1422 bp, Artificial Sequence
  derived and/or modified sequence
atggcccctcctgctgcccggctggccctgctgtctgctgctgccctgaccctggccgcccggcctgcccccagccctggcctgggccctgagtgcttcaccgccaacggggctgactaccggggcacccagaactggacagccctgcagggcggcaagccctgcctcttctggaatgagaccttccagcacccctacaacaccctgaagtacccaaatggagagggcggcctgggggagcacaactactgcagaaatccagatggagatgtgagcccctggtgctacgtggccgagcatgaagatggagtgtactggaagtactgtgagatcccagcctgccagatgcctggcaacctgggctgctacaaggaccacggcaaccccccacccctgaccggcaccagcaagaccagcaacaagctgaccatccagacctgcatctccttctgccgcagccagcgcttcaagtttgctggcatggagagcggctacgcctgcttctgtggcaacaacccagactactggaagtacggggaggccgccagcacagagtgcaacagcgtgtgctttggagaccacacccagccctgtggaggagatggccgcatcatcctgtttgacaccctggtgggcgcctgtggcggcaactacagcgccatgagctctgtggtgtacagcccagacttcccagacacctacgccaccggccgggtgtgctactggaccatccgggtgcctggggccagccacatccacttctccttccccctgtttgacatccgggacagcgctgacatggtggagctgctggatggctacacccaccgggtgctggcccgcttccacggccgcagccggccccccctgtccttcaacgtgtccctggactttgtgatcctgtacttcttcagtgaccgcatcaaccaggcccagggctttgctgtgctgtaccaggccgtgaaggaggagctgccccaggagaggcctgctgtgaaccagacagtggccgaggtgatcacagagcaggccaacctgtctgtgtctgctgcccggagcagcaaggtgctgtatgtgatcaccaccagccccagccaccccccccagacagtgcccggcagcaacagctgggccccacccatgggcgccggcagccaccgggtggagggctggacagtgtatggcctggccaccctgctgatcctgactgtgacagccatcgtggccaagatcctgctgcacgtgaccttcaagagccaccgggtgcctgccagcggggacctgcgggactgccaccagcccggcaccagcggggagatctggagcatcttctacaagcccagcaccagcatcagcatcttcaagaagaagctgaagggccagagccagcaggatgacaggaaccccctggtgtctgactag

SEQ ID NO: 324048 - DNA, 1428 bp, Artificial Sequence
  derived and/or modified sequence
atggccccccccgccgcccggctggccctgctgagcgccgccgcccttactctggcagcgagaccagctccatcccctggtctgggcccagggccagagtgtttcactgctaacggggcggactaccgcggtactcagaactggacggctttgcaaggtggtaagccttgtttgttttggaatgaaacttttcagcacccatataatactctcaaatatccgaacggggaaggcgggctgggtgagcataattattgcaggaaccccgatggagatgtttctccctggtgctatgtggctgagcacgaagatggggtctactggaagtattgtgaaatccccgcctgtcagatgcccggtaatttgggttgttataaagatcacggtaacccacctcctctcacaggcacttctaaaaccagtaacaaacttaccattcagacttgcatcagcttctgtcgatctcagaggttcaaattcgctggcatggagagtggttatgcctgtttttgcgggaacaatccagattactggaagtatggggaggcggccagcactgaatgcaactccgtctgtttcggagaccatactcagccttgcgggggagacggacgaatcatcctttttgacactctggttggcgcctgtgggggaaactattctgccatgtcatcggttgtttattcacccgactttcctgatacctacgccactggacgggtctgttattggactattagggtcccaggcgcgagtcacattcatttttctttcccattgttcgacatcagagacagcgcagatatggtggagcttctggacgggtatacccatcgcgtgctggccaggttccatggccgcagccgcccacccctgtcatttaatgtgtccctcgattttgtgattctatactttttcagtgacaggattaaccaggcacagggcttcgccgtattataccaggccgtgaaggaggaactgccacaagagagacccgctgtgaaccaaacagtggcggaagtgataactgaacaggctaatttgagcgtcagcgcagcacgcagctccaaggtgctatacgtcattacaacatccccgtctcatcctccgcagacagtgcccgggagcaactcttgggcgccaccaatgggagctggttctcacagggtcgaaggttggaccgtatacggcctcgctaccctgctcatactaaccgtgacagctatcgtcgctaagatccttctgcatgttaccttcaagtcccaccgagtgcctgcctccggagatcttagggattgccaccagcccggaaccagcggtgagatatggagcatcttttacaaaccttcgacatctatatcgatctttaagaaaaaattgaaaggtcagtcccagcaggatgacaggaaccctctggtgtctgattag

SEQ ID NO: 324049 - DNA, 1422 bp, Artificial Sequence
  derived and/or modified sequence
atggccccccccgccgcccggctggccctgctgagcgccgccgccctcaccttggccgccaggcccgcaccatctcccggacttgggcctgagtgctttactgccaacggagccgactatcgaggtacccagaattggactgcactccaaggggggaaaccctgtctcttctggaacgagaccttccagcacccctacaataccctgaagtatccgaacggggaaggcgggctgggagaacacaattattgtcgaaacccagacggcgacgtaagtccctggtgttatgtcgctgagcacgaagatggggtgtattggaaatactgtgagatcccagcctgccaaatgcccgggaatctgggatgttataaggatcacggcaacccaccaccacttacaggaacatctaagacttccaataagttgacaatccagacgtgtatctcgttttgccgcagccaaagatttaaattcgccgggatggaatccggttacgcttgtttctgcggtaataaccccgactattggaagtatggtgaagccgcctcaaccgaatgtaactcggtctgcttcggagaccacacgcagccttgtggcggggatggaaggatcatcctatttgatactttggtgggagcctgcggtggcaattactccgcaatgtcatcagtggtgtattcacccgatttcccagatacttacgctactggtcgggtgtgttactggaccattagagtgcctggcgcaagtcatatacatttttccttccccctgttcgacatacgggatagcgcagacatggtggaactcctggatggctatacgcaccgcgttctagcaaggttccatgggcgctctaggccccctctaagttttaatgtctccctggattttgtcatactgtacttcttctctgatcggattaatcaagctcagggctttgccgtcctgtatcaagccgttaaggaagagcttcctcaggaacggcctgctgtgaatcaaacggtggccgaagttatcaccgagcaagcaaacctgtcagtgtctgccgcccgtagtagtaaagtgctttatgtcattacaacctccccatcacatccgccacagacggttcctggctcaaacagctgggcaccacccatgggtgccggctcccatcgggttgaaggttggacagtttatggcctggccacactgctgattctgactgttaccgctatcgtcgcgaaaattctccttcatgttacatttaaatcccatcgggtgcccgcttccggggatctcagagattgccatcaacccggcacttctggggagatctggtcaattttctataagccttctacaagcatctctatatttaaaaaaaagttgaaaggtcagtcccagcaggacgataggaaccccttggtgagcgactag

SEQ ID NO: 324050 - DNA, 1428 bp, Artificial Sequence
  derived and/or modified sequence
atggcccctccggctgctagacttgccctgcttagcgctgcagcactgacactggccgcaagaccagcacctagccctggcttaggcccagggccagagtgtttcaccgcaaacggagctgattatcgcggaacccagaactggactgcacttcagggtggaaagccatgccttttctggaatgagacctttcagcacccctacaacactttgaagtaccctaacggcgagggagggctgggcgagcacaactactgccgcaatccagacggcgatgtatctccttggtgttatgtagcggagcatgaagatggggtgtactggaaatattgtgagattcccgcatgccagatgcccggtaacctgggatgttataaggatcacgggaatcccccaccactgaccggcactagcaaaacaagtaacaaactgaccattcagacatgcatttccttttgtcgtagccagcggtttaagtttgccggtatggaatccggctatgcctgtttttgcgggaataaccctgactattggaaatacggcgaggccgcttccactgagtgcaactctgtgtgctttggggaccatacgcagccatgcggcggagacggtcgaataattctctttgatactctggtcggggcttgcggtgggaactattccgcgatgagctccgtggtctactctcctgactttcccgacacgtatgccaccggccgagtttgctattggacaatccgggtcccaggtgcctcacacatccatttctcattcccactgtttgatatcagggattccgcggatatggtcgagctgctggacgggtatacgcatcgcgttctcgccagatttcacggcagatcgcgccctcctctatcctttaacgtctcactggattttgtcatcctttactttttctccgatcgcatcaaccaggcccaggggtttgccgtgctgtaccaggcggtgaaagaggagttaccgcaggaacgccctgctgtgaaccagacagtcgccgaagttatcaccgagcaagccaacctgtctgtcagcgccgcacgaagtagcaaggtgctctacgtcatcacaacaagcccttcacacccccctcagaccgtgcccggtagtaattcttgggccccacctatgggcgctggatcacaccgcgttgaaggctggacagtgtacggcctagctaccctgctaatactgacagtgaccgcgattgtggcaaagatccttctgcacgtcactttcaagtcccaccgagtgcccgcatccggagatttaagagactgccatcagccaggtacctcgggtgagatatggtcgatcttctacaagccctctactagcattagtatatttaaaaaaaaactcaaagggcagagtcagcaggacgataggaatcctctggtgtctgactag

SEQ ID NO: 324051 - DNA, 1422 bp, Artificial Sequence
  derived and/or modified sequence
atggcaccacccgctgcacgattggctcttctgagcgcggctgctctcactctggccgcacggcctgcgccatctccaggcctgggccctgagtgcttcactgccaatggcgcagactaccgaggcacccagaattggaccgcattgcagggtgggaaaccctgtctcttctggaacgagacgtttcagcatccctacaatacactgaagtacccaaatggagagggaggcctcggcgagcacaactattgtaggaacccagacggcgacgtatccccatggtgttatgtggccgagcacgaagacggcgtgtattggaagtattgtgagatccccgcatgtcagatgcctggaaatcttggatgctacaaggatcatggaaatccgcctcccctgaccggcactagtaagacttcaaataagctcacaatccaaacctgtatctctttttgccgaagccagagattcaagttcgctggcatggagagtgggtacgcatgcttctgcggaaataatcctgactactggaagtatggggaagctgcatctaccgagtgcaactctgtatgttttggagaccatacgcagccgtgcggcggagatggtcggatcattctgttcgatacactagtaggcgcttgcgggggaaattacagcgccatgtccagcgtggtttatagccccgacttcccagatacctatgccacgggtcgagtgtgctattggacaattagggttcccggtgcttcccacatccatttttcatttccactatttgatatcagagatagcgccgacatggtggagctgttggacggctatacacatagagtgctagcccgatttcacggcagatcacgacctcctttgtcattcaacgttagccttgatttcgttatcctgtacttcttcagtgatcgcataaaccaggctcagggcttcgcagtgttgtatcaagcagtcaaagaggaactaccccaggaaaggccagcagtgaaccagaccgtcgcagaagtgatcactgagcaagctaatctgtccgtatctgcagcacgatctagcaaggtcctttacgtaatcacaactagtcccagtcacccgcctcagactgtgcctggaagcaattcctgggcaccccctatgggcgcaggctcgcaccgggtcgaagggtggaccgtgtatggcctcgccacattactgatcctgactgttacagctattgtcgccaaaatcctcctccatgttactttcaagtcccaccgtgtaccagccagcggagacttgagagactgccatcagccaggaacaagcggggagatatggagcattttctataagccctccacaagcattagcatctttaagaaaaagcttaaaggccaaagccagcaagatgatagaaatcctctcgttagtgactag

SEQ ID NO: 324052 - protein, 643 aa, Artificial Sequence
  derived and/or modified sequence
VPSVWRSTLMERSCGSSPVLTGFTGSAWTPLLQHHTCPHCRHNIIEQKGNPSAVCVETSNLSRGRQQRVTLPVHYPGRVHRTNAIPAYPTRTSMDSHGNPVTLLTMDRHGEQSLYSPQTPAYIRSYPPLHLDHSLAAHRCGLEHRAYSPAHPFRRPKLSGRSFSKAACFSQYETMYQHYYFQGLSYPEQEGQSPPSLAPRGPARAFPPSGSGSLLFPTVVHVAPPSHLESGSTSSFSCYHGHRSVCSGYLADCPGSDSSSSSSSGQCHCSSSDSVVDCTEVSNQGVYGSCSTFRSSLSSDYDPFIYRSRSPCRASEAGGSGSSGRGPALCFEGSPPPEELPAVHSHGAGRGEPWPGPASPSGDQVSTCSLEMNYSSNSSLEHRGPNSSTSEVGLEASPGAAPDLRRTWKGGHELPSCACCCEPQPSPAGPSAGAAGSSTLFLGPHLYEGSGPAGGEPQSGSSQGLYGLHPDHLPRTDGVKYEGLPCCFYEEKQVARGGGGGSGCYTEDYSVSVQYTLTEEPPPGCYPGARDLSQRIPIIPEDVDCDLGLPSDCQGTHSLGSWGGTRGPDTPRPHRGLGATREEERALCCQARALLRPGCPPEEAGAVRANFPSALQDTQESSTTATEAAGPRSHSADSSSPGA

SEQ ID NO: 324053 - DNA, 2667 bp, Artificial Sequence
  derived and/or modified sequence
gcacagaagtttgctgcatcactggtgagctggggagtgtcctgtgtggtgtccacttaatcttactaggaaggatcccctcatttcaacaagatgcacccactgggcctatgtaataacaatgacgaagaggacttgtatgaatatggctgggtaggagtggtgaagctggaacagccagaattggacccgaaaccatgcctcactgtcctaggcaaggccaagcgagcagtacagcggggagctactgcagtcatctttgatgtgtctgaaaacccagaagctattgatcagctgaaccagggctctgaagacccgctcaagaggccggtggtgtatgtgaagggtgcagatgccattaagctgatgaacatcgtcaacaagcagaaagtggctcgagcaaggatccagcaccgccctcctcgacaacccactgaatactttgacatggggattttcctggctttcttcgtcgtggtctccttggtctgcctcatcctccttgtcaaaatcaagctgaagcagcgacgcagtcagaattccatgaacaggctggctgtgcaggctctagagaagatggaaaccagaaagttcaactccaagagcaaggggcgccgggaggggagctgtggggccctggacacactcagcagcagctccacgtccgactgtgccatctgtctggagaagtacattgatggagaggagctgcgggtcatcccctgtactcaccggtttcacaggaagtgcgtggacccctggctgctgcagcaccacacctgcccccactgtcggcacaacatcatagaacaaaagggaaacccaagcgcggtgtgtgtggagaccagcaacctctcacgtggtcggcagcagagggtgaccctgccggtgcattaccccggccgcgtgcacaggaccaacgccatcccagcctaccctacgaggacaagcatggactcccacggcaaccccgtcaccttgctgaccatggaccggcacggggagcagagcctctattccccgcagacccccgcctacatccgcagctacccacccctccacctggaccacagcctggccgctcaccgctgcggcctggagcaccgggcctactccccagcccaccccttccgcaggcccaagttgagtggccgcagcttctccaaggcagcttgcttctcccagtatgagaccatgtaccagcactactacttccagggcctcagctacccggagcaggaggggcagtccccacctagcctcgcaccccggggcccggcccgtgcctttcctccgagcggcagtggcagcctgctcttccccaccgtggtgcacgtggccccgccctcccacctggagagcggcagcacgtccagcttcagctgctatcacggccaccgctcggtgtgcagtggctacctggccgactgcccaggcagcgacagcagcagcagcagcagctccggccagtgccactgttcctccagtgactctgtggtagactgcactgaggtcagcaaccagggcgtgtacgggagctgctccaccttccgcagctccctcagcagcgactatgaccccttcatctaccgcagccggagcccctgtcgtgccagtgaggcggggggctcgggcagctcgggccggggacctgccctgtgcttcgagggctccccgcctcccgaggagctcccggcggtgcacagtcatggtgctgggcggggcgagccttggccgggccctgcctctccctcgggggatcaggtgtccacctgcagcctggagatgaactacagcagcaactcctccctggagcacagggggcccaatagctctacctcagaagtggggctcgaggcttctcctggggccgcccctgacctcaggaggacctggaaggggggccacgagttgccgtcgtgtgcctgctgctgcgagccccagccctccccagccgggcctagcgccggagcagctggcagcagcaccttgttcctggggccccacctctacgagggctctggcccggcgggtggggagccccagtcaggaagctcccagggcttgtacggccttcaccccgaccatttgcccaggacagatggggtgaaatacgagggtctgccctgctgcttctatgaagagaagcaggtggcccgcgggggcggagggggcagcggctgctacactgaggactactcggtgagtgtgcagtacacgctcaccgaggaaccaccgcccggctgctaccccggggcccgggacctgagccagcgcatccccatcattccagaggatgtggactgtgatctgggcctgccctcggactgccaagggacccacagcctcggctcctggggtgggacgcgaggcccggataccccacggccccacaggggcctgggagcaacccgggaagaggagcgggctctgtgctgccaggctagggccctactgcggcctggctgccctccggaggaggcgggtgctgtcagggccaacttccctagtgccctccaggacactcaggagtccagcaccactgccactgaggctgcaggaccgagatctcactcagcagacagcagcagcccgggagcctgagctcaggaggaactcttacctggaaattgggaactgtatggagactccaaactgacttctttc

SEQ ID NO: 324054 - DNA, 723 bp, Artificial Sequence
  derived and/or modified sequence
atgccggcacttccactggatcagctccagattacacacaaggatcctaaaaccggcaaactcaggacgagtcctgctctgcaccctgagcaaaaagcagatcggtattttgttttgtataaacctcccccaaaagataacatacctgcgcttgttgaagaatacctcgagagagcaacattcgtggccaatgatcttgactggctactagcgttaccccacgacaagttttggtgtcaggtgatatttgatgagaccctccagaaatgtcttgatagctacctaagatacgtgccccgaaaattcgatgaaggagtcgcctccgctcccgaggtggtggatatgcaaaaacgcctgcatagatcagtgttcttgacattcctgcgcatgagcacccataaagaaagtaaagatcattttatctccccgtctgcgttcggagagattctgtacaataattttctgttcgatattcctaagattctggacctgtgcgtactgtttggcaagggcaactcccctttactccagaagatgatagggaacatctttacccagcagccgtcgtattactccgatttggatgaaaccttacccaccatcctccaggtctttagcaacattttgcagcattgtggcctgcaaggcgatggcgccaatacaacaccgcagaaattggaggagcggggacgtctaaccccaagtgatatgccgctactctag

SEQ ID NO: 324055 - DNA, 723 bp, Artificial Sequence
  derived and/or modified sequence
atgcctgccctgcccctggaccagctgcagatcacccacaaggaccccaagacaggcaagctgcggaccagccctgccctgcaccctgagcagaaggctgaccgctactttgtgctgtacaagcccccacccaaggacaacatcccagccctggtggaggagtacctggagcgggccacctttgtggccaatgacctggactggctgctggccctgccccatgacaagttctggtgccaggtgatctttgatgagaccctgcagaagtgcctggacagctacctgcgctacgtgcccaggaagtttgatgaaggagtggccagcgcccctgaggtggtggacatgcagaagaggctgcacaggagcgtcttcctgaccttcctgaggatgagcacccacaaggagagcaaggaccacttcatcagccccagcgccttcggggagatcctgtacaacaacttcctgtttgacatccccaagatcctggacctgtgtgtgctgtttgggaagggcaacagccccctgctgcagaagatgattggcaacatcttcacccagcagcccagctactacagcgacctggatgagaccctgcccaccatcctgcaggtgttcagcaacatcctgcagcactgcggcctgcagggagatggagccaacaccaccccccagaagctggaggagcggggccgcctgacccccagcgacatgcccctgctgtag

SEQ ID NO: 324056 - DNA, 723 bp, Artificial Sequence
  derived and/or modified sequence
atgcccgccctgcccctggaccagctgcagatcacccacaaggaccccaaaactggtaagctacgcacaagtcctgctctgcatcctgaacagaaggccgaccgctatttcgttctctataagcccccgccaaaagataatattcctgcactggtagaggagtatctagaacgggcaacttttgtcgctaatgatctggactggttgttggctctgccccacgacaaattttggtgccaggttattttcgacgagactctacagaagtgtttggattcctaccttcggtacgtgccccgcaaatttgacgagggggttgctagcgcacctgaggtagtcgatatgcagaaaagattacaccggagtgtgttcttgacgttcttgcgtatgagcacgcacaaagagtctaaagatcacttcatcagcccgtcggcttttggcgaaatcctgtataataattttctgtttgacatacctaagatcctcgatctctgtgtcctctttggcaagggcaatagcccgcttctgcagaagatgataggtaacatcttcacacagcagccatcatattactccgacctcgacgagaccttgcccacgattctgcaagtgttcagtaacatactgcagcattgcggcttgcagggagacggcgctaacaccacgccccaaaagctggaggagaggggacggctcaccccgtctgacatgcctctactctag

SEQ ID NO: 324057 - DNA, 723 bp, Artificial Sequence
  derived and/or modified sequence
atgcctgctctccctctcgaccaactccaaatcacacacaaggatcctaaaacagggaagttgcgaacttcccccgctctgcatcctgagcagaaggccgacaggtacttcgtcctttacaagccaccacccaaggataacattcctgcactggtcgaggagtacctagagcgtgctacattcgtggcgaatgatctagattggctgctcgcactcccccatgacaaattttggtgccaggttatcttcgatgagactttacagaagtgcctggatagttacttgcgttatgtcccacgaaaatttgatgagggggtagcctccgcccctgaggtcgtcgatatgcagaaacgacttcatcgaagtgttttcctgacttttctgaggatgtctactcacaaggaatccaaagaccacttcattagcccttcggcatttggtgaaatcctgtacaataactttttgtttgatattccaaagatactggatttgtgcgttctcttcgggaaggggaacagcccactcttacagaaaatgataggcaatattttcactcagcagccttcatactatagcgatcttgatgagactttacctactatcctgcaggtgttctctaacatactgcaacactgcgggctccagggcgatggggcaaacaccacacctcaaaagctagaggagagaggcaggctcactccctcggatatgccactgctatag

SEQ ID NO: 324058 - DNA, 873 bp, Artificial Sequence
  derived and/or modified sequence
gccacctcgtgtatgcagagaccatgtgtgtctgatctgctgggatcctagagctggaacaggccaagtgatattgtgaaaagaacactggacagcaagacaggagaccttggatctgccactcactgactgtgaggagggtcacgcagcacaatgccagctctgcccctggaccaactccagatcacccacaaggacccgaagacaggaaagctgaggacttcaccagcgctgcaccccgagcagaaggcagaccggtattttgtgttatacaaaccgccccctaaagacaacattcccgccctagtggaggagtacctggaacgcgccaccttcgtagccaatgacctcgactggctcctggccttgcctcacgataaattctggtgccaggtgatctttgacgagactctacagaagtgcctggactcctacctgcgctatgtcccccgcaaattcgacgagggggtggcctcagcccctgaggttgttgacatgcagaagcgcctccatcgaagtgtttttctcaccttcctccgcatgtccactcacaaggaatccaaagatcacttcatttccccttctgcgtttggagaaatcctctacaataacttcctctttgacattccaaagatcctggacctctgcgtgctctttggaaaaggcaactcaccactgctccagaagatgataggaaacatctttacacagcagccaagttactacagtgacctggatgaaaccctgcctaccatccttcaggtcttcagcaatatcctccagcactgtggtttgcaaggggacggggccaataccacaccccagaagcttgaggagaggggccgattgacccccagtgacatgcctctcctg

SEQ ID NO: 324059 - DNA, 723 bp, Artificial Sequence
  derived and/or modified sequence
atgcccgccctgcccctggaccagctgcagatcacccacaaggaccccaagaccggcaagctgagaaccagccccgccctgcaccccgagcagaaggccgacagatacttcgtgctgtacaagcccccccccaaggacaacatccccgccctggtggaggagtacctggagagagccaccttcgtggccaacgacctggactggctgctggccctgccccacgacaagttctggtgccaggtgatcttcgacgagaccctgcagaagtgcctggacagctacctgagatacgtgcccagaaagttcgacgagggcgtggccagcgcccccgaggtggtggacatgcagaagagactgcacagaagcgtgttcctgaccttcctgagaatgagcacccacaaggagagcaaggaccacttcatcagccccagcgccttcggcgagatcctgtacaacaacttcctgttcgacatccccaagatcctggacctgtgcgtgctgttcggcaagggcaacagccccctgctgcagaagatgatcggcaacatcttcacccagcagcccagctactacagcgacctggacgagaccctgcccaccatcctgcaggtgttcagcaacatcctgcagcactgcggcctgcagggcgacggcgccaacaccaccccccagaagctggaggagagaggcagactgacccccagcgacatgcccctgctgtag

SEQ ID NO: 324060 - protein, 186 aa, Artificial Sequence
  derived and/or modified sequence
MAPLHPHPAGMRINVVNNHQAKQNLYDLDEDDDGIASVPTKQMKFAASGGFLHHMAGLSSSKLSMSKALPLTKVVQNDAYTAPALPSSIRTKALTNMSRTLVNKEEPPKELPAAEPVLSPLEGTKMTVNNLHPRVTEEDIVELFCVCGALKRARLVHPGVAEVVFVKKDDAITAYKKYNNRCLDGG

SEQ ID NO: 324061 - DNA, 558 bp, Artificial Sequence
  derived and/or modified sequence
atggctgatattagtttagatgaactgattcgcaagcgtggtgctgccgctaaaggccgccttaatgcccgccccggcgtagggggcgtccgatcccgagtcggtatccagcaggggctgctctcacagagcaccagaaccgccacatttcaacagcgcttcgacgccaggcaaaaaatcggcttatccgatgcaaggctgaaattgggcgttaaagacgcccgagaaaaactcctgcagaaggacgcaagatttaggataaagggtaaggttcaggatgcaagggagatgctgaatagcagaaagcagcagaccaccgtgccccagaaacctaggcaggtagctgacgcacgggaaaaaatttctctgaagagaagttcaccagctgcctttatcaaccctcccatcggcacagtgacacccgcactgaagcttacaaagacgatacaggtgggcctacgagccgtacctttgctctgtctggtctccggtggggcttgggtgggctcacgtagtcaagcttcatgtcctctaccaagtgggtctcggccgcattag

SEQ ID NO: 324062 - DNA, 561 bp, Artificial Sequence
  derived and/or modified sequence
atggctcctcttcaccctcatcccgccggcatgaggatcaatgtcgtgaacaatcatcaggcaaagcaaaacctctatgatcttgatgaagacgacgacgggatcgccagcgttccaaccaaacagatgaagtttgcagcatcaggtggatttctccaccatatggctggattgtcatctagtaaactgtctatgtcaaaggcactgcctctgacaaaggtggtgcaaaatgatgcctataccgccccagcccttccttcatccatacgtacgaaggctttaactaatatgtcccggaccctggtcaataaggaagagccgccaaaggaacttcccgccgccgagccagtgctgtcacccctcgagggcaccaagatgacagtgaataatctacacccacgggtcacggaggaagatatcgttgagctcttttgcgtgtgcggcgctcttaaaagagcacgactagtgcaccctggtgtcgccgaggttgtttttgtcaagaaagacgacgcaattaccgcctataagaaatataataacagatgcctagatggtggatag

SEQ ID NO: 324063 - DNA, 555 bp, Artificial Sequence
  derived and/or modified sequence
atggctgatatctctttggacgaacttataagaaagcggggcgccgcagcaaaagggcgattaaacgcacgccccggagtcggcggggtgcggtctagagtgggcatccagcaaggtctgctaagccagtctactcgaacagcaaccttccagcaacggttcgatgctagacagaagattggactgagcgatgcccgactgaagttgggggtgaaggacgcccgggagaaactcctgcaaaaggatgcacggttccgcatcaaaggcaaggtgcaggacgctagggagatgctcaatagccgaaagcagcaaactactgttccccagaaaccccggcaggtagccgatgcccgagagaagatatcgttgaaaagatctagtccagccgcttttataaatccccccatcggtaccgtcacgcctgcgttaaagctgactaaaacaatccaggttccctcctttccatgccctagaccatctctgagccctaagtggttccggatgatgcacactcagctcctacttagcctgccattgttcgagcaaaagccatag

SEQ ID NO: 324064 - DNA, 558 bp, Artificial Sequence
  derived and/or modified sequence
atggctgacatcagcctggatgagctgatcaggaagagaggagctgctgccaagggccgcctgaatgcccggcctggggtgggcggcgtgcgcagccgggtgggcatccagcagggcctgctgagccagagcaccaggacagccaccttccagcagagatttgatgcccggcagaagattggcctgagtgatgcccggctgaagctgggcgtgaaggatgcccgggagaagctgctgcagaaggatgcccgcttccgcatcaagggcaaggtgcaggatgcccgggagatgctgaacagcaggaagcagcagaccaccgtgccccagaagccccggcaggtggctgatgcccgggagaagatcagcctgaagaggagcagccctgctgccttcatcaacccccccatcggcaccgtgaccccagccctgaagctgaccaagaccatccaggtgggcctgcgggctgtgcccctgctgtgcctggtgtctggaggagcctgggtgggcagccgcagccaggccagctgccccctgcccagcggcagccggccccactag

SEQ ID NO: 324065 - DNA, 561 bp, Artificial Sequence
  derived and/or modified sequence
atggcccccctgcacccccaccctgctggcatgaggatcaacgtggtgaacaaccaccaggccaagcagaacctgtatgacctggatgaagatgatgatggcatcgcctctgtgcccaccaagcagatgaagtttgctgccagcggcggcttcctgcaccacatggccggcctgagcagcagcaagctgtccatgagcaaggccctgcccctgaccaaggtggtgcagaatgatgcctacacagccccagccctgcccagcagcatccgcaccaaggccctgaccaacatgagcaggaccctggtgaacaaggaggagccccccaaggagctgcctgctgctgagcctgtgctgagccccctggagggcaccaagatgacagtgaacaacctgcacccccgggtgacagaggaggacatcgtggagctgttctgtgtgtgtggggccctgaagagggcccggctggtgcaccctggggtggccgaggtggtgtttgtgaagaaggatgatgccatcacagcctacaagaagtacaacaaccgctgcctggatggcggctag

SEQ ID NO: 324066 - DNA, 555 bp, Artificial Sequence
  derived and/or modified sequence
atggctgacatcagcctggatgagctgatcaggaagagaggagctgctgccaagggccgcctgaatgcccggcctggggtgggcggcgtgcgcagccgggtgggcatccagcagggcctgctgagccagagcaccaggacagccaccttccagcagagatttgatgcccggcagaagattggcctgagtgatgcccggctgaagctgggcgtgaaggatgcccgggagaagctgctgcagaaggatgcccgcttccgcatcaagggcaaggtgcaggatgcccgggagatgctgaacagcaggaagcagcagaccaccgtgccccagaagccccggcaggtggctgatgcccgggagaagatcagcctgaagaggagcagccctgctgccttcatcaacccccccatcggcaccgtgaccccagccctgaagctgaccaagaccatccaggtgcccagcttcccctgcccccggcccagcctgagccccaagtggttcaggatgatgcacacccagctgctgctgagcctgcccctgtttgagcagaagccctag

SEQ ID NO: 324067 - DNA, 558 bp, Artificial Sequence
  derived and/or modified sequence
atggccgacatcagcctggacgagctgatccggaagcggggcgccgcagcaaaggggagattgaacgctcgaccgggtgtcgggggtgtccgttcccgggtgggaattcagcagggcttactgtcccagtctaccaggaccgcgacgttccaacagcgcttcgatgctagacagaagatcggtttgtctgacgcgcgtctcaaactgggtgtgaaagatgctcgagaaaagttgcttcagaaagatgcgcgctttcgtatcaagggcaaagtccaggatgctagggaaatgttgaactcccgaaagcagcagaccaccgtgccccagaaacctaggcaggttgctgacgctagggagaagattagcctaaagcgtagctcaccagcagcgttcatcaacccccccatcggcactgttactcctgcgctgaagctcaccaaaaccatccaagttgggcttcgagccgtgccgttgctgtgccttgtgagcggcggggcgtgggtcgggtccaggagccaagcctcttgtcctcttccgagtggctcccggccgcactag

SEQ ID NO: 324068 - DNA, 561 bp, Artificial Sequence
  derived and/or modified sequence
atggcccccctgcacccccaccccgccggcatgcggatcaacgtggttaacaatcaccaggcgaagcaaaacttatacgatctcgatgaagatgatgatggcattgcttcagttccaactaaacagatgaaatttgccgcaagcggtgggttccttcaccacatggccgggctgtcaagctccaaattgagtatgtcaaaggccctgcccctaaccaaagtagttcagaacgacgcgtataccgcgcccgctttgccaagctctatacgcacaaaggccctgacaaacatgtcgcggacactagttaataaggaggaacctcccaaagagctgccagccgcagagcctgtgctctcccctctagagggaacaaaaatgactgtcaacaacttgcacccccgggtcaccgaagaagatattgttgaactcttctgcgtgtgcggtgcactaaaacgcgcaagactggtccatcctggtgtggccgaggtcgtcttcgttaaaaaggacgatgctatcaccgcttataaaaagtacaataaccgatgtctagatggaggatag

SEQ ID NO: 324069 - DNA, 555 bp, Artificial Sequence
  derived and/or modified sequence
atggccgacatcagcctggacgagctgatccggaagcggggcgccgctgcgaagggcaggttgaatgcaaggccaggagttggaggcgttagatccagggtggggattcagcaggggctgctttcacagagtacaagaacagctacttttcagcagcggtttgatgccaggcaaaaaattgggctctccgacgctcgcctaaagttgggagttaaagatgctagagaaaagcttctgcagaaagatgccagattcagaattaaaggcaaggtgcaggacgcccgggaaatgcttaattctagaaaacagcagacaacggtgccccagaagccccggcaggtggcagatgcaagagaaaagatttctctcaaaagatccagtcctgccgcctttattaacccccccatcggtacagtcaccccggccttgaagctaactaaaacaatccaggtgccttccttcccgtgtccacgacccagcctcagcccaaaatggtttcggatgatgcacactcaactactgctaagcctacctctgttcgagcagaaaccgtag

SEQ ID NO: 324070 - DNA, 783 bp, Artificial Sequence
  derived and/or modified sequence
atggcggacatctccctggacgaactcatcaggaagcgcggggcggcggcgaaaggacggcttaatgccagaccgggagttggaggtgtccgatctcgagttgggatccagcaaggccttctcagccagtcaacacgcacagccaccttccagcagagatttgatgcccggcagaagattggcctctcagatgcccggctcaaactgggagtcaaggatgcccgggagaagcttttgcagaaagatgcccgatttcgaatcaaagggaaagtgcaggatgccagagagatgttgaactctcgcaagcagcagaccacggtgccccagaagccccgccaggttgctgatgcccgggagaagatcagcttgaagaggagttcccctgctgccttcataaacccacccattgggacagtgacccctgctctgaagctcaccaaaaccatccaggtcggcctgagagctgtgccgctcctctgtcttgtcagtggaggtgcctgggtggggagcaggtctcaggcctcttgtcctctccccagtggctccaggcctcactagtggcaagggcaggatgaggctgcaccgctgggaagagtctatctaagctcttggcttggagtcccgtgtcgtctccacccagaggaagttctccagagttcacctttcccttttccttgagttgtgctgaatgccccaccccagctctctttcccttctgggtgtctttgctgggagggggctgtgttgtgagccctcccggttctcacctcgcctggcacttaa

SEQ ID NO: 324071 - DNA, 558 bp, Artificial Sequence
  derived and/or modified sequence
atggcagacatctctctggatgagctgattagaaagcgtggagctgctgccaaaggcaggctcaacgctcggccaggcgtggggggagtgcgttcccgcgtcggcatccagcagggtttactgtcacagagtaccaggaccgccacattccaacagcgcttcgatgcgagacagaagatcggactcagcgacgcaagattaaaactgggtgtcaaagatgctcgtgaaaaactgctgcagaaggacgcgaggtttcgtatcaagggaaaggtccaggacgctcgagaaatgctgaacagccgcaagcagcagaccacagtcccacaaaagccaagacaggttgctgacgccagggaaaaaatctctttaaagcgctcgtcccctgctgctttcatcaatcctccgatcggtactgtgactcctgcgctcaaacttaccaagacaattcaagttggtctccgagccgttcccttgctgtgcctagttagtggtggtgcctgggtgggctcccgcagtcaggcttcttgtccacttcccagcgggtctcgccctcattag

SEQ ID NO: 324072 - DNA, 561 bp, Artificial Sequence
  derived and/or modified sequence
atggcccctctgcatccccacccggcaggcatgagaattaatgtcgtcaacaatcaccaggccaagcagaatctgtatgacttagacgaagacgatgacggtatcgcttccgttcctacgaaacagatgaaatttgcagccagtggtgggtttttgcaccacatggctgggctgagctcatccaagctgagtatgtccaaggccctgccacttacaaaggtagtgcagaacgacgcttataccgccccagcactccccagctcaatccggaccaaggcacttaccaatatgtccagaacgttagtcaataaagaggaaccccctaaagagcttcctgcagccgaaccagttctctcacccctcgaaggtaccaaaatgacagttaacaatttgcatccgagagtgacagaggaggatatcgttgagctgttctgtgtttgtggggcacttaagcgagcgaggctggtacatccaggcgtggccgaagtggtatttgtgaaaaaagacgatgcaatcacagcctacaagaagtataataataggtgcctcgacgggggttag

SEQ ID NO: 324073 - DNA, 555 bp, Artificial Sequence
  derived and/or modified sequence
atggcagacattagtctggatgagctcatacggaaacggggtgcagccgcaaaagggcgactcaatgctaggcctggagtgggcggtgtgcggtctagggtcgggattcagcagggactactcagccagtcaacacgcactgccacgtttcagcagcgatttgacgctagacagaagatagggctttccgacgctcggctgaagttgggtgtgaaggacgccagggagaaactgctccagaaagatgcacggttccggatcaaggggaaggttcaggacgcaagagagatgctcaacagtagaaaacagcagaccaccgttcctcaaaaaccaagacaggttgcggacgctcgagaaaagatctccttaaaacgcagcagcccggctgcatttatcaacccacccatcgggaccgtgacccccgctttaaaattgacgaagactatccaggtaccaagcttcccctgtccgagaccttccttaagcccaaagtggttcagaatgatgcacacacagctcttactgtcattgcctctgtttgaacagaagccctag

SEQ ID NO: 324074 - DNA, 558 bp, Artificial Sequence
  derived and/or modified sequence
atggccgacatcagcctggacgagctgatcagaaagagaggcgccgccgccaagggcagactgaacgccagacccggcgtgggcggcgtgagaagcagagtgggcatccagcagggcctgctgagccagagcaccagaaccgccaccttccagcagagattcgacgccagacagaagatcggcctgagcgacgccagactgaagctgggcgtgaaggacgccagagagaagctgctgcagaaggacgccagattcagaatcaagggcaaggtgcaggacgccagagagatgctgaacagcagaaagcagcagaccaccgtgccccagaagcccagacaggtggccgacgccagagagaagatcagcctgaagagaagcagccccgccgccttcatcaacccccccatcggcaccgtgacccccgccctgaagctgaccaagaccatccaggtgggcctgagagccgtgcccctgctgtgcctggtgagcggcggcgcctgggtgggcagcagaagccaggccagctgccccctgcccagcggcagcagaccccactag

SEQ ID NO: 324075 - DNA, 561 bp, Artificial Sequence
  derived and/or modified sequence
atggcccccctgcacccccaccccgccggcatgagaatcaacgtggtgaacaaccaccaggccaagcagaacctgtacgacctggacgaggacgacgacggcatcgccagcgtgcccaccaagcagatgaagttcgccgccagcggcggcttcctgcaccacatggccggcctgagcagcagcaagctgagcatgagcaaggccctgcccctgaccaaggtggtgcagaacgacgcctacaccgcccccgccctgcccagcagcatcagaaccaaggccctgaccaacatgagcagaaccctggtgaacaaggaggagccccccaaggagctgcccgccgccgagcccgtgctgagccccctggagggcaccaagatgaccgtgaacaacctgcaccccagagtgaccgaggaggacatcgtggagctgttctgcgtgtgcggcgccctgaagagagccagactggtgcaccccggcgtggccgaggtggtgttcgtgaagaaggacgacgccatcaccgcctacaagaagtacaacaacagatgcctggacggcggctag

SEQ ID NO: 324076 - DNA, 555 bp, Artificial Sequence
  derived and/or modified sequence
atggccgacatcagcctggacgagctgatcagaaagagaggcgccgccgccaagggcagactgaacgccagacccggcgtgggcggcgtgagaagcagagtgggcatccagcagggcctgctgagccagagcaccagaaccgccaccttccagcagagattcgacgccagacagaagatcggcctgagcgacgccagactgaagctgggcgtgaaggacgccagagagaagctgctgcagaaggacgccagattcagaatcaagggcaaggtgcaggacgccagagagatgctgaacagcagaaagcagcagaccaccgtgccccagaagcccagacaggtggccgacgccagagagaagatcagcctgaagagaagcagccccgccgccttcatcaacccccccatcggcaccgtgacccccgccctgaagctgaccaagaccatccaggtgcccagcttcccctgccccagacccagcctgagccccaagtggttcagaatgatgcacacccagctgctgctgagcctgcccctgttcgagcagaagccctag

SEQ ID NO: 324077 - protein, 368 aa, Artificial Sequence
  derived and/or modified sequence
MADAQNISLDSPGSVGAVAVPVVFALIFLLGTVGNGLVLAVLLQPGPSAWQEPGSTTDLFILNLAVADLCFILCCVPFQATIYTLDAWLFGALVCKAVHLLIYLTMYASSFTLAAVSVDRYLAVRHPLRSRALRTPRNARAAVGLVWLLAALFSAPYLSYYGTVRYGALELCVPAWEDARRRALDVATFAAGYLLPVAVVSLAYGRTLRFLWAAVGPAGAAAAEARRRATGRAGRAMLAVAALYALCWGPHHALILCFWYGRFAFSPATYACRLASHCLAYANSCLNPLVYALASRHFRARFRRLWPCGRRRRHRARRALRRVRPASSGPPGCPGDARPSGRLLAGGGQGPEPREGPVHGGEAARGPE

SEQ ID NO: 324078 - DNA, 1157 bp, Artificial Sequence
  derived and/or modified sequence
tcccaggtgcccgtctgatggggagatggctgatgcccagaacatttcactggacagcccagggagtgtgggggccgtggcagtgcctgtggtctttgccctaatcttcctgctgggcacagtgggcaatgggctggtgctggcagtgctcctgcagcctggcccgagtgcctggcaggagcctggcagcaccacggacctgttcatcctcaacctggcggtggctgacctctgcttcatcctgtgctgcgtgcccttccaggccaccatctacacgctggatgcctggctctttggggccctcgtctgcaaggccgtgcacctgctcatctacctcaccatgtacgccagcagctttacgctggctgctgtctccgtggacaggtacctggccgtgcggcacccgctgcgctcgcgcgccctgcgcacgccgcgtaacgcccgcgccgcagtggggctggtgtggctgctggcggcgctcttctcggcgccctacctcagctactacggcaccgtgcgctacggcgcgctggagctctgcgtgcccgcctgggaggacgcgcgccgccgcgccctggacgtggccaccttcgctgccggctacctgctgcccgtggctgtggtgagcctggcctacgggcgcacgctgcgcttcctgtgggccgccgtgggtcccgcgggcgcggcggcggccgaggcgcggcggagggcgacgggccgcgcggggcgcgccatgctggcggtggccgcgctctacgcgctctgctggggtccgcaccacgcgctcatcctgtgcttctggtacggccgcttcgccttcagcccggccacctacgcctgccgcctggcctcacactgcctggcctacgccaactcctgcctcaacccgctcgtctacgcgctcgcctcgcgccacttccgcgcgcgcttccgccgcctgtggccgtgcggccgccgacgccgccaccgtgcccgccgcgccttgcgtcgcgtccgccccgcgtcctcgggcccacccggctgccccggagacgcccggcctagcgggaggctgctggctggtggcggccagggcccggagcccagggagggacccgtccacggcggagaggctgcccgaggaccggaataaaccctgccgcctggactccgcctgt

SEQ ID NO: 324079 - DNA, 1107 bp, Artificial Sequence
  derived and/or modified sequence
atggctgatgcccagaatatctccttggatagtcctggatctgtgggagctgtagccgtacctgtggtatttgctttgatatttctcctcggaaccgtgggaaatggcctggtcctggcagtgctactgcaacccggaccttccgcgtggcaggagcccggcagcacaacagatctgttcattttgaaccttgcggtggcagacttgtgtttcatcctttgttgtgttccgttccaggctaccatctataccctagacgcctggctgtttggtgcacttgtctgcaaagccgtacatttgctcatttatcttacgatgtatgccagcagcttcactttggctgcagttagtgtcgatcggtatctggccgtgcgccatcctcttcggtcaagagccctaaggactcctcgtaatgcgagagctgctgtgggcttagtctggcttctcgcggctctcttctccgcaccatatctgagctactatggaactgtcagatacggggcgttggaattatgcgtccctgcctgggaagacgctcggaggagagcacttgacgtggctaccttcgctgcagggtacctgctccccgttgccgtcgtctctctagcatacggccgtacgctgcgcttcctgtgggccgctgtcggccctgccggggctgcagccgctgaggctcgccgtcgggcaacaggccgtgcgggcagggccatgctggctgtcgccgctctgtacgcactctgctgggggccacatcatgccttgatactctgcttttggtatggtcgtttcgccttttcccccgctacttatgcatgtagattagcatcccactgcctggcctatgccaacagctgtctgaatccactggtgtatgcccttgccagccgacatttccgcgctcgattcaggcgcctctggccttgcgggagaagaagacggcacagggccagacgggccctgaggagagtgcgacccgcctcttcaggacccccagggtgtccaggggacgctagaccctctggccgcctcctggccgggggcggacaaggcccggagccacgtgagggccccgttcacgggggcgaggcagcccggggacctgagtag

SEQ ID NO: 324080 - DNA, 1107 bp, Artificial Sequence
  derived and/or modified sequence
atggctgatgcccagaacatcagcctggacagccctggctctgtgggcgctgtggccgtgcctgtggtgtttgccctgatcttcctgctgggcaccgtgggcaatggcctggtgctggccgtgctgctgcagcccggccccagcgcctggcaggagcccggcagcaccacagacctcttcatcctgaacctggccgtggccgacctgtgcttcatcctgtgctgcgtgcccttccaggccaccatctacaccctggatgcctggctgtttggagccctggtgtgcaaggctgtgcacctgctgatctacctgaccatgtatgccagcagcttcaccctggccgctgtgtctgtggaccgctacctggccgtgcgccaccccctgcggagccgggccctgcggaccccaagaaatgcccgggctgctgtgggcctggtgtggctgctggccgccctcttcagcgccccctacctgagctactatggaacagtgcgctacggggccctggagctgtgtgtgcctgcctgggaggatgccaggagaagagccctggatgtggccacctttgctgctggctacctgctgcctgtggccgtggtgtccctggcctacggccgcaccctgcgcttcctgtgggccgctgtgggccctgctggagctgctgctgctgaggccaggagaagagccaccggccgggccggccgggccatgctggccgtggccgccctgtatgccctgtgctggggcccccaccacgccctgatcctgtgcttctggtacggccgctttgccttctccccagccacctacgcctgccgcctggccagccactgcctggcctatgccaacagctgcctgaaccccctggtgtatgccctggccagccgccacttccgggcccgcttccggcggctgtggccctgtggcagaagaagaagacaccgggcccggcgggccctgcggcgggtgcggcctgccagcagcggccccccaggctgccctggagatgcccggcccagcggccgcctgctggccggcggcggccagggccctgagccccgggagggccctgtgcatggaggagaggccgcccggggccctgagtag

SEQ ID NO: 324081 - DNA, 1107 bp, Artificial Sequence
  derived and/or modified sequence
atggccgacgcccagaacatcagcctggacagccccggcagcgtgggcgctgtcgcagtgccagtggtctttgctctcatttttctgctcggtacagtaggtaatgggctggtcctcgctgtactgttgcagcccgggccttccgcttggcaggagcccggaagcaccaccgatttgttcatcttaaacctggcagtggcggacctatgcttcatattgtgctgcgtccccttccaggccacgatctacactctggatgcctggcttttcggagcgcttgtttgcaaagccgtacatttgttaatttatctgaccatgtacgcttcaagcttcaccctggccgccgttagtgtggacaggtatctggcagtacggcatcccctcagaagcagagcacttcgcacaccacgcaacgcaagagccgctgtagggctggtgtggttacttgcggccttgttcagtgccccttaccttagttattacggaacggtgcgctacggagcattagagttgtgtgttcccgcctgggaggacgcccggcgccgggcacttgacgttgctacatttgcggcgggctatttgctgcccgtggctgtcgtctctctggcctatggacgtacactaagatttctgtgggctgctgtaggacctgctggtgccgccgccgccgaggctcgaaggcgcgcgaccggtagggcaggtcgggctatgctggcagtcgctgcactatacgctttgtgctgggggcctcaccatgccctcatattatgcttctggtacggcagattcgccttcagcccggctacttacgcttgtaggctggcatctcattgtttggcctatgccaatagctgcctgaatcctctcgtttacgctctggcctccagacatttccgtgcaagattcaggagactgtggccttgcggtcgcaggaggaggcatcgcgccaggcgcgccctcagacgggtacgacccgcttcatcaggtcccccaggctgtcccggtgatgctaggccgtctggcaggctgctggctgggggcggccaggggcctgagccacgggagggccccgtgcacggcggggaggcagccagaggcccagagtag

SEQ ID NO: 324082 - DNA, 1107 bp, Artificial Sequence
  derived and/or modified sequence
atggctgacgcccagaatatatccctggatagcccagggtccgtgggtgcagtagccgttccagttgttttcgctctgatatttcttctggggacggtaggtaacggtttagttctggcagtgctgctgcagcccggtcccagtgcatggcaggaacccggttccacaaccgatctttttatcctaaatctggccgtggcggacctgtgcttcattctgtgctgcgtgccgtttcaggccactatttacactcttgacgcgtggttgttcggtgctcttgtgtgtaaggcagtacacctacttatctatctgacaatgtatgctagctcttttaccctcgcagccgtgtctgtggaccgatatcttgctgtccgccacccgttgcggtcaagggctcttcgaacacccagaaatgcgagagccgcagtcgggttggtgtggttactcgccgctctgttctcagctccctacctgtcttactacggcaccgtccgctatggcgctctagaactgtgcgtgccagcctgggaggatgcgagacgccgagctctggacgttgctacatttgctgccggatatcttctgcccgtcgcagtggtgtcccttgcttacgggcgaactctccgctttctgtgggctgccgtcggacccgcaggcgctgcagctgcggaggcacggcgaagagccaccgggcgagctggtcgggctatgctcgccgtggcggcactctacgctctctgctggggacctcaccatgccctgatattgtgtttttggtacggaaggtttgcctttagcccggcaacatatgcctgccgattagcctcccactgtttggcttatgccaactcatgcctcaatcctcttgtctacgccctcgcttctcgccactttagagccagatttaggagactatggccatgtgggagaagacggaggcatagggctcgtagagctctgagaagagtgcggcctgcctcaagtggaccacccggatgtcccggtgatgccagacctagcggacgcctgctcgccggaggaggacaagggccagagccacgcgaagggcctgtccacgggggagaagcagcccgaggaccagagtag

SEQ ID NO: 324083 - DNA, 1107 bp, Artificial Sequence
  derived and/or modified sequence
atggccgacgcccagaacatcagcctggacagccccggcagcgtgggcgccgtggccgtgcccgtggtgttcgccctgatcttcctgctgggcaccgtgggcaacggcctggtgctggccgtgctgctgcagcccggccccagcgcctggcaggagcccggcagcaccaccgacctgttcatcctgaacctggccgtggccgacctgtgcttcatcctgtgctgcgtgcccttccaggccaccatctacaccctggacgcctggctgttcggcgccctggtgtgcaaggccgtgcacctgctgatctacctgaccatgtacgccagcagcttcaccctggccgccgtgagcgtggacagatacctggccgtgagacaccccctgagaagcagagccctgagaacccccagaaacgccagagccgccgtgggcctggtgtggctgctggccgccctgttcagcgccccctacctgagctactacggcaccgtgagatacggcgccctggagctgtgcgtgcccgcctgggaggacgccagaagaagagccctggacgtggccaccttcgccgccggctacctgctgcccgtggccgtggtgagcctggcctacggcagaaccctgagattcctgtgggccgccgtgggccccgccggcgccgccgccgccgaggccagaagaagagccaccggcagagccggcagagccatgctggccgtggccgccctgtacgccctgtgctggggcccccaccacgccctgatcctgtgcttctggtacggcagattcgccttcagccccgccacctacgcctgcagactggccagccactgcctggcctacgccaacagctgcctgaaccccctggtgtacgccctggccagcagacacttcagagccagattcagaagactgtggccctgcggcagaagaagaagacacagagccagaagagccctgagaagagtgagacccgccagcagcggcccccccggctgccccggcgacgccagacccagcggcagactgctggccggcggcggccagggccccgagcccagagagggccccgtgcacggcggcgaggccgccagaggccccgagtag

SEQ ID NO: 324084 - protein, 277 aa, Artificial Sequence
  derived and/or modified sequence
MIMKDKNWHDKGQQYRNWFLKEFPRLKSELEDNIRRLRALADGVQKVHKGTTIANVVSGSLSISSGILTLVGMGLAPFTEGGSLVLLEPGMELGITAALTGITSSTMDYGKKWWTQAQAHDLVIKSLDKLKEVREFLGENISNFLSLAGNTYQLTRGIGKDIRALRRARANLQSVPHASASRPRVTEPISAESGEQVERVNEPSILEMSRGVKLTDVAPVSFFLVLDVVYLVYESKHLHEGAKSETAEELKKVAQELEEKLNILNNNYKILQADQEL

SEQ ID NO: 324085 - DNA, 834 bp, Artificial Sequence
  derived and/or modified sequence
atgattatgaaggacaaaaactggcacgataagggccagcaatacaggaactggtttcttaaggaattccctagactgaagagcgagctcgaggataatataaggcggcttcgtgccttggccgacggagtacagaaagtgcacaaggggactaccattgcaaatgtagtctccggttccctgtcaatatcttccgggatacttacactcgtcggaatgggcctggctccattcaccgagggaggatcacttgtgttactcgaaccgggcatggagttgggcatcaccgctgctctgacaggcatcacctccagtaccatggattatggaaagaaatggtggactcaagcccaagcccatgatctcgtgatcaaatcccttgataaactcaaggaggtgcgggaattcctgggggagaacataagcaatttcttatcccttgcgggaaacacctaccaactgactcgtggaatcgggaaagacatcagggctttgcgtagggcacgcgctaatctccagtccgtgcctcatgcctcagcttctagaccgcgcgtcacagagcctattagcgctgaatcaggcgagcaggtggagcgtgtgaatgaaccctctatcctcgagatgtcacggggagtcaagctcacagacgtggctcccgtgtctttctttctcgtgctggatgtggtttatctggtgtacgaatcaaagcacctccacgagggcgccaagagcgaaacagccgaggaactcaagaaggttgctcaagaattggaagagaaactcaatattcttaacaataattataagatactgcaggccgaccaggagttgtag

SEQ ID NO: 324086 - DNA, 834 bp, Artificial Sequence
  derived and/or modified sequence
atgatcatgaaggacaagaactggcatgacaagggccagcagtacagaaactggttcctgaaggagttcccccggctgaagtctgagctggaggacaacatccggcggctgcgggccctggctgatggagtgcagaaggtgcacaagggcaccaccatcgccaacgtggtgtctggcagcctgagcatcagcagcggcatcctgaccctggtgggcatgggcctggcccccttcacagaaggaggcagcctggtgctgctggagcccggcatggagctgggcatcacagctgccctgaccggcatcaccagcagcaccatggactatggcaagaagtggtggacccaggcccaggcccatgacctggtgatcaagagcctggacaagctgaaggaggtgcgggagttcctgggggagaacatcagcaacttcctgagcctggccggcaacacctaccagctgacccggggcatcggcaaggacatccgggccctgcggcgggcccgggccaacctgcagagcgtgccccacgccagcgccagccggccccgggtgacagagcccatctctgctgagagcggggagcaggtggagcgggtgaatgagcccagcatcctggagatgagcagaggagtgaagctgacagatgtggcccctgtgtccttcttcctggtgctggatgtggtgtacctggtgtatgagagcaagcacctgcatgaaggagccaagtcagaaacagctgaggagctgaagaaggtggcccaggagctggaggagaagctgaacatcctgaacaacaactacaagatcctgcaggccgaccaggagctgtag

SEQ ID NO: 324087 - DNA, 834 bp, Artificial Sequence
  derived and/or modified sequence
atgatcatgaaggacaagaactggcacgacaagggccagcagtaccgcaattggtttctcaaagaattcccaagacttaaatctgaactggaggacaatatccgtcgtttgcgcgctctggctgacggggtgcagaaggtgcataaagggactactatagccaacgtggtttctggatctctctctatctcctcgggcatcttgacactcgtgggcatgggattggcaccctttactgaggggggctccttggtgcttctggagcccggaatggaactggggataacagccgctctgaccggcattaccagttccactatggactatggcaaaaagtggtggacacaagcccaggcccatgatttggttatcaaatcactggataagctgaaggaggtcagagagttcctgggcgaaaacatatcaaacttccttagtctggccggcaacacataccagctgacgcggggcataggcaaggacatcagagccctgcgccgggcccgggccaatctccagtctgtgccccatgccagtgcgtccagacctcgggtcacggaacctatctccgccgagagtggggaacaggttgaacgcgtcaatgagccaagcatcttggaaatgagcaggggtgtgaagttaacggacgtagcccctgtaagtttctttctcgtgctggacgttgtttacctagtgtatgagtcaaagcatctccatgaaggcgccaaatctgagacagctgaggagctaaagaaagttgcccaggagctcgaggagaagctcaacatcctaaataataattataaaatcctgcaagctgaccaggaactgtag

SEQ ID NO: 324088 - DNA, 834 bp, Artificial Sequence
  derived and/or modified sequence
atgatcatgaaagataaaaattggcacgacaagggacaacagtaccggaattggtttctcaaggagtttcctcgcctcaagagcgagctggaggataatattcgtcggctccgagccttggcagacggggtacagaaggtccacaaaggaactacaatcgcaaatgtcgtcagtggctctctgtctatcagttctggcatccttactcttgtcggaatgggactcgccccttttaccgaaggcggatcgctggtgttgctcgagccaggcatggagctgggaattaccgctgcactgactggtataacctcaagtacaatggattacggaaagaagtggtggacacaggcgcaggctcacgatctcgttattaaaagcctcgacaagcttaaagaggtcagggaattcctcggggagaatatttccaattttctttccctggctggcaacacatatcaactaacaagagggattggaaaagacatccgagcactgcggagagctcgagcaaatctgcagtctgtccctcacgccagcgcgtccaggcctcgggtcaccgagcctatctccgccgaatccggagagcaagtggagagagtgaacgaaccctctattctcgagatgagtagaggcgttaagctcacagacgtcgccccagtcagcttcttcctggttcttgatgttgtgtacctggtctatgagtccaaacatctgcacgaaggtgctaaatccgaaactgctgaagaactgaaaaaagtggcccaggaactggaagaaaagctcaatattctgaacaacaactacaagatcctccaagccgaccaagaactttag

SEQ ID NO: 324089 - DNA, 834 bp, Artificial Sequence
  derived and/or modified sequence
atgattatgaaggacaagaattggcacgataaaggacaacagtacaggaactggtttctgaaggagttcccccgcttaaaatccgagctggaggacaacattcgcagattaagggccttagcggatggagtgcagaaagtgcataaggggaccaccatcgctaatgtggtctcaggctcgctctctatctcatcagggatactcactctagtaggcatgggcctcgctcccttcactgaggggggttcactcgtactcctcgagcctggcatggagctggggattacagcggccctgacaggcataacttcaagcacaatggattacggcaaaaaatggtggacccaggcccaagcgcatgaccttgtgatcaaatctctagataaactgaaagaggtacgggagttccttggcgaaaatatctccaactttctatccctggcaggcaatacgtaccagctgacaagaggcatcggtaaagacatccgcgccctccggagagctcgggctaacctacagtccgtgccgcatgctagtgcgtctagaccacgtgttactgaacccatctcagcagaatccggcgaacaggttgaacgggtaaatgaaccctcaattctcgagatgagcagaggagtgaagctcacggacgtggctcctgtgtctttttttttggttctggatgtggtctacctcgtctatgagagcaaacacctgcacgagggcgccaagagcgaaacagccgaggaactgaagaaggtggcacaggagctggaagaaaagcttaatattctgaacaataattataaaattctccaggctgatcaggaattgtag

SEQ ID NO: 324090 - DNA, 834 bp, Artificial Sequence
  derived and/or modified sequence
atgattatgaaagacaaaaattggcacgacaagggccagcagtacagaaactggtttcttaaagaatttcccagactgaaaagtgagttggaagacaatataaggcgtcttagggcactggcagacggggttcagaaggtgcataaggggactaccattgccaacgtcgtgtcgggcagcctgagtatctcttcaggaattctcactctggttggaatgggccttgcaccatttacagaaggtggatccctggttctattggagccgggaatggaactgggcattactgccgctctgacaggcataacttcaagcacaatggattacggcaaaaaatggtggacccaggcccaagcgcatgaccttgtgatcaaatctctagataaactgaaagaggtacgggagttccttggcgaaaatatctccaactttctatccctggcaggcaatacgtaccagctgacaagaggcatcggtaaagacatccgcgccctccggagagctcgggctaacctacagtccgtgccgcatgctagtgcgtctagaccacgtgttactgaacccatctcagcagaatccggcgaacaggttgaacgggtaaacgagcccagcatattagagatgtccaggggggttaaactaactgacgtggcacctgtatcttttttccttgtattggatgtggtatacctggtttacgagtccaaacaccttcatgaaggcgccaagtctgaaaccgccgaagagctaaaaaaggtcgcacaggaactggaggagaaattgaacatccttaataataactacaagatcctgcaggctgatcaggaactgtag

SEQ ID NO: 324091 - DNA, 834 bp, Artificial Sequence
  derived and/or modified sequence
atgatcatgaaggacaagaactggcacgacaagggccagcagtacagaaactggttcctgaaggagttccccagactgaagagcgagctggaggacaacatcagaagactgagagccctggccgacggcgtgcagaaggtgcacaagggcaccaccatcgccaacgtggtgagcggcagcctgagcatcagcagcggcatcctgaccctggtgggcatgggcctggcccccttcaccgagggcggcagcctggtgctgctggagcccggcatggagctgggcatcaccgccgccctgaccggcatcaccagcagcaccatggactacggcaagaagtggtggacccaggcccaggcccacgacctggtgatcaagagcctggacaagctgaaggaggtgagagagttcctgggcgagaacatcagcaacttcctgagcctggccggcaacacctaccagctgaccagaggcatcggcaaggacatcagagccctgagaagagccagagccaacctgcagagcgtgccccacgccagcgccagcagacccagagtgaccgagcccatcagcgccgagagcggcgagcaggtggagagagtgaacgagcccagcatcctggagatgagcagaggcgtgaagctgaccgacgtggcccccgtgagcttcttcctggtgctggacgtggtgtacctggtgtacgagagcaagcacctgcacgagggcgccaagagcgagaccgccgaggagctgaagaaggtggcccaggagctggaggagaagctgaacatcctgaacaacaactacaagatcctgcaggccgaccaggagctgtag

SEQ ID NO: 324092 - protein, 2188 aa, Artificial Sequence
  derived and/or modified sequence
MAESASPPSSSAAAPAAEPGVTTEQPGPRSPPSSPPGLEEPLDGADPHVPHPDLAPIAFFCLRQTTSPRNWCIKMATGPWWWCLCMLVILLNCVTLGMYQPCDDMDCLSDRCKILQVFDDFIFIFFAMEMVLKMVALGIFGKKCYLGDTWNRLDFFIVMAGMVEYSLDLQNINLSAIRTVRVLRPLKAINRVPSMRILVNLLLDTLPMLGNVLLLCFFVFFIFGIIGVQLWAGLLRNRCFLEENFTIQGDVALPPYYQPEEDDEMPFICSLSGDNGIMGCHEIPPLKEQGRECCLSKDDVYDFGAGRQDLNASGLCVNWNRYYNVCRTGSANPHKGAINFDNIGYAWIVIFQVITLEGWVEIMYYVMDAHSFYNFIYFILLIIVGSFFMINLCLVVIATQFSETKQREHRLMLEQRQRYLSSSTVASYAEPGDCYEEIFQYVCHILRKAKRRALGLYQALQSRRQALGPEAPAPAKPGPHAKEPRHYQLCPQHSPLDATPHTLVQPIPATLASDPASCPCCQHEDGRRPSGLGSTDSGQEGSGSGSSAGGEDEADGDGARSSEDGASSELGKEEEEEEQADGAVWLCGDVWRETRAKLRGIVDSKYFNRGIMMAILVNTVSMGIEHHEQATELTNILEICNVVFTSMFALEMILKLAAFGLFDYLRNPYNIFDSIIVIISIWEIVGQADGGLSVLRTFRLLRVLKLVRFMPALRRQLVVLMKTMDNVATFCMLLMLFIFIFSILGMHIFGCKFSLRTDTGDTVPDRKNFDSLLWAIVTVFQILTQEDWNVVLYNGMASTSPWASLYFVALMTFGNYVLFNLLVAILVEGFQAEGDANRSYSDEDQSSSNIEEFDKLQEGLDSSGDPKLCPIPMTPNGHLDPSLPLGGHLGPAGAAGPAPRLSLQPDPMLVALGSRKSSVMSLGRMSYDQRSLSSSRSSYYGPWGRSAAWASRRSSWNSLKHKPPSAEHESLLSAERGGGARVCEVAADEGPPRAAPLHTPHAHHIHHGPHLAHRHRHHRRTLSLDNRDSVDLAELVPAVGAHPRAAWRAAGPAPGHEDCNGRMPSIAKDVFTKMGDRGDRGEDEEEIDYTLCFRVRKMIDVYKPDWCEVREDWSVYLFSPENRFRVLCQTIIAHKLFDYVVLAFIFLNCITIALERPQIEAGSTERIFLTVSNYIFTAIFVGEMTLKVVSLGLYFGEQAYLRSSWNVLDGFLVFVSIIDIVVSLASAGGAKILGVLRVLRLLRTLRPLRVISRAPGLKLVVETLISSLKPIGNIVLICCAFFIIFGILGVQLFKGKFYHCLGVDTRNITNRSDCMAANYRWVHHKYNFDNLGQALMSLFVLASKDGWVNIMYNGLDAVAVDQQPVTNHNPWMLLYFISFLLIVSFFVLNMFVGVVVENFHKCRQHQEAEEARRREEKRLRRLEKKRRKAQRLPYYATYCHTRLLIHSMCTSHYLDIFITFIICLNVVTMSLEHYNQPTSLETALKYCNYMFTTVFVLEAVLKLVAFGLRRFFKDRWNQLDLAIVLLSVMGITLEEIEINAALPINPTIIRIMRVLRIARVLKLLKMATGMRALLDTVVQALPQVGNLGLLFMLLFFIYAALGVELFGKLVCNDENPCEGMSRHATFENFGMAFLTLFQVSTGDNWNGIMKDTLRDCTHDERSCLSSLQFVSPLYFVSFVLTAQFVLINVVVAVLMKHLDDSNKEAQEDAEMDAELELEMAHGLGPGPRLPTGSPGAPGRGPGGAGGGGDTEGGLCRRCYSPAQENLWLDSVSLIIKDSLEGELTIIDNLSGSIFHHYSSPAGCKKCHHDKQEVQLAETEAFSLNSDRSSSILLGDDLSLEDPTACPPGRKDSKGELDPPEPMRVGDLGECFFPLSSTAVSPDPENFLCEMEEIPFNPVRSWLKHDSSQAPPSPFSPDASSPLLPMPAEFFHPAVSASQKGPEKGTGTGTLPKIALQGSWASLRSPRVNCTLLRQATGSDTSLDASPSSSAGSLQTTLEDSLTLSDSPRRALGPPAPAPGPRAGLSPAARRRLSLRGRGLFSLRGLRAHQRSHSSGGSTSPGCTHHDSMDPSDEEGRGGAGGGGAGSEHSETLSSLSLTSLFCPPPPPPAPGLTPARKFSSTSSLAAPGRPHAAALAHGLARSPSWAADRSKDPPGRAPLPMGLGPLAPPPQPLPGELEPGDAASKRKR

SEQ ID NO: 324093 - protein, 2188 aa, Artificial Sequence
  derived and/or modified sequence
MAESASPPSSSAAAPAAEPGVTTEQPGPRSPPSSPPGLEEPLDGADPHVPHPDLAPIAFFCLRQTTSPRNWCIKMVCNPWFECVSMLVILLNCVTLGMYQPCDDMDCLSDRCKILQVFDDFIFIFFAMEMVLKMVALGIFGKKCYLGDTWNRLDFFIVMAGMVEYSLDLQNINLSAIRTVRVLRPLKAINRVPSMRILVNLLLDTLPMLGNVLLLCFFVFFIFGIIGVQLWAGLLRNRCFLEENFTIQGDVALPPYYQPEEDDEMPFICSLSGDNGIMGCHEIPPLKEQGRECCLSKDDVYDFGAGRQDLNASGLCVNWNRYYNVCRTGSANPHKGAINFDNIGYAWIVIFQVITLEGWVEIMYYVMDAHSFYNFIYFILLIIVGSFFMINLCLVVIATQFSETKQREHRLMLEQRQRYLSSSTVASYAEPGDCYEEIFQYVCHILRKAKRRALGLYQALQSRRQALGPEAPAPAKPGPHAKEPRHYQLCPQHSPLDATPHTLVQPIPATLASDPASCPCCQHEDGRRPSGLGSTDSGQEGSGSGSSAGGEDEADGDGARSSEDGASSELGKEEEEEEQADGAVWLCGDVWRETRAKLRGIVDSKYFNRGIMMAILVNTVSMGIEHHEQPEELTNILEICNVVFTSMFALEMILKLAAFGLFDYLRNPYNIFDSIIVIISIWEIVGQADGGLSVLRTFRLLRVLKLVRFMPALRRQLVVLMKTMDNVATFCMLLMLFIFIFSILGMHIFGCKFSLRTDTGDTVPDRKNFDSLLWAIVTVFQILTQEDWNVVLYNGMASTSPWASLYFVALMTFGNYVLFNLLVAILVEGFQAEGDANRSYSDEDQSSSNIEEFDKLQEGLDSSGDPKLCPIPMTPNGHLDPSLPLGGHLGPAGAAGPAPRLSLQPDPMLVALGSRKSSVMSLGRMSYDQRSLSSSRSSYYGPWGRSAAWASRRSSWNSLKHKPPSAEHESLLSAERGGGARVCEVAADEGPPRAAPLHTPHAHHIHHGPHLAHRHRHHRRTLSLDNRDSVDLAELVPAVGAHPRAAWRAAGPAPGHEDCNGRMPSIAKDVFTKMGDRGDRGEDEEEIDYTLCFRVRKMIDVYKPDWCEVREDWSVYLFSPENRFRVLCQTIIAHKLFDYVVLAFIFLNCITIALERPQIEAGSTERIFLTVSNYIFTAIFVGEMTLKVVSLGLYFGEQAYLRSSWNVLDGFLVFVSIIDIVVSLASAGGAKILGVLRVLRLLRTLRPLRVISRAPGLKLVVETLISSLKPIGNIVLICCAFFIIFGILGVQLFKGKFYHCLGVDTRNITNRSDCMAANYRWVHHKYNFDNLGQALMSLFVLASKDGWVNIMYNGLDAVAVDQQPVTNHNPWMLLYFISFLLIVSFFVLNMFVGVVVENFHKCRQHQEAEEARRREEKRLRRLEKKRRKAQRLPYYATYCHTRLLIHSMCTSHYLDIFITFIICLNVVTMSLEHYNQPTSLETALKYCNYMFTTVFVLEAVLKLVAFGLRRFFKDRWNQLDLAIVLLSVMGITLEEIEINAALPINPTIIRIMRVLRIARVLKLLKMATGMRALLDTVVQALPQVGNLGLLFMLLFFIYAALGVELFGKLVCNDENPCEGMSRHATFENFGMAFLTLFQVSTGDNWNGIMKDTLRDCTHDERSCLSSLQFVSPLYFVSFVLTAQFVLINVVVAVLMKHLDDSNKEAQEDAEMDAELELEMAHGLGPGPRLPTGSPGAPGRGPGGAGGGGDTEGGLCRRCYSPAQENLWLDSVSLIIKDSLEGELTIIDNLSGSIFHHYSSPAGCKKCHHDKQEVQLAETEAFSLNSDRSSSILLGDDLSLEDPTACPPGRKDSKGELDPPEPMRVGDLGECFFPLSSTAVSPDPENFLCEMEEIPFNPVRSWLKHDSSQAPPSPFSPDASSPLLPMPAEFFHPAVSASQKGPEKGTGTGTLPKIALQGSWASLRSPRVNCTLLRQATGSDTSLDASPSSSAGSLQTTLEDSLTLSDSPRRALGPPAPAPGPRAGLSPAARRRLSLRGRGLFSLRGLRAHQRSHSSGGSTSPGCTHHDSMDPSDEEGRGGAGGGGAGSEHSETLSSLSLTSLFCPPPPPPAPGLTPARKFSSTSSLAAPGRPHAAALAHGLARSPSWAADRSKDPPGRAPLPMGLGPLAPPPQPLPGELEPGDAASKRKR

SEQ ID NO: 324094 - protein, 1981 aa, Artificial Sequence
  derived and/or modified sequence
MAESASPPSSSAAAPAAEPGVTTEQPGPRSPPSSPPGLEEPLDGADPHVPHPDLAPIAFFCLRQTTSPRNWCIKMVCNPWFECVSMLVILLNCVTLGMYQPCDDMDCLSDRCKILQVFDDFIFIFFAMEMVLKMVALGIFGKKCYLGDTWNRLDFFIVMAGMVEYSLDLQNINLSAIRTVRVLRPLKAINRVPSMRILVNLLLDTLPMLGNVLLLCFFVFFIFGIIGVQLWAGLLRNRCFLEENFTIQGDVALPPYYQPEEDDEMPFICSLSGDNGIMGCHEIPPLKEQGRECCLSKDDVYDFGAGRQDLNASGLCVNWNRYYNVCRTGSANPHKGAINFDNIGYAWIVIFQVITLEGWVEIMYYVMDAHSFYNFIYFILLIIVGSFFMINLCLVVIATQFSETKQREHRLMLEQRQRYLSSSTVASYAEPGDCYEEIFQYVCHILRKAKRRALGLYQALQSRRQALGPEAPAPAKPGPHAKEPRHYQLCPQHSPLDATPHTLVQPIPATLASDPASCPCCQHEDGRRPSGLGSTDSGQEGSGSGSSAGGEDEADGDGARSSEDGASSELGKEEEEEEQADGAVWLCGDVWRETRAKLRGIVDSKYFNRGIMMAILVNTVSMGIEHHEQPEELTNILEICNVVFTSMFALEMILKLAAFGLFDYLRNPYNIFDSIIVIISIWEIVGQADGGLSVLRTFRLLRVLKLVRFMPALRRQLVVLMKTMDNVATFCMLLMLFIFIFSILGMHIFGCKFSLRTDTGDTVPDRKNFDSLLWAIVTVFQILTQEDWNVVLYNGMASTSPWASLYFVALMTFGNYVLFNLLVAILVEGFQAEGDANRSYSDEDQSSSNIEEFDKLQEGLDSSGDPKLCPIPMTPNGHLDPSLPLGGHLGPAGAAGPAPRLSLQPDPMLVALGSRKSSVMSLGRMSYDQRSLSSSRSSYYGPWGRSAAWASRRSSWNSLKHKPPSAEHESLLSAERGGGARVCEVAADEGPPRAAPLHTPHAHHIHHGPHLAHRHRHHRRTLSLDNRDSVDLAELVPAVGAHPRAAWRAAGPAPGHEDCNGRMPSIAKDVFTKMGDRGDRGEDEEEIDYTLCFRVRKMIDVYKPDWCEVREDWSVYLFSPENRFRVLCQTIIAHKLFDYVVLAFIFLNCITIALERPQIEAGSTERIFLTVSNYIFTAIFVGEMTLKVVSLGLYFGEQAYLRSSWNVLDGFLVFVSIIDIVVSLASAGGAKILGVLRVLRLLRTLRPLRVISRAPGLKLVVETLISSLKPIGNIVLICCAFFIIFGILGVQLFKGKFYHCLGVDTRNITNRSDCMAANYRWVHHKYNFDNLGQALMSLFVLASKDGWVNIMYNGLDAVAVDQQPVTNHNPWMLLYFISFLLIVSFFVLNMFVGVVVENFHKCRQHQEAEEARRREEKRLRRLEKKRRKAQRLPYYATYCHTRLLIHSMCTSHYLDIFITFIICLNVVTMSLEHYNQPTSLETALKYCNYMFTTVFVLEAVLKLVAFGLRRFFKDRWNQLDLAIVLLSVMGITLEEIEINAALPINPTIIRIMRVLRIARVLKLLKMATGMRALLDTVVQALPQVGNLGLLFMLLFFIYAALGVELFGKLVCNDENPCEGMSRHATFENFGMAFLTLFQVSTGDNWNGIMKDTLRDCTHDERSCLSSLQFVSPLYFVSFVLTAQFVLINVVVAVLMKHLDDSNKEAQEDAEMDAELELEMAHGLGPGPRLPTGSPGAPGRGPGGAGGGGDTEGGLCRRCYSPAQENLWLDSVSLIIKDSLEGELTIIDNLSGSIFHHYSSPAGCKKCHHDKQEVQLAETEAFSLNSDRSSSILLGDDLSLEDPTACPPGRKDSKGELDPPEPMRVGDLGECFFPLSSTAVSPDPENFLCEMEEIPFNPVRSWLKHDSSQAPPSPFSPDASSPLLPMPAEFFHPAVSASQKGPEKGTGTGTLPKIALQGSWASLRSPRVNCTLLRQVPTPPRP

SEQ ID NO: 324095 - DNA, 6567 bp, Artificial Sequence
  derived and/or modified sequence
atggctgagtccgctagtcccccttcgtcttctgccgcagccccagccgctgaacctggggttaccacagaacagcctggcccacggtccccacctagttcccctccgggacttgaggaaccactggatggtgccgaccctcacgtgcctcatcccgatcttgcacccattgcattcttctgcctgcgacagacaacatctccccgcaactggtgtataaagatggcaacgggaccatggtggtggtgcttatgcatgttggtgattttgctgaattgcgtgaccttagggatgtaccagccatgcgatgatatggattgcctcagcgatagatgtaaaattctgcaagttttcgacgactttatttttatcttctttgctatggagatggtccttaagatggtcgctttagggatcttcggaaaaaaatgctatctgggagacacatggaatcgtctcgacttctttatcgtgatggctggaatggtggaatattcacttgatctccagaacattaatctgagcgcaatacggactgtgcgcgttctgagacccttaaaagcaataaatagggtgccctccatgaggatattggtgaatctattgctcgacacactccccatgctgggaaatgtcctattgctgtgcttctttgtgttcttcatttttggaatcattggagtgcaattatgggccggtctgctgagaaataggtgctttctcgaggaaaatttcactattcaaggcgacgtcgccttacctccttactaccaacccgaggaagatgacgaaatgccattcatctgtagtctaagcggggacaatgggattatgggatgtcatgagataccccctctcaaggaacagggcagggagtgctgtctgtctaaggacgatgtgtacgacttcggagccggacgccaagatctgaacgcttccggactctgcgtgaattggaacaggtattacaacgtttgtcggacggggtccgccaacccccacaaaggggcaatcaatttcgataatattgggtatgcctggatcgtgatcttccaggtaatcacccttgaggggtgggttgaaattatgtactacgttatggacgcccacagtttctataacttcatctatttcatcctgctgatcatcgtggggtcgttctttatgattaacctctgtttggtagtgattgcgacacaatttagcgagaccaaacagcgggaacaccgcttaatgctggaacagaggcagagatacctctctagttcaacagtggcatcttatgccgagcccggcgactgttacgaagagatcttccaatatgtgtgccatatcctgcggaaagcgaagcggcgtgcactcggtctgtaccaggcactgcagagccgcaggcaagccctgggacccgaagcccctgcccccgcaaagcctggaccccatgccaaggagccacggcactaccagctctgtccacagcactcgcctctcgatgcgaccccacacacactggtgcagccgattcccgccacgctggcttctgacccggcatcttgtccatgctgccagcacgaggatggtcggagaccatctgggctgggaagtaccgacagtgggcaggaaggttccggctcgggcagcagcgctgggggtgaagatgaggcagacggagacggagcacggtcctcagaggatggcgcctcttctgaacttggtaaggaggaagaggaagaggagcaggccgacggagccgtgtggctgtgtggcgacgtttggagggagactagggctaagttgagaggcattgtagactcaaagtacttcaaccgcggcataatgatggccattctggtgaacacagttagtatgggtatagagcaccacgagcaggctacagagctaaccaacatcctagaaatctgtaatgtggttttcacgtcaatgttcgccctggagatgattttaaagctggccgccttcggtctcttcgactatctgagaaatccatacaacatcttcgactctattattgttatcatttctatttgggaaatcgtgggacaagcagatggcggtctgtctgtgctccggacattcagattgctgagggtcctgaaactagtgcggtttatgcccgccctgcgacgccagcttgtggtgctgatgaaaaccatggacaatgtcgctaccttttgcatgctgctgatgctattcatcttcattttcagtatattggggatgcacatttttggctgtaaattctcattaaggactgacacgggagatacggtccctgaccggaagaactttgatagtttactttgggcaatcgtaactgtgtttcaaatcctgacccaagaagattggaatgtagtgctttataatggcatggctagtactagcccctgggccagtctctatttcgtggcccttatgacatttggcaactacgttctcttcaatctcctagtggcaatcctggtggaagggttccaggccgagggagacgctaacaggtcttacagcgacgaagaccagagctctagcaatatagaagaatttgacaagctgcaagaaggactcgacagctcaggggaccctaagctgtgcccaattcccatgacacctaacgggcacctggacccaagtctccctctgggaggacatctgggacctgcgggtgccgcgggcccagctcctcgactatcgttgcagccagatcctatgctggtggctttaggtagccggaagtcatcggtcatgtctctgggccgaatgtcctacgaccagcgtagcctaagctcttcccggtcctcttactacggtccctggggtagatccgcagcatgggccagcagacggtcctcttggaactccctcaaacacaagcctccttctgccgagcatgaatcactgctgtccgctgaaaggggcggtggcgcaagagtatgtgaggtagcagctgatgagggcccaccccgggctgctcctctgcacaccccacacgcgcaccatattcatcatggaccgcacttagctcatcggcaccgacatcaccgccgcaccctgagccttgacaacagggatagcgtcgacctggcagaattggttccggccgtaggagcccacccacgggcagcatggagagccgccggtcctgctccgggacacgaggattgtaatggacggatgccctccatcgccaaagatgtgttcactaagatgggggatcggggagaccgaggcgaggatgaagaagagatcgattatactttatgcttccgggtgagaaaaatgatcgatgtgtacaaacccgactggtgtgaggtccgagaagattggtccgtgtatctgttcagccctgagaacaggtttagagtcctctgccaaacgatcatagcacataagttatttgattatgttgtcctggccttcatttttttaaactgtattacgattgcactggaacggccccagatcgaagctgggtccacggaaagaatctttctgactgtgagtaattatattttcacagccattttcgtaggggagatgaccctgaaggtcgtgtctctcgggctatacttcggagagcaggcctacctccgatcttcatggaacgtcttggatggcttcctggtattcgttagcatcattgatatcgttgtgtcactggctagcgccggaggagccaaaatactgggagtgctgagagtgcttagactgctaagaactttgaggccgttaagggtgatctcccgggccccaggtctcaaactagtggtggagacactaatttccagtctcaaacccatcggaaatatcgtccttatctgttgcgcatttttcatcatttttggaatcctgggagttcaactattcaaagggaaattttaccactgccttggtgtggatacccgcaacattacaaaccggtctgactgcatggctgccaattatcgctgggtgcatcacaaatataattttgataatcttggccaggccctgatgtcacttttcgtgttggcatccaaggacggatgggttaacatcatgtacaatggcctcgacgccgtcgctgtcgaccaacagcctgtaacaaaccataatccgtggatgctcttatattttatcagcttccttctgattgtctctttcttcgtattaaatatgttcgtgggagtcgtggttgaaaatttccacaaatgcaggcagcaccaggaagccgaagaggcaagacgcagagaggaaaagcgcttgcggcgcctggagaagaagagaaggaaggcccagcgactgccatactatgccacatattgtcatacccgactgctgatacacagtatgtgcacgagccactacctggacatcttcatcacgttcataatttgtttaaatgtggtaactatgagcctggagcactataaccaacctactagtctagagacagccttgaaatactgtaactacatgttcaccaccgtgttcgtactggaggctgtactcaagctggtggccttcggcctgaggcgtttctttaaggaccgctggaatcaactagacctggctatcgtccttcttagcgtcatgggcatcacactggaggaaattgagattaacgcagccttaccaattaaccctacaatcatacgtatcatgagggtactcaggattgctagagtcttgaagctgttgaagatggcaacagggatgcgggcactgctagacaccgtcgttcaggccctcccgcaggtgggtaaccttggactactctttatgctgttgttcttcatttacgctgcattaggcgtggaactctttggcaagctggtttgtaacgacgaaaacccctgcgaaggcatgagccggcacgccacattcgagaactttggcatggccttcctgactctgtttcaggtgagcaccggagacaattggaatggcataatgaaggacaccctgcgcgattgcacacacgatgaaaggagttgcttgtccagcttgcagttcgtgagtccgctgtactttgtgtcctttgtcctcactgcccagtttgtactgattaacgttgtggttgccgtcctgatgaagcatttggacgacagcaataaagaggcccaagaggatgccgagatggatgcagaactcgagttagagatggctcatgggctcgggcctgggccacggctgcccacaggaagtcctggcgctccgggacgcggaccagggggcgcaggcggcggaggcgatacagaggggggtctgtgtaggcgatgctacagcccagcacaggagaatctgtggctcgattctgtgtcacttatcattaaggattctcttgaaggcgaattgacgattatcgataaccttagtggatccattttccatcattactctagcccagccggctgcaagaaatgtcaccatgataagcaggaagtgcagctggctgagacagaggccttctcactgaactctgaccggtcttcctcaattctgttgggggacgatctcagcctggaggatcccacagcttgtcccccgggtcggaaagattccaaaggcgaactagatcccccagaaccgatgcgtgtgggggacctcggcgaatgtttttttcccctaagtagcaccgccgtcagccctgatcctgaaaactttctgtgtgagatggaagagattccgttcaacccggtcagaagctggctgaagcatgactcctcccaggccccaccaagtccctttagccccgatgcaagctctccactgctgccaatgcctgctgagttctttcacccagctgtatctgcaagccagaagggaccagagaaaggcactgggaccggaacccttccaaagattgccttacagggcagttgggccagtctccgctcgccacgcgtgaactgtactctactgcggcaggctacggggtccgacacttccctggacgcttctccaagttccagtgctggctcactccagactaccctggaagacagcctgacccttagcgattcaccacggcgtgcgttgggcccaccggcacctgcccccggccctagagctggcctgtctccagcagcacggcgtcggttatccttgagggggcgcggcctgttctccctgagaggtctgcgcgcccatcagagatcccactcatccggcgggtcaacctctcccggttgtacccatcatgactctatggatccttccgatgaagagggaagagggggcgctggtggcggtggggctgggtctgaacatagcgagactttgtcaagtctctctctgacctctctcttctgcccaccaccaccccctcccgccccgggcttaacccctgcacgcaaatttagcagtacgtctagcttagcagcgcctgggcggccgcacgccgcagctctcgctcatggtctcgctagatctccaagctgggcagccgatcggagcaaggacccccctggacgggccccgctccccatgggcctagggcctctcgccccaccacctcagcctctccctggagagctcgagcccggcgatgcagcatcaaaacgcaaacggtag

SEQ ID NO: 324096 - DNA, 6567 bp, Artificial Sequence
  derived and/or modified sequence
atggctgaatcagctagccctccctcttcttcagccgctgccccggccgcagagcccggcgttaccacggaacaacccggtccacggtcacctcctagcagcccgccaggtctggaagaacccttggatggggccgatccgcatgttccacatccagatctcgctcccattgcctttttctgtctccgacagacaaccagccctcgaaactggtgtattaaaatggtttgcaatccttggttcgaatgtgtaagcatgctcgtgattctgctgaactgtgtgacgctgggaatgtaccagccgtgcgatgatatggattgtcttagcgatagatgtaagatccttcaagtttttgatgattttatttttatattctttgccatggagatggtactcaaaatggtagcattaggcattttcggcaaaaaatgctatctcggtgatacatggaacaggctggatttctttatcgtcatggccggaatggtggagtatagtctggacctacagaatataaacctctccgccatcagaaccgtcagggtgctgagacccctgaaggccataaaccgagttccttcgatgagaatactggtaaacctgctgcttgacaccttgcccatgcttggtaacgtgctgctactttgtttcttcgtgttcttcatctttggcattatcggggtgcaactttgggcgggcctcctccgcaatagatgcttcttggaggagaatttcactatacagggagatgtggctctccctccctactatcagcccgaagaggacgatgaaatgccatttatatgtagtctttcaggggataacgggattatggggtgtcatgagataccacctctgaaagaacaagggcgcgagtgctgtctgtcaaaagatgatgtctatgatttcggagccggtaggcaggacctgaatgcatcagggctctgcgtaaactggaaccggtactataatgtgtgtcgtactggttccgccaatccgcacaagggagccattaatttcgataatattgggtacgcctggatcgtcatattccaggtgataaccttagagggctgggtggaaattatgtattacgtcatggatgctcactcattttacaactttatctactttattctgttgattattgtcgggtccttcttcatgattaatctgtgccttgtggtcatcgcaacacagttctcagagacgaaacagagagaacaccggttgatgcttgagcagaggcagagatatttatcatcatccactgtggccagctacgccgagcccggggactgctatgaggagattttccagtacgtgtgccacatcttgcggaaagcgaaaaggagagccttgggtctttatcaggcattacagagcaggcggcaagccttaggtcctgaggctccggccccagccaaacccggccctcatgccaaagaacccagacactatcagctctgccctcaacactctccacttgacgcaacgccccacacgctggtgcagccaatccctgccaccctggcaagtgatccggcgagttgcccatgctgtcagcatgaagacggtaggaggcccagtggcctcgggtcaacagactctggacaggaggggtctggaagcggatcctccgctgggggcgaggatgaggcagacggggatggtgcacgatcctccgaagatggggccagttcggagcttggcaaggaggaggaggaggaagagcaggccgacggggccgtgtggctatgtggagatgtatggagagaaacacgagctaagctgaggggaattgtcgactcaaaatatttcaaccggggcatcatgatggccatcctggtgaacaccgtgtcgatgggaatcgaacatcacgaacagcctgaagagttgaccaacatactcgaaatctgcaatgtggtcttcacatccatgttcgccctggaaatgatcctaaaactggctgcgttcggactttttgattatctgcgaaacccttataacattttcgattcaattatcgtgataatctcgatttgggaaatagtggggcaagctgacggtggtctgtccgtgctgcgtacttttcgcttacttagggtgctgaaactcgtgagatttatgcccgctctgagaagacaactggttgtgctgatgaagacaatggacaatgttgccacattctgcatgctacttatgctgttcattttcatcttcagcattctcgggatgcatattttcgggtgtaagttttcactgcgaacggataccggcgacactgtgcctgaccgaaagaattttgactctcttctgtgggcaattgtcacagtgttccaaatccttacccaggaggattggaatgtggtgctgtacaatggcatggctagcacctcaccttgggcgagcctatacttcgtggccttaatgacttttggtaattatgtcctgtttaatctactggtagcaattctggtggagggattccaggcagagggagacgccaaccgcagttacagcgatgaggatcagtcgtccagtaatatagaagagtttgacaagctgcaggaaggcctggactccagcggagatccaaagctgtgtccaatacccatgactcctaatggccacctggacccttctttacccctgggtggccacttggggcccgcgggcgccgcaggacccgcacccaggctgtccctgcagcccgatcccatgctggtcgcgctcggttccagaaagtcatccgtgatgtccctgggtcgcatgagttacgatcaacggagcctgtcttcgagccggagctcgtattacggaccctggggaagaagcgctgcctgggctagcaggaggtccagttggaatagcctgaagcacaagccaccctccgccgagcacgagagcctactgtctgctgagaggggagggggcgcccgcgtgtgtgaggtagccgctgatgaggggcctccaagagccgcccccctacatactccacacgcgcatcacatccatcacgggccacatctggcacaccgacataggcatcacaggcgcactctgagcctggataatcgcgactccgtagatttggcagagttagtgccggccgtgggcgcccacccacgggctgcttggagagctgcgggccccgccccaggtcacgaggattgcaatggccgaatgccttccattgctaaagatgtgttcactaagatgggggacagaggcgatagaggggaggacgaggaggaaatagactacactttatgctttagagtgcgcaagatgatcgacgtttacaaaccagattggtgcgaagttagggaagattggtccgtttacctgttttcaccagagaatcgatttcgagttctgtgccagactatcattgctcataaactattcgactacgtagtattggcgttcatctttcttaactgtatcactatcgccctggagcgaccccagatcgaagctggtagcacagagcggatattcctgacagtgtcaaattatatcttcacagccatctttgtcggagagatgacactgaaagtggttagcctaggtctttactttggcgaacaagcttacttacggtcaagctggaacgtactggacgggtttctcgtttttgtcagcatcatagacattgttgtgagcctcgcctccgccggtggcgccaagattcttggagttctgagggtgctgcggctgctcaggaccttaaggccactgcgtgttatctccagggccccaggactcaaactagtggttgagactctgatctcttccctaaaacctattggaaacattgttctgatctgttgtgcctttttcattatcttcggaatcttgggcgtccagctatttaaaggtaagttctatcattgtctcggtgtggatacacgtaatatcacgaatagatctgactgcatggcagccaattaccggtgggtgcatcataagtacaacttcgacaaccttggacaggctctgatgtcgcttttcgttctagcatccaaagatggttgggtgaacatcatgtacaacggcttagacgcggtggccgtggatcaacagcctgtaaccaatcacaacccctggatgctactgtacttcattagctttctgctgattgtcagcttcttcgtgttgaatatgttcgtgggggtggttgttgagaacttccacaagtgtcgccaacatcaggaagctgaggaagctcgaaggcgggaggagaaacggctccggagattggagaaaaagcgccgcaaggcacagcgtctgccttattatgcaacctactgccacaccagacttctaatccatagtatgtgcacgtctcattacctcgacatattcattacgttcattatctgtcttaacgtagtaacaatgtccctggaacactacaaccaacctacgagcctagagaccgcgctgaaatattgtaattacatgttcactaccgtattcgtgctcgaagcagtgctgaagctagtggccttcgggctgaggcggtttttcaaagacagatggaatcagctcgacctggctatcgtgctcctgtccgtgatgggaattactttagaggagattgaaatcaacgcagccctccctatcaatcctactattatccgaattatgagggttctacggatagcccgggtcttaaaactgctcaagatggcgacaggcatgagagctttgttagatacggtggttcaggccctgcctcaggtgggcaatctggggctgctgttcatgttattgtttttcatctacgcagcattaggcgtagaactgtttggcaagctggtgtgtaatgatgaaaacccttgtgaaggcatgagcagacatgccacatttgaaaatttcggaatggcatttctgactctctttcaggtttctaccggcgataactggaatgggattatgaaagacacactgcgagactgcacccatgacgagcgcagttgtctgtcatcactgcagtttgtgtcccccctgtatttcgtttcattcgtcctcacagcccagttcgtcttgatcaatgttgtggttgcagttctgatgaagcacttggacgattcaaacaaggaggctcaggaagatgcagagatggatgcagagctcgaactggaaatggctcacggactcggtcctggcccacgcctgccgactgggtccccaggagctcctggacgcggccctgggggggcaggcggcggcggagacaccgagggcggattgtgtcgtcgatgttactctcctgcccaggagaacctctggctggattctgtatccctgatcattaaagattcactggagggcgagcttaccatcatcgacaacctgtccggctctatttttcatcactatagctctccagcaggttgcaagaagtgtcatcacgataaacaagaggtgcaacttgccgaaactgaggccttttccttgaattctgacaggagtagttctatcctcctgggcgacgacctttctctcgaagaccctaccgcctgcccccctggtcgaaaggactctaagggagagctggaccctcccgagcccatgagagtaggagaccttggcgagtgtttttttcctctcagctcaacagccgtgtctcctgatcctgaaaactttctatgcgagatggaggaaattccttttaacccagttaggtcatggctgaaacatgacagctctcaggctccccccagcccattctccccagacgcaagtagtccgttgctgcccatgccggctgagttcttccaccctgcagtttctgcctcacagaaaggacccgaaaaagggaccggcacaggcacactgcccaaaattgctctgcagggctcttgggctagcttgagatcaccaagggtgaattgtacattgttaagacaagcaacaggatccgacacttctctggatgccagtccatcctcatctgctggctctttgcagaccactctggaggactccctgacactcagcgatagcccgcgccgagccttaggaccgcccgctccagccccaggaccacgagccggcctgagccccgcagccagaaggaggctcagcctgaggggaaggggtctgttttcactacgcgggctcagggcccatcagagatcacattcatctggcggatccactagtccaggttgtacacatcatgacagcatggacccaagcgatgaggaaggtaggggtggcgccggcgggggtggagcagggtccgagcacagcgaaaccctgtcttccctatccttgacttcacttttctgtccccctcctcctccccccgcccctggcttaactcccgccagaaaatttagcagcacttcaagcctggctgctccaggccgtccacacgcagcagcactggcccatgggctcgcacgctctccgtcctgggctgccgataggtcaaaagacccacctggacgcgccccactgcctatggggctgggtcctctggcacccccccctcagcctctccctggcgagcttgagcctggtgacgccgccagcaaacggaagaggtag

SEQ ID NO: 324097 - DNA, 5946 bp, Artificial Sequence
  derived and/or modified sequence
atggctgagtctgcttcaccccctagttcttctgccgctgccccagctgccgagcctggtgtgaccacagaacagcctgggccaaggtcgccaccttcctcaccaccaggactcgaggagccactggacggcgcagaccctcatgtgccacaccctgacctggcacccattgctttcttctgcttgagacaaacaacatctcccaggaattggtgcatcaaaatggtgtgcaacccttggtttgagtgcgtatcaatgctggttatcctgttgaattgcgttacacttggcatgtatcaaccctgtgatgatatggattgtttaagcgatcgctgtaaaatccttcaggtgttcgacgatttcatctttatcttcttcgcgatggagatggtgctgaaaatggtcgccttaggaatctttggaaaaaagtgttacctgggggacacttggaaccggttagatttctttattgtaatggccggaatggtggagtactctttagatctccagaacatcaatctcagtgcgatccgaaccgtacgggttctgagacctctgaaggctatcaatcgcgtccctagtatgcgaattctagttaacttattgctggacactctacctatgttaggtaatgtgctactcctgtgcttcttcgttttcttcatattcggtattattggagtgcagctgtgggctggtctcctccggaatcgctgctttttagaagaaaactttaccatccagggggatgtggctctccctccttactaccagccagaggaagatgacgagatgccctttatctgctctctctctggcgacaatggcatcatgggttgccacgaaattcctccacttaaggagcaaggtcgggagtgctgtctgtcgaaggatgacgtgtatgattttggcgccgggagacaagatctcaacgcgtcgggtctgtgtgtcaactggaaccgctactacaatgtgtgccgcaccggatcagccaacccccacaaaggcgccattaatttcgataacatcggttatgcctggatagtgatcttccaggtgatcactttagagggatgggtagaaattatgtattacgtcatggacgcccattctttttataattttatttactttattcttctaattatcgtcggctccttctttatgattaatctgtgtctggtagtgattgcgacccaattctccgagactaagcaaagggaacaccggcttatgctggaacagagacaaagatacttgagctccagcactgttgcgagttatgccgagccaggagattgttacgaggagattttccaatatgtgtgtcatatcctccgcaaggccaagcgccgggcgctcgggctgtaccaggctcttcaatcccgtcgacaagccctcgggccggaagcacccgctcccgctaagccgggcccccacgctaaggagccacgccattatcagctctgtcctcagcattccccactagacgccaccccacatacactggtccagccaatccccgcaaccctagccagtgaccctgcgtcctgtccctgttgccagcatgaggacggtcggaggccttctgggttgggttctactgattctggacaggagggatccggctcgggcagtagtgcagggggcgaagacgaggcagacggcgacggtgcccgatcctccgaagatggagccagctctgagctgggcaaggaagaggaagaggaagaacaggccgatggcgctgtgtggctgtgcggggacgtgtggagagaaacccgcgccaagctccgaggcatcgtagacagcaaatatttcaatagaggaataatgatggccattctggtgaacacagtatccatgggtatcgaacatcacgaacagcccgaggagctgaccaatattttggagatatgcaacgtcgtttttacctccatgtttgctctcgagatgattctgaagctcgccgctttcggtctttttgattacctacggaacccctataacatttttgattccataatcgtcatcatttcaatctgggaaatcgtgggccaggctgatggtgggctcagcgtattgagaacatttaggctgctacgggtcctcaaactggtgcggttcatgccggccttacgcaggcagctagttgtgctgatgaaaacaatggataatgtcgcaaccttctgtatgctgctaatgttgtttattttcatcttctcaatcctagggatgcacatattcggctgtaagttcagtctgcggaccgacaccggggacactgtccctgataggaagaattttgactcccttttgtgggctatcgtgacagtctttcagattctgacccaggaggactggaacgtggtcctgtataatggaatggccagtacctccccctgggcctcactgtacttcgtagcgctgatgaccttcggcaactatgtgctctttaacctgctggtcgccatcctggtagaggggtttcaggcagaaggggacgcaaatagaagctatagcgatgaagaccagtcatcctctaatatcgaggagttcgacaagctgcaggaagggctggattcaagtggcgaccctaagctctgccctattccgatgacgcccaatgggcacctggaccctagtttgcctctgggaggccatcttggtccggcaggagctgccggacccgcccccaggcttagtcttcaacctgatcccatgctggttgcactcggcagccggaagtcatcagtaatgagcctgggtcgcatgtcctacgatcagagaagtttaagctccagccgcagcagttattatggcccatggggccgctcagccgcctgggcaagtcgacggagctcctggaacagcctgaagcacaagccaccttcagccgagcacgaatccctcttgtccgccgagagaggtggaggtgccagggtttgcgaagtagccgccgacgaaggaccaccacgagccgccccgttacatacaccccacgcacaccatatccatcatgggcctcacttggcacacagacaccgtcatcaccgcagaaccctgagcctagacaaccgggacagcgtggatctggccgagctagtgcccgctgtcggggctcatccccgcgcagcatggcgggctgccggccccgcccccgggcacgaggactgcaatggtcgcatgccttctatagccaaggacgtcttcaccaaaatgggcgatcgcggcgaccgaggtgaggacgaggaagagatagattacaccttgtgtttccgggtgagaaagatgatcgacgtgtataagccagactggtgtgaagttcgggaggactggagcgtgtacctctttagtcctgagaatagatttagagtgctctgtcagactatcatcgcccacaaactgttcgattatgtggtgcttgcttttattttcctcaattgcattacaatcgcactggagcggccgcaaattgaagcgggcagcactgaaaggatcttcctgactgtgtcaaattacatattcactgcaattttcgtgggagagatgactctcaaggtggtgagcctgggcctgtacttcggtgaacaggcataccttagaagctcttggaatgtgcttgacggttttttggtgttcgtgagtataattgacatcgtcgtttcgctcgccagtgctgggggggccaagatcttaggggttctccgtgtgttacgcctcttaagaaccctgcgtcctctcagggtgattagcagggcgccaggcttgaagcttgtggtggagactctcattagtagtttaaaacccatcgggaatatcgtgctgatatgctgtgcctttttcattatctttggcatcttgggcgtccaactctttaaaggcaagttctaccactgtcttggggtggacactcggaacattaccaatagatctgactgcatggctgcaaattatcgctgggtccaccacaaatataactttgacaatcttggtcaggccttaatgtctctgttcgtgctagcaagtaaggacggatgggtgaatattatgtacaatgggctggacgcagtggccgtggaccagcaaccagtcaccaatcataacccctggatgctgctctacttcatttctttcctgctgatagtaagctttttcgtgctgaacatgttcgtaggggttgtggtggagaactttcacaaatgccgtcaacaccaggaggctgaagaggcccgaagacgcgaggagaaaagactccgacgcctagagaaaaagaggcggaaggctcagcgacttccttactatgctacctactgccacacccgtctcctgatccatagtatgtgcacaagccactatctcgacatttttattaccttcatcatctgccttaacgtggtgacaatgagtctggaacactacaaccaaccgacctcccttgaaacagccctgaaatactgcaattatatgtttaccaccgtctttgttctcgaggcagtcctgaagctggtggctttcggactgcggagatttttcaaagaccgctggaaccaactcgatctggcaatcgtgttattgagcgtgatggggatcacgctggaagaaatcgagatcaacgccgcccttcctatcaaccccaccatcatccgcataatgagagtcctcagaattgctcgcgtcctgaagctccttaaaatggctactgggatgagagccctcttggataccgtggttcaggccttaccccaggttggcaacctgggcttgttatttatgctgttgttttttatttatgctgctctgggcgttgaacttttcggaaaactggtgtgcaatgacgaaaatccatgtgaaggtatgtccagacatgccacattcgaaaattttgggatggccttcctaacactgttccaggtgtctacaggcgacaactggaatggcatcatgaaggacactctgcgggactgtacacacgacgaaagaagttgcttgtcttccctacaatttgtatcaccactgtattttgtgtccttcgtgctcacagcccagttcgttctcatcaatgtggttgtggccgtattgatgaagcacctggatgacagtaacaaggaggcacaggaggatgccgagatggatgcggagttggaattagaaatggcccacgggctcggccccggtcccagactgcctaccggctcgcccggcgcaccaggtcgtggccctggcggggcaggaggaggcggtgataccgagggtggcctctgcaggcggtgttatagcccagcacaggagaatctgtggctcgacagcgtctctcttatcattaaagattcactggaaggcgaactgaccataattgataacctctccggcagcatattccatcattattccagtccagcaggctgcaaaaaatgtcaccatgataaacaggaagtccagctggcagagactgaagccttctcccttaatagcgatcgatcttccagcatcctcctgggagatgatctgagccttgaagatcctacagcctgtccgccgggtcgaaaagattcaaaaggggagctggaccccccagaaccgatgcgagtaggagatcttggagagtgttttttccccctcagtagtaccgccgtgtcaccagaccccgagaacttcctatgcgaaatggaggaaatccccttcaatcccgtccgaagctggcttaagcacgactcatcccaggctccgccctcccccttctctcccgacgcatcttccccgctcttacccatgccagcggagttctttcaccctgcagtatctgcctcccaaaaggggcccgagaaaggaacagggaccggtaccctgccaaagatcgcccttcaagggagttgggccagcctccggagccctcgggtgaactgcaccctgctcagacaagtacctaccccccctcgtccttag

SEQ ID NO: 324098 - DNA, 6567 bp, Artificial Sequence
  derived and/or modified sequence
atggccgagagcgccagcccccccagcagcagcgctgctgccccagctgctgagcccggggtgaccacagagcagcccggccccaggagcccccccagcagccccccaggcctggaggagcccctggatggagctgacccccacgtgccccacccagacctggcccccatcgccttcttctgcctgcggcagaccaccagccccaggaactggtgcatcaagatggccaccggcccctggtggtggtgcctgtgcatgctggtgatcctgctgaactgtgtgaccctgggcatgtaccagccctgtgatgacatggactgcctgagtgaccgctgcaagatcctgcaggtgtttgatgacttcatcttcatcttctttgccatggagatggtgctgaagatggtggccctgggcatctttgggaagaagtgctacctgggggacacctggaaccggctggacttcttcatcgtgatggccggcatggtggagtacagcctggacctgcagaacatcaacctgagcgccatcagaacagtgcgggtgctgcggcccctgaaggccatcaacagagtgcccagcatgaggatcctggtgaacctgctgctggacaccctgcccatgctgggcaatgtgctgctgctgtgcttctttgtgttcttcatcttcggcatcatcggcgtgcagctgtgggccggcctgctgaggaaccgctgcttcctggaggagaacttcaccatccagggagatgtggccctgcccccctactaccagccagaagaagatgatgagatgcccttcatctgcagcctgagcggggacaatggcatcatgggctgccacgagatcccccccctgaaggagcagggccgggagtgctgcctgagcaaggatgatgtgtatgactttggagctggccggcaggacctgaatgccagcggcctgtgtgtgaactggaaccgctactacaacgtgtgcaggacaggcagcgccaacccccacaagggggccatcaactttgacaacatcggctacgcctggatcgtcatcttccaggtgatcaccctggagggctgggtggagatcatgtactacgtgatggatgcccacagcttctacaacttcatctacttcatcctgctgatcatcgtgggcagcttcttcatgatcaacctgtgcctggtggtgattgccacccagttcagcgagaccaagcagcgggagcaccggctgatgctggagcagaggcagcgctacctgagcagcagcacagtggccagctatgcagagcccggggactgctatgaggagatcttccagtatgtgtgccacatcctgaggaaggccaagagaagagccctgggcctgtaccaggccctgcagagccggcggcaggccctgggccctgaggccccagccccagccaagccaggcccccacgccaaggagcccaggcactaccagctgtgcccccagcacagccccctggatgccaccccccacaccctggtgcagcccatcccagccaccctggccagtgaccctgccagctgcccctgctgccagcatgaagatggaagaagacccagcggcctgggcagcacagattctggccaggagggcagcggcagcggcagcagcgctggaggagaagatgaagcagatggagatggagcccggagcagtgaagatggagccagcagcgagctgggcaaggaggaggaggaggaggagcaggctgatggagctgtgtggctgtgtggagatgtgtggagggagacccgggccaagctgcggggcatcgtggacagcaagtacttcaacagaggcatcatgatggccatcctggtgaacacagtgtccatgggcatcgagcaccacgagcaggccacagagctgaccaacatcctggagatctgcaatgtggtgttcacctccatgtttgccctggagatgatcctgaagctggccgccttcggcctgtttgactacctgaggaacccctacaacatctttgacagcatcatcgtcatcatcagcatctgggagatcgtgggccaggctgatggcggcctgtctgtgctgcggaccttccggctgctgcgggtgctgaagctggtgcgcttcatgcctgccctgcggcggcagctggtggtgctgatgaagaccatggacaacgtggccaccttctgcatgctgctgatgctgttcatcttcatcttcagcatcctgggcatgcacatcttcggctgcaagttcagcctgaggacagacacaggagacacagtgcctgacaggaagaactttgacagcctgctgtgggccatcgtgaccgtcttccagatcctgacccaggaggactggaatgtggtgctgtacaacggcatggccagcaccagcccctgggccagcctgtactttgtggccctgatgacctttggaaactacgtgctcttcaacctgctggtggccatcctggtggagggcttccaggccgagggagatgccaacagaagctacagtgatgaggaccagagcagcagcaacatcgaggagtttgacaagctgcaggagggcctggacagcagcggggaccccaagctgtgccccatccccatgacccccaacggccacctggaccccagcctgcccctgggcggccacctgggccctgctggagctgctggccctgccccccggctgagcctgcagcctgaccccatgctggtggccctgggcagcaggaagagctctgtgatgagcctgggccgcatgtcctatgaccagaggagcctgagcagcagccgcagcagctactacggcccctggggccgctctgctgcctgggccagccgccgcagctcctggaacagcctgaagcacaagcccccatctgctgagcacgagagcctgctgtctgctgagcggggcggcggggcccgggtgtgtgaggtggccgcagatgagggccccccccgggccgcccccctgcacacccctcatgcccaccacatccaccacggcccccacctggcccaccgccaccgccaccacaggaggaccctgagcctggacaacagagattctgtggacctggccgagctggtgcctgctgtgggcgcccaccccagggctgcctggagggctgctggccctgcccctggccacgaggactgcaatggccgcatgcccagcatcgccaaggatgtgttcaccaagatgggagacagaggagacagaggagaagatgaggaggagattgactacaccctgtgcttccgggtgaggaagatgattgatgtgtacaagccagactggtgtgaggtgcgggaggactggagcgtgtacctgttctccccagaaaatcgcttccgggtgctgtgccagaccatcatcgcccacaagctgtttgattatgtggtgctggccttcatcttcctgaactgcatcaccatcgccctggagcggccccagattgaagctggcagcacagagcgcatcttcctgactgtgagcaactacatcttcaccgccatctttgtgggggagatgaccctgaaggtggtgtccctgggcctgtactttggagagcaggcctacctgcggagctcctggaatgtgctggatggcttcctggtgtttgtgtccatcatcgacatcgtggtgtccctggccagcgctggaggagccaagatcctgggcgtgctgcgggtgctgcggctgctgcggaccctgcggcccctgcgggtcatcagccgggcccctggcctgaagctggtggtggagaccctcatcagcagcctgaagcccatcggcaacatcgtgctgatctgctgtgccttcttcatcatcttcggcatcctgggcgtgcagctgttcaagggcaagttctaccactgcctgggcgtggacaccaggaacatcaccaacagaagtgactgcatggccgccaactaccgctgggtgcaccacaagtacaactttgacaacctgggccaggccctgatgagcctgtttgtgctggccagcaaggatggctgggtgaacatcatgtacaacggcctggatgctgtggccgtggaccagcagcctgtgaccaaccacaacccctggatgctgctgtacttcatctccttcctgctgattgtgtccttctttgtgctgaacatgtttgtgggcgtggtggtggagaacttccacaagtgccggcagcaccaggaggccgaggaggccaggagaagagaggagaagaggctgcggcggctggagaagaagaggaggaaggcccagaggctgccctactatgccacctactgccacacccggctgctgatccacagcatgtgcaccagccactacctggacatcttcatcaccttcatcatctgcctgaatgtggtgaccatgagcctggagcactacaaccagcccaccagcctggagacagccctgaagtactgcaactacatgttcaccaccgtgtttgtgctggaggccgtgctgaagctggtggccttcggcctgcggcgcttcttcaaggaccgctggaaccagctggacctggccatcgtgctgctgtctgtgatgggcatcaccctggaggagattgagatcaatgctgccctgcccatcaaccccaccatcatccgcatcatgagggtgctgagaattgcccgggtgctgaagctgctgaagatggccaccggcatgagggccctgctggacacagtggtgcaggccctgccccaggtgggcaacctgggcctgctcttcatgctgctcttcttcatctatgctgccctgggcgtggagctgtttgggaagctggtgtgcaatgatgagaacccctgtgagggcatgagcagacatgccacctttgaaaattttggcatggccttcctgaccctcttccaggtgtccactggagacaactggaatggcatcatgaaggacaccctgcgggactgcacccatgatgagaggagctgcctgagcagcctgcagtttgtgagccccctgtactttgtgtcctttgtgctgacagcccagtttgtgctgatcaacgtggtggtggccgtgctgatgaagcacctggatgacagcaacaaggaggcccaggaggatgctgagatggatgctgagctggagctggagatggcccacggcctgggccctggcccccggctgcccaccggcagccctggggcccctggccggggccctggaggagctgggggcggcggggacacagagggcggcctgtgccgccgctgctacagccctgcccaggagaacctgtggctggacagcgtgtccctcatcatcaaggacagcctggagggggagctgaccatcatcgacaacctgagcggcagcatcttccaccactacagcagccctgctggctgcaagaagtgccaccacgacaagcaggaggtgcagctggccgagacagaggccttcagcctgaacagcgacaggagcagcagcatcctgctgggagatgacctgagcctggaggaccccacagcctgccccccaggcaggaaggacagcaaaggagagctggaccccccagagcccatgagggtgggggacctgggggagtgcttcttccccctgagcagcacagctgtgtccccagaccctgagaacttcctgtgtgagatggaggagatccccttcaaccctgtgcgctcctggctgaagcatgacagcagccaggccccacccagccccttctccccagatgccagcagccccctgctgcccatgcctgctgagttcttccaccctgctgtgtctgccagccagaagggccctgagaagggcactggaacaggcaccctgcccaagatcgccctgcagggctcctgggccagcctgcggagcccccgggtgaactgcaccctgctgcggcaggccaccggcagtgacaccagcctggatgccagccccagcagcagcgctggcagcctgcagaccaccctggaggacagcctgaccctgagtgacagcccccggcgggccctgggccccccagccccagcccctggcccccgggccggcctgagccctgctgcccggcggcggctgagcctgcggggccggggcctcttcagcctgcggggcctgcgggcccaccagaggagccacagcagcggcggcagcaccagccctggctgcacccaccacgacagcatggaccccagtgatgaggagggccggggcggggccggcggcggcggggccggcagcgagcacagcgagaccctgagcagcctgagcctgaccagcctcttctgccccccacctcctcctccagcccctggcctgaccccagccaggaagttcagcagcaccagcagcctggccgcccctggccggccccacgccgccgccctggcccacggcctggcccggagccccagctgggccgctgacaggagcaaggaccccccaggccgggcccccctgcccatgggcctgggccccctggcccccccaccccagcccctgcccggggagctggagcctggagatgctgccagcaagaggaagaggtag

SEQ ID NO: 324099 - DNA, 6567 bp, Artificial Sequence
  derived and/or modified sequence
atggccgagagcgccagcccccccagcagcagcgctgctgccccagctgctgagcccggggtgaccacagagcagcccggccccaggagcccccccagcagccccccaggcctggaggagcccctggatggagctgacccccacgtgccccacccagacctggcccccatcgccttcttctgcctgcggcagaccaccagccccaggaactggtgcatcaagatggtgtgcaacccctggtttgaatgtgtgtccatgctggtgatcctgctgaactgtgtgaccctgggcatgtaccagccctgtgatgacatggactgcctgagtgaccgctgcaagatcctgcaggtgtttgatgacttcatcttcatcttctttgccatggagatggtgctgaagatggtggccctgggcatctttgggaagaagtgctacctgggggacacctggaaccggctggacttcttcatcgtgatggccggcatggtggagtacagcctggacctgcagaacatcaacctgagcgccatcagaacagtgcgggtgctgcggcccctgaaggccatcaacagagtgcccagcatgaggatcctggtgaacctgctgctggacaccctgcccatgctgggcaatgtgctgctgctgtgcttctttgtgttcttcatcttcggcatcatcggcgtgcagctgtgggccggcctgctgaggaaccgctgcttcctggaggagaacttcaccatccagggagatgtggccctgcccccctactaccagccagaagaagatgatgagatgcccttcatctgcagcctgagcggggacaatggcatcatgggctgccacgagatcccccccctgaaggagcagggccgggagtgctgcctgagcaaggatgatgtgtatgactttggagctggccggcaggacctgaatgccagcggcctgtgtgtgaactggaaccgctactacaacgtgtgcaggacaggcagcgccaacccccacaagggggccatcaactttgacaacatcggctacgcctggatcgtcatcttccaggtgatcaccctggagggctgggtggagatcatgtactacgtgatggatgcccacagcttctacaacttcatctacttcatcctgctgatcatcgtgggcagcttcttcatgatcaacctgtgcctggtggtgattgccacccagttcagcgagaccaagcagcgggagcaccggctgatgctggagcagaggcagcgctacctgagcagcagcacagtggccagctatgcagagcccggggactgctatgaggagatcttccagtatgtgtgccacatcctgaggaaggccaagagaagagccctgggcctgtaccaggccctgcagagccggcggcaggccctgggccctgaggccccagccccagccaagccaggcccccacgccaaggagcccaggcactaccagctgtgcccccagcacagccccctggatgccaccccccacaccctggtgcagcccatcccagccaccctggccagtgaccctgccagctgcccctgctgccagcatgaagatggaagaagacccagcggcctgggcagcacagattctggccaggagggcagcggcagcggcagcagcgctggaggagaagatgaagcagatggagatggagcccggagcagtgaagatggagccagcagcgagctgggcaaggaggaggaggaggaggagcaggctgatggagctgtgtggctgtgtggagatgtgtggagggagacccgggccaagctgcggggcatcgtggacagcaagtacttcaacagaggcatcatgatggccatcctggtgaacacagtgtccatgggcatcgagcaccacgagcagcctgaggagctgaccaacatcctggagatctgcaatgtggtgttcacctccatgtttgccctggagatgatcctgaagctggccgccttcggcctgtttgactacctgaggaacccctacaacatctttgacagcatcatcgtcatcatcagcatctgggagatcgtgggccaggctgatggcggcctgtctgtgctgcggaccttccggctgctgcgggtgctgaagctggtgcgcttcatgcctgccctgcggcggcagctggtggtgctgatgaagaccatggacaacgtggccaccttctgcatgctgctgatgctgttcatcttcatcttcagcatcctgggcatgcacatcttcggctgcaagttcagcctgaggacagacacaggagacacagtgcctgacaggaagaactttgacagcctgctgtgggccatcgtgaccgtcttccagatcctgacccaggaggactggaatgtggtgctgtacaacggcatggccagcaccagcccctgggccagcctgtactttgtggccctgatgacctttggaaactacgtgctcttcaacctgctggtggccatcctggtggagggcttccaggccgagggagatgccaacagaagctacagtgatgaggaccagagcagcagcaacatcgaggagtttgacaagctgcaggagggcctggacagcagcggggaccccaagctgtgccccatccccatgacccccaacggccacctggaccccagcctgcccctgggcggccacctgggccctgctggagctgctggccctgccccccggctgagcctgcagcctgaccccatgctggtggccctgggcagcaggaagagctctgtgatgagcctgggccgcatgtcctatgaccagaggagcctgagcagcagccgcagcagctactacggcccctggggccgctctgctgcctgggccagccgccgcagctcctggaacagcctgaagcacaagcccccatctgctgagcacgagagcctgctgtctgctgagcggggcggcggggcccgggtgtgtgaggtggccgcagatgagggccccccccgggccgcccccctgcacacccctcatgcccaccacatccaccacggcccccacctggcccaccgccaccgccaccacaggaggaccctgagcctggacaacagagattctgtggacctggccgagctggtgcctgctgtgggcgcccaccccagggctgcctggagggctgctggccctgcccctggccacgaggactgcaatggccgcatgcccagcatcgccaaggatgtgttcaccaagatgggagacagaggagacagaggagaagatgaggaggagattgactacaccctgtgcttccgggtgaggaagatgattgatgtgtacaagccagactggtgtgaggtgcgggaggactggagcgtgtacctgttctccccagaaaatcgcttccgggtgctgtgccagaccatcatcgcccacaagctgtttgattatgtggtgctggccttcatcttcctgaactgcatcaccatcgccctggagcggccccagattgaagctggcagcacagagcgcatcttcctgactgtgagcaactacatcttcaccgccatctttgtgggggagatgaccctgaaggtggtgtccctgggcctgtactttggagagcaggcctacctgcggagctcctggaatgtgctggatggcttcctggtgtttgtgtccatcatcgacatcgtggtgtccctggccagcgctggaggagccaagatcctgggcgtgctgcgggtgctgcggctgctgcggaccctgcggcccctgcgggtcatcagccgggcccctggcctgaagctggtggtggagaccctcatcagcagcctgaagcccatcggcaacatcgtgctgatctgctgtgccttcttcatcatcttcggcatcctgggcgtgcagctgttcaagggcaagttctaccactgcctgggcgtggacaccaggaacatcaccaacagaagtgactgcatggccgccaactaccgctgggtgcaccacaagtacaactttgacaacctgggccaggccctgatgagcctgtttgtgctggccagcaaggatggctgggtgaacatcatgtacaacggcctggatgctgtggccgtggaccagcagcctgtgaccaaccacaacccctggatgctgctgtacttcatctccttcctgctgattgtgtccttctttgtgctgaacatgtttgtgggcgtggtggtggagaacttccacaagtgccggcagcaccaggaggccgaggaggccaggagaagagaggagaagaggctgcggcggctggagaagaagaggaggaaggcccagaggctgccctactatgccacctactgccacacccggctgctgatccacagcatgtgcaccagccactacctggacatcttcatcaccttcatcatctgcctgaatgtggtgaccatgagcctggagcactacaaccagcccaccagcctggagacagccctgaagtactgcaactacatgttcaccaccgtgtttgtgctggaggccgtgctgaagctggtggccttcggcctgcggcgcttcttcaaggaccgctggaaccagctggacctggccatcgtgctgctgtctgtgatgggcatcaccctggaggagattgagatcaatgctgccctgcccatcaaccccaccatcatccgcatcatgagggtgctgagaattgcccgggtgctgaagctgctgaagatggccaccggcatgagggccctgctggacacagtggtgcaggccctgccccaggtgggcaacctgggcctgctcttcatgctgctcttcttcatctatgctgccctgggcgtggagctgtttgggaagctggtgtgcaatgatgagaacccctgtgagggcatgagcagacatgccacctttgaaaattttggcatggccttcctgaccctcttccaggtgtccactggagacaactggaatggcatcatgaaggacaccctgcgggactgcacccatgatgagaggagctgcctgagcagcctgcagtttgtgagccccctgtactttgtgtcctttgtgctgacagcccagtttgtgctgatcaacgtggtggtggccgtgctgatgaagcacctggatgacagcaacaaggaggcccaggaggatgctgagatggatgctgagctggagctggagatggcccacggcctgggccctggcccccggctgcccaccggcagccctggggcccctggccggggccctggaggagctgggggcggcggggacacagagggcggcctgtgccgccgctgctacagccctgcccaggagaacctgtggctggacagcgtgtccctcatcatcaaggacagcctggagggggagctgaccatcatcgacaacctgagcggcagcatcttccaccactacagcagccctgctggctgcaagaagtgccaccacgacaagcaggaggtgcagctggccgagacagaggccttcagcctgaacagcgacaggagcagcagcatcctgctgggagatgacctgagcctggaggaccccacagcctgccccccaggcaggaaggacagcaaaggagagctggaccccccagagcccatgagggtgggggacctgggggagtgcttcttccccctgagcagcacagctgtgtccccagaccctgagaacttcctgtgtgagatggaggagatccccttcaaccctgtgcgctcctggctgaagcatgacagcagccaggccccacccagccccttctccccagatgccagcagccccctgctgcccatgcctgctgagttcttccaccctgctgtgtctgccagccagaagggccctgagaagggcactggaacaggcaccctgcccaagatcgccctgcagggctcctgggccagcctgcggagcccccgggtgaactgcaccctgctgcggcaggccaccggcagtgacaccagcctggatgccagccccagcagcagcgctggcagcctgcagaccaccctggaggacagcctgaccctgagtgacagcccccggcgggccctgggccccccagccccagcccctggcccccgggccggcctgagccctgctgcccggcggcggctgagcctgcggggccggggcctcttcagcctgcggggcctgcgggcccaccagaggagccacagcagcggcggcagcaccagccctggctgcacccaccacgacagcatggaccccagtgatgaggagggccggggcggggccggcggcggcggggccggcagcgagcacagcgagaccctgagcagcctgagcctgaccagcctcttctgccccccacctcctcctccagcccctggcctgaccccagccaggaagttcagcagcaccagcagcctggccgcccctggccggccccacgccgccgccctggcccacggcctggcccggagccccagctgggccgctgacaggagcaaggaccccccaggccgggcccccctgcccatgggcctgggccccctggcccccccaccccagcccctgcccggggagctggagcctggagatgctgccagcaagaggaagaggtag

SEQ ID NO: 324100 - DNA, 5946 bp, Artificial Sequence
  derived and/or modified sequence
atggccgagagcgccagcccccccagcagcagcgctgctgccccagctgctgagcccggggtgaccacagagcagcccggccccaggagcccccccagcagccccccaggcctggaggagcccctggatggagctgacccccacgtgccccacccagacctggcccccatcgccttcttctgcctgcggcagaccaccagccccaggaactggtgcatcaagatggtgtgcaacccctggtttgaatgtgtgtccatgctggtgatcctgctgaactgtgtgaccctgggcatgtaccagccctgtgatgacatggactgcctgagtgaccgctgcaagatcctgcaggtgtttgatgacttcatcttcatcttctttgccatggagatggtgctgaagatggtggccctgggcatctttgggaagaagtgctacctgggggacacctggaaccggctggacttcttcatcgtgatggccggcatggtggagtacagcctggacctgcagaacatcaacctgagcgccatcagaacagtgcgggtgctgcggcccctgaaggccatcaacagagtgcccagcatgaggatcctggtgaacctgctgctggacaccctgcccatgctgggcaatgtgctgctgctgtgcttctttgtgttcttcatcttcggcatcatcggcgtgcagctgtgggccggcctgctgaggaaccgctgcttcctggaggagaacttcaccatccagggagatgtggccctgcccccctactaccagccagaagaagatgatgagatgcccttcatctgcagcctgagcggggacaatggcatcatgggctgccacgagatcccccccctgaaggagcagggccgggagtgctgcctgagcaaggatgatgtgtatgactttggagctggccggcaggacctgaatgccagcggcctgtgtgtgaactggaaccgctactacaacgtgtgcaggacaggcagcgccaacccccacaagggggccatcaactttgacaacatcggctacgcctggatcgtcatcttccaggtgatcaccctggagggctgggtggagatcatgtactacgtgatggatgcccacagcttctacaacttcatctacttcatcctgctgatcatcgtgggcagcttcttcatgatcaacctgtgcctggtggtgattgccacccagttcagcgagaccaagcagcgggagcaccggctgatgctggagcagaggcagcgctacctgagcagcagcacagtggccagctatgcagagcccggggactgctatgaggagatcttccagtatgtgtgccacatcctgaggaaggccaagagaagagccctgggcctgtaccaggccctgcagagccggcggcaggccctgggccctgaggccccagccccagccaagccaggcccccacgccaaggagcccaggcactaccagctgtgcccccagcacagccccctggatgccaccccccacaccctggtgcagcccatcccagccaccctggccagtgaccctgccagctgcccctgctgccagcatgaagatggaagaagacccagcggcctgggcagcacagattctggccaggagggcagcggcagcggcagcagcgctggaggagaagatgaagcagatggagatggagcccggagcagtgaagatggagccagcagcgagctgggcaaggaggaggaggaggaggagcaggctgatggagctgtgtggctgtgtggagatgtgtggagggagacccgggccaagctgcggggcatcgtggacagcaagtacttcaacagaggcatcatgatggccatcctggtgaacacagtgtccatgggcatcgagcaccacgagcagcctgaggagctgaccaacatcctggagatctgcaatgtggtgttcacctccatgtttgccctggagatgatcctgaagctggccgccttcggcctgtttgactacctgaggaacccctacaacatctttgacagcatcatcgtcatcatcagcatctgggagatcgtgggccaggctgatggcggcctgtctgtgctgcggaccttccggctgctgcgggtgctgaagctggtgcgcttcatgcctgccctgcggcggcagctggtggtgctgatgaagaccatggacaacgtggccaccttctgcatgctgctgatgctgttcatcttcatcttcagcatcctgggcatgcacatcttcggctgcaagttcagcctgaggacagacacaggagacacagtgcctgacaggaagaactttgacagcctgctgtgggccatcgtgaccgtcttccagatcctgacccaggaggactggaatgtggtgctgtacaacggcatggccagcaccagcccctgggccagcctgtactttgtggccctgatgacctttggaaactacgtgctcttcaacctgctggtggccatcctggtggagggcttccaggccgagggagatgccaacagaagctacagtgatgaggaccagagcagcagcaacatcgaggagtttgacaagctgcaggagggcctggacagcagcggggaccccaagctgtgccccatccccatgacccccaacggccacctggaccccagcctgcccctgggcggccacctgggccctgctggagctgctggccctgccccccggctgagcctgcagcctgaccccatgctggtggccctgggcagcaggaagagctctgtgatgagcctgggccgcatgtcctatgaccagaggagcctgagcagcagccgcagcagctactacggcccctggggccgctctgctgcctgggccagccgccgcagctcctggaacagcctgaagcacaagcccccatctgctgagcacgagagcctgctgtctgctgagcggggcggcggggcccgggtgtgtgaggtggccgcagatgagggccccccccgggccgcccccctgcacacccctcatgcccaccacatccaccacggcccccacctggcccaccgccaccgccaccacaggaggaccctgagcctggacaacagagattctgtggacctggccgagctggtgcctgctgtgggcgcccaccccagggctgcctggagggctgctggccctgcccctggccacgaggactgcaatggccgcatgcccagcatcgccaaggatgtgttcaccaagatgggagacagaggagacagaggagaagatgaggaggagattgactacaccctgtgcttccgggtgaggaagatgattgatgtgtacaagccagactggtgtgaggtgcgggaggactggagcgtgtacctgttctccccagaaaatcgcttccgggtgctgtgccagaccatcatcgcccacaagctgtttgattatgtggtgctggccttcatcttcctgaactgcatcaccatcgccctggagcggccccagattgaagctggcagcacagagcgcatcttcctgactgtgagcaactacatcttcaccgccatctttgtgggggagatgaccctgaaggtggtgtccctgggcctgtactttggagagcaggcctacctgcggagctcctggaatgtgctggatggcttcctggtgtttgtgtccatcatcgacatcgtggtgtccctggccagcgctggaggagccaagatcctgggcgtgctgcgggtgctgcggctgctgcggaccctgcggcccctgcgggtcatcagccgggcccctggcctgaagctggtggtggagaccctcatcagcagcctgaagcccatcggcaacatcgtgctgatctgctgtgccttcttcatcatcttcggcatcctgggcgtgcagctgttcaagggcaagttctaccactgcctgggcgtggacaccaggaacatcaccaacagaagtgactgcatggccgccaactaccgctgggtgcaccacaagtacaactttgacaacctgggccaggccctgatgagcctgtttgtgctggccagcaaggatggctgggtgaacatcatgtacaacggcctggatgctgtggccgtggaccagcagcctgtgaccaaccacaacccctggatgctgctgtacttcatctccttcctgctgattgtgtccttctttgtgctgaacatgtttgtgggcgtggtggtggagaacttccacaagtgccggcagcaccaggaggccgaggaggccaggagaagagaggagaagaggctgcggcggctggagaagaagaggaggaaggcccagaggctgccctactatgccacctactgccacacccggctgctgatccacagcatgtgcaccagccactacctggacatcttcatcaccttcatcatctgcctgaatgtggtgaccatgagcctggagcactacaaccagcccaccagcctggagacagccctgaagtactgcaactacatgttcaccaccgtgtttgtgctggaggccgtgctgaagctggtggccttcggcctgcggcgcttcttcaaggaccgctggaaccagctggacctggccatcgtgctgctgtctgtgatgggcatcaccctggaggagattgagatcaatgctgccctgcccatcaaccccaccatcatccgcatcatgagggtgctgagaattgcccgggtgctgaagctgctgaagatggccaccggcatgagggccctgctggacacagtggtgcaggccctgccccaggtgggcaacctgggcctgctcttcatgctgctcttcttcatctatgctgccctgggcgtggagctgtttgggaagctggtgtgcaatgatgagaacccctgtgagggcatgagcagacatgccacctttgaaaattttggcatggccttcctgaccctcttccaggtgtccactggagacaactggaatggcatcatgaaggacaccctgcgggactgcacccatgatgagaggagctgcctgagcagcctgcagtttgtgagccccctgtactttgtgtcctttgtgctgacagcccagtttgtgctgatcaacgtggtggtggccgtgctgatgaagcacctggatgacagcaacaaggaggcccaggaggatgctgagatggatgctgagctggagctggagatggcccacggcctgggccctggcccccggctgcccaccggcagccctggggcccctggccggggccctggaggagctgggggcggcggggacacagagggcggcctgtgccgccgctgctacagccctgcccaggagaacctgtggctggacagcgtgtccctcatcatcaaggacagcctggagggggagctgaccatcatcgacaacctgagcggcagcatcttccaccactacagcagccctgctggctgcaagaagtgccaccacgacaagcaggaggtgcagctggccgagacagaggccttcagcctgaacagcgacaggagcagcagcatcctgctgggagatgacctgagcctggaggaccccacagcctgccccccaggcaggaaggacagcaaaggagagctggaccccccagagcccatgagggtgggggacctgggggagtgcttcttccccctgagcagcacagctgtgtccccagaccctgagaacttcctgtgtgagatggaggagatccccttcaaccctgtgcgctcctggctgaagcatgacagcagccaggccccacccagccccttctccccagatgccagcagccccctgctgcccatgcctgctgagttcttccaccctgctgtgtctgccagccagaagggccctgagaagggcactggaacaggcaccctgcccaagatcgccctgcagggctcctgggccagcctgcggagcccccgggtgaactgcaccctgctgcggcaggtgcccaccccaccccggccctag

SEQ ID NO: 324101 - DNA, 6567 bp, Artificial Sequence
  derived and/or modified sequence
atggccgagagcgccagcccccccagcagcagcgccgccgcccccgccgcggagcccggggtcaccacagagcagccaggtcccaggtccccaccctcctccccaccaggtctggaagagccacttgacggtgcagacccccatgtgccccaccctgatctggctcccatcgctttcttctgcttaaggcagaccacttctccccgaaactggtgcatcaaaatggcaacaggcccttggtggtggtgcttatgtatgcttgttattcttttaaattgcgttactctcggaatgtatcagccctgcgacgacatggattgcctcagtgatcgatgtaagattctccaagtcttcgacgactttattttcatcttttttgctatggaaatggtgctgaagatggtggccctgggcatatttgggaaaaaatgttacctgggcgacacctggaaccgcctggattttttcatcgtcatggccgggatggtagagtactcccttgacctccaaaatattaatctttctgccatacgcaccgtgcgcgtcctcagaccactcaaagctatcaaccgagtcccttcaatgaggatcttagttaacctcctgctggatacacttcccatgttggggaacgttctgctgttatgtttttttgtgttctttatcttcggcattatcggtgtgcagttgtgggctggcctattacgtaacaggtgtttcctggaggagaactttacaatccagggagatgtcgccctgccgccctattaccagcccgaagaggacgatgagatgccctttatctgctccctgtctggagacaatggcataatggggtgtcacgagattccacccttgaaagagcagggtcgggaatgctgcctaagcaaagacgatgtgtatgacttcggggcaggccggcaggatctgaacgcctcagggttatgtgttaattggaatcgatactataatgtctgcaggaccggctcggccaacccgcacaagggcgctatcaacttcgataatataggttacgcttggattgttatttttcaagtcattacccttgaaggatgggtggagatcatgtattatgtgatggatgcccacagcttctataactttatatacttcatcttgctgatcatcgtgggttctttcttcatgatcaatctgtgcttggtggtcatcgcaactcagttctctgagactaaacagagggaacatagattaatgttggagcagcgtcaacgatacctgtcttcttcgactgtggcctcctacgcggaacctggtgattgctatgaggagatctttcaatatgtgtgtcatatactccgtaaagctaagcggcgcgctctcggcctttaccaggctctacagtcccgacgtcaggctcttggaccggaagcaccggcccccgcaaagcccggaccccatgcaaaggagccaaggcactatcaattatgcccacagcattcaccgctggacgctacgccacacacattagttcagcccattccagcgactcttgcttccgatccggcctcttgcccctgctgccaacatgaggacggcagaagaccatccggactcggttcaactgactcagggcaggaggggtcaggctctgggagttcagcaggcggggaagacgaagccgatggtgatggcgcccggtccagtgaggacggtgcttccagtgaactcggtaaggaggaagaggaggaggaacaagcagatggagcagtgtggctgtgtggtgacgtgtggagagagacaagggcgaagttgcgaggcattgtcgatagtaagtactttaacaggggtattatgatggcaattcttgtgaatactgttagtatggggatcgaacaccatgagcaagccacggagctgacaaatattttagagatatgcaatgtcgtatttactagtatgttcgccttagagatgattctgaagctggccgcttttgggctctttgactacctccgcaatccttacaacattttcgacagcatcattgtaataatttccatctgggaaattgttggacaggctgacgggggtctgagcgtgctgaggacgttcagactcctcagagtcctaaaactggtgcgcttcatgcctgcattaagaagacagttggtggtcctcatgaaaactatggataatgttgccaccttttgtatgctcttgatgctcttcatttttatcttctctatccttggaatgcacatcttcggatgcaaatttagtttgaggaccgatactggggatacagtgcctgacagaaaaaattttgacagtcttctgtgggctatcgtaaccgtgtttcaaattctgacacaggaagactggaacgtcgtcttgtataacggtatggcttccacttcaccatgggcttcactctactttgtcgccttaatgacctttggcaattacgtactatttaatctcctcgtcgctatcctggtagaggggttccaggccgagggcgatgctaaccgaagctacagcgatgaagaccagtccagttcgaacattgaagaattcgacaagctgcaagaggggctagactcctctggtgatccaaagctgtgcccaatccccatgacaccaaatggccacctcgacccctcactaccccttggcggtcacctgggcccagccggagccgccggcccggccccacgactttccctgcagcctgaccctatgctcgtcgcactggggagccgcaaaagctctgtgatgagcttggggcggatgagctatgatcagaggtcactctcttcgagcaggagcagctattatggcccgtggggtcgtagtgcagcttgggcttcaaggaggtctagttggaattccctgaagcacaagccaccttccgcggagcacgagagcctcttatcagccgaacgaggtggcggagcacgcgtctgcgaagtcgccgcggacgagggaccccctcgggcagcccctttacacacgccccatgctcatcacattcatcacggaccccacttagctcaccgtcataggcaccatcggcgcaccctgagcctcgacaatagggatagtgtggacttggccgagctcgttccagcagttggcgcccaccccagagccgcctggagagctgcaggtcctgcaccgggtcacgaggactgtaacggccgcatgccctcaattgccaaggacgttttcaccaagatgggtgacaggggtgaccggggagaggatgaagaagagatcgattacactctctgcttcagagtccgtaagatgatcgacgtgtataaacccgattggtgcgaggtgcgtgaagactggtccgtgtacctcttttccccagaaaaccgctttagggtgctgtgtcagaccatcattgcgcataagctgtttgattacgtggtgctggccttcattttcctcaactgcatcacaatcgcccttgaaaggccccaaatagaggccgggagcacagagcgcatattcctgaccgtgtcaaattatatctttacagctatatttgtgggggaaatgacgctaaaagttgtctcattgggactctattttggagagcaggcctacttacggtcctcatggaatgtgttggacggatttcttgtgttcgtgtccatcatcgatatcgtcgttagccttgcgagcgccgggggcgcgaaaatactgggggtgctgcgggtactaaggttactgcgcacgttaagacccctgagggtgatctcgcgagccccaggcttaaagctggtggttgaaacactgataagttctctgaagcctatcggcaatattgtgcttatctgctgcgcgttctttattattttcgggatactgggtgtgcaactgttcaaaggaaagttttaccactgtctgggcgttgacacacgaaatataaccaaccggagcgactgcatggctgccaattacaggtgggttcaccacaaatacaacttcgacaatctggggcaggcactaatgagtctgttcgtcttagcttctaaagatgggtgggttaacattatgtacaatggcttggacgcagtcgctgtggaccagcaacccgtcacaaaccataacccttggatgttgctgtacttcatatccttcttacttatagttagtttcttcgttctgaatatgttcgttggcgtggtggtggagaactttcataaatgcaggcaacatcaggaagcagaagaagctaggcgtagggaagaaaaacgcttaaggcgacttgagaagaagagaagaaaggcacagagactgccatattacgccacgtactgccacactcggctactgattcattctatgtgcacgagccattacctggatatctttattacctttatcatctgtctgaatgtggtgaccatgtcactggagcattacaatcaaccgactagcttagaaaccgcccttaaatactgcaactacatgttcacaacagtttttgtgttggaagcagtcttgaagcttgtagcattcggtctgagaaggtttttcaaggatagatggaatcaactggatctcgccatcgttctgctttcggttatgggcatcacccttgaggagatcgagatcaacgccgccttgcctatcaatcccacaataatcaggattatgcgggttctgagaatcgctcgcgtacttaagctactgaagatggctacaggcatgagagctctgttggacacagtagtgcaggcacttccccaggtaggcaatctggggctgctttttatgttactgttctttatatatgctgccctgggagttgaactattcggcaaactggtctgcaatgatgagaatccttgcgaggggatgtctaggcatgctacttttgaaaattttggaatggccttcctgaccctctttcaagtgtctacaggggacaattggaacggcattatgaaagatactctccgagattgcacccacgatgagcgctcatgcctgtcttccctacagttcgttagccccctttacttcgtgtcgtttgtgctgaccgctcagtttgtgctaatcaatgtggtggtcgctgtcctcatgaaacatctggacgattcaaacaaggaggcccaagaggacgccgagatggacgcggaactggaactagagatggctcatggacttgggccaggcccccggctgcctaccggatctcccggtgctcccggccggggcccaggaggtgctggcggcgggggggacaccgaaggcggcttgtgtcggagatgttattctccagctcaggaaaacctgtggctggacagtgtttccctgataatcaaagacagcctcgagggggaactgactattatcgacaacctttctggtagcattttccatcactattcaagcccggccggctgcaaaaaatgccaccacgacaagcaggaggtacaactggccgaaactgaagccttctccctcaacagcgatcgctcctctagcatcctgcttggcgacgatctgtcgctggaggaccctactgcctgccctccaggcaggaaggattctaaaggggagctggatcccccggagcctatgcgggtgggagacctgggcgaatgcttctttcctctgagctccacagccgtttctccagatcccgagaattttctctgtgaaatggaggaaattccgtttaacccagtccgtagctggttgaagcacgacagtagtcaggcgcctcctagtcccttctctcctgacgcatcaagtcctttgctcccgatgcctgcagagtttttccaccccgcagtctcggcaagtcagaaaggcccggagaaaggcacagggacggggaccctgcccaaaatagcgctgcagggaagttgggcatccctcagatcccccagggtgaattgcacactccttaggcaggctacaggaagcgacacgtctctggatgcttctcccagttcttccgccggctcactgcaaactaccctggaggattccttaactttatccgacagtcccaggcgggccctcggcccccctgccccagctccaggacctcgagccggtctgtccccggctgcacgacgccggttaagtctcagggggagaggcctcttttccttgcgtggactgcgcgctcaccagcgctcccactcatcgggaggctccacgtccccgggctgtacgcaccacgactccatggatccatccgatgaagagggtaggggaggagctggaggaggtggcgctggatcggaacactccgaaactctctcttctctatcactgacgtccctgttttgccctccccccccaccccccgctcccggcctgactcctgcccgaaaattttcctctaccagcagtctcgctgccccaggccggcctcacgcagctgctcttgctcacgggttggcccgaagcccatcttgggctgctgaccggagcaaagatccaccagggcgtgcacctttaccgatgggcctcggtcccctcgcccctccaccccaacccttacctggcgagctggaaccaggagatgctgcttctaagcggaaacgatag

SEQ ID NO: 324102 - DNA, 6567 bp, Artificial Sequence
  derived and/or modified sequence
atggccgagagcgccagcccccccagcagcagcgccgccgcccccgcggctgagcctggcgtgactaccgagcagccaggccctcgatcacccccttcctctccccccggtcttgaagaacccctggacggggccgaccctcacgtgccacaccccgatctggctccaatcgcctttttctgcctgcggcaaacaactagccctaggaattggtgtattaagatggtctgcaatccttggtttgagtgcgtctcgatgttagtaatcctgctgaactgcgtgactctggggatgtaccagccatgtgacgacatggattgtcttagtgacagatgtaagatcctgcaggtgttcgacgattttattttcatctttttcgccatggaaatggtgctgaaaatggtggccctagggatatttgggaagaagtgctatctcggcgatacttggaatcgcctggacttcttcatcgtgatggccgggatggttgagtatagcctggatctccagaatattaacttgagcgccatccggacagtccgagtcctcaggccacttaaagccatcaaccgagtgccgtcaatgcggatcctggtgaacctgctcctcgacaccttgcctatgctagggaacgtgctgctgctgtgctttttcgtattctttatattcgggatcattggggtacagctctgggctggattgttgaggaataggtgttttttagaagaaaattttacaatccaaggtgacgtggccctgcccccctactatcagccagaggaggatgatgaaatgccatttatttgctccctctccggagacaacggaattatgggatgtcacgagatcccacccctcaaggagcagggccgggagtgttgcctcagcaaagacgatgtatacgacttcggtgctggtaggcaggatctgaatgcatcagggctctgtgtgaattggaatcgctactataacgtgtgccgaacaggctccgctaatcctcacaaaggagcaatcaatttcgacaatatcggctatgcctggatagtgatattccaggtgatcacactagaaggctgggtcgagatcatgtactatgttatggatgctcacagtttctacaattttatttattttatcctactcatcattgtcggctctttctttatgattaacctgtgcctcgtggttatcgctacgcagttttcagagacaaagcaaagggaacatagactaatgctggagcagcgacagcggtacctgtcctctagcaccgtggccagctatgccgagcctggtgactgctacgaggagattttccagtacgtgtgccatattttgagaaaggccaagaggagggcacttggcctctaccaggctctgcagagcaggagacaggccctaggacctgaggcacctgcaccagccaagcctggtccccacgcgaaagagccacgacattaccagctgtgcccgcagcactctccattggatgcaaccccacacactctggttcagcccattcctgcaactctggcaagcgaccccgctagctgcccttgttgtcaacatgaagatggtaggcgaccgtcagggctcggatccacagactctggccaggagggttcgggcagtggctcctccgctggtggagaggatgaagctgacggcgacggtgcacggtctagcgaggacggcgccagctctgagctcggaaaagaagaggaagaagaagaacaggctgacggcgccgtctggctctgcggagatgtgtggagagagacacgggctaaattaagagggattgtagacagcaagtacttcaatcgagggataatgatggccattctggtgaatacagtctcgatgggcatagagcatcatgagcagcctgaagagctcacaaatatattagagatctgtaacgtagtattcacctcaatgttcgctctagaaatgattctcaaactggctgctttcgggctttttgattatcttagaaacccctataatattttcgattccattattgtgatcataagcatctgggagatcgtgggtcaagcagatggaggcctatctgtgctgcgaacgttcagactgcttagagtgctgaagctggtgcgtttcatgccagccctccgaagacagctcgttgtcctaatgaagaccatggataacgttgccaccttctgtatgctcctgatgctgttcatattcattttctccatcctagggatgcatatctttgggtgcaaattcagtctgcgaacagacaccggcgacaccgtgccagaccggaagaattttgacagcctcctttgggccattgtgaccgttttccagatcctgacccaagaggactggaacgtggtcttatataacggcatggcatctaccagtccctgggcatctctctattttgtcgccctgatgacgtttgggaactacgtcctgtttaatctgcttgtcgctatccttgttgaggggtttcaggccgaaggtgatgcaaatcggtcatattccgatgaggatcagagttctagcaatatcgaggaatttgataaacttcaagagggcctggattcctctggggatcctaaattgtgcccaatccctatgacaccgaacggccacttggacccatccctgcctctgggcggacacttaggcccagccggtgcagcaggcccagcgccgcgactgtccctgcagccggaccctatgctggtggccctaggctcgcgtaagagcagtgtaatgtccctcgggcggatgagctatgatcagagatctctcagcagcagtcggagtagctactacggtccctgggggaggagcgctgcctgggcaagtcgtcgctcttcttggaactctctgaaacataaaccaccatccgcagagcatgaaagcttgctttcagccgagaggggcggtggtgcccgcgtgtgtgaagtcgccgcagacgaaggaccccctagggcagctccccttcatacccctcacgcacatcatatccatcacggtcctcacctggcacacagacatcgtcaccacaggaggactcttagcttagacaatcgcgacagcgtggacttagcagaacttgtccccgccgtgggcgcccacccaagggctgcttggcgggctgccgggcctgccccagggcatgaggactgcaatggacggatgccttccatcgcaaaagatgtgtttactaagatgggagataggggcgataggggcgaagatgaagaagagatcgattatacgctctgtttccgggtccgaaagatgattgacgtgtataagccagactggtgcgaagtgcgggaagactggtccgtgtatctcttttcccccgaaaaccgttttcgggtgctctgtcagacaataattgcgcacaaactctttgattatgtggtgttggccttcatcttccttaattgcataactattgccctggagaggccacagattgaggctgggtcgacagaacggatttttctaacggtaagcaattacattttcactgccatatttgtgggcgagatgactctcaaggtcgtgtccctggggctctacttcggggagcaagcatacctccggtcctcttggaacgtgctagacgggttcctcgtcttcgtaagtatcattgatattgtagtcagcttggcctccgcaggaggggctaagatactgggcgtacttcgagtgttgcggttgctccgcacgctgagaccactccgggtgatttcccgggctccaggactgaaattggtggtcgagacactgatctccagcctgaagccaatcggaaatattgtacttatttgctgtgcattctttattatattcggcatcctcggcgtgcagttattcaaaggcaagttttaccattgtttgggagtggatacccgcaacataaccaaccgatcggactgcatggccgctaactatagatgggtccatcataagtacaatttcgataatctcggccaggcactgatgtccctgttcgtgctcgcatctaaggatggatgggtcaacatcatgtacaatggcctggatgccgttgccgtggaccaacagccagtgaccaaccacaatccatggatgctcttgtacttcatcagttttttattgattgtttccttcttcgtattgaatatgttcgtcggtgtggtcgtggaaaattttcacaagtgccggcaacatcaggaagccgaagaggcacgtaggcgggaggagaagcggctgagacgcctggagaagaagcgccggaaggcacagcgactgccgtactatgctacctactgtcacaccaggttgttaattcattccatgtgtacaagccattaccttgacatctttatcacgtttattatttgcctgaatgtagtgactatgtcgctcgaacattacaaccagcctactagcctggagacggcgcttaaatattgcaactacatgttcaccacagtattcgtgctggaggcagtactaaagctggtggcatttggcctgaggaggttttttaaggatcggtggaaccagttagatctcgcaattgtgctcctatccgtaatggggatcaccttagaggagatcgaaatcaacgctgcactgccgatcaatccaactatcattagaattatgagggtcctaagaattgcccgtgtgctgaagttgctgaagatggcaaccgggatgcgcgccctgctggacaccgtcgttcaggccctcccacaggtcggcaaccttgggctcttgtttatgctgctgttcttcatttacgccgcccttggcgtggagctgtttgggaaactggtgtgcaacgacgaaaacccatgtgagggcatgtcccggcatgctactttcgaaaatttcggcatggcatttctaactttatttcaagtgtccaccggtgataactggaacggtataatgaaggatacactgagagattgcacccacgacgagcgctcttgcctgtcatcccttcagttcgtttcccccctttacttcgtgagcttcgtgctaaccgcccagtttgtactaatcaacgttgtagtggccgtactgatgaagcacctagacgactcaaataaggaggcgcaggaggacgcagaaatggacgccgagctcgagttggagatggcacacggcctcgggcctggccctcgcctccccacaggaagtcccggcgccccagggagaggcccaggtggtgccgggggcggcggggacacggaaggaggcctatgccgcaggtgctatagccccgctcaggaaaacttatggctagattcagtgtctctgatcattaaggactcactggaaggggagctgaccattatcgacaatctttcaggcagtattttccatcactatagctcccccgcgggttgtaaaaagtgccaccatgataagcaggaagtccagctggcggagaccgaggctttctctttgaattctgatcgctcctcatcaattttactcggagacgacctgtcgctcgaggatccaaccgcttgccctcccggaagaaaagattccaagggcgaacttgacccacccgaacctatgcgcgtaggggatttaggcgaatgttttttccctctttctagtactgctgtgtcacccgaccctgagaactttctatgtgagatggaggagattccatttaatcctgttcgctcatggctgaagcacgatagctctcaggccccaccctcacctttttcgccggatgcgagttcccctttactcccaatgcctgcggagttcttccaccctgctgtcagcgcttcccagaaaggccccgaaaaaggcaccggcaccggcactttgccgaaaatcgcactccagggctcctgggcgtccttaaggtcaccgagagtcaactgtaccctcctaagacaggcaacgggaagcgacaccagcctcgatgcctctccttcttcttcagcgggatctctgcagaccaccttggaggattctctaactctttctgactctccacggcgcgctctcggcccacccgctcctgctcctggcccgcgggcaggactgtctcccgcagcgaggagacgtctatccttgcgtggacggggactgttctctctccggggcttgcgggcgcatcagcgttctcactcttccgggggatccacctcccctggctgcacccatcatgactcaatggacccttccgacgaagaggggagaggcggggcggggggtggaggtgctgggagcgaacattctgagaccttgagctcacttagcctgacctccttgttttgtccaccaccgcctccccccgctcctggactgacccccgcaagaaagtttagctcaacgtccagcctggcagcccctgggcgaccacacgcagcagcgctggctcatggcctggctaggtcacccagctgggcagcagatcgctcgaaagacccaccaggccgggcaccgttaccgatgggcctaggacccctggcccccccaccacagcctctcccaggggagttggaacccggcgatgcggccagtaaaaggaagcgctag

SEQ ID NO: 324103 - DNA, 5946 bp, Artificial Sequence
  derived and/or modified sequence
atggccgagagcgccagcccccccagcagcagcgccgccgcccccgcagccgaacccggcgtgactactgaacagccgggaccgcgtagcccccctagtagtccccctggtttagaagagcctctggacggtgccgacccccatgtaccccacccggatctcgctcccatagccttcttttgcctgaggcagaccactagtccccgtaactggtgtataaaaatggtctgtaacccatggttcgagtgtgtctcgatgctcgtaatccttttgaattgcgtcaccctgggaatgtatcagccctgtgatgacatggattgtttatctgatagatgcaaaattctgcaggtgtttgatgatttcatcttcattttttttgccatggaaatggtactaaagatggtggctctaggaatcttcggaaaaaaatgctacctcggagatacctggaatcgcctcgacttctttatagttatggcgggtatggtggagtactccttggaccttcagaacatcaacttgtcagccataagaaccgtcagagtgctgcgcccattaaaggcgattaaccgggtcccttccatgcgcattctcgtgaacctgttgttggatactctccctatgctgggaaatgtattactgctttgcttcttcgtgtttttcatattcggtatcatcggagtgcagctgtgggccggcctcctcagaaatagatgctttctggaggaaaatttcacgattcagggtgatgtggccttgcccccatattaccagcccgaggaggatgatgagatgcccttcatctgctcgctttccggcgataatggaatcatgggatgccacgagatcccaccactgaaggagcaagggagagaatgctgcctgtcgaaagatgatgtgtacgactttggtgccgggcgtcaggatttgaatgcctctggtctctgcgtcaattggaatcgttattacaatgtgtgtagaactggaagcgccaaccctcacaagggagccatcaattttgataacatcggttacgcctggattgtaatttttcaggtgatcaccttggaaggctgggttgagatcatgtactatgtgatggacgcacatagcttctacaattttatttactttattctgctcatcatcgtcggaagcttctttatgatcaacctctgtctggtcgttatagcgacgcaattctccgaaaccaagcagcgggagcacagattgatgctggaacaacgccagcgctatttatcatcttctaccgtggcatcctacgccgagcccggcgactgctatgaggaaatctttcagtatgtatgccatattctgcgcaaagccaaaagacgcgcactcggcctttatcaggccctgcagagtagaagacaggctctgggtcccgaagccccggcgccggccaagcccggtccccatgcaaaagagccaaggcactatcagctctgccctcagcactcgcccctggacgccactccccacaccttggtccagcctatccccgccacgttggcctcagatccagcctcctgtccttgctgccagcatgaggacggcagaagaccctccgggttgggcagtaccgattctggacaagaaggaagcggatctggaagttcagccggaggcgaagacgaggccgacggagacggggctaggagctcggaggacggagcctcttccgagttagggaaggaggaggaagaggaggagcaggcagatggcgcagtatggctgtgtggcgatgtgtggagggagacgcgcgccaaactgaggggaatcgtggactcaaagtacttcaatcgagggataatgatggcaattctggtgaataccgtctccatgggcattgagcaccacgagcagccagaagaactgactaatattctagaaatttgtaacgtggtgttcacatccatgttcgcgcttgagatgatacttaagctggccgcctttgggctgtttgactacctcaggaacccctacaacatttttgactccatcatagtaatcataagtatatgggagattgtcggtcaagcggacggcgggctgagtgtgctccgtacattcagacttcttcgggtactgaaacttgtacgctttatgcctgcactccgacgccagctggtggtgctgatgaagaccatggacaatgtggctaccttttgtatgcttttaatgctctttatctttatcttctctatcctcggaatgcacattttcggctgcaaattcagccttaggacggacactggagacaccgtaccagataggaagaacttcgattccctcctgtgggcgatcgtgaccgtcttccagatcctgacacaggaggactggaacgtggtgctgtacaacggcatggcttcaacttctccttgggctagcctttactttgtcgccttaatgacctttgggaactacgtgctgttcaatctcctagtggcgattctggtggagggttttcaggcagaaggcgacgcaaatcggtcatacagcgatgaggaccaaagctcttccaacatcgaggagtttgacaaattacaggaaggccttgactcctcgggcgatcctaaactatgcccgatccctatgaccccgaatggacacttagaccccagtctacctttaggcggacatctcgggccagctggcgccgccggaccagcaccccgattgagcttgcagcccgatcctatgctggtagccctgggaagcagaaaatcctccgtgatgtcactggggcgtatgagttatgaccagcggagtttaagcagcagccgaagtagctactacggcccttggggccgatcagccgcatgggcatcgaggcgctccagctggaactcgctgaagcataagcccccttccgctgaacatgagtccttactatctgcagaacgaggcggcggtgctcgcgtgtgcgaggttgccgccgacgaagggccacctcgcgccgctccgctccacactccacatgcccatcacatccatcatggacctcatctcgctcatcgccacaggcaccatcggagaacgctctctttggacaacagggacagtgtcgatctggcggagttggtccctgctgtgggggcccatccgagagcagcttggagggctgccggccccgcgcccggccatgaggactgtaacggacggatgccaagtatcgctaaagacgtgttcacgaaaatgggcgaccgcggggataggggggaagatgaagaggagatagattacaccttgtgcttccgggtacggaagatgattgatgtctataagccagactggtgcgaggtccgcgaggattggtccgtgtacttgttcagccctgagaatcgatttcgcgtcctctgtcagacaatcatcgctcataaactgttcgattacgtcgttctagccttcatttttttgaactgtatcactatcgcccttgaacgccctcagatcgaggccggaagcacagaacgtattttccttaccgtatccaattacatttttacagctatattcgtgggggagatgactctgaaggtggtgagccttggactatattttggcgagcaggcgtatttgcgatcctcctggaatgtactcgacggtttcctcgtgttcgtctccatcattgatatcgtagtgtctctggctagcgccgggggagcaaagattctcggggttctgagggtccttagacttcttcgcaccctgagaccactgcgcgtcattagccgagccccaggccttaagctggtcgtggagaccctgatctcttctcttaaaccaattggtaatatcgttctgatctgctgcgctttttttattatcttcggaatactgggagtgcagctgtttaaagggaaattttaccattgcctgggtgtagatacacgcaatatcactaatcggtccgattgcatggctgcgaactatcgctgggtgcatcacaaatataatttcgataacctgggccaagctctgatgtctctgtttgtactggcttccaaggatggatgggtgaatatcatgtataacggactggacgccgtcgctgttgatcagcagccggtgaccaaccacaatccatggatgctgttgtatttcataagcttcctcctcattgtgtctttttttgttttaaacatgttcgtgggcgtggtggtcgagaacttccacaagtgccgacagcaccaagaggccgaggaagctcgcaggagagaggagaagaggcttcggcgtttggaaaagaagagacgaaaagctcaacggttaccttactacgcaacatactgtcacacacgcctgctgattcattccatgtgcacttcccactatctggacatattcatcacattcatcatttgcctgaacgttgtaaccatgagcctggagcattacaaccagcccacatctctggagaccgctctcaagtactgcaactacatgtttacaaccgtgttcgtactcgaggcagtcctaaagttggtggcattcggcctgagaagattcttcaaagatcgctggaatcagttagatctagcaatcgttttgctgtctgtgatgggaattactctcgaagaaatagagataaacgcggccttgccaattaaccccaccataatcaggatcatgagggtcctcaggattgcccgagtgctcaagctactgaagatggctacagggatgcgggctctcctggatactgttgtccaagctcttccgcaggtggggaatttggggcttctgttcatgctgcttttttttatctacgctgccctgggtgtggaattgttcggcaagctggtctgtaacgacgagaacccatgtgaggggatgagcagacatgcaaccttcgagaacttcggaatggccttcctaacgctgtttcaggtgtctaccggagacaattggaacggcatcatgaaagataccttaagggattgcacacacgatgagcggagctgcctgtcatcacttcagttcgtttcacccttatactttgtttcctttgttctcactgcccagtttgtcttaatcaatgtagttgtggcggtcctaatgaaacacttagacgatagtaataaagaagctcaggaggacgccgaaatggatgcagagttggagttggaaatggcccatgggctaggacctggaccgaggttaccaactggcagtccaggagctccaggtcgcggtcctggtggcgccggcggcgggggagatacagaaggaggcctctgtcggcggtgctattctcctgcccaagagaacctttggctggacagtgtctccctgatcattaaggacagcctggagggggaactaacaattattgacaacttaagtgggagtattttccaccattatagctctcccgctggatgtaaaaagtgtcaccacgataagcaagaggtgcagctggcagaaacggaagccttctcgctgaattccgacaggtcttcctccatcttattaggcgacgatctctcactggaagatccgacagcatgcccacccggccgaaaagacagcaagggggagttggacccaccggagccgatgagagtgggggatctgggcgaatgttttttccccctttcgtcaactgcagtgtctccagaccccgagaatttcctgtgtgagatggaagagattccgttcaacccggttagatcatggctcaagcacgattcatcacaagccccgccatctcccttctcaccagacgcctcatcaccattgctgccaatgcccgccgaattctttcacccagccgtgtcagccagccagaagggacccgaaaaggggaccggtaccggcacattacccaagatagcccttcagggaagttgggcatccctcagatccccgcgtgtgaactgtaccctattgagacaggtgcccacaccaccacgtccatag

SEQ ID NO: 324104 - DNA, 6566 bp, Artificial Sequence
  derived and/or modified sequence
atggccgagtcagcgtctccacccagctcatccgcggctgcccctgcagccgaaccgggagtcactacggagcagccaggacctagatcccctccctcctcaccccctggtttggaagagcccttggatggcgctgatccacatgtgcctcaccctgacttggcccctatagcctttttctgcctgcgacaaacaactagcccaaggaactggtgcattaagatggctactggtccttggtggtggtgtctgtgtatgctagtaatcctgctgaattgcgtcactctgggcatgtatcagccctgtgatgatatggattgcctttcagatcgctgcaagatcttgcaagtatttgatgacttcattttcatcttcttcgctatggagatggttctcaagatggtagctttaggcatcttcggaaaaaaatgctacctgggtgacacctggaatagattggacttctttattgtgatggcagggatggttgagtactctctagacctgcagaatatcaatctgtcagccatccgcactgtgcgggtccttcggcctctgaaggcaattaaccgggtgccaagcatgagaatactcgtcaacctgcttctggataccctgcctatgcttggaaatgtgctgctcttgtgcttcttcgtgttttttatattcggaatcatcggcgtacaactctgggccggactcctgcgtaatcggtgttttctggaggaaaattttaccatccagggtgatgtcgccctgcccccttattaccagcctgaagaggatgacgagatgccctttatatgctccctgagcggagacaacggaatcatgggctgtcacgagattccgcctctcaaggaacaagggcgtgaatgttgcctttctaaggacgatgtgtacgacttcggagccggtcgccaggacctgaatgcttccgggctctgcgtgaattggaaccggtactacaatgtatgtagaactggctccgccaaccctcataaaggagccattaactttgataatataggatacgcctggatcgtgatcttccaggtgattactctcgaaggttgggtggagatcatgtattacgtcatggacgcacactcattttacaactttatctactttattctccttatcattgttggttcatttttcatgatcaacctgtgtttagtagtcattgccacccagttctcagagaccaagcagcgcgagcaccggctgatgttggagcagaggcagcggtacctttcttcgtctactgtagctagctacgcggagcctggcgattgttatgaggagatcttccaatatgtctgtcatatcctgcggaaagctaagcgaagagcgcttggtctgtatcaggctctgcagagtcggagacaggctctgggacccgaagctccggcacctgccaagcccggaccccacgccaaggagccccgtcattaccaattgtgcccccaacattcgccactagatgccacaccacacaccctcgtccagccaatacctgctaccctcgccagcgatcccgctagctgcccctgttgccagcacgaagacggacgcagacccagtgggctcggaagcacggacagcggtcaggagggatctggttcaggcagctctgccggtggcgaagatgaagccgatggtgacggggcaaggagttccgaggacggagccagctccgaactgggtaaagaggaggaagaggaagaacaagcggatggcgctgtttggttgtgcggcgatgtgtggcgagagaccagggctaaactgagggggatagtcgattccaaatactttaacagggggataatgatggcgatcttagtgaacaccgtgagcatgggcatcgagcaccatgagcaggctacagaactgacaaatatcctcgagatatgtaatgtcgtattcacctctatgtttgctctggaaatgatcctcaaactggccgcatttggcctgttcgattatttgcgcaacccttacaatatctttgactccataattgtgatcatcagtatctgggaaattgttgggcaagcagacggcggtttaagcgtcttacgtacctttagactactgagggtcttgaagttggtgaggtttatgccagctctgaggcgccagctagtggtgctgatgaagaccatggacaatgtggctaccttctgcatgctcctgatgctgtttattttcatattttcaatccttggaatgcatatcttcgggtgtaaattctccctcagaactgacaccggtgataccgtacctgaccgcaaaaacttcgattcactcctatgggccattgtgacagtgttccagatccttactcaggaagactggaatgtggtcctgtataatggtatggctagtaccagcccctgggcctcgctgtactttgttgctcttatgactttcggtaactatgttctatttaacctgttggttgctattctcgtggaaggctttcaagccgaaggggatgccaaccgcagttatagtgatgaggatcagtcaagttctaatattgaggagtttgacaagctgcaagagggcctcgattcctccggcgacccaaagttatgcccaatacccatgacacccaacggacatcttgatccctctctgccattgggaggccacctgggccctgccggagctgcaggacctgcgcctagactgtccctacagcccgacccaatgttggtggctctgggatctagaaagtcatcggttatgagcttggggaggatgtcgtacgatcagagatccttgagttcatccagatcctcctactatggcccatgggggaggtccgctgcatgggccagcaggcgcagtagctggaatagcttaaaacataagcctcccagcgccgagcatgaaagcctgcttagcgccgagagagggggtggagccagggtgtgcgaagtcgccgctgatgaaggtccccctcgcgcagcaccacttcataccccgcacgcacatcatatccatcacggccctcatttagcccaccgacatagacatcaccgcagaaccctctcgttagataatcgggacagcgtggacctggcagaactggtgcccgctgtaggcgcacaccctcgggctgcatggcgcgctgctgggcctgcccctgggcacgaagattgtaacgggcgtatgccatcaatagctaaggacgttttcacgaagatgggagatcgaggtgaccgcggtgaagatgaagaagagatcgattacacactgtgtttcagggtaaggaagatgatcgacgtctacaagcctgactggtgtgaagtccgtgaagattggtccgtgtatcttttttcccctgagaatcgcttccgagtgctgtgtcaaaccatcattgcgcataaattgtttgattatgtggtgctagccttcatctttctgaactgtatcaccatcgcactcgagaggccacagattgaggccggatcgacagagaggatcttcctcacggtctctaattacatcttcaccgcaattttcgtcggggagatgaccctaaaagtagtgtcgctggggctgtattttggagaacaggcatacctgaggtcttcttggaacgttcttgatgggttcctcgtcttcgtgtcaatcatcgatattgtggttagcctggctagtgccggaggcgcaaagatcctgggggtgcttagggttcttcggttgctcagaactctgcgacctctcagagttatcagccgcgctcctggactcaaactggtagtggaaacactgatctcttccctcaagcccattggcaacatcgtgctcatctgctgtgcgtttttcatcatcttcggaatcctcggagtccagctgtttaaagggaaattctaccactgtcttggagtcgatacgagaaacataaccaaccgaagcgactgtatggccgcaaattataggtgggtgcatcacaaatataactttgacaacctgggtcaggcgctgatgtctttgtttgtgctggcctcgaaagacggctgggtgaacattatgtacaacggacttgacgctgtggccgtggatcagcagcccgtcaccaaccacaatccctggatgctgctgtatttcatctcctttctactgatagtgagcttttttgtcctgaacatgttcgtcggcgtcgtggttgaaaatttccacaagtgtcggcagcatcaggaggccgaggaggcacggcgacgagaggaaaagagacttagacgcctagaaaagaagcgacggaaggctcaaagactcccttattacgccacctactgccatacacgcctgctgatacacagcatgtgtacctcgcattaccttgacatttttataacatttataatttgtctcaacgtcgtgacaatgagtctggagcactacaaccaaccgacaagcctcgagactgcactgaaatattgcaattacatgtttaccaccgtcttcgtgttggaggctgttctcaaattggtcgcttttggcctgcgacgcttcttcaaagaccgctggaaccagctcgacctggccattgtactcctcagtgtgatgggtataacccttgaagagattgaaatcaatgccgctcttccgatcaatccaacaatcattcggattatgcgcgtgctaagaattgctagagtgctgaagttacttaaaatggccaccggcatgagggctctcctggacaccgtggtccaggccctgccgcaggtcgggaatctcggcctgctgtttatgctcctcttctttatctacgcagccctaggcgttgaattgtttggcaagctagtgtgtaatgatgagaatccctgtgaaggcatgtccagacatgccacattcgaaaacttcggcatggctttcttgacgttattccaggtgagcaccggagacaattggaacggcattatgaaggatactctgagagactgcacgcacgacgaaaggtcgtgcttatcttccctgcagtttgtgtctcctctgtacttcgtcagctttgtcctgaccgctcaatttgtgctgatcaacgtcgtagtagctgtgttaatgaaacacctggacgactcaaataaggaggctcaggaggacgccgagatggacgccgaactggagttagaaatggcccacgggcttggtcctgggcctcggctgcctaccggctctccaggggctccaggcagaggcccaggtggggcaggcggaggcggagacacagaaggtggactgtgtagacggtgctatagccctgcgcaggagaatctgtggctcgatagcgtgtcactgataataaaggatagcctagagggggagctgactattatagacaacctgagtggtagcatttttcaccactatagctctcccgcaggatgcaagaagtgtcaccacgacaaacaggaggtgcagcttgctgaaactgaggcgttttctctcaactctgaccgctcaagttcaattttacttggggacgacctttcactggaggacccgacggcatgtccaccaggacggaaagactcgaagggagagctggaccccccagaacccatgcgggtcggggatcttggagaatgcttttttcccctctctagtaccgctgtttccccggaccccgaaaattttctatgtgaaatggaggagattccgtttaatccggttcggtcttggctgaagcatgattcatcacaggccccacctagcccctttagtcccgatgcgagcagtccgctcctccccatgcccgcagaattttttcacccagccgtctccgccagccagaaaggcccagagaagggcaccggtacaggaacgctcccgaagattgctctgcagggctcttgggcgtccctccggagtcccagggtgaattgtacacttctgagacaggcaacaggcagcgataccagtctggacgctagtccctcatcatcagctggctcattacagaccacattggaggactctttgacactatcagattctccccgacgggctcttgggcctccggcacccgctccaggacctagagctggactatccccagctgccaggagacgtctgagcctgcgcggtcgaggcttgttttcactcagggggttgcgggcacaccagcgctcacactccagcggaggttcaacttcacctgggtgcactcaccacgactctatggatccatcagacgaagagggcagaggaggagccggaggcggaggagccggatcagaacatagcgagacactgtcgagcctgagcctgacttccttattctgcccccctccgcctccgcctgcccctggtctcacacccgctaggaagttctcttctaccagctcactcgccgcaccaggtcgccctcatgcggctgccctggcccacggcctggcacggagtcccagttgggcagcagacagatcgaaggaccctcctggcagggcccctctgccaatgggcctaggccctctcgcccctccaccccagccgctgccgggagaactcgagccgggagacgctgcgagcaaaagaaagagata

SEQ ID NO: 324105 - DNA, 6566 bp, Artificial Sequence
  derived and/or modified sequence
atggccgagagtgcctctccccctagtagtagtgcagcggcacccgcagccgaacctggggttacaaccgagcagcccggaccacggtctccaccttctagtccacccggattggaggaaccacttgacggcgctgacccacacgtaccccaccctgacctagccccaattgcttttttctgtctacgtcagaccacctctcccaggaattggtgtatcaagatggtctgtaacccctggttcgagtgcgttagcatgctggtcattcttctcaattgcgtgacattgggcatgtaccagccgtgtgacgacatggattgcctgtccgatcgctgtaaaattcttcaggtgtttgatgattttatcttcatcttctttgccatggagatggttcttaaaatggttgctctgggcatctttggaaagaagtgctatctgggggatacctggaatcggctagatttttttatcgtgatggcaggaatggtcgagtactccctggaccttcagaatattaacttgtcagccatccgaacagtgagagttctgcggcctctgaaagccattaaccgagtccccagcatgcggattctagttaaccttctccttgatactctgcctatgctgggcaatgtgctgctgctgtgcttctttgtattcttcatctttggcatcattggtgtgcagttatgggccggtctgttgcggaacagatgtttcctggaggagaatttcaccattcagggtgacgtggcactcccaccttattaccagccggaagaagacgacgaaatgcctttcatatgctcactttctggcgacaacggtatcatggggtgccacgagattcccccactgaaagaacaaggccgagagtgttgcttaagtaaggatgatgtctatgattttggcgcaggcaggcaggacctcaacgcctcagggttatgtgtgaattggaaccgatattataacgtctgcaggaccggtagcgctaatcctcacaaaggagcgatcaatttcgacaacattggctatgcctggatcgttatttttcaggtaatcacgctagagggctgggttgaaataatgtattatgtaatggatgctcactccttttataatttcatttattttattctgttgataatcgtaggatcctttttcatgatcaacttgtgcctggttgttattgcgactcagttctccgagacaaaacagagggagcatagactaatgcttgagcagcggcagcgctacctgtcctcgtctacagtggcatcctacgcagaacctggagattgttacgaagagatattccagtacgtctgccacatactccgcaaggctaaacgacgagctcttggtctctatcaagcccttcaatcccggcgacaggctctgggccctgaggcacctgctccggcaaaacccggaccccatgcaaaggagcctaggcactaccagctgtgtcctcagcattctccattggacgctacaccccataccctggttcagccaattcccgcaaccctggctagcgacccagcttcctgcccctgttgtcagcacgaggacggtagacggccaagcggtttaggaagcacagattcaggacaggaggggtcaggcagtggcagttctgccggaggcgaggacgaggccgatggggacggtgccagaagctcagaagacggcgcatccagcgaactgggtaaagaggaagaagaggaagagcaggccgatggcgcagtctggttgtgtggcgacgtgtggagggagacgcgggcaaagctgagggggattgttgatagcaagtactttaaccggggtataatgatggcgattctggtgaatactgtatctatgggaattgaacaccatgagcagcctgaggagttgacaaatatacttgagatctgcaacgtggtatttactagtatgtttgctctggaaatgattttgaagctcgccgctttcggcttgtttgactacctacggaatccatacaacatctttgactccattatagttattatttctatctgggaaatcgtgggtcaggcagacggaggcctctcggtcctaagaacatttcgcctccttagagttctcaagcttgtgcggtttatgcccgctttacgcagacagctcgtggtgttaatgaaaaccatggataacgttgctaccttctgtatgctactgatgttgtttatctttattttctcaattctggggatgcacatctttgggtgtaagttctctctgcgaaccgacactggggacactgtccccgacaggaagaacttcgacagtttgctgtgggcaattgtaaccgttttccagattcttacccaggaggattggaatgtggtcttgtacaacggcatggcctcaacaagcccctgggcgagtctgtactttgtagcgcttatgacattcgggaactacgtgctgttcaatctgctcgtggccatactggttgaagggtttcaggcagagggtgatgccaatcggtcttacagtgacgaggaccaaagttcctctaatattgaggaatttgacaagctccaagaaggtctggactcatccggggaccctaaactgtgtcctatacccatgacgcctaatggccacctggatccaagtctgccgctgggagggcacctcggccctgctggagccgctggccctgctccaagattatctctccagccagatccaatgctagtggccttggggtctaggaagtcaagcgtgatgtcacttggaaggatgtcatacgaccagagatccctgtcatcgagcaggagcagctactacggcccttggggcagatccgccgcttgggctagccgcagaagctcttggaactcactgaagcacaaaccccctagtgccgagcacgagagcctcctgtcagccgaaaggggtggcggagcaagggtatgtgaagtcgcggctgatgaaggcccaccgagggccgcaccgcttcacacacctcatgcccatcacatccaccatggccctcatctggcccatcggcataggcaccacaggcggactctgtcactggataatagagactcagtcgacttggcggaactggtgcccgctgtcggtgctcacccccgagctgcatggagggccgcaggcccagctccaggccacgaggattgtaacgggaggatgccttcaattgccaaagatgttttcactaagatgggggacaggggcgatcgcggtgaggacgaagaggaaatcgattacacgctatgctttagggttcgcaagatgatagatgtatataaaccggactggtgcgaggtacgcgaagactggtcagtgtacctgttttctccagaaaataggttccgggtcctctgtcagacaatcattgcacataagcttttcgattacgtggtactcgcttttatcttcctgaattgtatcacgattgccctggagcgcccacagatagaggcgggttctactgaacgcatttttttaacagtgtcgaattacatttttaccgctatcttcgtgggtgagatgaccttgaaggtagtgagcctgggattatattttggcgaacaggcctacttgagatcttcctggaacgtgctggatggctttctggtgtttgtgtcgataatcgatatcgtggtctccctggcgtcagcaggcggtgccaaaattctaggggtgctgcgtgtactgcgattgctgcggaccctgcgccctctccgcgtaatatcccgggctccaggcctgaaactggttgttgaaaccttaatttcaagcttaaaaccaatcgggaatatagtgctgatatgttgtgctttttttattatcttcggtattcttggtgtgcagctctttaagggcaaattctaccattgtctaggagtggacacccggaatattactaaccgctctgattgcatggcggcaaactatcgctgggtgcaccataagtataacttcgataatttgggccaggccctcatgagcctcttcgtgctggccagtaaggatggatgggtgaacattatgtataacggactcgatgcggtagccgtagaccaacaaccagtgacaaatcataatccctggatgttactgtatttcatatcatttttgcttattgtctcgtttttcgtgcttaatatgttcgtgggggttgtagtcgagaatttccacaagtgccgacagcaccaagaggccgaagaagcaagaaggcgggaggagaagcgcctgaggaggctcgagaagaaacggaggaaagctcagcgtctgccatactacgccacctattgtcatactcggctgttaattcattccatgtgcacaagtcattatctcgatatcttcatcacttttattatttgcctcaacgtggttaccatgtcacttgaacactataatcagcccacttcactcgaaaccgctctaaaatactgtaattacatgttcacgactgttttcgtgctggaggcggtactcaagctggtcgcctttggccttcggagatttttcaaggatagatggaaccagctggatttggcaattgtgctgttgtctgtgatgggaatcacactcgaggaaattgagataaacgccgcactacctattaatcctactatcatccgcattatgagagtgctgcgcatcgctcgtgtgcttaagttgcttaaaatggccacaggaatgcgcgctctgctcgacacggtcgttcaggcattgccacaagtgggaaatcttgggctcctattcatgctgttgtttttcatctatgccgctctcggcgtcgagctgttcgggaaactggtgtgtaatgatgaaaatccttgtgagggaatgagcagacacgctacctttgaaaacttcggcatggctttcctcactctgtttcaggtctcaacaggagacaactggaacggcatcatgaaggacacacttcgtgattgtacccacgatgagcgctcctgtctatccagtttgcagtttgtgagcccgctctattttgtatcgtttgttctgactgcccagtttgtgcttattaacgtggtagtagcggtattaatgaagcatctggacgatagcaacaaggaggctcaagaagatgccgagatggacgctgagcttgagctcgagatggcccacggcctgggcccaggccctaggctgcctactggctctcctggcgcaccaggcaggggccctggcggtgccggtggcggtggcgacactgagggaggactttgtaggagatgttactcaccggcacaggagaatctgtggttggatagcgtgtctttgataattaaggacagcctggaaggggaactcacgattattgacaacctgagtggatctatctttcaccattatagttcccccgcagggtgtaagaaatgccaccatgataagcaggaagttcagctggcagaaaccgaagcattttctctcaacagtgaccgatcctcgtccatattactgggcgacgacctatccttagaggatcctaccgcttgtccaccaggcaggaaggactcgaagggcgagctcgatcctcctgagccaatgcgggtcggtgatcttggcgagtgcttctttcccctgagctctacagccgtgtctcccgatcccgaaaactttttgtgtgaaatggaagaaatccccttcaaccctgtgagatcctggcttaaacatgattctagccaggccccaccatccccattcagcccggatgcaagctcaccactccttcccatgcctgctgagttctttcaccccgctgtttccgctagccagaagggcccagagaaaggcacaggcaccgggactctgcccaaaattgctttgcagggaagctgggcctccctgaggtcacctcgcgtgaactgtacactcctccgccaagctacaggttccgatactagcttggatgccagtccatctagtagtgcaggaagcctgcagactacactagaggatagcctcacgttgtcagacagcccgaggagggcactggggccaccagccccagcccctggaccaagagctggattgtcccccgctgcgcgtcgtcggctctccttgagggggagggggctgtttagcctgagggggttaagggcccaccagagaagtcactcctccggaggtagtacatcaccaggctgcacgcaccatgactccatggatccttctgatgaggaaggcagaggcggagctggtggcggaggcgcaggctcagaacactctgagacgctcagttctctgagcctcaccagtctcttttgtccccctccacccccacccgcaccagggctgacgcctgctaggaaattctccagtactagcagcctggctgccccagggcgaccccacgctgccgcactggctcatgggctggcaagaagtccttcttgggctgccgacaggtctaaagatccaccgggacgggctcccctgcctatgggcctcgggcctctggcccctccgcctcagcctctgcctggagaattggagccgggtgacgctgctagcaagagaaaaaggta

SEQ ID NO: 324106 - DNA, 5945 bp, Artificial Sequence
  derived and/or modified sequence
atggcggagagcgcctcaccgcctagttcatcagctgcggctcccgcagcggaaccaggcgtgaccactgagcaacccggtcctaggagcccacctagctcaccacccggattggaagaacccttggacggggctgatccacatgtaccccatccagatctggccccaatagcgttcttctgcttaagacagaccacgtccccacgtaattggtgcattaagatggtctgcaatccgtggtttgaatgtgtctcaatgcttgtgatactgctcaattgcgtaacactcggcatgtatcagccctgcgacgatatggactgtctgtctgaccgatgcaaaattctccaggtctttgacgatttcatatttatttttttcgcaatggagatggtgttaaaaatggtggcacttggaatctttggtaagaaatgttatctcggagatacatggaatcggctggattttttcattgtaatggcaggtatggttgaatattccctggacctgcagaatattaatctctctgctatccggactgtccgggtgttacgcccactgaaagctatcaacagagtgcccagcatgcgaatcctagtcaacctcctgctggacaccctgcctatgttggggaacgttctgctactctgttttttcgtatttttcatatttggcatcattggcgtgcagctctgggccggattgttgcgtaatcggtgttttttagaggaaaacttcaccattcagggagatgtcgcacttcccccatattatcagcctgaggaggatgatgagatgccatttatttgctcactttctggtgataacgggattatgggctgtcacgaaattccaccgctgaaggagcagggtcgggaatgttgtctttccaaagacgatgtatatgactttggcgcaggacgccaagatctgaacgccagcggactctgtgtgaattggaatcgctattacaacgtctgcaggaccggctcagctaatccacacaaaggagccattaacttcgacaatatcggctacgcttggattgtgatcttccaagtgattaccctcgagggatgggtggaaattatgtattatgttatggatgctcacagcttctacaattttatatacttcatcctccttattattgtcgggagtttctttatgatcaatctgtgcctggtggtgatcgcaacgcagttctccgagacaaaacagcgggagcacaggcttatgctcgagcagcgtcagagatatctgagctcatctactgtggctagttacgcggagcccggagattgttatgaagagatctttcagtacgtttgtcatattttgcgaaaggcaaaacgacgcgctctcggcctataccaagccctgcaatctcgtagacaggctctaggaccagaggccccagcccctgccaagccagggccacatgccaaggaacctcgtcactaccaactgtgtccccagcactccccattagatgctacaccccataccctagtacagccaatcccggcaacgctggcgtccgatccagcctcgtgtccctgctgtcagcacgaagatggccgaagaccctccggactcggcagcacagatagcgggcaggagggcagcgggagcggatcaagcgccggaggggaagacgaagctgacggtgacggagcgagatctagtgaggatggcgctagctccgagttggggaaggaggaggaggaggaagagcaggctgacggggctgtgtggctttgcggtgacgtttggagggagaccagagccaaactacgtggcatcgtggactccaagtacttcaaccgtggcatcatgatggcgattttagtgaacaccgtgagcatggggatagaacatcatgagcaacctgaggagttgacaaatatattggaaatctgcaacgtcgtgttcaccagtatgttcgccttggagatgatactgaagttagcagcctttggcctatttgattaccttcgaaatccctacaacatctttgacagtatcattgtgattatctccatctgggaaattgtggggcaggcggatggcggactcagcgtgttaaggaccttcagattgctacgcgtcttgaaactagtgcgcttcatgcccgcactgagaaggcagttagtcgttctcatgaagacgatggacaacgtggctactttctgtatgctattaatgctgtttattttcattttttccatcctcggcatgcatattttcggatgcaaattcagtcttcggaccgatactggagacaccgtgcccgatcgcaaaaatttcgactccctcctttgggccatcgtgaccgtgttccagatcctgactcaggaagactggaacgtcgttttgtacaacggtatggcgtcaacctccccatgggcaagtctatattttgtcgccctgatgacattcggcaactacgtgctcttcaacctactcgtggccattctggtggagggcttccaggcagaaggcgacgcgaaccgctcttactctgacgaagatcagagtagctccaatatagaggaattcgacaaattgcaggaagggctggactcctctggcgatcccaagctgtgccctatcccaatgacgcccaatgggcaccttgatccttccctaccattgggcggacacctggggcctgcgggagccgcaggaccagcccctaggcttagtttacagcctgatcccatgttggtggcactcggctccaggaaatcaagtgtgatgtctctggggaggatgagttacgatcagcgctccttgtcctcctcccgaagtagttactatggaccttggggaaggtctgctgcctgggcctcacggcgttcctcttggaattctctgaaacacaagcccccttccgccgaacacgagtcactcctatccgccgaaaggggaggcggtgcacgcgtgtgtgaagttgccgcagacgagggacccccacgggctgcaccactgcacaccccacacgcacaccacatccaccatgggccacacctcgcccacagacaccgccaccatcggagaacactgagcctcgataatcgggatagcgtggatctcgcagagctagttcctgctgtgggcgctcatcctagggcagcctggagagccgcaggtcccgcacccggacacgaggattgtaatggacgtatgccttcaatagctaaagacgtgttcacaaaaatgggcgatagaggcgaccgcggagaggacgaggaagagatcgactatacgctgtgcttcagggtgcgcaagatgatagatgtgtataagcccgactggtgtgaggtgagagaggactggtcggtgtatctcttcagcccagaaaaccggttccgggtgctgtgtcagacgatcattgcccacaagctgttcgattatgtcgtgcttgcctttatcttcttgaattgcattaccatagcgctggagcgtccccagatcgaagccggtagcacagagaggatctttctgactgtatccaattacatcttcacagcaatcttcgtgggggaaatgacgttaaaggtggtctccctgggtctctattttggggagcaggcttatctcaggtcttcttggaatgttcttgatggttttctggtgttcgtgagcattattgacatcgtagtgtccttggcctcggctggaggggctaagatcctcggagtgctccgggtacttcgactgcttcgtaccctcaggcctttgcgtgtgatcagtcgggcaccagggctgaaactcgtcgtggaaactctgatctcttccctgaaacctataggcaacattgttctaatttgttgtgctttcttcatcatttttggtatcttaggcgtccagctcttcaaaggcaagttctatcattgcctgggagtggacacgagaaatattactaatcgctctgactgcatggcggctaactatagatgggtccatcacaagtacaacttcgataatctgggtcaggcattgatgtcgttatttgtgctggcctcaaaggacggatgggtaaacatcatgtacaacggtctggatgcagttgctgtggatcagcagccagttaccaaccataatccctggatgctcctctattttatctccttcctgttgatcgtcagcttctttgttctgaacatgtttgtgggagtggttgtcgagaacttccacaagtgtagacagcatcaggaggccgaagaggcccgacgcagggaggagaagcggttgcgcaggcttgagaaaaagcgaagaaaggcccagcgactgccatactacgcaacgtactgccacacccgactgctgatacatagcatgtgcacctcccattatctcgacatctttattactttcatcatctgcctcaacgtggtcacaatgagcctggagcactataaccagccaacgagtctggaaacagccctcaaatattgtaattatatgttcaccacagtgttcgtgctggaggcagtgctgaaactggtggcgttcgggctgcgcagattcttcaaggatcggtggaatcaactcgacctcgctatagtcttattgtcagtgatgggaatcacattggaagagattgaaattaacgccgctttgcctatcaaccccaccatcattcggattatgagagtgcttcggatcgcccgtgtcctgaagctgctcaaaatggccaccgggatgcgcgctctgttagataccgtcgttcaggccctgccccaagtggggaacctaggtctcctcttcatgctgttattctttatttacgcagctctgggcgtggaattattcggaaagttagtctgcaacgacgaaaacccctgtgaaggcatgtcccggcatgctaccttcgagaactttggcatggcattcctcacgctttttcaggtgtcaactggtgacaactggaatggcatcatgaaggatacgttgcgtgattgcactcatgacgaaagatcttgcttaagcagtctgcagttcgtgtctccattatattttgtctctttcgtacttacggcccaattcgtcctgatcaacgtagttgttgctgtcctcatgaaacatctggacgacagcaataaggaggcccaggaggatgcggaaatggacgcagaattggaactggaaatggcccatggcctcgggccaggccctcggctgcctacaggatctccaggagcgcctggaagaggtccaggcggagctggaggcggaggagacaccgagggtggcctgtgtcgcaggtgctatagccccgcacaggaaaatctttggctcgatagcgtgagcctgattattaaagactctctagagggggaactcactataatcgataatctcagtggatcaatctttcatcattatagctctcccgctggttgcaagaagtgtcaccatgacaagcaggaggtgcaactggctgaaactgaagcattcagtctgaattcggatagaagcagtagtatcttgttaggagatgacctgtctcttgaggacccaaccgcctgccctccagggagaaaggactccaagggagaactggacccacctgagcctatgagggtgggagatctgggagagtgtttttttcctctttcatctactgccgtatctcccgaccccgaaaatttcttgtgcgagatggaagagatcccgttcaatccagtgaggtcttggttgaagcacgattcctcccaggcccctccatcacctttcagtccggacgcaagttctccgttactgcccatgcccgcagagttttttcatccagccgtgtctgcctcccagaaaggacccgagaagggaaccggcactggcactttgccaaagattgcactgcagggcagttgggctagcctcagatcaccgcgtgtcaactgcactctgcttcggcaggttcctaccccacctcgaccata

SEQ ID NO: 324107 - DNA, 9892 bp, Artificial Sequence
  derived and/or modified sequence
atggctgagagcgcctccccgccctcctcatctgcagcagccccagccgctgagccaggagtcaccacggagcagcccggaccccggagccccccatcctccccgccaggcctggaggagcctctggatggagctgatcctcatgtcccacacccagacctggcgcctattgccttcttctgcctgcgacagaccaccagcccccggaactggtgcatcaagatggccactgggccttggtggtggtgcctgtgcatgctggtgatcctgctgaactgcgtgacacttggcatgtaccagccgtgcgacgacatggactgcctgtccgaccgctgcaagatcctgcaggtctttgatgacttcatctttatcttctttgccatggagatggtgctcaagatggtggccctggggatttttggcaagaagtgctacctcggggacacatggaaccgcctggatttcttcatcgtcatggcagggatggtcgagtactccctggaccttcagaacatcaacctgtcagccatccgcaccgtgcgcgtcctgaggcccctcaaagccatcaaccgcgtgcccagtatgcggatcctggtgaacctgctcctggacacactgcccatgctggggaatgtcctgctgctctgcttctttgtcttcttcatctttggcatcataggtgtgcagctctgggcgggcctgctgcgtaaccgctgcttcctggaggagaacttcaccatacaaggggatgtggccttgcccccatactaccagccggaggaggatgatgagatgcccttcatctgctccctgtcgggcgacaatgggataatgggctgccatgagatccccccgctcaaggagcagggccgtgagtgctgcctgtccaaggacgacgtctacgactttggggcggggcgccaggacctcaatgccagcggcctctgtgtcaactggaaccgttactacaatgtgtgccgcacgggcagcgccaacccccacaagggtgccatcaactttgacaacatcggttatgcttggattgtcatcttccaggtgatcactctggaaggctgggtggagatcatgtactacgtgatggatgctcactccttctacaacttcatctacttcatcctgcttatcatagtgggctccttcttcatgatcaacctgtgcctcgttgtcatagcgacccagttctcggagaccaagcaacgggagcaccggctgatgctggagcagcggcagcgctacctgtcctccagcacggtggccagctacgccgagcctggcgactgctacgaggagatcttccagtatgtctgccacatcctgcgcaaggccaagcgccgcgccctgggcctctaccaggccctgcagagccggcgccaggccctgggcccggaggccccggcccccgccaaacctgggccccacgccaaggagccccggcactaccagctgtgcccgcaacatagccccctggatgcgacgccccacaccctggtgcagcccatccccgccacgctggcttccgatcccgccagctgcccttgctgccagcatgaggacggccggcggccctcgggcctgggcagcaccgactcgggccaggagggctcgggctccgggagctccgctggtggcgaggacgaggcggatggggacggggcccggagcagcgaggacggagcctcctcagaactggggaaggaggaggaggaggaggagcaggcggatggggcggtctggctgtgcggggatgtgtggcgggagacgcgagccaagctgcgcggcatcgtggacagcaagtacttcaaccggggcatcatgatggccatcctggtcaacaccgtcagcatgggcatcgagcaccacgagcaggccacagagctgaccaacatcctggagatctgcaatgtggtcttcaccagcatgtttgccctggagatgatcctgaagctggctgcatttgggctcttcgactacctgcgtaacccctacaacatcttcgacagcatcattgtcatcatcagcatctgggagattgtggggcaggcggacggtgggctgtcggtgctgcggaccttccggctgctgcgcgtgctgaaactggtgcgcttcatgcctgccctgcggcgccagctcgtggtgctcatgaagaccatggacaacgtggccaccttctgcatgctgctcatgctcttcatcttcatcttcagcatccttgggatgcatatttttggctgcaagttcagcctccgcacggacactggagacacggtgcccgacaggaagaacttcgactccctgctgtgggccatcgtcactgtgttccagatcctcacccaggaggactggaacgtcgttctctacaatggcatggcctccacttctccctgggcctccctctactttgtcgccctcatgaccttcggcaactatgtgctcttcaacctgctggtggccatcctggtggagggcttccaggcggagggtgacgccaatcgctcctactcggacgaggaccagagctcatccaacatagaagagtttgataagctccaggaaggcctggacagcagcggagatcccaagctctgcccaatccccatgacccccaatgggcacctggaccccagtctcccactgggtgggcacctaggtcctgctggggctgcgggacctgccccccgactctcactgcagccggaccccatgctggtggccctgggctcccgaaagagcagtgtcatgtctctagggaggatgagctatgaccagcgctccctgtccagctcccggagctcctactacgggccatggggccgcagcgcggcctgggccagccgtcgctccagctggaacagcctcaagcacaagccgccgtcggcggagcatgagtccctgctctctgcggagcgcggcggcggcgcccgggtctgcgaggttgccgcggacgaggggccgccgcgggccgcacccctgcacaccccacacgcccaccacattcatcacgggccccatctggcgcaccgccaccgccaccaccgccggacgctgtccctcgacaacagggactcggtggacctggccgagctggtgcccgcggtgggcgcccacccccgggccgcctggagggcggcaggcccggcccccgggcatgaggactgcaatggcaggatgcccagcatcgccaaagacgtcttcaccaagatgggcgaccgcggggatcgcggggaggatgaggaggaaatcgactacaccctgtgcttccgcgtccgcaagatgatcgacgtctataagcccgactggtgcgaggtccgcgaagactggtctgtctacctcttctctcccgagaacaggttccgggtcctgtgtcagaccattattgcccacaaactcttcgactacgtcgtcctggccttcatctttctcaactgcatcaccatcgccctggagcggcctcagatcgaggccggcagcaccgaacgcatctttctcaccgtgtccaactacatcttcacggccatcttcgtgggcgagatgacattgaaggtagtctcgctgggcctgtacttcggcgagcaggcgtacctacgcagcagctggaacgtgctggatggctttcttgtcttcgtgtccatcatcgacatcgtggtgtccctggcctcagccgggggagccaagatcttgggggtcctccgagtcttgcggctcctgcgcaccctacgccccctgcgtgtcatcagccgggcgccgggcctgaagctggtggtggagacactcatctcctccctcaagcccatcggcaacatcgtgctcatctgctgtgccttcttcatcatctttggcatcctgggagtgcagctcttcaagggcaagttctaccactgtctgggcgtggacacccgcaacatcaccaaccgctcggactgcatggccgccaactaccgctgggtccatcacaaatacaacttcgacaacctgggccaggctctgatgtccctctttgtcctggcatccaaggatggttgggtgaacatcatgtacaatggactggatgctgttgctgtggaccagcagcctgtgaccaaccacaacccctggatgctgctgtacttcatctccttcctgctcatcgtcagcttctttgtgctcaacatgtttgtgggtgtcgtggtggagaacttccacaagtgccggcagcaccaggaggctgaagaggcacggcggcgtgaggagaagcggctgcggcgcctggagaagaagcgccggaaggcccagcggctgccctactatgccacctattgtcacacccggctgctcatccactccatgtgcaccagccactacctggacatcttcatcaccttcatcatctgcctcaacgtggtcaccatgtccctggagcactacaatcagcccacgtccctggagacagccctcaagtactgcaactatatgttcaccactgtctttgtgctggaggctgtgctgaagctggtggcatttggtctgaggcgcttcttcaaggaccgatggaaccagctggacctggccattgtgctactgtcagtcatgggcatcaccctggaggagatcgagatcaatgcggccctgcccatcaatcccaccatcatccgcatcatgagggttctgcgcattgcccgagtgctgaagctgttgaagatggccacaggaatgcgggccctgctggacacggtggtgcaagctttgccccaggtgggcaacctgggcctcctcttcatgctgctcttcttcatctatgctgctctcggggtggagctctttgggaagctggtctgcaacgacgagaacccgtgcgagggcatgagccggcatgccaccttcgagaacttcggcatggccttcctcacactcttccaggtctccacgggtgacaactggaacgggatcatgaaggacacgctgcgggactgcacccacgacgagcgcagctgcctgagcagcctgcagtttgtgtcgccgctgtacttcgtgagcttcgtgctcaccgcgcagttcgtgctcatcaacgtggtggtggctgtgctcatgaagcacctggacgacagcaacaaggaggcgcaggaggacgccgagatggatgccgagctcgagctggagatggcccatggcctgggccctggcccgaggctgcctaccggctccccgggcgcccctggccgagggccgggaggggcgggcggcgggggcgacaccgagggcggcttgtgccggcgctgctactcgcctgcccaggagaacctgtggctggacagcgtctctttaatcatcaaggactccttggagggggagctgaccatcatcgacaacctgtcgggctccatcttccaccactactcctcgcctgccggctgcaagaagtgtcaccacgacaagcaagaggtgcagctggctgagacggaggccttctccctgaactcagacaggtcctcgtccatcctgctgggtgacgacctgagtctcgaggaccccacagcctgcccacctggccgcaaagacagcaagggtgagctggacccacctgagcccatgcgtgtgggagacctgggcgaatgcttcttccccttgtcctctacggccgtctcgccggatccagagaacttcctgtgtgagatggaggagatcccattcaaccctgtccggtcctggctgaaacatgacagcagtcaagcacccccaagtcccttctccccggatgcctccagccctctcctgcccatgccagccgagttcttccaccctgcagtgtctgccagccagaaaggcccagaaaagggcactggcactggaaccctccccaagattgcgctgcagggctcctgggcatctctgcggtcaccaagggtcaactgtaccctcctccggcaggccaccgggagcgacacgtcgctggacgccagccccagcagctccgcgggcagcctgcagaccacgctcgaggacagcctgaccctgagcgacagcccccggcgtgccctggggccgcccgcgcctgctccaggaccccgggccggcctgtcccccgccgctcgccgccgcctgagcctgcgcggccggggcctcttcagcctgcgggggctgcgggcgcatcagcgcagccacagcagcgggggctccaccagcccgggctgcacccaccacgactccatggacccctcggacgaggagggccgcggtggcgcgggcggcgggggcgcgggcagcgagcactcggagaccctcagcagcctctcgctcacctccctcttctgcccgccgcccccgccgccagcccccggcctcacgcccgccaggaagttcagcagcaccagcagcctggccgcccccggccgcccccacgccgccgccctggcccacggcctggcccggagcccctcgtgggccgcggaccgcagcaaggacccccccggccgggcaccgctgcccatgggcctgggccccttggcgcccccgccgcaaccgctccccggagagctggagccgggagacgccgccagcaagaggaagagatgagggtcgcaggggcccccggccgcccaccgcccgccccgtctcaccttctttacctcaggagccaggagcagacagcaatacttcgtccacacctgggatcgcgcagggcccgcagggcacaggcgcccgacagccgggctgagcggagtctgggttagccaggcctgcgtggcccatggtggcccttccagtgcatatacatacatatatatatatatatgcatatatatatatatatatatatatatgtgtatacacacacacatagacagacatatatatatatatttattttttttactgagagcttatgacttccagaaagtgctaaaggtgggaggtgggccagggcctggacggggcttttgtctgatgctctgggattctggccagacccaccccagggcacatgtcctgcgggggcgtcccagctgtgttttttgatgtctcctccctggttaagagtagcttggagaggaccctcaggcctctgagggcaccaggccctggagaagaggtgcaattcagggtgtgtgtgtgttttttttcctttaaagaagaaacgctgctaagatcccacgtggctcccacgtgtcggggtgtctgtcctgtcatcctgactgtctcgttattgtgaagtctttcgtagacaccccagagcacacacatccccttagtccaccggttagatgtctctctttagaaaaatcaggggtgagtagctgtgtttccttaggcctggggtaggggatggagagcagctccaaggctgagctggggctctggccccaggtgaggtccccagctcctgagcacttctgagggggtgggttccacccccaggagggcgggggtgggtggagcaggagtggaggcagcctgcagaggaagggtgcgggagactgagccggcagtggcttgcttggaggggctagggtacccgcctggtctcggctggctccagctgccctgcaggtgcccctgggctcaggtagttagttgttcagccactaatgccttttatcccccatatgggcgctgagctgtggctgttcctggacactgtgctgtccccgtcctgagcaactatgcccccgccccagtaggttcaaggcaaagcagctctgaccgaattctaggcaggggtgggggcacctgcctgggccctgggtccagccgcatccccatgcccagcctttcgcgtcacctggaggccacatcttcccaccccacctgccagcccctgtctctcctccccgctgcccctaactgcagctcagctttcactatagcagtgcttcccaaacgggttctagacttgggtgtttgatttgaagagttacgcatttatttcactatttattgggaaaaaaatgcattgaacccgtgatttcacagacattttgcttaggtcaaggctactttttaaaaagggagtgactttcatgaagtcagtttgaagaaggaggttgggagcatgttggtggcagtgatctggagaggctgcaggggccacgagtttgcagatgctgtacttcagcaataaccttgcctttgctaagaccccctccgagggcttcaggggggcctgccaagggggggccttgttcttgttcccaaactctgacttggaagaactcagcttgtggccgggctggtgagggtgtggggtgcgcccttcccttttgggctgagggagagggggccgggaggggttgtcaagcccacccgggaaactgagccctggagaggggaagcagccagcccaggatgcttcagggccctggcagcaaagaagctggggtggtgtggagggccctactccacaccctagagctgtgatgctgagcaaggtgcctgtggcggaaggaactgcccagtcctccctgggggcaggtagacctgtggggatggctcggtccaagcccaacactgcccgctccagagagcctcagccctgcctccctttccacagaggtggttttatgtggaacgaggtaccttgtctggggaagaagtggagctgggcaggcttgactgctcctggctgaccctgagctctcgcagttggagggaagcagacagacttgactttttgcaagtccgcgtgttgctggagggacacgtgtattggagcccagaagaggggctgtgtggcctgggaataccatgtggaaggttgggcttcaagttaacaggatcagacaccagtcaagcagcctcaggtcatcttgcgactccactgagcagcctttcctgttgtcacatgggttcagagcagctgagcagggaacacgtcctaggcaggtctgacgtgaaacctccccttaccctgaaccgtgtgactctgcaagcagacacctcgaggcaggtgttctaggcaaagggatgggcatgagcgaaggctccagggtccacagagcagggagtgtggagaaggtggaagagctgagctcagaggcagagaagctccttgcagggagcactgggagatggcctggcccgtcccaggctcctggaggccccacctgccgatcccaggcacttgaccttgttcctgtgggtgacagagatgagaaccagggaagctgtgatccactggccaggacaagtcaacatgggtgagggttgggcaaagggcccttccttcctccccaaccctgtggtctggggccatggcctcaggcttgtgtctatcacaaaagcacaaacttgccctaacccacatgggcctggctgtggggaaagtggggacccaggtccctgagctgtctgctgggctccgtagagcggtggtgggcaggcaccttggcatctgtgcagagacggcccagtctggccaaatcctcttcctctcccctgctctaccttctccggcaccaggcagccccttaaaggaggacaaagtgtgtaaagcccgtctgctgtcttcccccaaatcctcagctcagagccttccgcttccagggccaaccccagccccgtttgctgcgttgtgtaagggcttggggtcttagaagctgctctttagcccagatacacatactcttttttgtctttgtgcaataatcagtgttcctggcagagcctgggccaagctgcagcctactgaggaggcagaggccacctcctccagaaagccctcggcctgggccgccgccgtgactctagcactctcagtcgctgtacagtttctatggtgtgaatgaacttccctcctagttgctgatggcgctggtacctgctggcccatggcccgggtgtagagaaaccaagcggcagccaccaccagtgttgttttgaataaaagcccagaagcctattt

SEQ ID NO: 324108 - DNA, 9892 bp, Artificial Sequence
  derived and/or modified sequence
atggctgagagcgcctccccgccctcctcatctgcagcagccccagccgctgagccaggagtcaccacggagcagcccggaccccggagccccccatcctccccgccaggcctggaggagcctctggatggagctgatcctcatgtcccacacccagacctggcgcctattgccttcttctgcctgcgacagaccaccagcccccggaactggtgcatcaagatggtgtgcaacccgtggtttgaatgtgtcagcatgctggtgatcctgctgaactgcgtgacacttggcatgtaccagccgtgcgacgacatggactgcctgtccgaccgctgcaagatcctgcaggtctttgatgacttcatctttatcttctttgccatggagatggtgctcaagatggtggccctggggatttttggcaagaagtgctacctcggggacacatggaaccgcctggatttcttcatcgtcatggcagggatggtcgagtactccctggaccttcagaacatcaacctgtcagccatccgcaccgtgcgcgtcctgaggcccctcaaagccatcaaccgcgtgcccagtatgcggatcctggtgaacctgctcctggacacactgcccatgctggggaatgtcctgctgctctgcttctttgtcttcttcatctttggcatcataggtgtgcagctctgggcgggcctgctgcgtaaccgctgcttcctggaggagaacttcaccatacaaggggatgtggccttgcccccatactaccagccggaggaggatgatgagatgcccttcatctgctccctgtcgggcgacaatgggataatgggctgccatgagatccccccgctcaaggagcagggccgtgagtgctgcctgtccaaggacgacgtctacgactttggggcggggcgccaggacctcaatgccagcggcctctgtgtcaactggaaccgttactacaatgtgtgccgcacgggcagcgccaacccccacaagggtgccatcaactttgacaacatcggttatgcttggattgtcatcttccaggtgatcactctggaaggctgggtggagatcatgtactacgtgatggatgctcactccttctacaacttcatctacttcatcctgcttatcatagtgggctccttcttcatgatcaacctgtgcctcgttgtcatagcgacccagttctcggagaccaagcaacgggagcaccggctgatgctggagcagcggcagcgctacctgtcctccagcacggtggccagctacgccgagcctggcgactgctacgaggagatcttccagtatgtctgccacatcctgcgcaaggccaagcgccgcgccctgggcctctaccaggccctgcagagccggcgccaggccctgggcccggaggccccggcccccgccaaacctgggccccacgccaaggagccccggcactaccagctgtgcccgcaacatagccccctggatgcgacgccccacaccctggtgcagcccatccccgccacgctggcttccgatcccgccagctgcccttgctgccagcatgaggacggccggcggccctcgggcctgggcagcaccgactcgggccaggagggctcgggctccgggagctccgctggtggcgaggacgaggcggatggggacggggcccggagcagcgaggacggagcctcctcagaactggggaaggaggaggaggaggaggagcaggcggatggggcggtctggctgtgcggggatgtgtggcgggagacgcgagccaagctgcgcggcatcgtggacagcaagtacttcaaccggggcatcatgatggccatcctggtcaacaccgtcagcatgggcatcgagcaccacgagcagccggaggagctgaccaacatcctggagatctgcaatgtggtcttcaccagcatgtttgccctggagatgatcctgaagctggctgcatttgggctcttcgactacctgcgtaacccctacaacatcttcgacagcatcattgtcatcatcagcatctgggagattgtggggcaggcggacggtgggctgtcggtgctgcggaccttccggctgctgcgcgtgctgaaactggtgcgcttcatgcctgccctgcggcgccagctcgtggtgctcatgaagaccatggacaacgtggccaccttctgcatgctgctcatgctcttcatcttcatcttcagcatccttgggatgcatatttttggctgcaagttcagcctccgcacggacactggagacacggtgcccgacaggaagaacttcgactccctgctgtgggccatcgtcactgtgttccagatcctcacccaggaggactggaacgtcgttctctacaatggcatggcctccacttctccctgggcctccctctactttgtcgccctcatgaccttcggcaactatgtgctcttcaacctgctggtggccatcctggtggagggcttccaggcggagggtgacgccaatcgctcctactcggacgaggaccagagctcatccaacatagaagagtttgataagctccaggaaggcctggacagcagcggagatcccaagctctgcccaatccccatgacccccaatgggcacctggaccccagtctcccactgggtgggcacctaggtcctgctggggctgcgggacctgccccccgactctcactgcagccggaccccatgctggtggccctgggctcccgaaagagcagtgtcatgtctctagggaggatgagctatgaccagcgctccctgtccagctcccggagctcctactacgggccatggggccgcagcgcggcctgggccagccgtcgctccagctggaacagcctcaagcacaagccgccgtcggcggagcatgagtccctgctctctgcggagcgcggcggcggcgcccgggtctgcgaggttgccgcggacgaggggccgccgcgggccgcacccctgcacaccccacacgcccaccacattcatcacgggccccatctggcgcaccgccaccgccaccaccgccggacgctgtccctcgacaacagggactcggtggacctggccgagctggtgcccgcggtgggcgcccacccccgggccgcctggagggcggcaggcccggcccccgggcatgaggactgcaatggcaggatgcccagcatcgccaaagacgtcttcaccaagatgggcgaccgcggggatcgcggggaggatgaggaggaaatcgactacaccctgtgcttccgcgtccgcaagatgatcgacgtctataagcccgactggtgcgaggtccgcgaagactggtctgtctacctcttctctcccgagaacaggttccgggtcctgtgtcagaccattattgcccacaaactcttcgactacgtcgtcctggccttcatctttctcaactgcatcaccatcgccctggagcggcctcagatcgaggccggcagcaccgaacgcatctttctcaccgtgtccaactacatcttcacggccatcttcgtgggcgagatgacattgaaggtagtctcgctgggcctgtacttcggcgagcaggcgtacctacgcagcagctggaacgtgctggatggctttcttgtcttcgtgtccatcatcgacatcgtggtgtccctggcctcagccgggggagccaagatcttgggggtcctccgagtcttgcggctcctgcgcaccctacgccccctgcgtgtcatcagccgggcgccgggcctgaagctggtggtggagacactcatctcctccctcaagcccatcggcaacatcgtgctcatctgctgtgccttcttcatcatctttggcatcctgggagtgcagctcttcaagggcaagttctaccactgtctgggcgtggacacccgcaacatcaccaaccgctcggactgcatggccgccaactaccgctgggtccatcacaaatacaacttcgacaacctgggccaggctctgatgtccctctttgtcctggcatccaaggatggttgggtgaacatcatgtacaatggactggatgctgttgctgtggaccagcagcctgtgaccaaccacaacccctggatgctgctgtacttcatctccttcctgctcatcgtcagcttctttgtgctcaacatgtttgtgggtgtcgtggtggagaacttccacaagtgccggcagcaccaggaggctgaagaggcacggcggcgtgaggagaagcggctgcggcgcctggagaagaagcgccggaaggcccagcggctgccctactatgccacctattgtcacacccggctgctcatccactccatgtgcaccagccactacctggacatcttcatcaccttcatcatctgcctcaacgtggtcaccatgtccctggagcactacaatcagcccacgtccctggagacagccctcaagtactgcaactatatgttcaccactgtctttgtgctggaggctgtgctgaagctggtggcatttggtctgaggcgcttcttcaaggaccgatggaaccagctggacctggccattgtgctactgtcagtcatgggcatcaccctggaggagatcgagatcaatgcggccctgcccatcaatcccaccatcatccgcatcatgagggttctgcgcattgcccgagtgctgaagctgttgaagatggccacaggaatgcgggccctgctggacacggtggtgcaagctttgccccaggtgggcaacctgggcctcctcttcatgctgctcttcttcatctatgctgctctcggggtggagctctttgggaagctggtctgcaacgacgagaacccgtgcgagggcatgagccggcatgccaccttcgagaacttcggcatggccttcctcacactcttccaggtctccacgggtgacaactggaacgggatcatgaaggacacgctgcgggactgcacccacgacgagcgcagctgcctgagcagcctgcagtttgtgtcgccgctgtacttcgtgagcttcgtgctcaccgcgcagttcgtgctcatcaacgtggtggtggctgtgctcatgaagcacctggacgacagcaacaaggaggcgcaggaggacgccgagatggatgccgagctcgagctggagatggcccatggcctgggccctggcccgaggctgcctaccggctccccgggcgcccctggccgagggccgggaggggcgggcggcgggggcgacaccgagggcggcttgtgccggcgctgctactcgcctgcccaggagaacctgtggctggacagcgtctctttaatcatcaaggactccttggagggggagctgaccatcatcgacaacctgtcgggctccatcttccaccactactcctcgcctgccggctgcaagaagtgtcaccacgacaagcaagaggtgcagctggctgagacggaggccttctccctgaactcagacaggtcctcgtccatcctgctgggtgacgacctgagtctcgaggaccccacagcctgcccacctggccgcaaagacagcaagggtgagctggacccacctgagcccatgcgtgtgggagacctgggcgaatgcttcttccccttgtcctctacggccgtctcgccggatccagagaacttcctgtgtgagatggaggagatcccattcaaccctgtccggtcctggctgaaacatgacagcagtcaagcacccccaagtcccttctccccggatgcctccagccctctcctgcccatgccagccgagttcttccaccctgcagtgtctgccagccagaaaggcccagaaaagggcactggcactggaaccctccccaagattgcgctgcagggctcctgggcatctctgcggtcaccaagggtcaactgtaccctcctccggcaggccaccgggagcgacacgtcgctggacgccagccccagcagctccgcgggcagcctgcagaccacgctcgaggacagcctgaccctgagcgacagcccccggcgtgccctggggccgcccgcgcctgctccaggaccccgggccggcctgtcccccgccgctcgccgccgcctgagcctgcgcggccggggcctcttcagcctgcgggggctgcgggcgcatcagcgcagccacagcagcgggggctccaccagcccgggctgcacccaccacgactccatggacccctcggacgaggagggccgcggtggcgcgggcggcgggggcgcgggcagcgagcactcggagaccctcagcagcctctcgctcacctccctcttctgcccgccgcccccgccgccagcccccggcctcacgcccgccaggaagttcagcagcaccagcagcctggccgcccccggccgcccccacgccgccgccctggcccacggcctggcccggagcccctcgtgggccgcggaccgcagcaaggacccccccggccgggcaccgctgcccatgggcctgggccccttggcgcccccgccgcaaccgctccccggagagctggagccgggagacgccgccagcaagaggaagagatgagggtcgcaggggcccccggccgcccaccgcccgccccgtctcaccttctttacctcaggagccaggagcagacagcaatacttcgtccacacctgggatcgcgcagggcccgcagggcacaggcgcccgacagccgggctgagcggagtctgggttagccaggcctgcgtggcccatggtggcccttccagtgcatatacatacatatatatatatatatgcatatatatatatatatatatatatatgtgtatacacacacacatagacagacatatatatatatatttattttttttactgagagcttatgacttccagaaagtgctaaaggtgggaggtgggccagggcctggacggggcttttgtctgatgctctgggattctggccagacccaccccagggcacatgtcctgcgggggcgtcccagctgtgttttttgatgtctcctccctggttaagagtagcttggagaggaccctcaggcctctgagggcaccaggccctggagaagaggtgcaattcagggtgtgtgtgtgttttttttcctttaaagaagaaacgctgctaagatcccacgtggctcccacgtgtcggggtgtctgtcctgtcatcctgactgtctcgttattgtgaagtctttcgtagacaccccagagcacacacatccccttagtccaccggttagatgtctctctttagaaaaatcaggggtgagtagctgtgtttccttaggcctggggtaggggatggagagcagctccaaggctgagctggggctctggccccaggtgaggtccccagctcctgagcacttctgagggggtgggttccacccccaggagggcgggggtgggtggagcaggagtggaggcagcctgcagaggaagggtgcgggagactgagccggcagtggcttgcttggaggggctagggtacccgcctggtctcggctggctccagctgccctgcaggtgcccctgggctcaggtagttagttgttcagccactaatgccttttatcccccatatgggcgctgagctgtggctgttcctggacactgtgctgtccccgtcctgagcaactatgcccccgccccagtaggttcaaggcaaagcagctctgaccgaattctaggcaggggtgggggcacctgcctgggccctgggtccagccgcatccccatgcccagcctttcgcgtcacctggaggccacatcttcccaccccacctgccagcccctgtctctcctccccgctgcccctaactgcagctcagctttcactatagcagtgcttcccaaacgggttctagacttgggtgtttgatttgaagagttacgcatttatttcactatttattgggaaaaaaatgcattgaacccgtgatttcacagacattttgcttaggtcaaggctactttttaaaaagggagtgactttcatgaagtcagtttgaagaaggaggttgggagcatgttggtggcagtgatctggagaggctgcaggggccacgagtttgcagatgctgtacttcagcaataaccttgcctttgctaagaccccctccgagggcttcaggggggcctgccaagggggggccttgttcttgttcccaaactctgacttggaagaactcagcttgtggccgggctggtgagggtgtggggtgcgcccttcccttttgggctgagggagagggggccgggaggggttgtcaagcccacccgggaaactgagccctggagaggggaagcagccagcccaggatgcttcagggccctggcagcaaagaagctggggtggtgtggagggccctactccacaccctagagctgtgatgctgagcaaggtgcctgtggcggaaggaactgcccagtcctccctgggggcaggtagacctgtggggatggctcggtccaagcccaacactgcccgctccagagagcctcagccctgcctccctttccacagaggtggttttatgtggaacgaggtaccttgtctggggaagaagtggagctgggcaggcttgactgctcctggctgaccctgagctctcgcagttggagggaagcagacagacttgactttttgcaagtccgcgtgttgctggagggacacgtgtattggagcccagaagaggggctgtgtggcctgggaataccatgtggaaggttgggcttcaagttaacaggatcagacaccagtcaagcagcctcaggtcatcttgcgactccactgagcagcctttcctgttgtcacatgggttcagagcagctgagcagggaacacgtcctaggcaggtctgacgtgaaacctccccttaccctgaaccgtgtgactctgcaagcagacacctcgaggcaggtgttctaggcaaagggatgggcatgagcgaaggctccagggtccacagagcagggagtgtggagaaggtggaagagctgagctcagaggcagagaagctccttgcagggagcactgggagatggcctggcccgtcccaggctcctggaggccccacctgccgatcccaggcacttgaccttgttcctgtgggtgacagagatgagaaccagggaagctgtgatccactggccaggacaagtcaacatgggtgagggttgggcaaagggcccttccttcctccccaaccctgtggtctggggccatggcctcaggcttgtgtctatcacaaaagcacaaacttgccctaacccacatgggcctggctgtggggaaagtggggacccaggtccctgagctgtctgctgggctccgtagagcggtggtgggcaggcaccttggcatctgtgcagagacggcccagtctggccaaatcctcttcctctcccctgctctaccttctccggcaccaggcagccccttaaaggaggacaaagtgtgtaaagcccgtctgctgtcttcccccaaatcctcagctcagagccttccgcttccagggccaaccccagccccgtttgctgcgttgtgtaagggcttggggtcttagaagctgctctttagcccagatacacatactcttttttgtctttgtgcaataatcagtgttcctggcagagcctgggccaagctgcagcctactgaggaggcagaggccacctcctccagaaagccctcggcctgggccgccgccgtgactctagcactctcagtcgctgtacagtttctatggtgtgaatgaacttccctcctagttgctgatggcgctggtacctgctggcccatggcccgggtgtagagaaaccaagcggcagccaccaccagtgttgttttgaataaaagcccagaagcctattt

SEQ ID NO: 324109 - DNA, 5952 bp, Artificial Sequence
  derived and/or modified sequence
atggctgagagcgcctccccgccctcctcatctgcagcagccccagccgctgagccaggagtcaccacggagcagcccggaccccggagccccccatcctccccgccaggcctggaggagcctctggatggagctgatcctcatgtcccacacccagacctggcgcctattgccttcttctgcctgcgacagaccaccagcccccggaactggtgcatcaagatggtgtgcaacccgtggtttgaatgtgtcagcatgctggtgatcctgctgaactgcgtgacacttggcatgtaccagccgtgcgacgacatggactgcctgtccgaccgctgcaagatcctgcaggtctttgatgacttcatctttatcttctttgccatggagatggtgctcaagatggtggccctggggatttttggcaagaagtgctacctcggggacacatggaaccgcctggatttcttcatcgtcatggcagggatggtcgagtactccctggaccttcagaacatcaacctgtcagccatccgcaccgtgcgcgtcctgaggcccctcaaagccatcaaccgcgtgcccagtatgcggatcctggtgaacctgctcctggacacactgcccatgctggggaatgtcctgctgctctgcttctttgtcttcttcatctttggcatcataggtgtgcagctctgggcgggcctgctgcgtaaccgctgcttcctggaggagaacttcaccatacaaggggatgtggccttgcccccatactaccagccggaggaggatgatgagatgcccttcatctgctccctgtcgggcgacaatgggataatgggctgccatgagatccccccgctcaaggagcagggccgtgagtgctgcctgtccaaggacgacgtctacgactttggggcggggcgccaggacctcaatgccagcggcctctgtgtcaactggaaccgttactacaatgtgtgccgcacgggcagcgccaacccccacaagggtgccatcaactttgacaacatcggttatgcttggattgtcatcttccaggtgatcactctggaaggctgggtggagatcatgtactacgtgatggatgctcactccttctacaacttcatctacttcatcctgcttatcatagtgggctccttcttcatgatcaacctgtgcctcgttgtcatagcgacccagttctcggagaccaagcaacgggagcaccggctgatgctggagcagcggcagcgctacctgtcctccagcacggtggccagctacgccgagcctggcgactgctacgaggagatcttccagtatgtctgccacatcctgcgcaaggccaagcgccgcgccctgggcctctaccaggccctgcagagccggcgccaggccctgggcccggaggccccggcccccgccaaacctgggccccacgccaaggagccccggcactaccagctgtgcccgcaacatagccccctggatgcgacgccccacaccctggtgcagcccatccccgccacgctggcttccgatcccgccagctgcccttgctgccagcatgaggacggccggcggccctcgggcctgggcagcaccgactcgggccaggagggctcgggctccgggagctccgctggtggcgaggacgaggcggatggggacggggcccggagcagcgaggacggagcctcctcagaactggggaaggaggaggaggaggaggagcaggcggatggggcggtctggctgtgcggggatgtgtggcgggagacgcgagccaagctgcgcggcatcgtggacagcaagtacttcaaccggggcatcatgatggccatcctggtcaacaccgtcagcatgggcatcgagcaccacgagcagccggaggagctgaccaacatcctggagatctgcaatgtggtcttcaccagcatgtttgccctggagatgatcctgaagctggctgcatttgggctcttcgactacctgcgtaacccctacaacatcttcgacagcatcattgtcatcatcagcatctgggagattgtggggcaggcggacggtgggctgtcggtgctgcggaccttccggctgctgcgcgtgctgaaactggtgcgcttcatgcctgccctgcggcgccagctcgtggtgctcatgaagaccatggacaacgtggccaccttctgcatgctgctcatgctcttcatcttcatcttcagcatccttgggatgcatatttttggctgcaagttcagcctccgcacggacactggagacacggtgcccgacaggaagaacttcgactccctgctgtgggccatcgtcactgtgttccagatcctcacccaggaggactggaacgtcgttctctacaatggcatggcctccacttctccctgggcctccctctactttgtcgccctcatgaccttcggcaactatgtgctcttcaacctgctggtggccatcctggtggagggcttccaggcggagggtgacgccaatcgctcctactcggacgaggaccagagctcatccaacatagaagagtttgataagctccaggaaggcctggacagcagcggagatcccaagctctgcccaatccccatgacccccaatgggcacctggaccccagtctcccactgggtgggcacctaggtcctgctggggctgcgggacctgccccccgactctcactgcagccggaccccatgctggtggccctgggctcccgaaagagcagtgtcatgtctctagggaggatgagctatgaccagcgctccctgtccagctcccggagctcctactacgggccatggggccgcagcgcggcctgggccagccgtcgctccagctggaacagcctcaagcacaagccgccgtcggcggagcatgagtccctgctctctgcggagcgcggcggcggcgcccgggtctgcgaggttgccgcggacgaggggccgccgcgggccgcacccctgcacaccccacacgcccaccacattcatcacgggccccatctggcgcaccgccaccgccaccaccgccggacgctgtccctcgacaacagggactcggtggacctggccgagctggtgcccgcggtgggcgcccacccccgggccgcctggagggcggcaggcccggcccccgggcatgaggactgcaatggcaggatgcccagcatcgccaaagacgtcttcaccaagatgggcgaccgcggggatcgcggggaggatgaggaggaaatcgactacaccctgtgcttccgcgtccgcaagatgatcgacgtctataagcccgactggtgcgaggtccgcgaagactggtctgtctacctcttctctcccgagaacaggttccgggtcctgtgtcagaccattattgcccacaaactcttcgactacgtcgtcctggccttcatctttctcaactgcatcaccatcgccctggagcggcctcagatcgaggccggcagcaccgaacgcatctttctcaccgtgtccaactacatcttcacggccatcttcgtgggcgagatgacattgaaggtagtctcgctgggcctgtacttcggcgagcaggcgtacctacgcagcagctggaacgtgctggatggctttcttgtcttcgtgtccatcatcgacatcgtggtgtccctggcctcagccgggggagccaagatcttgggggtcctccgagtcttgcggctcctgcgcaccctacgccccctgcgtgtcatcagccgggcgccgggcctgaagctggtggtggagacactcatctcctccctcaagcccatcggcaacatcgtgctcatctgctgtgccttcttcatcatctttggcatcctgggagtgcagctcttcaagggcaagttctaccactgtctgggcgtggacacccgcaacatcaccaaccgctcggactgcatggccgccaactaccgctgggtccatcacaaatacaacttcgacaacctgggccaggctctgatgtccctctttgtcctggcatccaaggatggttgggtgaacatcatgtacaatggactggatgctgttgctgtggaccagcagcctgtgaccaaccacaacccctggatgctgctgtacttcatctccttcctgctcatcgtcagcttctttgtgctcaacatgtttgtgggtgtcgtggtggagaacttccacaagtgccggcagcaccaggaggctgaagaggcacggcggcgtgaggagaagcggctgcggcgcctggagaagaagcgccggaaggcccagcggctgccctactatgccacctattgtcacacccggctgctcatccactccatgtgcaccagccactacctggacatcttcatcaccttcatcatctgcctcaacgtggtcaccatgtccctggagcactacaatcagcccacgtccctggagacagccctcaagtactgcaactatatgttcaccactgtctttgtgctggaggctgtgctgaagctggtggcatttggtctgaggcgcttcttcaaggaccgatggaaccagctggacctggccattgtgctactgtcagtcatgggcatcaccctggaggagatcgagatcaatgcggccctgcccatcaatcccaccatcatccgcatcatgagggttctgcgcattgcccgagtgctgaagctgttgaagatggccacaggaatgcgggccctgctggacacggtggtgcaagctttgccccaggtgggcaacctgggcctcctcttcatgctgctcttcttcatctatgctgctctcggggtggagctctttgggaagctggtctgcaacgacgagaacccgtgcgagggcatgagccggcatgccaccttcgagaacttcggcatggccttcctcacactcttccaggtctccacgggtgacaactggaacgggatcatgaaggacacgctgcgggactgcacccacgacgagcgcagctgcctgagcagcctgcagtttgtgtcgccgctgtacttcgtgagcttcgtgctcaccgcgcagttcgtgctcatcaacgtggtggtggctgtgctcatgaagcacctggacgacagcaacaaggaggcgcaggaggacgccgagatggatgccgagctcgagctggagatggcccatggcctgggccctggcccgaggctgcctaccggctccccgggcgcccctggccgagggccgggaggggcgggcggcgggggcgacaccgagggcggcttgtgccggcgctgctactcgcctgcccaggagaacctgtggctggacagcgtctctttaatcatcaaggactccttggagggggagctgaccatcatcgacaacctgtcgggctccatcttccaccactactcctcgcctgccggctgcaagaagtgtcaccacgacaagcaagaggtgcagctggctgagacggaggccttctccctgaactcagacaggtcctcgtccatcctgctgggtgacgacctgagtctcgaggaccccacagcctgcccacctggccgcaaagacagcaagggtgagctggacccacctgagcccatgcgtgtgggagacctgggcgaatgcttcttccccttgtcctctacggccgtctcgccggatccagagaacttcctgtgtgagatggaggagatcccattcaaccctgtccggtcctggctgaaacatgacagcagtcaagcacccccaagtcccttctccccggatgcctccagccctctcctgcccatgccagccgagttcttccaccctgcagtgtctgccagccagaaaggcccagaaaagggcactggcactggaaccctccccaagattgcgctgcagggctcctgggcatctctgcggtcaccaagggtcaactgtaccctcctccggcaggtaccgacacctcccaggccctagagcact

SEQ ID NO: 324110 - DNA, 6567 bp, Artificial Sequence
  derived and/or modified sequence
atggccgagagcgccagcccccccagcagcagcgccgccgcccccgccgccgagcccggcgtgaccaccgagcagcccggccccagaagcccccccagcagcccccccggcctggaggagcccctggacggcgccgacccccacgtgccccaccccgacctggcccccatcgccttcttctgcctgagacagaccaccagccccagaaactggtgcatcaagatggccaccggcccctggtggtggtgcctgtgcatgctggtgatcctgctgaactgcgtgaccctgggcatgtaccagccctgcgacgacatggactgcctgagcgacagatgcaagatcctgcaggtgttcgacgacttcatcttcatcttcttcgccatggagatggtgctgaagatggtggccctgggcatcttcggcaagaagtgctacctgggcgacacctggaacagactggacttcttcatcgtgatggccggcatggtggagtacagcctggacctgcagaacatcaacctgagcgccatcagaaccgtgagagtgctgagacccctgaaggccatcaacagagtgcccagcatgagaatcctggtgaacctgctgctggacaccctgcccatgctgggcaacgtgctgctgctgtgcttcttcgtgttcttcatcttcggcatcatcggcgtgcagctgtgggccggcctgctgagaaacagatgcttcctggaggagaacttcaccatccagggcgacgtggccctgcccccctactaccagcccgaggaggacgacgagatgcccttcatctgcagcctgagcggcgacaacggcatcatgggctgccacgagatcccccccctgaaggagcagggcagagagtgctgcctgagcaaggacgacgtgtacgacttcggcgccggcagacaggacctgaacgccagcggcctgtgcgtgaactggaacagatactacaacgtgtgcagaaccggcagcgccaacccccacaagggcgccatcaacttcgacaacatcggctacgcctggatcgtgatcttccaggtgatcaccctggagggctgggtggagatcatgtactacgtgatggacgcccacagcttctacaacttcatctacttcatcctgctgatcatcgtgggcagcttcttcatgatcaacctgtgcctggtggtgatcgccacccagttcagcgagaccaagcagagagagcacagactgatgctggagcagagacagagatacctgagcagcagcaccgtggccagctacgccgagcccggcgactgctacgaggagatcttccagtacgtgtgccacatcctgagaaaggccaagagaagagccctgggcctgtaccaggccctgcagagcagaagacaggccctgggccccgaggcccccgcccccgccaagcccggcccccacgccaaggagcccagacactaccagctgtgcccccagcacagccccctggacgccaccccccacaccctggtgcagcccatccccgccaccctggccagcgaccccgccagctgcccctgctgccagcacgaggacggcagaagacccagcggcctgggcagcaccgacagcggccaggagggcagcggcagcggcagcagcgccggcggcgaggacgaggccgacggcgacggcgccagaagcagcgaggacggcgccagcagcgagctgggcaaggaggaggaggaggaggagcaggccgacggcgccgtgtggctgtgcggcgacgtgtggagagagaccagagccaagctgagaggcatcgtggacagcaagtacttcaacagaggcatcatgatggccatcctggtgaacaccgtgagcatgggcatcgagcaccacgagcaggccaccgagctgaccaacatcctggagatctgcaacgtggtgttcaccagcatgttcgccctggagatgatcctgaagctggccgccttcggcctgttcgactacctgagaaacccctacaacatcttcgacagcatcatcgtgatcatcagcatctgggagatcgtgggccaggccgacggcggcctgagcgtgctgagaaccttcagactgctgagagtgctgaagctggtgagattcatgcccgccctgagaagacagctggtggtgctgatgaagaccatggacaacgtggccaccttctgcatgctgctgatgctgttcatcttcatcttcagcatcctgggcatgcacatcttcggctgcaagttcagcctgagaaccgacaccggcgacaccgtgcccgacagaaagaacttcgacagcctgctgtgggccatcgtgaccgtgttccagatcctgacccaggaggactggaacgtggtgctgtacaacggcatggccagcaccagcccctgggccagcctgtacttcgtggccctgatgaccttcggcaactacgtgctgttcaacctgctggtggccatcctggtggagggcttccaggccgagggcgacgccaacagaagctacagcgacgaggaccagagcagcagcaacatcgaggagttcgacaagctgcaggagggcctggacagcagcggcgaccccaagctgtgccccatccccatgacccccaacggccacctggaccccagcctgcccctgggcggccacctgggccccgccggcgccgccggccccgcccccagactgagcctgcagcccgaccccatgctggtggccctgggcagcagaaagagcagcgtgatgagcctgggcagaatgagctacgaccagagaagcctgagcagcagcagaagcagctactacggcccctggggcagaagcgccgcctgggccagcagaagaagcagctggaacagcctgaagcacaagccccccagcgccgagcacgagagcctgctgagcgccgagagaggcggcggcgccagagtgtgcgaggtggccgccgacgagggcccccccagagccgcccccctgcacaccccccacgcccaccacatccaccacggcccccacctggcccacagacacagacaccacagaagaaccctgagcctggacaacagagacagcgtggacctggccgagctggtgcccgccgtgggcgcccaccccagagccgcctggagagccgccggccccgcccccggccacgaggactgcaacggcagaatgcccagcatcgccaaggacgtgttcaccaagatgggcgacagaggcgacagaggcgaggacgaggaggagatcgactacaccctgtgcttcagagtgagaaagatgatcgacgtgtacaagcccgactggtgcgaggtgagagaggactggagcgtgtacctgttcagccccgagaacagattcagagtgctgtgccagaccatcatcgcccacaagctgttcgactacgtggtgctggccttcatcttcctgaactgcatcaccatcgccctggagagaccccagatcgaggccggcagcaccgagagaatcttcctgaccgtgagcaactacatcttcaccgccatcttcgtgggcgagatgaccctgaaggtggtgagcctgggcctgtacttcggcgagcaggcctacctgagaagcagctggaacgtgctggacggcttcctggtgttcgtgagcatcatcgacatcgtggtgagcctggccagcgccggcggcgccaagatcctgggcgtgctgagagtgctgagactgctgagaaccctgagacccctgagagtgatcagcagagcccccggcctgaagctggtggtggagaccctgatcagcagcctgaagcccatcggcaacatcgtgctgatctgctgcgccttcttcatcatcttcggcatcctgggcgtgcagctgttcaagggcaagttctaccactgcctgggcgtggacaccagaaacatcaccaacagaagcgactgcatggccgccaactacagatgggtgcaccacaagtacaacttcgacaacctgggccaggccctgatgagcctgttcgtgctggccagcaaggacggctgggtgaacatcatgtacaacggcctggacgccgtggccgtggaccagcagcccgtgaccaaccacaacccctggatgctgctgtacttcatcagcttcctgctgatcgtgagcttcttcgtgctgaacatgttcgtgggcgtggtggtggagaacttccacaagtgcagacagcaccaggaggccgaggaggccagaagaagagaggagaagagactgagaagactggagaagaagagaagaaaggcccagagactgccctactacgccacctactgccacaccagactgctgatccacagcatgtgcaccagccactacctggacatcttcatcaccttcatcatctgcctgaacgtggtgaccatgagcctggagcactacaaccagcccaccagcctggagaccgccctgaagtactgcaactacatgttcaccaccgtgttcgtgctggaggccgtgctgaagctggtggccttcggcctgagaagattcttcaaggacagatggaaccagctggacctggccatcgtgctgctgagcgtgatgggcatcaccctggaggagatcgagatcaacgccgccctgcccatcaaccccaccatcatcagaatcatgagagtgctgagaatcgccagagtgctgaagctgctgaagatggccaccggcatgagagccctgctggacaccgtggtgcaggccctgccccaggtgggcaacctgggcctgctgttcatgctgctgttcttcatctacgccgccctgggcgtggagctgttcggcaagctggtgtgcaacgacgagaacccctgcgagggcatgagcagacacgccaccttcgagaacttcggcatggccttcctgaccctgttccaggtgagcaccggcgacaactggaacggcatcatgaaggacaccctgagagactgcacccacgacgagagaagctgcctgagcagcctgcagttcgtgagccccctgtacttcgtgagcttcgtgctgaccgcccagttcgtgctgatcaacgtggtggtggccgtgctgatgaagcacctggacgacagcaacaaggaggcccaggaggacgccgagatggacgccgagctggagctggagatggcccacggcctgggccccggccccagactgcccaccggcagccccggcgcccccggcagaggccccggcggcgccggcggcggcggcgacaccgagggcggcctgtgcagaagatgctacagccccgcccaggagaacctgtggctggacagcgtgagcctgatcatcaaggacagcctggagggcgagctgaccatcatcgacaacctgagcggcagcatcttccaccactacagcagccccgccggctgcaagaagtgccaccacgacaagcaggaggtgcagctggccgagaccgaggccttcagcctgaacagcgacagaagcagcagcatcctgctgggcgacgacctgagcctggaggaccccaccgcctgcccccccggcagaaaggacagcaagggcgagctggacccccccgagcccatgagagtgggcgacctgggcgagtgcttcttccccctgagcagcaccgccgtgagccccgaccccgagaacttcctgtgcgagatggaggagatccccttcaaccccgtgagaagctggctgaagcacgacagcagccaggccccccccagccccttcagccccgacgccagcagccccctgctgcccatgcccgccgagttcttccaccccgccgtgagcgccagccagaagggccccgagaagggcaccggcaccggcaccctgcccaagatcgccctgcagggcagctgggccagcctgagaagccccagagtgaactgcaccctgctgagacaggccaccggcagcgacaccagcctggacgccagccccagcagcagcgccggcagcctgcagaccaccctggaggacagcctgaccctgagcgacagccccagaagagccctgggcccccccgcccccgcccccggccccagagccggcctgagccccgccgccagaagaagactgagcctgagaggcagaggcctgttcagcctgagaggcctgagagcccaccagagaagccacagcagcggcggcagcaccagccccggctgcacccaccacgacagcatggaccccagcgacgaggagggcagaggcggcgccggcggcggcggcgccggcagcgagcacagcgagaccctgagcagcctgagcctgaccagcctgttctgcccccccccccccccccccgcccccggcctgacccccgccagaaagttcagcagcaccagcagcctggccgcccccggcagaccccacgccgccgccctggcccacggcctggccagaagccccagctgggccgccgacagaagcaaggacccccccggcagagcccccctgcccatgggcctgggccccctggccccccccccccagcccctgcccggcgagctggagcccggcgacgccgccagcaagagaaagagatag

SEQ ID NO: 324111 - DNA, 6567 bp, Artificial Sequence
  derived and/or modified sequence
atggccgagagcgccagcccccccagcagcagcgccgccgcccccgccgccgagcccggcgtgaccaccgagcagcccggccccagaagcccccccagcagcccccccggcctggaggagcccctggacggcgccgacccccacgtgccccaccccgacctggcccccatcgccttcttctgcctgagacagaccaccagccccagaaactggtgcatcaagatggtgtgcaacccctggttcgagtgcgtgagcatgctggtgatcctgctgaactgcgtgaccctgggcatgtaccagccctgcgacgacatggactgcctgagcgacagatgcaagatcctgcaggtgttcgacgacttcatcttcatcttcttcgccatggagatggtgctgaagatggtggccctgggcatcttcggcaagaagtgctacctgggcgacacctggaacagactggacttcttcatcgtgatggccggcatggtggagtacagcctggacctgcagaacatcaacctgagcgccatcagaaccgtgagagtgctgagacccctgaaggccatcaacagagtgcccagcatgagaatcctggtgaacctgctgctggacaccctgcccatgctgggcaacgtgctgctgctgtgcttcttcgtgttcttcatcttcggcatcatcggcgtgcagctgtgggccggcctgctgagaaacagatgcttcctggaggagaacttcaccatccagggcgacgtggccctgcccccctactaccagcccgaggaggacgacgagatgcccttcatctgcagcctgagcggcgacaacggcatcatgggctgccacgagatcccccccctgaaggagcagggcagagagtgctgcctgagcaaggacgacgtgtacgacttcggcgccggcagacaggacctgaacgccagcggcctgtgcgtgaactggaacagatactacaacgtgtgcagaaccggcagcgccaacccccacaagggcgccatcaacttcgacaacatcggctacgcctggatcgtgatcttccaggtgatcaccctggagggctgggtggagatcatgtactacgtgatggacgcccacagcttctacaacttcatctacttcatcctgctgatcatcgtgggcagcttcttcatgatcaacctgtgcctggtggtgatcgccacccagttcagcgagaccaagcagagagagcacagactgatgctggagcagagacagagatacctgagcagcagcaccgtggccagctacgccgagcccggcgactgctacgaggagatcttccagtacgtgtgccacatcctgagaaaggccaagagaagagccctgggcctgtaccaggccctgcagagcagaagacaggccctgggccccgaggcccccgcccccgccaagcccggcccccacgccaaggagcccagacactaccagctgtgcccccagcacagccccctggacgccaccccccacaccctggtgcagcccatccccgccaccctggccagcgaccccgccagctgcccctgctgccagcacgaggacggcagaagacccagcggcctgggcagcaccgacagcggccaggagggcagcggcagcggcagcagcgccggcggcgaggacgaggccgacggcgacggcgccagaagcagcgaggacggcgccagcagcgagctgggcaaggaggaggaggaggaggagcaggccgacggcgccgtgtggctgtgcggcgacgtgtggagagagaccagagccaagctgagaggcatcgtggacagcaagtacttcaacagaggcatcatgatggccatcctggtgaacaccgtgagcatgggcatcgagcaccacgagcagcccgaggagctgaccaacatcctggagatctgcaacgtggtgttcaccagcatgttcgccctggagatgatcctgaagctggccgccttcggcctgttcgactacctgagaaacccctacaacatcttcgacagcatcatcgtgatcatcagcatctgggagatcgtgggccaggccgacggcggcctgagcgtgctgagaaccttcagactgctgagagtgctgaagctggtgagattcatgcccgccctgagaagacagctggtggtgctgatgaagaccatggacaacgtggccaccttctgcatgctgctgatgctgttcatcttcatcttcagcatcctgggcatgcacatcttcggctgcaagttcagcctgagaaccgacaccggcgacaccgtgcccgacagaaagaacttcgacagcctgctgtgggccatcgtgaccgtgttccagatcctgacccaggaggactggaacgtggtgctgtacaacggcatggccagcaccagcccctgggccagcctgtacttcgtggccctgatgaccttcggcaactacgtgctgttcaacctgctggtggccatcctggtggagggcttccaggccgagggcgacgccaacagaagctacagcgacgaggaccagagcagcagcaacatcgaggagttcgacaagctgcaggagggcctggacagcagcggcgaccccaagctgtgccccatccccatgacccccaacggccacctggaccccagcctgcccctgggcggccacctgggccccgccggcgccgccggccccgcccccagactgagcctgcagcccgaccccatgctggtggccctgggcagcagaaagagcagcgtgatgagcctgggcagaatgagctacgaccagagaagcctgagcagcagcagaagcagctactacggcccctggggcagaagcgccgcctgggccagcagaagaagcagctggaacagcctgaagcacaagccccccagcgccgagcacgagagcctgctgagcgccgagagaggcggcggcgccagagtgtgcgaggtggccgccgacgagggcccccccagagccgcccccctgcacaccccccacgcccaccacatccaccacggcccccacctggcccacagacacagacaccacagaagaaccctgagcctggacaacagagacagcgtggacctggccgagctggtgcccgccgtgggcgcccaccccagagccgcctggagagccgccggccccgcccccggccacgaggactgcaacggcagaatgcccagcatcgccaaggacgtgttcaccaagatgggcgacagaggcgacagaggcgaggacgaggaggagatcgactacaccctgtgcttcagagtgagaaagatgatcgacgtgtacaagcccgactggtgcgaggtgagagaggactggagcgtgtacctgttcagccccgagaacagattcagagtgctgtgccagaccatcatcgcccacaagctgttcgactacgtggtgctggccttcatcttcctgaactgcatcaccatcgccctggagagaccccagatcgaggccggcagcaccgagagaatcttcctgaccgtgagcaactacatcttcaccgccatcttcgtgggcgagatgaccctgaaggtggtgagcctgggcctgtacttcggcgagcaggcctacctgagaagcagctggaacgtgctggacggcttcctggtgttcgtgagcatcatcgacatcgtggtgagcctggccagcgccggcggcgccaagatcctgggcgtgctgagagtgctgagactgctgagaaccctgagacccctgagagtgatcagcagagcccccggcctgaagctggtggtggagaccctgatcagcagcctgaagcccatcggcaacatcgtgctgatctgctgcgccttcttcatcatcttcggcatcctgggcgtgcagctgttcaagggcaagttctaccactgcctgggcgtggacaccagaaacatcaccaacagaagcgactgcatggccgccaactacagatgggtgcaccacaagtacaacttcgacaacctgggccaggccctgatgagcctgttcgtgctggccagcaaggacggctgggtgaacatcatgtacaacggcctggacgccgtggccgtggaccagcagcccgtgaccaaccacaacccctggatgctgctgtacttcatcagcttcctgctgatcgtgagcttcttcgtgctgaacatgttcgtgggcgtggtggtggagaacttccacaagtgcagacagcaccaggaggccgaggaggccagaagaagagaggagaagagactgagaagactggagaagaagagaagaaaggcccagagactgccctactacgccacctactgccacaccagactgctgatccacagcatgtgcaccagccactacctggacatcttcatcaccttcatcatctgcctgaacgtggtgaccatgagcctggagcactacaaccagcccaccagcctggagaccgccctgaagtactgcaactacatgttcaccaccgtgttcgtgctggaggccgtgctgaagctggtggccttcggcctgagaagattcttcaaggacagatggaaccagctggacctggccatcgtgctgctgagcgtgatgggcatcaccctggaggagatcgagatcaacgccgccctgcccatcaaccccaccatcatcagaatcatgagagtgctgagaatcgccagagtgctgaagctgctgaagatggccaccggcatgagagccctgctggacaccgtggtgcaggccctgccccaggtgggcaacctgggcctgctgttcatgctgctgttcttcatctacgccgccctgggcgtggagctgttcggcaagctggtgtgcaacgacgagaacccctgcgagggcatgagcagacacgccaccttcgagaacttcggcatggccttcctgaccctgttccaggtgagcaccggcgacaactggaacggcatcatgaaggacaccctgagagactgcacccacgacgagagaagctgcctgagcagcctgcagttcgtgagccccctgtacttcgtgagcttcgtgctgaccgcccagttcgtgctgatcaacgtggtggtggccgtgctgatgaagcacctggacgacagcaacaaggaggcccaggaggacgccgagatggacgccgagctggagctggagatggcccacggcctgggccccggccccagactgcccaccggcagccccggcgcccccggcagaggccccggcggcgccggcggcggcggcgacaccgagggcggcctgtgcagaagatgctacagccccgcccaggagaacctgtggctggacagcgtgagcctgatcatcaaggacagcctggagggcgagctgaccatcatcgacaacctgagcggcagcatcttccaccactacagcagccccgccggctgcaagaagtgccaccacgacaagcaggaggtgcagctggccgagaccgaggccttcagcctgaacagcgacagaagcagcagcatcctgctgggcgacgacctgagcctggaggaccccaccgcctgcccccccggcagaaaggacagcaagggcgagctggacccccccgagcccatgagagtgggcgacctgggcgagtgcttcttccccctgagcagcaccgccgtgagccccgaccccgagaacttcctgtgcgagatggaggagatccccttcaaccccgtgagaagctggctgaagcacgacagcagccaggccccccccagccccttcagccccgacgccagcagccccctgctgcccatgcccgccgagttcttccaccccgccgtgagcgccagccagaagggccccgagaagggcaccggcaccggcaccctgcccaagatcgccctgcagggcagctgggccagcctgagaagccccagagtgaactgcaccctgctgagacaggccaccggcagcgacaccagcctggacgccagccccagcagcagcgccggcagcctgcagaccaccctggaggacagcctgaccctgagcgacagccccagaagagccctgggcccccccgcccccgcccccggccccagagccggcctgagccccgccgccagaagaagactgagcctgagaggcagaggcctgttcagcctgagaggcctgagagcccaccagagaagccacagcagcggcggcagcaccagccccggctgcacccaccacgacagcatggaccccagcgacgaggagggcagaggcggcgccggcggcggcggcgccggcagcgagcacagcgagaccctgagcagcctgagcctgaccagcctgttctgcccccccccccccccccccgcccccggcctgacccccgccagaaagttcagcagcaccagcagcctggccgcccccggcagaccccacgccgccgccctggcccacggcctggccagaagccccagctgggccgccgacagaagcaaggacccccccggcagagcccccctgcccatgggcctgggccccctggccccccccccccagcccctgcccggcgagctggagcccggcgacgccgccagcaagagaaagagatag

SEQ ID NO: 324112 - DNA, 5946 bp, Artificial Sequence
  derived and/or modified sequence
atggccgagagcgccagcccccccagcagcagcgccgccgcccccgccgccgagcccggcgtgaccaccgagcagcccggccccagaagcccccccagcagcccccccggcctggaggagcccctggacggcgccgacccccacgtgccccaccccgacctggcccccatcgccttcttctgcctgagacagaccaccagccccagaaactggtgcatcaagatggtgtgcaacccctggttcgagtgcgtgagcatgctggtgatcctgctgaactgcgtgaccctgggcatgtaccagccctgcgacgacatggactgcctgagcgacagatgcaagatcctgcaggtgttcgacgacttcatcttcatcttcttcgccatggagatggtgctgaagatggtggccctgggcatcttcggcaagaagtgctacctgggcgacacctggaacagactggacttcttcatcgtgatggccggcatggtggagtacagcctggacctgcagaacatcaacctgagcgccatcagaaccgtgagagtgctgagacccctgaaggccatcaacagagtgcccagcatgagaatcctggtgaacctgctgctggacaccctgcccatgctgggcaacgtgctgctgctgtgcttcttcgtgttcttcatcttcggcatcatcggcgtgcagctgtgggccggcctgctgagaaacagatgcttcctggaggagaacttcaccatccagggcgacgtggccctgcccccctactaccagcccgaggaggacgacgagatgcccttcatctgcagcctgagcggcgacaacggcatcatgggctgccacgagatcccccccctgaaggagcagggcagagagtgctgcctgagcaaggacgacgtgtacgacttcggcgccggcagacaggacctgaacgccagcggcctgtgcgtgaactggaacagatactacaacgtgtgcagaaccggcagcgccaacccccacaagggcgccatcaacttcgacaacatcggctacgcctggatcgtgatcttccaggtgatcaccctggagggctgggtggagatcatgtactacgtgatggacgcccacagcttctacaacttcatctacttcatcctgctgatcatcgtgggcagcttcttcatgatcaacctgtgcctggtggtgatcgccacccagttcagcgagaccaagcagagagagcacagactgatgctggagcagagacagagatacctgagcagcagcaccgtggccagctacgccgagcccggcgactgctacgaggagatcttccagtacgtgtgccacatcctgagaaaggccaagagaagagccctgggcctgtaccaggccctgcagagcagaagacaggccctgggccccgaggcccccgcccccgccaagcccggcccccacgccaaggagcccagacactaccagctgtgcccccagcacagccccctggacgccaccccccacaccctggtgcagcccatccccgccaccctggccagcgaccccgccagctgcccctgctgccagcacgaggacggcagaagacccagcggcctgggcagcaccgacagcggccaggagggcagcggcagcggcagcagcgccggcggcgaggacgaggccgacggcgacggcgccagaagcagcgaggacggcgccagcagcgagctgggcaaggaggaggaggaggaggagcaggccgacggcgccgtgtggctgtgcggcgacgtgtggagagagaccagagccaagctgagaggcatcgtggacagcaagtacttcaacagaggcatcatgatggccatcctggtgaacaccgtgagcatgggcatcgagcaccacgagcagcccgaggagctgaccaacatcctggagatctgcaacgtggtgttcaccagcatgttcgccctggagatgatcctgaagctggccgccttcggcctgttcgactacctgagaaacccctacaacatcttcgacagcatcatcgtgatcatcagcatctgggagatcgtgggccaggccgacggcggcctgagcgtgctgagaaccttcagactgctgagagtgctgaagctggtgagattcatgcccgccctgagaagacagctggtggtgctgatgaagaccatggacaacgtggccaccttctgcatgctgctgatgctgttcatcttcatcttcagcatcctgggcatgcacatcttcggctgcaagttcagcctgagaaccgacaccggcgacaccgtgcccgacagaaagaacttcgacagcctgctgtgggccatcgtgaccgtgttccagatcctgacccaggaggactggaacgtggtgctgtacaacggcatggccagcaccagcccctgggccagcctgtacttcgtggccctgatgaccttcggcaactacgtgctgttcaacctgctggtggccatcctggtggagggcttccaggccgagggcgacgccaacagaagctacagcgacgaggaccagagcagcagcaacatcgaggagttcgacaagctgcaggagggcctggacagcagcggcgaccccaagctgtgccccatccccatgacccccaacggccacctggaccccagcctgcccctgggcggccacctgggccccgccggcgccgccggccccgcccccagactgagcctgcagcccgaccccatgctggtggccctgggcagcagaaagagcagcgtgatgagcctgggcagaatgagctacgaccagagaagcctgagcagcagcagaagcagctactacggcccctggggcagaagcgccgcctgggccagcagaagaagcagctggaacagcctgaagcacaagccccccagcgccgagcacgagagcctgctgagcgccgagagaggcggcggcgccagagtgtgcgaggtggccgccgacgagggcccccccagagccgcccccctgcacaccccccacgcccaccacatccaccacggcccccacctggcccacagacacagacaccacagaagaaccctgagcctggacaacagagacagcgtggacctggccgagctggtgcccgccgtgggcgcccaccccagagccgcctggagagccgccggccccgcccccggccacgaggactgcaacggcagaatgcccagcatcgccaaggacgtgttcaccaagatgggcgacagaggcgacagaggcgaggacgaggaggagatcgactacaccctgtgcttcagagtgagaaagatgatcgacgtgtacaagcccgactggtgcgaggtgagagaggactggagcgtgtacctgttcagccccgagaacagattcagagtgctgtgccagaccatcatcgcccacaagctgttcgactacgtggtgctggccttcatcttcctgaactgcatcaccatcgccctggagagaccccagatcgaggccggcagcaccgagagaatcttcctgaccgtgagcaactacatcttcaccgccatcttcgtgggcgagatgaccctgaaggtggtgagcctgggcctgtacttcggcgagcaggcctacctgagaagcagctggaacgtgctggacggcttcctggtgttcgtgagcatcatcgacatcgtggtgagcctggccagcgccggcggcgccaagatcctgggcgtgctgagagtgctgagactgctgagaaccctgagacccctgagagtgatcagcagagcccccggcctgaagctggtggtggagaccctgatcagcagcctgaagcccatcggcaacatcgtgctgatctgctgcgccttcttcatcatcttcggcatcctgggcgtgcagctgttcaagggcaagttctaccactgcctgggcgtggacaccagaaacatcaccaacagaagcgactgcatggccgccaactacagatgggtgcaccacaagtacaacttcgacaacctgggccaggccctgatgagcctgttcgtgctggccagcaaggacggctgggtgaacatcatgtacaacggcctggacgccgtggccgtggaccagcagcccgtgaccaaccacaacccctggatgctgctgtacttcatcagcttcctgctgatcgtgagcttcttcgtgctgaacatgttcgtgggcgtggtggtggagaacttccacaagtgcagacagcaccaggaggccgaggaggccagaagaagagaggagaagagactgagaagactggagaagaagagaagaaaggcccagagactgccctactacgccacctactgccacaccagactgctgatccacagcatgtgcaccagccactacctggacatcttcatcaccttcatcatctgcctgaacgtggtgaccatgagcctggagcactacaaccagcccaccagcctggagaccgccctgaagtactgcaactacatgttcaccaccgtgttcgtgctggaggccgtgctgaagctggtggccttcggcctgagaagattcttcaaggacagatggaaccagctggacctggccatcgtgctgctgagcgtgatgggcatcaccctggaggagatcgagatcaacgccgccctgcccatcaaccccaccatcatcagaatcatgagagtgctgagaatcgccagagtgctgaagctgctgaagatggccaccggcatgagagccctgctggacaccgtggtgcaggccctgccccaggtgggcaacctgggcctgctgttcatgctgctgttcttcatctacgccgccctgggcgtggagctgttcggcaagctggtgtgcaacgacgagaacccctgcgagggcatgagcagacacgccaccttcgagaacttcggcatggccttcctgaccctgttccaggtgagcaccggcgacaactggaacggcatcatgaaggacaccctgagagactgcacccacgacgagagaagctgcctgagcagcctgcagttcgtgagccccctgtacttcgtgagcttcgtgctgaccgcccagttcgtgctgatcaacgtggtggtggccgtgctgatgaagcacctggacgacagcaacaaggaggcccaggaggacgccgagatggacgccgagctggagctggagatggcccacggcctgggccccggccccagactgcccaccggcagccccggcgcccccggcagaggccccggcggcgccggcggcggcggcgacaccgagggcggcctgtgcagaagatgctacagccccgcccaggagaacctgtggctggacagcgtgagcctgatcatcaaggacagcctggagggcgagctgaccatcatcgacaacctgagcggcagcatcttccaccactacagcagccccgccggctgcaagaagtgccaccacgacaagcaggaggtgcagctggccgagaccgaggccttcagcctgaacagcgacagaagcagcagcatcctgctgggcgacgacctgagcctggaggaccccaccgcctgcccccccggcagaaaggacagcaagggcgagctggacccccccgagcccatgagagtgggcgacctgggcgagtgcttcttccccctgagcagcaccgccgtgagccccgaccccgagaacttcctgtgcgagatggaggagatccccttcaaccccgtgagaagctggctgaagcacgacagcagccaggccccccccagccccttcagccccgacgccagcagccccctgctgcccatgcccgccgagttcttccaccccgccgtgagcgccagccagaagggccccgagaagggcaccggcaccggcaccctgcccaagatcgccctgcagggcagctgggccagcctgagaagccccagagtgaactgcaccctgctgagacaggtgcccaccccccccagaccctag

SEQ ID NO: 324113 - protein, 246 aa, Artificial Sequence
  derived and/or modified sequence
MKTVLMVAEKPSLAQSIAKILSRGSLSSHKGLNGACSVHEYTGTFAGQPVRFKMTSVCGHVMTLDFLGKYNKWDKVDPAELFSQAPTEKKEANPKLNMVKFLQVEGRGCDYIVLWLDCDKEGENICFEVLDAVLPVMNKAHGGEKTVFRARFSSITDTDICNAMACLGEPDHNEALSVDARQELDLRIGCAFTRFQTKYFQGKYGDLDSSLISFGPCQTPTLGFCVERHDKIQSFKPETYWVLQAK

SEQ ID NO: 324114 - protein, 121 aa, Artificial Sequence
  derived and/or modified sequence
MKTVLMVAEKPSLAQSIAKILSRGSLSSHKGLNGACSVHEYTGTFAGQPVRFKMTSVCGHVMTLDFLGKYNKWDKVDPAELFSQAPTEKKEANPKLNMVKFLQVEGRGCDYIVLWLDCDKE

SEQ ID NO: 324115 - protein, 122 aa, Artificial Sequence
  derived and/or modified sequence
MKTVLMVAEKPSLAQSIAKILSRGSLSSHKGLNGACSVHEYTGTFAGQPVRFKMTSVCGHVMTLDFLGKYNKWDKVDPAELFSQAPTEKKEANPKLNMVKFLQVEGRGCDYIVLWLDCDKEG

SEQ ID NO: 324116 - protein, 132 aa, Artificial Sequence
  derived and/or modified sequence
MKTVLMVAEKPSLAQSIAKILSRGSLSSHKGLNGACSVHEYTGTFAGQPVRFKMTSVCGHVMTLDFLGKYNKWDKVDPAELFSQAPTEKKEANPKLPQASVCTQAAPGVRPHPCPPAAARVADRVVPCGPVT

SEQ ID NO: 324117 - protein, 60 aa, Artificial Sequence
  derived and/or modified sequence
MKTVLMVAEKPSLAQSIAKILSRGSLSSHKGLNGACSVHEYTGTFAGQPVRFKMTSVCGH

SEQ ID NO: 324118 - protein, 61 aa, Artificial Sequence
  derived and/or modified sequence
MKTVLMVAEKPSLAQSIAKILSRGSLSSHKGLNGACSVHEYTGTFAGQPVRFKMTSVCGHV

SEQ ID NO: 324119 - DNA, 741 bp, Artificial Sequence
  derived and/or modified sequence
atgaagaccgtgctgatggtggccgagaagcccagcctggcccagagcatcgccaagatcctgagcagaggcagcctgagcagccacaagggcctgaacggcgcctgcagcgtgcacgagtacaccggcaccttcgccggccagcccgtgagattcaagatgaccagcgtgtgcggccacgtgatgaccctggacttcctgggcaagtacaacaagtgggacaaggtggaccccgccgagctgttcagccaggcccccaccgagaagaaggaggccaaccccaagctgaacatggtgaagttcctgcaggtggagggcagaggctgcgactacatcgtgctgtggctggactgcgacaaggagggcgagaacatctgcttcgaggtgctggacgccgtgctgcccgtgatgaacaaggcccacggcggcgagaagaccgtgttcagagccagattcagcagcatcaccgacaccgacatctgcaacgccatggcctgcctgggcgagcccgaccacaacgaggccctgagcgtggacgccagacaggagctggacctgagaatcggctgcgccttcaccagattccagaccaagtacttccagggcaagtacggcgacctggacagcagcctgatcagcttcggcccctgccagacccccaccctgggcttctgcgtggagagacacgacaagatccagagcttcaagcccgagacctactgggtgctgcaggccaagtag

SEQ ID NO: 324120 - DNA, 366 bp, Artificial Sequence
  derived and/or modified sequence
atgaagaccgtgctgatggtggccgagaagcccagcctggcccagagcatcgccaagatcctgagcagaggcagcctgagcagccacaagggcctgaacggcgcctgcagcgtgcacgagtacaccggcaccttcgccggccagcccgtgagattcaagatgaccagcgtgtgcggccacgtgatgaccctggacttcctgggcaagtacaacaagtgggacaaggtggaccccgccgagctgttcagccaggcccccaccgagaagaaggaggccaaccccaagctgaacatggtgaagttcctgcaggtggagggcagaggctgcgactacatcgtgctgtggctggactgcgacaaggagtag

SEQ ID NO: 324121 - DNA, 129 bp, Artificial Sequence
  derived and/or modified sequence
atgaagaccgtgctgatggtggccgagaagcccagcctggcccagagcatcgccaagatcctgagcagaggcagcctgagcagccacaagggcctgaacggcgcctgcagcgtgcacgagtacacctag

SEQ ID NO: 324122 - DNA, 369 bp, Artificial Sequence
  derived and/or modified sequence
atgaagaccgtgctgatggtggccgagaagcccagcctggcccagagcatcgccaagatcctgagcagaggcagcctgagcagccacaagggcctgaacggcgcctgcagcgtgcacgagtacaccggcaccttcgccggccagcccgtgagattcaagatgaccagcgtgtgcggccacgtgatgaccctggacttcctgggcaagtacaacaagtgggacaaggtggaccccgccgagctgttcagccaggcccccaccgagaagaaggaggccaaccccaagctgaacatggtgaagttcctgcaggtggagggcagaggctgcgactacatcgtgctgtggctggactgcgacaaggagggctag

SEQ ID NO: 324123 - DNA, 144 bp, Artificial Sequence
  derived and/or modified sequence
atgaagaccgtgctgatggtggccgagaagcccagcctggcccagagcatcgccaagatcctgagcagaggcagcctgagcagccacaagggcctgaacggcgcctgcagcgtgcacgagtacaccggcaccttcgccggctag

SEQ ID NO: 324124 - DNA, 399 bp, Artificial Sequence
  derived and/or modified sequence
atgaagaccgtgctgatggtggccgagaagcccagcctggcccagagcatcgccaagatcctgagcagaggcagcctgagcagccacaagggcctgaacggcgcctgcagcgtgcacgagtacaccggcaccttcgccggccagcccgtgagattcaagatgaccagcgtgtgcggccacgtgatgaccctggacttcctgggcaagtacaacaagtgggacaaggtggaccccgccgagctgttcagccaggcccccaccgagaagaaggaggccaaccccaagctgccccaggccagcgtgtgcacccaggccgcccccggcgtgagaccccacccctgcccccccgccgccgccagagtggccgacagagtggtgccctgcggccccgtgacctag

SEQ ID NO: 324125 - DNA, 183 bp, Artificial Sequence
  derived and/or modified sequence
atgaagaccgtgctgatggtggccgagaagcccagcctggcccagagcatcgccaagatcctgagcagaggcagcctgagcagccacaagggcctgaacggcgcctgcagcgtgcacgagtacaccggcaccttcgccggccagcccgtgagattcaagatgaccagcgtgtgcggccactag

SEQ ID NO: 324126 - DNA, 186 bp, Artificial Sequence
  derived and/or modified sequence
atgaagaccgtgctgatggtggccgagaagcccagcctggcccagagcatcgccaagatcctgagcagaggcagcctgagcagccacaagggcctgaacggcgcctgcagcgtgcacgagtacaccggcaccttcgccggccagcccgtgagattcaagatgaccagcgtgtgcggccacgtgtag

SEQ ID NO: 324127 - DNA, 741 bp, Artificial Sequence
  derived and/or modified sequence
atgaagacagtgttgatggttgccgagaagccttccctcgcccagtccatagctaaaattctgtccagaggctctcttagctcacacaaagggttaaatggtgcttgttcagttcacgagtataccggcaccttcgccggacagcccgtcaggttcaagatgacatcagtctgcggacatgtgatgaccctggattttttgggcaaatacaataagtgggacaaagtggacccagctgagcttttctcacaggcacccacagagaagaaagaggccaaccctaagttaaacatggttaagttcctgcaggtcgaggggaggggctgcgactacatagtcctgtggctagactgtgacaaagagggggaaaatatatgttttgaagtgcttgacgccgtgctgcccgttatgaacaaggctcatgggggagagaaaactgtcttcagggcccgatttagtagcatcacagataccgacatctgcaatgccatggcgtgcttgggagaaccggatcacaacgaggcattgtcggtggacgcacggcaggaactcgacctgagaatcgggtgcgccttcacccggttccagactaagtacttccagggaaaatacggtgatttggatagcagcctgatctcatttggtccatgtcaaacccctacactcggattctgcgtggagcgtcatgacaaaattcagagctttaaacctgagacatactgggtcctgcaggccaagtag

SEQ ID NO: 324128 - DNA, 366 bp, Artificial Sequence
  derived and/or modified sequence
atgaagaccgtactaatggtggccgagaagccttcacttgctcagtccatcgctaagatcctgtctcgaggcagcttaagttctcataagggacttaacggtgcctgtagcgtacatgaatatactggtacatttgctggccagccagttcggttcaaaatgacgtcggtgtgtgggcatgtgatgacattagacttcctaggaaagtataacaagtgggataaagtcgaccccgccgagctctttagtcaagctccaacagagaaaaaggaggctaatcctaaactcaacatggtgaaatttttacaggtggagggcaggggttgtgattacatcgtcctgtggctagactgtgacaaggaatag

SEQ ID NO: 324129 - DNA, 129 bp, Artificial Sequence
  derived and/or modified sequence
atgaaaactgtccttatggttgcagagaagccatccctcgcacagtctattgctaaaattctgtcccggggaagtctgagttcccataagggactcaatggagcgtgtagcgtgcacgagtacacatag

SEQ ID NO: 324130 - DNA, 369 bp, Artificial Sequence
  derived and/or modified sequence
atgaagaccgtactgatggtggctgaaaaaccctctctcgcgcagtctatagcgaaaatcctgtcgagagggagtctgtccagccacaagggcctgaacggcgcgtgctccgtacacgaatacactgggacatttgcagggcaaccagtacgatttaagatgacttccgtctgtggacatgttatgactcttgactttcttggcaaatacaacaaatgggataaggttgacccggccgaactctttagccaggcacctaccgaaaagaaagaggcaaaccccaaactgaacatggtaaagtttctacaggtggaaggacgcggatgcgattatatcgtgctgtggctcgattgtgataaagaaggctag

SEQ ID NO: 324131 - DNA, 144 bp, Artificial Sequence
  derived and/or modified sequence
atgaagactgtcttaatggtggctgaaaaaccgagtcttgcccagagcatcgccaagatcctgagccgcggatcactgtccagccacaagggactaaacggtgcctgctccgtgcacgagtacactggaacttttgcgggttag

SEQ ID NO: 324132 - DNA, 399 bp, Artificial Sequence
  derived and/or modified sequence
atgaagaccgtgttgatggttgccgagaaacccagcctggcccagagtatagctaagattctgtctcggggtagcctgtccagccacaaaggcctcaatggggcctgtagtgtccacgaatacaccggcactttcgcggggcaaccagtccgcttcaaaatgactagcgtgtgcggccacgtcatgacactggatttcctgggcaaatacaataagtgggataaggtcgaccccgccgagctgtttagccaggccccaactgaaaaaaaagaagctaatccaaagctgccccaggcatccgtgtgcactcaggctgctcctggcgtgcggccccatccgtgcccccccgcggcggcccgggtcgcggatagagtggtgccctgcggacccgtcacctag

SEQ ID NO: 324133 - DNA, 183 bp, Artificial Sequence
  derived and/or modified sequence
atgaagacagtgctaatggtggctgagaagccttcactggctcagtcaattgcaaagattctgtcaaggggctcactgtccagccacaaaggactgaacggggcatgcagcgtccatgagtataccggaacctttgcggggcagccagtgagattcaaaatgaccagcgtttgtggccattag

SEQ ID NO: 324134 - DNA, 186 bp, Artificial Sequence
  derived and/or modified sequence
atgaagactgttctaatggttgcagagaaaccttctctggcccagtccatcgcgaaaatcttaagccgggggtccctctcttcccacaaaggacttaacggcgcatgctccgtacacgagtacacaggcaccttcgcaggtcagccggtgcgattcaaaatgaccagtgtctgcggacacgtttag

SEQ ID NO: 324135 - DNA, 741 bp, Artificial Sequence
  derived and/or modified sequence
atgaagacagtgctgatggtggccgagaagcccagcctggcccagagcatcgccaagatcctgagccggggcagcctgagcagccacaagggcctgaatggagcctgcagcgtgcatgagtacacaggcacctttgctggccagcctgtgcgcttcaagatgacctctgtgtgtggccacgtgatgaccctggacttcctgggcaagtacaacaagtgggacaaggtggaccctgctgagctgttcagccaggcccccacagagaagaaggaggccaaccccaagctgaacatggtgaagttcctgcaggtggagggccggggctgtgactacatcgtgctgtggctggactgtgacaaggagggggagaacatctgctttgaggtgctggatgctgtgctgcctgtgatgaacaaggcccatggaggagagaagacagtgttccgggcccgcttcagcagcatcacagacacagacatctgcaatgccatggcctgcctgggggagccagaccacaatgaggccctgtctgtggatgcccggcaggagctggacctgcgcatcggctgtgccttcacccgcttccagaccaagtacttccagggcaagtacggggacctggacagcagcctcatcagctttggcccctgccagacccccaccctgggcttctgtgtggagagacatgacaagatccagagcttcaagccagagacctactgggtgctgcaggccaagtag

SEQ ID NO: 324136 - DNA, 366 bp, Artificial Sequence
  derived and/or modified sequence
atgaagacagtgctgatggtggccgagaagcccagcctggcccagagcatcgccaagatcctgagccggggcagcctgagcagccacaagggcctgaatggagcctgcagcgtgcatgagtacacaggcacctttgctggccagcctgtgcgcttcaagatgacctctgtgtgtggccacgtgatgaccctggacttcctgggcaagtacaacaagtgggacaaggtggaccctgctgagctgttcagccaggcccccacagagaagaaggaggccaaccccaagctgaacatggtgaagttcctgcaggtggagggccggggctgtgactacatcgtgctgtggctggactgtgacaaggagtag

SEQ ID NO: 324137 - DNA, 129 bp, Artificial Sequence
  derived and/or modified sequence
atgaagacagtgctgatggtggccgagaagcccagcctggcccagagcatcgccaagatcctgagccggggcagcctgagcagccacaagggcctgaatggagcctgcagcgtgcatgagtacacctag

SEQ ID NO: 324138 - DNA, 369 bp, Artificial Sequence
  derived and/or modified sequence
atgaagacagtgctgatggtggccgagaagcccagcctggcccagagcatcgccaagatcctgagccggggcagcctgagcagccacaagggcctgaatggagcctgcagcgtgcatgagtacacaggcacctttgctggccagcctgtgcgcttcaagatgacctctgtgtgtggccacgtgatgaccctggacttcctgggcaagtacaacaagtgggacaaggtggaccctgctgagctgttcagccaggcccccacagagaagaaggaggccaaccccaagctgaacatggtgaagttcctgcaggtggagggccggggctgtgactacatcgtgctgtggctggactgtgacaaggagggctag

SEQ ID NO: 324139 - DNA, 144 bp, Artificial Sequence
  derived and/or modified sequence
atgaagacagtgctgatggtggccgagaagcccagcctggcccagagcatcgccaagatcctgagccggggcagcctgagcagccacaagggcctgaatggagcctgcagcgtgcatgagtacacaggcacctttgctggatag

SEQ ID NO: 324140 - DNA, 399 bp, Artificial Sequence
  derived and/or modified sequence
atgaagacagtgctgatggtggccgagaagcccagcctggcccagagcatcgccaagatcctgagccggggcagcctgagcagccacaagggcctgaatggagcctgcagcgtgcatgagtacacaggcacctttgctggccagcctgtgcgcttcaagatgacctctgtgtgtggccacgtgatgaccctggacttcctgggcaagtacaacaagtgggacaaggtggaccctgctgagctgttcagccaggcccccacagagaagaaggaggccaaccccaagctgccccaggcctctgtgtgcacccaggccgcccctggggtgcggccccacccctgccccccagctgctgcccgggtggccgacagagtggtgccctgtggccctgtgacctag

SEQ ID NO: 324141 - DNA, 183 bp, Artificial Sequence
  derived and/or modified sequence
atgaagacagtgctgatggtggccgagaagcccagcctggcccagagcatcgccaagatcctgagccggggcagcctgagcagccacaagggcctgaatggagcctgcagcgtgcatgagtacacaggcacctttgctggccagcctgtgcgcttcaagatgacctctgtgtgtggccactag

SEQ ID NO: 324142 - DNA, 186 bp, Artificial Sequence
  derived and/or modified sequence
atgaagacagtgctgatggtggccgagaagcccagcctggcccagagcatcgccaagatcctgagccggggcagcctgagcagccacaagggcctgaatggagcctgcagcgtgcatgagtacacaggcacctttgctggccagcctgtgcgcttcaagatgacctctgtgtgtggccacgtgtag

SEQ ID NO: 324143 - DNA, 741 bp, Artificial Sequence
  derived and/or modified sequence
atgaagaccgtgctgatggtggccgagaagcccagcctggcccagagtattgctaagatacttagcagaggaagtctgtcctcacacaagggacttaacggggcctgtagcgtgcatgagtatacaggcacctttgctggccagccggtacggtttaagatgacaagcgtatgtggccatgttatgaccctagatttcctgggaaagtacaacaagtgggataaagtagatcccgcagaattgtttagccaggctccaacagaaaaaaaagaagcaaatccaaaacttaatatggtcaagtttttacaggttgagggcagaggatgcgactatatagtactgtggctcgactgcgacaaggaaggggagaacatctgttttgaggttctggatgcggttctccctgtcatgaacaaagcgcatggtggggagaagactgtgtttagagcccgtttttccagcataaccgacaccgatatatgcaatgcaatggcatgcctgggtgagcctgaccacaacgaggccttatccgtagacgcccgccaggagcttgacctgaggattgggtgtgcatttactcgcttccaaacaaagtacttccaagggaagtatggcgatctggattccagtttaatcagtttcggcccttgtcagacgccaacactgggattttgcgtggagagacacgacaaaattcagagttttaaacctgaaacttactgggtgttacaggccaagtag

SEQ ID NO: 324144 - DNA, 366 bp, Artificial Sequence
  derived and/or modified sequence
atgaagaccgtgctgatggtggccgagaagcccagcctggcccagagtatcgctaagattctcagtcgcggatcactgtcctcccacaagggcctgaatggtgcctgtagtgtccatgagtacacaggaacttttgccggacaacctgtgcgcttcaaaatgacttcagtgtgcgggcacgtcatgaccttagacttcctcggaaaatacaacaagtgggataaggtggacccagctgagcttttcagccaggcgcccaccgagaaaaaagaagcaaacccaaaactgaacatggtcaagtttcttcaagttgagggacggggttgcgactatatagtgctatggctcgattgcgacaaggagtag

SEQ ID NO: 324145 - DNA, 129 bp, Artificial Sequence
  derived and/or modified sequence
atgaagaccgtgctgatggtggccgagaagcccagcctggcccagagtattgctaaaatcctgtcgaggggcagtctcagtagccataaaggccttaacggggcctgtagcgtacatgaatacacctag

SEQ ID NO: 324146 - DNA, 369 bp, Artificial Sequence
  derived and/or modified sequence
atgaagaccgtgctgatggtggccgagaagcccagcctggcccagtcaatcgcaaaaatcctctctcgaggttccctctctagccacaaagggctgaacggggcctgctctgtacacgagtatacaggaacatttgcgggacagcctgttcgttttaagatgacgtccgtgtgtggtcatgtgatgacacttgatttcctgggcaagtacaataagtgggataaggtggacccagctgagcttttttctcaggcccctacagagaaaaaggaggcaaaccccaagttaaacatggtcaaattcttacaggtcgaaggtcgggggtgtgactatatagttctgtggctggattgcgacaaggagggctag

SEQ ID NO: 324147 - DNA, 144 bp, Artificial Sequence
  derived and/or modified sequence
atgaagaccgtgctgatggtggccgagaagcccagcctggcccagtcaatcgctaagatcttatctagggggtcactctcgtctcacaagggactaaatggcgcctgcagcgtgcacgagtacacagggacgttcgcagggtag

SEQ ID NO: 324148 - DNA, 399 bp, Artificial Sequence
  derived and/or modified sequence
atgaagaccgtgctgatggtggccgagaagcccagcctggcccagtccattgccaaaatcctgtcccgtggaagcttgagttctcataagggacttaatggtgcgtgtagcgtccacgagtacacagggactttcgccggacagcccgttcggttcaaaatgacctccgtctgcggccacgtgatgactttggactttctcggaaagtacaacaaatgggacaaagtggaccctgccgaactcttttcccaggcccccaccgagaaaaaagaagcgaatccaaagttgccacaggcctctgtgtgtactcaggctgctccaggagtgcgcccacatccctgtcctcccgctgcagcgcgcgtggccgatagagtggtcccttgtggacccgttacctag

SEQ ID NO: 324149 - DNA, 183 bp, Artificial Sequence
  derived and/or modified sequence
atgaagaccgtgctgatggtggccgagaagcccagcctggcccagagtattgctaagatattgtccaggggttcgctgagcagtcataaaggtttgaacggcgcctgttcagtgcacgagtatactggcactttcgctgggcagcccgtacggttcaagatgacatccgtgtgtggccattag

SEQ ID NO: 324150 - DNA, 186 bp, Artificial Sequence
  derived and/or modified sequence
atgaagaccgtgctgatggtggccgagaagcccagcctggcccagagcatcgcaaagattctttctcggggatcactcagctctcataagggtctgaatggcgcgtgttctgtgcacgaatataccggcacctttgctggtcagcccgtcagatttaagatgacgtccgtttgcggacacgtgtag

SEQ ID NO: 324151 - DNA, 741 bp, Artificial Sequence
  derived and/or modified sequence
atgaagacggtgttaatggtagcggaaaagcctagcttagctcagtccattgctaaaattctgtctcgcggatcgttatcatcccacaaaggactgaatggcgcatgttccgttcatgaatataccggcacgttcgcgggacagccggtgcggttcaagatgacgtctgtctgcggccacgtcatgacattagacttccttggtaaatacaataagtgggacaaagtggacccagcagaactcttctctcaggccccaacggagaagaaagaagcaaatcccaagttgaatatggtgaagtttctccaggtagaagggcgtggttgcgattacattgtcctgtggcttgattgtgataaagaaggggagaacatctgtttcgaggtgctcgacgctgttctgccagtgatgaacaaggcacacggcggtgagaagactgtgtttcgtgcaagatttagttccatcactgacactgacatttgtaacgccatggcatgcctcggagagccagatcacaatgaggcccttagtgttgacgcccgacaggaactcgatctcagaatcggctgcgcattcacgaggtttcagacgaaatactttcaaggcaaatacggagatctggacagtagtttaatttccttcggaccctgtcaaacacctaccttgggcttctgcgtcgagcgccacgacaagatccaaagctttaaaccagagacctactgggtgctgcaggcaaagtag

SEQ ID NO: 324152 - DNA, 366 bp, Artificial Sequence
  derived and/or modified sequence
atgaagaccgtgctcatggttgccgaaaaaccttccctcgctcagtcaattgcgaagatcctatcgcgaggatcgcttagtagccataagggtctgaatggagcatgttcggttcacgaatatacaggtacctttgccggacagcccgtaaggttcaaaatgactagtgtgtgtggtcacgtcatgacgctggattttcttggaaaatacaataaatgggataaggtggatcctgccgaactgttttcacaagctccaaccgagaaaaaagaagccaaccccaaactcaacatggtgaagttcttgcaagtggaaggcaggggatgcgactatattgtgctctggctcgactgcgataaagagtag

SEQ ID NO: 324153 - DNA, 129 bp, Artificial Sequence
  derived and/or modified sequence
atgaagaccgtgcttatggtggcagagaaaccaagtctggcgcagtcaatcgctaagattctctctcggggttctttgtctagtcacaaggggctgaatggggcatgtagcgtgcacgagtacacttag

SEQ ID NO: 324154 - DNA, 369 bp, Artificial Sequence
  derived and/or modified sequence
atgaaaactgtgctgatggtcgctgaaaagcccagccttgctcagtctatagccaaaatcctgagcaggggctctctctcttcccataagggattgaacggagcgtgctcagtgcatgaatacactggaacattcgccggtcagccagtgcgcttcaagatgacaagtgtctgcggtcacgttatgacattagactttctggggaagtacaacaaatgggacaaggtcgaccctgctgaattattttcacaggcaccaacagagaagaaggaggctaatcccaagctgaatatggtgaagttcttgcaggttgaaggaagaggatgcgattatattgtgctctggcttgactgtgataaggaggggtag

SEQ ID NO: 324155 - DNA, 144 bp, Artificial Sequence
  derived and/or modified sequence
atgaaaaccgtgctgatggtggccgaaaaaccctcactggcccagagcatcgccaagatactcagtagggggtccctgtcctcccataaagggctcaacggtgcctgttcagtgcatgagtatacgggcactttcgcagggtag

SEQ ID NO: 324156 - DNA, 399 bp, Artificial Sequence
  derived and/or modified sequence
atgaagactgttctcatggtcgccgaaaagccctccttagcacagtcaatcgctaaaatcttgtctcgtggaagcctgtcttctcataagggactcaacggggcttgcagcgtgcacgaatataccggcaccttcgccggtcagcccgtgaggtttaagatgacaagtgtgtgcgggcatgtcatgaccctcgattttctaggcaaatataacaagtgggataaagtagaccccgctgaactcttctctcaggccccaacagagaagaaagaggccaatcctaaactgccccaggcctctgtttgcactcaagcagcccctggtgtgcggccacatccttgtccaccagccgcagctagggttgcagacagggtagtaccatgtgggccagtgacttag

SEQ ID NO: 324157 - DNA, 183 bp, Artificial Sequence
  derived and/or modified sequence
atgaagaccgtcttaatggtggcggagaaaccatcattggctcagtctattgccaagattcttagccggggttccctgagctcccacaagggcctgaacggcgcatgcagcgtacatgagtacacagggacttttgctggccaacctgtgaggttcaagatgactagcgtgtgcgggcactag

SEQ ID NO: 324158 - DNA, 186 bp, Artificial Sequence
  derived and/or modified sequence
atgaagaccgtacttatggtcgccgaaaaaccctctctagcacagtcaatcgccaagatattgtcacgaggatcgctgagctcgcacaaggggctcaatggggcttgcagtgtgcacgaatacactggcaccttcgctggtcaaccagtgcggtttaaaatgaccagcgtctgcggacacgtgtag

SEQ ID NO: 324159 - DNA, 824 bp, Artificial Sequence
  derived and/or modified sequence
gtagccgccccgggaacaaggaccggagctggatccgcggtgcggctgtggtgccccgaaactggagtgtgaaggaccgagacaaaatgaagactgtgctcatggttgctgaaaagccgtccttggcacagtcaattgccaaaatcctctctagagggagcctgtcctcacacaaagggctgaacggggcctgctcagtccacgagtacactgggacctttgctggccagccagtgcgcttcaagatgacgtctgtctgtggtcacgtgatgaccctggatttcctgggaaaatacaacaaatgggacaaagtggaccccgcagaactgttcagccaagctcccacggagaagaaagaagctaaccccaagctgaacatggtgaagttcctgcaggtggagggcagaggctgcgactacatcgtgctgtggctggactgcgacaaggagggggagaacatctgctttgaggttcttgatgctgttctgcccgtcatgaacaaggcccatggtggcgagaagaccgtgttccgggccaggtttagctccatcacggacacagacatctgtaatgccatggcctgcctaggcgagcctgaccacaacgaggcgctctcagtggatgctcgccaggagctggacctgcgaatcggctgtgcattcaccaggtttcagactaaatatttccaggggaaatacggtgatttagacagctctctcatctcctttgggccgtgtcagactccaaccctgggattctgtgtggagagacatgataaaatccagtccttcaaaccagagacctactgggtgctgcaggccaag

SEQ ID NO: 324160 - DNA, 582 bp, Artificial Sequence
  derived and/or modified sequence
agaagcggctggacccggaaataggggttgtcggtagccgccccgggaacaaggaccggagctggatccgcggtgcggctgtggctctttagggtgagatctgctgtaccagtctcacaggagtcagcattggtaatagtgctgtgctgcggaagagtggagtctaaactttttcattgccagtgccccgaaactggagtgtgaaggaccgagacaaaatgaagactgtgctcatggttgctgaaaagccgtccttggcacagtcaattgccaaaatcctctctagagggagcctgtcctcacacaaagggctgaacggggcctgctcagtccacgagtacactgggacctttgctggccagccagtgcgcttcaagatgacgtctgtctgtggtcacgtgatgaccctggatttcctgggaaaatacaacaaatgggacaaagtggaccccgcagaactgttcagccaagctcccacggagaagaaagaagctaaccccaagctgaacatggtgaagttcctgcaggtggagggcagaggctgcgactacatcgtgctgtggctggactgcgacaaggagg

SEQ ID NO: 324161 - DNA, 571 bp, Artificial Sequence
  derived and/or modified sequence
ataggggttgtcggtagccgccccgggaacaaggaccggagctggatccgcggtgcggctgtgggtgagtccacctgtaggtggaagagccagtccagagaggagggccaggcatccacctggcctgacccatcactccagatccccaggccccagcatcttcctagcatggatttaggaataaaattgacctgagatcactggggccacttcaccttcccccaaatggagccacattcccaggatcatctcagccacttcagctgacctggtagttttttcttgtttttaatctcagatgtcttcaagtttccctaattccctaatttttcttcttcttgcctcaggagtcagcattggtaatagtgctgtgctgcggaagagtggagtctaaactttttcattgccagtgccccgaaactggagtgtgaaggaccgagacaaaatgaagactgtgctcatggttgctgaaaagccgtccttggcacagtcaattgccaaaatcctctctagagggagcctgtcctcacacaaagggctgaacggggcctgctcagtccacgagtacact

SEQ ID NO: 324162 - DNA, 550 bp, Artificial Sequence
  derived and/or modified sequence
aacaaggaccggagctggatccgcggtgcggctgtggatgtcttcaagtttccctaattccctaatttttcttcttcttgcctcaggagtcagcattggtaatagtgctgtgctgcggaagagtggagtctaaactttttcattgccagtgccccgaaactggagtgtgaaggaccgagacaaaatgaagactgtgctcatggttgctgaaaagccgtccttggcacagtcaattgccaaaatcctctctagagggagcctgtcctcacacaaagggctgaacggggcctgctcagtccacgagtacactgggacctttgctggccagccagtgcgcttcaagatgacgtctgtctgtggtcacgtgatgaccctggatttcctgggaaaatacaacaaatgggacaaagtggaccccgcagaactgttcagccaagctcccacggagaagaaagaagctaaccccaagctgaacatggtgaagttcctgcaggtggagggcagaggctgcgactacatcgtgctgtggctggactgcgacaaggagggg

SEQ ID NO: 324163 - DNA, 400 bp, Artificial Sequence
  derived and/or modified sequence
ttgtttttaatctcagatgtcttcaagtttccctaattccctaatttttcttcttcttgcctcaggttggtcttgttttttctttgttaaagtgattttccttgtagtggtgtaggttctattgacagcattgctatcctgagtgtcttttcttctctttaggagtcagcattggtaatagtgctgtgctgcggaagagtggagtctaaactttttcattgccagtgccccgaaactggagtgtgaaggaccgagacaaaatgaagactgtgctcatggttgctgaaaagccgtccttggcacagtcaattgccaaaatcctctctagagggagcctgtcctcacacaaagggctgaacggggcctgctcagtccacgagtacactgggacctttgctgg

SEQ ID NO: 324164 - DNA, 557 bp, Artificial Sequence
  derived and/or modified sequence
gaaataggggttgtcggtagccgccccgggaacaaggaccggagctggatccgcggtgcggctgtggcattggtaatagtgctgtgctgcggaagagtggagtctaaactttttcattgccagtgccccgaaactggagtgtgaaggaccgagacaaaatgaagactgtgctcatggttgctgaaaagccgtccttggcacagtcaattgccaaaatcctctctagagggagcctgtcctcacacaaagggctgaacggggcctgctcagtccacgagtacactgggacctttgctggccagccagtgcgcttcaagatgacgtctgtctgtggtcacgtgatgaccctggatttcctgggaaaatacaacaaatgggacaaagtggaccccgcagaactgttcagccaagctcccacggagaagaaagaagctaaccccaagctccctcaggcctcagtctgcacccaggctgccccgggagtgagaccccatccctgccctcctgctgccgccagagtagctgacagggtggttccatgtggcccagtgacatga

SEQ ID NO: 324165 - DNA, 543 bp, Artificial Sequence
  derived and/or modified sequence
gttgtcggtagccgccccgggaacaaggaccggagctggatccgcggtgcggctgtgggtgagtccacctgtaggtggaagagccagtccagagaggagggccaggcatccacctggcctgacccatcactccagatccccaggccccagcatcttcctagcatggatttaggaataaaattgacctgagatcactggggccacttcaccttcccccaaatggagccacattcccaggatcatctcagccacttcagctgacctggagtcagcattggtaatagtgctgtgctgcggaagagtggagtctaaactttttcattgccagtgccccgaaactggagtgtgaaggaccgagacaaaatgaagactgtgctcatggttgctgaaaagccgtccttggcacagtcaattgccaaaatcctctctagagggagcctgtcctcacacaaagggctgaacggggcctgctcagtccacgagtacactgggacctttgctggccagccagtgcgcttcaagatgacgtctgtctgtggtcac

SEQ ID NO: 324166 - DNA, 561 bp, Artificial Sequence
  derived and/or modified sequence
aacaaggaccggagctggatccgcggtgcggctgtggctctttagggtgagatctgctgtaccagtctcacaggtgagtccacctgtaggtggaagagccagtccagagaggagggccaggcatccacctggcctgacccatcactccagatccccaggccccagcatcttcctagcatggatttaggaataaaattgacctgagatcactggggccacttcaccttcccccaaatggagccacattcccaggatcatctcagccacttcagctgacctggagtcagcattggtaatagtgctgtgctgcggaagagtggagtctaaactttttcattgccagtgccccgaaactggagtgtgaaggaccgagacaaaatgaagactgtgctcatggttgctgaaaagccgtccttggcacagtcaattgccaaaatcctctctagagggagcctgtcctcacacaaagggctgaacggggcctgctcagtccacgagtacactgggacctttgctggccagccagtgcgcttcaagatgacgtctgtctgtggtcacgtg

SEQ ID NO: 324167 - protein, 70 aa, Artificial Sequence
  derived and/or modified sequence
MGSPGATTGWGLLDYKTEKWALLAKKGYQERDLEPQFSIITKLKGVSVTQIKELGNRLWDVADFVKPPQV

SEQ ID NO: 324168 - DNA, 120 bp, Artificial Sequence
  derived and/or modified sequence
cagaagggcggcgtggagggcaagtggcaggccgacgccgtgctgagctggtgccccctggccttcgccgtggtgcccagcaagcagctgagcgagctgtggtacatctgcagcgactag

SEQ ID NO: 324169 - protein, 47 aa, Artificial Sequence
  derived and/or modified sequence
MLGICRGRRKFLAASLSLLCIPAITWIYLFSGSFEDGKPVSLSPLES

SEQ ID NO: 324170 - protein, 136 aa, Artificial Sequence
  derived and/or modified sequence
MLGICRGRRKFLAASLSLLCIPAITWIYLFSGSFEDGKPVSLSPLESQAHSPRYTASSQRERESLEVRMREVEEENRALRRQLSLAQGRAPSHRRGNHSKTYSMEEGTGDSENLRAGIVAGNSSECGQQPVVEKCE

SEQ ID NO: 324171 - protein, 60 aa, Artificial Sequence
  derived and/or modified sequence
MLGICRGRRKFLAASLSLLCIPAITWIYLFSGSFEDGKPVSLSPLESQAHSPRYTASSQR

SEQ ID NO: 324172 - protein, 555 aa, Artificial Sequence
  derived and/or modified sequence
MLIWSEVSWIPNKHYSGIYGLMKLVLTKTLPANLERVIVLDTDITFATDIAELWAVFHKFKGQQVLGLVENQSDWYLGNLWKNHRPWPALGRGYNTGVILLLLDKLRKMKWEQMWRLTAERELMGMLSTSLADQDIFNAVIKQNPFLVYQLPCFWNVQLSDHTRSEQCYRDVSDLKVIHWNSPKKLRVKNKHVEFFRNLYLTFLEYDGNLLRRELFGCPSEADVNSENLQKQLSELDEDDLCYEFRRERFTVHRTHLYFLHYEYEPAADSTDVTLVAQLSMDRLQMLEAICKHWEGPISLALYLSDAEAQQFLRYAQGSEVLMSRHNVGYHIVYKEGQFYPVNLLRNVAMKHISTPYMFLSDIDFLPMYGLYEYLRKSVIQLDLANTKKAMIVPAFETLRYRLSFPKSKAELLSMLDMGTLFTFRYHVWTKGHAPTNFAKWRTATTPYRVEWEADFEPYVVVRRDCPEYDRRFVGFGWNKVAHIMELDVQEYEFIVLPNAYMIHMPHAPSFDITKFRSNKQYRICLKTLKEEFQQDMSRRYGFAALKYLTAENNS

SEQ ID NO: 324173 - DNA, 1668 bp, Artificial Sequence
  derived and/or modified sequence
atgcttatatggagcgaggtatcctggattcccaacaagcactattcgggcatctacggcttgatgaaactggtcttgactaaaacgcttcctgccaacctcgaacgggtgattgtactggatactgacataacctttgcaacggacattgccgagctgtgggccgtttttcacaaattcaagggacagcaagtactcggccttgtggagaatcagagcgattggtaccttggaaatttatggaagaaccaccgaccctggcctgccttagggagaggttataacactggagtgattctacttctgcttgataagctgaggaagatgaaatgggaacagatgtggagattgaccgcagaaagagagctgatgggaatgctttccacatccctggccgatcaggacatctttaatgctgtgattaagcagaacccattccttgtataccagctgccctgcttttggaatgtacagctttcggatcacaccaggagcgagcagtgctatagggacgtctctgatctgaaggtgatccactggaacagccctaagaagcttagggtaaagaacaagcatgtggagttcttcaggaatttgtatttgaccttcctggagtacgatgggaacctactccggcgagaactgtttggatgcccctccgaagcggacgtgaactctgaaaacctgcaaaaacagcttagtgagctcgatgaggacgacttgtgctatgagtttagacgcgagcgcttcactgtgcatagaacgcacctctattttctccactatgagtacgagcccgccgctgattccacagatgtaactttagtagcacaactgagcatggaccgcttgcagatgctcgaggcaatctgtaagcactgggagggtcctatttcattggcactgtatctgtctgacgctgaagcgcagcaattcctgagatacgcccagggcagcgaggtgctcatgtctaggcacaatgtgggttatcatattgtctacaaagagggccagttctaccccgttaatctgttgcggaatgtggccatgaagcacattagcactccatacatgtttctgtccgacatcgactttctgcctatgtacggtctgtatgagtatctgcgaaagtctgtgattcagctagatctggccaacacgaaaaaggcaatgattgtcccagcatttgagacactcaggtacagactatcttttccaaaaagcaaagccgaactgctctctatgttggacatgggcacattattcactttccgataccacgtgtggactaaaggccacgcccctacaaacttcgctaagtggcgcaccgctactaccccctaccgagtagaatgggaagcggactttgaaccgtacgtggtcgtgcgtcgcgactgtcccgagtatgatcgacgcttcgtgggcttcggatggaacaaagtggctcatatcatggaattggatgtccaggaatacgagtttatcgtattgcccaacgcttacatgatccacatgccccatgctccctcttttgacattaccaagttccggtccaacaagcagtaccgcatctgtctcaagacactgaaggaagaattccagcaggatatgtcaaggagatacgggtttgccgcacttaagtacttgacggccgagaacaactcttag

SEQ ID NO: 324174 - DNA, 1668 bp, Artificial Sequence
  derived and/or modified sequence
atgctgatctggagcgaggtgtcctggatccccaacaagcactacagcggcatctacggcctgatgaagctggtgctgaccaagaccctgcctgccaacctggagagggtcatcgtgctggacacagacatcacctttgccacagacattgctgagctgtgggccgtgttccacaagttcaagggccagcaggtgctgggcctggtggagaaccagagcgactggtacctgggcaacctgtggaagaaccaccggccctggccagccctgggccggggctacaacacaggagtcatcctgctgctgctggacaagctgaggaagatgaagtgggagcagatgtggaggctgacagctgagcgggagctgatgggcatgctgagcaccagcctggccgaccaggacatcttcaatgctgtgatcaagcagaaccccttcctggtgtaccagctgccctgcttctggaatgtgcagctgagtgaccacaccaggtctgagcagtgctacagagatgtgtctgacctgaaggtgatccactggaacagccccaagaagctgcgggtgaagaacaagcacgtggagttcttcaggaacctgtacctgaccttcctggagtatgatggcaacctgctgcggcgggagctgtttggctgccccagcgaggctgatgtgaacagcgagaacctgcagaagcagctgtctgagctggatgaagatgacctgtgctatgagttccggcgggagcgcttcaccgtgcacaggacccacctgtacttcctgcactatgaatatgagcctgctgctgacagcacagatgtgaccctggtggcccagctgtccatggaccggctgcagatgctggaggccatctgcaagcactgggagggccccatcagcctggccctgtacctgagtgatgctgaggcccagcagttcctgcgctatgcccagggcagcgaggtgctgatgagccgccacaacgtgggctaccacatcgtgtacaaggagggccagttctaccctgtgaacctgctgagaaatgtggccatgaagcacatcagcaccccctacatgttcctgagtgacatcgacttcctgcccatgtatggcctgtatgagtacctgaggaagagcgtcatccagctggacctggccaacaccaagaaggccatgattgtgcctgcctttgagaccctgcgctaccgcctgtccttccccaagagcaaggccgagctgctgtccatgctggacatgggcaccctcttcaccttccgctaccacgtgtggaccaagggccacgcccccaccaactttgccaagtggaggacagccaccaccccctacagagtggagtgggaggccgactttgagccctacgtggtggtgagaagagactgcccagaatatgacagaagatttgtgggcttcggctggaacaaggtggcccacatcatggagctggatgtgcaggagtatgagttcatcgtgctgcccaatgcctacatgatccacatgcctcatgcccccagctttgacatcaccaagttccgcagcaacaagcagtaccgcatctgcctgaagaccctgaaggaggagttccagcaggacatgagcagaagatatggctttgctgccctgaagtacctgacagctgagaacaacagctag

SEQ ID NO: 324175 - DNA, 2008 bp, Artificial Sequence
  derived and/or modified sequence
atgaaaggcaaatgacttttcaaacattctgcagctgggatgacttctttttttaattttttaaaatatgtcaaggtgatttgtaatccacagcaaaatgttaatatggtctgaagtttcctggatccccaataaacattactctgggatttatggtctgatgaagcttgtcctgaccaagactcttcctgccaacctggagagagtcatcgtccttgacacggatatcacctttgccactgacattgcagagctgtgggctgtgttccacaagttcaaaggtcagcaagtcctgggcttggtggagaaccagagtgactggtaccttggaaacctgtggaaaaatcaccgcccatggccagcccttggaagaggctacaacacaggggtgatcctgttacttctggataagctgcggaagatgaaatgggagcagatgtggaggctgaccgcagagagggagctcatgggcatgctctctacatccttagctgaccaggatattttcaatgccgtcatcaaacaaaaccccttccttgtgtaccagctcccctgcttctggaatgtgcagctgtcagaccacacccgctccgagcagtgctacagagacgtgtctgatctaaaggtcattcactggaactcccccaagaagctccgggtgaagaacaagcatgtggagttttttcgcaacctctacctgaccttcctggagtatgacggcaatcttctgaggcgggaactgtttggctgccccagtgaggctgatgtcaacagtgaaaacctccagaagcagctgtctgagctggacgaggacgacctgtgctatgagttccggcgagagcgcttcactgtccaccgcacccacctgtacttcctgcactacgagtatgagcctgcagcagacagcacggacgtcaccctggtcgctcagctgtccatggacaggctccagatgctggaggccatctgcaagcactgggaggggcccatcagcctggccctctacctgtcagacgccgaggcccagcagttcctccgctacgcacagggctctgaggtgcttatgagccgccacaacgtgggctaccacatcgtgtacaaggagggccagttctaccccgtgaacctgctgcgcaacgtggccatgaagcacatcagcactccctacatgttcctgtctgacattgacttcctgcccatgtatgggctctatgagtacctcaggaagtctgtcatccagctcgatcttgccaacaccaagaaagcaatgattgtccccgcgttcgagacactgcgctaccggctgtccttccccaagtcaaaagcggagttgctgtcaatgctggacatggggaccctcttcacattcaggtaccacgtctggacgaaaggccacgcacccacaaacttcgccaagtggcggaccgccaccacgccttaccgggttgagtgggaggccgattttgagccgtatgttgttgtgagacgtgactgcccggagtacgaccggaggtttgtaggctttggctggaacaaagtggctcatatcatggagctggatgtgcaggagtatgagttcattgtgctgcccaacgcctacatgatccacatgcctcatgcccccagcttcgacattaccaagttccgttccaacaagcaataccgcatctgtctcaaaaccctcaaggaagagtttcagcaggacatgtcccgccgctacggctttgctgccctgaaatatctcacagccgagaacaacagctagcaccaagaagcccaccactagggggagacatgctgtaggggaagtgccactcgctgtttggggcccggccttcaaattcaaaattgagccatgctttttcggtttgtttttatttatctctttggcccagccaagctgccctcactacagagaccttggacaaggatccagccagtccctctctgccccacaaccctgcattcccagaggttagctatgcagcccacctagatgagtctcttc

SEQ ID NO: 324176 - DNA, 1668 bp, Artificial Sequence
  derived and/or modified sequence
atgctgatctggagcgaggtgagctggatccccaacaagcactacagtggcatctatggtctgatgaaactggttcttaccaaaaccctccccgctaacctagaacgtgtaatcgtactcgatacggacataaccttcgccacggatatagcagagttgtgggccgtgttccataagttcaagggtcagcaagtactgggacttgtggaaaatcagtccgactggtatctcggaaacctgtggaaaaatcatcgcccctggccagctctaggtagaggatataataccggtgtaattctgttactgctggacaagcttagaaagatgaagtgggaacagatgtggcgtctcaccgcagagcgagagctgatgggaatgctttctacctcactggctgaccaggatatcttcaatgcagtgataaaacagaatccattcctggtttatcagttaccgtgtttctggaacgtccaactgtcagaccatacccgcagcgagcagtgttatagagatgtttcggatctgaaagtcatccactggaactcaccgaagaaattacgggtaaagaacaagcacgttgaattcttcaggaatctctatctcacttttctggaatatgacgggaacttactgcgccgggaactcttcgggtgtccttctgaagccgacgtgaactcagagaacttgcagaagcagctctccgagcttgatgaagacgacctctgttacgagttcaggagggagagattcactgtacatcggacccacctctattttctccactacgagtacgagccagctgccgactccaccgacgtaacactggtcgcccaacttagtatggaccgcctccagatgctggaggctatatgcaagcattgggaaggcccaatcagcctggccctttacctgtccgacgccgaggcccagcagtttctgagatacgcacaggggagcgaggtcctcatgtcacggcacaatgtgggataccatattgtgtacaaggaaggacagttttatccagtcaacctgctgcgtaatgtcgcaatgaaacacatcagcaccccctatatgttcctgtcagacatcgactttttgccaatgtacgggctctatgagtatctccggaaaagcgtgattcaattggatctggctaacaccaagaaggcgatgatagtccctgcttttgagaccttacgttatcgtttgtcctttccaaagagcaaagctgaactgctctcaatgcttgacatgggaactctgttcacctttaggtatcacgtgtggacaaagggacacgccccaacgaattttgccaaatggagaactgctacaacgccttatcgcgtggaatgggaagcggacttcgagccttatgttgtggtgagacgggactgtcctgaatatgaccggcggttcgtcggattcgggtggaacaaagtggcacacatcatggaactcgacgtgcaagaatacgaattcattgtgctccctaacgcatatatgatccacatgccacatgctcctagcttcgatatcactaagttccgaagcaacaagcagtatcggatctgcctgaaaacgctgaaggaggagttccagcaggacatgagtaggcgctatggcttcgccgctttgaagtacctaactgcggagaacaattcttag

SEQ ID NO: 324177 - DNA, 1668 bp, Artificial Sequence
  derived and/or modified sequence
atgctgatctggtcagaggtgtcttggattcctaacaagcactacagtggaatctatggcctcatgaagttggttctgaccaagacactcccggcaaacctggagagagttattgtgcttgatactgacataacttttgctacagacatcgcagaactctgggccgtgttccacaaattcaaagggcagcaggtgctaggcttagtagagaatcagtcggattggtatctcggtaacctgtggaagaatcatcggccttggccagcgctcgggagaggatacaataccggtgtgatccttctgctgctcgataagctccgtaagatgaaatgggagcagatgtggcgcctcactgcagagcgcgagctcatgggcatgcttagtacaagcctggcagaccaggacatatttaacgctgttataaagcagaaccctttcctcgtctatcagctcccatgcttttggaatgtgcagttaagcgaccacacacgatccgagcagtgttaccgggacgttagtgacctgaaggtgattcattggaattctcccaagaaattacgggtcaaaaataagcacgtagaattctttcggaatctgtacttgacattcctggagtacgacggcaacctgctgagacgggagctgttcgggtgccctagtgaagctgatgtcaatagcgaaaacctgcagaaacaactaagcgaactagatgaggatgatctgtgctacgagttcaggagagaacgtttcacagtgcaccgcacacatctgtactttctacattatgaatacgagcctgccgctgactcgacagatgtaacactggtggctcagctgtctatggatcgcttacagatgttggaagctatatgcaagcattgggaaggcccaattagcctcgccttatatctaagcgacgcagaggcccagcagtttttgaggtacgctcaaggttcggaggtgctgatgagcaggcataatgtcggttaccatattgtgtacaaggagggacagttctaccctgtcaacctgttgaggaacgtagctatgaaacacattagcactccctatatgtttctttccgatattgattttctcccgatgtacggcctctatgaatatctcaggaagtcagtcattcagctcgatctggccaacaccaaaaaggccatgatcgtccccgcatttgaaaccttgcgctataggttgtcttttccaaaaagcaaagcagaactcctgtctatgcttgatatgggcaccctattcacttttagataccacgtttggaccaagggccacgcgcctaccaattttgcaaagtggcggactgctaccactccctaccgtgtagaatgggaagctgatttcgagccctatgttgtagtccggcgtgattgtcccgaatacgatcggagattcgttggatttgggtggaataaagtcgctcacatcatggagctcgatgtgcaggagtacgagttcatcgttctgcctaatgcatacatgattcacatgcctcacgcaccttcctttgatatcacaaagtttcggtctaataaacagtatcgcatttgccttaagaccctgaaagaagagtttcagcaagatatgtctagacggtatgggtttgcagccctgaaatacctcaccgccgaaaacaactcttag

SEQ ID NO: 324178 - DNA, 1668 bp, Artificial Sequence
  derived and/or modified sequence
atgctgatctggagcgaggtgagctggatccccaacaagcactacagcggcatctacggcctgatgaagctggtgctgaccaagaccctgcccgccaacctggagagagtgatcgtgctggacaccgacatcaccttcgccaccgacatcgccgagctgtgggccgtgttccacaagttcaagggccagcaggtgctgggcctggtggagaaccagagcgactggtacctgggcaacctgtggaagaaccacagaccctggcccgccctgggcagaggctacaacaccggcgtgatcctgctgctgctggacaagctgagaaagatgaagtgggagcagatgtggagactgaccgccgagagagagctgatgggcatgctgagcaccagcctggccgaccaggacatcttcaacgccgtgatcaagcagaaccccttcctggtgtaccagctgccctgcttctggaacgtgcagctgagcgaccacaccagaagcgagcagtgctacagagacgtgagcgacctgaaggtgatccactggaacagccccaagaagctgagagtgaagaacaagcacgtggagttcttcagaaacctgtacctgaccttcctggagtacgacggcaacctgctgagaagagagctgttcggctgccccagcgaggccgacgtgaacagcgagaacctgcagaagcagctgagcgagctggacgaggacgacctgtgctacgagttcagaagagagagattcaccgtgcacagaacccacctgtacttcctgcactacgagtacgagcccgccgccgacagcaccgacgtgaccctggtggcccagctgagcatggacagactgcagatgctggaggccatctgcaagcactgggagggccccatcagcctggccctgtacctgagcgacgccgaggcccagcagttcctgagatacgcccagggcagcgaggtgctgatgagcagacacaacgtgggctaccacatcgtgtacaaggagggccagttctaccccgtgaacctgctgagaaacgtggccatgaagcacatcagcaccccctacatgttcctgagcgacatcgacttcctgcccatgtacggcctgtacgagtacctgagaaagagcgtgatccagctggacctggccaacaccaagaaggccatgatcgtgcccgccttcgagaccctgagatacagactgagcttccccaagagcaaggccgagctgctgagcatgctggacatgggcaccctgttcaccttcagataccacgtgtggaccaagggccacgcccccaccaacttcgccaagtggagaaccgccaccaccccctacagagtggagtgggaggccgacttcgagccctacgtggtggtgagaagagactgccccgagtacgacagaagattcgtgggcttcggctggaacaaggtggcccacatcatggagctggacgtgcaggagtacgagttcatcgtgctgcccaacgcctacatgatccacatgccccacgcccccagcttcgacatcaccaagttcagaagcaacaagcagtacagaatctgcctgaagaccctgaaggaggagttccagcaggacatgagcagaagatacggcttcgccgccctgaagtacctgaccgccgagaacaacagctag

SEQ ID NO: 324179 - DNA, 408 bp, Artificial Sequence
  derived and/or modified sequence
atgcttggcatctgtaggggtcgccgcaaatttctggctgcaagcctgtctctactgtgcatacctgccattacatggatttacttatttagcggttctttcgaagatggcaaaccagtgtccctctcccccctcgagtcccaagcccacagtccaaggtatacagcaagctcccaacgcgagcgggaaagtctcgaagttcgtatgagagaggttgaggaggagaatagagccctcaggcggcagttgagtctggcacaggggcgagcaccctcacacagaagggggaaccacagtaagacttactcaatggaagaagggacaggtgattcagagaatttaagagctgggattgttgctgggaacagcagcgaatgcggccagcagccagtggtggaaaagtgctag

SEQ ID NO: 324180 - DNA, 144 bp, Artificial Sequence
  derived and/or modified sequence
atgctcggcatctgcagaggaaggcgcaagtttctggcagcttcactgagtctgctttgtattccagctattacatggatttatctgtttagtggctcctttgaagatgggaaaccagttagtctgtctcccctcgaatcctag

SEQ ID NO: 324181 - DNA, 411 bp, Artificial Sequence
  derived and/or modified sequence
atgctcggtatttgtcgcgggcggcgaaaatttcttgccgcctctctgtctctgttgtgcatcccagccattacctggatatacctgttctctgggtcttttgaagatggcaagcccgtgtcattatccccattggagtcccaggcccactcccctcgctataccgcaagctcgcaacgcgaaagagagtccttggaggttcgcatgcgcgaagtggaggaggaaaatagagccctgcgtaggcagttgtcacttgcgcaggggagagcacccagccatcgcagaggcaatcattcaaagacctacagtatggaggagggcaccggagatagtgagaacttgagggcaggtatcgtcgccggaaactcctccgagtgcggacagcaaccggtcgtggaaaagtgcgagtag

SEQ ID NO: 324182 - DNA, 183 bp, Artificial Sequence
  derived and/or modified sequence
atgctgggcatttgtagaggtcggagaaaatttttggccgcaagcctctcactgctctgcatcccagctatcacctggatttatctgttctcgggatctttcgaagatggcaagcccgtgtcactctcacccctcgaatcacaagctcactctccacgctataccgcctctagtcagaggtag

SEQ ID NO: 324183 - DNA, 330 bp, Artificial Sequence
  derived and/or modified sequence
atgctaggcatttgcagaggaagacgaaaattcttagctgcgtctctgagcctgctgtgcattccagcgattacctggatatacttgttcagcggaagcttcgaagacggcaagccagtgagtctgagtcccctggagagccaggcccatagcccaagatacaccgcgtccagtcagcgagaacgagaatctctggaagtaaggatgcgggaagtcgaggaggagaatagggctctcagacgccagcttagccttgcccagggccgagccccctcccatagaaggggaaatcactccaagacctacagcatggaagagggaacgggctag

SEQ ID NO: 324184 - DNA, 408 bp, Artificial Sequence
  derived and/or modified sequence
atgctgggcatctgccggggccgcaggaagttcctggccgccagcctgagcctgctgtgcatcccagccatcacctggatctacctgttcagcggcagctttgaagatggcaagcctgtgtccctgagccccctggagagccaggcccacagcccccgctacacagccagcagccagcgggagcgggagagcctggaggtgaggatgagggaggtggaggaggagaacagagccctgcggcggcagctgagcctggcccagggccgggcccccagccaccggcggggcaaccacagcaagacctacagcatggaggagggcaccggggacagcgagaacctgcgggccggcatcgtggccggcaacagcagtgaatgtggccagcagcctgtggtggagaagtgctag

SEQ ID NO: 324185 - DNA, 144 bp, Artificial Sequence
  derived and/or modified sequence
atgctgggcatctgccggggccgcaggaagttcctggccgccagcctgagcctgctgtgcatcccagccatcacctggatctacctgttcagcggcagctttgaagatggcaagcctgtgtccctgagccccctggagagctag

SEQ ID NO: 324186 - DNA, 411 bp, Artificial Sequence
  derived and/or modified sequence
atgctgggcatctgccggggccgcaggaagttcctggccgccagcctgagcctgctgtgcatcccagccatcacctggatctacctgttcagcggcagctttgaagatggcaagcctgtgtccctgagccccctggagagccaggcccacagcccccgctacacagccagcagccagcgggagcgggagagcctggaggtgaggatgagggaggtggaggaggagaacagagccctgcggcggcagctgagcctggcccagggccgggcccccagccaccggcggggcaaccacagcaagacctacagcatggaggagggcaccggggacagcgagaacctgcgggccggcatcgtggccggcaacagcagtgaatgtggccagcagcctgtggtggagaagtgtgagtag

SEQ ID NO: 324187 - DNA, 183 bp, Artificial Sequence
  derived and/or modified sequence
atgctgggcatctgccggggccgcaggaagttcctggccgccagcctgagcctgctgtgcatcccagccatcacctggatctacctgttcagcggcagctttgaagatggcaagcctgtgtccctgagccccctggagagccaggcccacagcccccgctacacagccagcagccagaggtag

SEQ ID NO: 324188 - DNA, 330 bp, Artificial Sequence
  derived and/or modified sequence
atgctgggcatctgccggggccgcaggaagttcctggccgccagcctgagcctgctgtgcatcccagccatcacctggatctacctgttcagcggcagctttgaagatggcaagcctgtgtccctgagccccctggagagccaggcccacagcccccgctacacagccagcagccagcgggagcgggagagcctggaggtgaggatgagggaggtggaggaggagaacagagccctgcggcggcagctgagcctggcccagggccgggcccccagccaccggcggggcaaccacagcaagacctacagcatggaggagggcaccggctag

SEQ ID NO: 324189 - DNA, 773 bp, Artificial Sequence
  derived and/or modified sequence
ccccttgttttcagcgcgttctggaacagagctgcacgtcagaggaagaactgagcagccttcgagctaaaagacttggcattaaactttgacactttaatggtctctaggatattagatagtattttttcatataatgttcttctccgacacggtaatggcatcagaaacagaatctgctatgcctgccaacgtgcacggtgaggctcatcgccgcagagaacctacattaagaaacgcattcagatgcatcagccgtttgtaaagcacctgtcgtgagccagagagtattatgagggaggccgaggacttcatgctccggacagagaaacggcgctgggattagggattgccacttctgagaggatgctgggaatctgcagggggagacggaaattcttggctgcctcgttgagtcttctctgcatcccagccatcacctggatttacctgttttctgggagcttcgaagatggaaagcccgtgtctctgtcaccgctggagtcccaggcacacagccccaggtacacggcctccagccagcgggagcgcgagagcctggaggtgcgcatgcgcgaggtggaggaggagaaccgcgccctccgcaggcagctcagcctggcccagggccgagccccatcccatcgccgaggcaaccactccaagacctactccatggaggagggcactggagacagcgagaaccttcgggctggcatcgtggcaggcaacagctccgagtgtgggcagcagccggtcgtggagaaatgcga

SEQ ID NO: 324190 - DNA, 568 bp, Artificial Sequence
  derived and/or modified sequence
aaataactccacagcatgtctcattaggccaggaacactccagctaatcgaggcgtgcctttgtcgtgcgctgctcgtgccaggggagttaaaaaaagaaataggcctgatcccaagggtgtgggcagggcagagataataaacccaaatacaaagtcaggccacccaggaatgaggtggtgtgctctatcggggccggattcccccagctccagatcatctggccaaatctgcaccctcctcccgggcctcccttttgctggggatggtttgggcagagaacctacattaagaaacgcattcagatgcatcagccgtttgtaaagcacctgtcgtgagccagagagtattatgagggaggccgaggacttcatgctccggacagagaaacggcgctgggattagggattgccacttctgagaggatgctgggaatctgcagggggagacggaaattcttggctgcctcgttgagtcttctctgcatcccagccatcacctggatttacctgttttctgggagcttcgaagatggaaagcccgtgtctctgtcaccgctggagtccca

SEQ ID NO: 324191 - DNA, 559 bp, Artificial Sequence
  derived and/or modified sequence
agatttgacagtcaaggatcctcatggcagcatggagaggccaggcgtgtctgcgtggccattctgtggagagtattatgagggaggccgaggacttcatgctccggacagagaaacggcgctgggattagggattgccacttctgagaggatgctgggaatctgcagggggagacggaaattcttggctgcctcgttgagtcttctctgcatcccagccatcacctggatttacctgttttctgggagcttcgaagatggaaagcccgtgtctctgtcaccgctggagtcccaggcacacagccccaggtacacggcctccagccagcgggagcgcgagagcctggaggtgcgcatgcgcgaggtggaggaggagaaccgcgccctccgcaggcagctcagcctggcccagggccgagccccatcccatcgccgaggcaaccactccaagacctactccatggaggagggcactggagacagcgagaaccttcgggctggcatcgtggcaggcaacagctccgagtgtgggcagcagccggtcgtggagaaatgcgag

SEQ ID NO: 324192 - DNA, 560 bp, Artificial Sequence
  derived and/or modified sequence
attcagaacagactagacaaataactccacagcatgtctcattaggccaggaacactccagctaatcgaggcgtgcctttgtcgtgcgctgctcgtgccaggggagttaaaaaaagaaataggcctgatcccaagggtgtgggcagggcagagataataaacccaaatacaaagtcaggccacccaggaatgaggtggtgtgctctatcggggccggattcccccagctccagatcatctggccaaatctgcaccctcctcccgggcctcccttttgctggggatggtttgggcagagagagtattatgagggaggccgaggacttcatgctccggacagagaaacggcgctgggattagggattgccacttctgagaggatgctgggaatctgcagggggagacggaaattcttggctgcctcgttgagtcttctctgcatcccagccatcacctggatttacctgttttctgggagcttcgaagatggaaagcccgtgtctctgtcaccgctggagtcccaggcacacagccccaggtacacggcctccagccagcgg

SEQ ID NO: 324193 - DNA, 562 bp, Artificial Sequence
  derived and/or modified sequence
aagaatcttttccatttctgttgaatgagggggcttgagaaaaagctcacgaaattaaaaggagaatgaagacgcttctgaagggagctcgaacctacattaagaaacgcattcagatgcatcagccgtttgtaaagcacctgtcgtgagccagagagtattatgagggaggccgaggacttcatgctccggacagagaaacggcgctgggattagggattgccacttctgagaggatgctgggaatctgcagggggagacggaaattcttggctgcctcgttgagtcttctctgcatcccagccatcacctggatttacctgttttctgggagcttcgaagatggaaagcccgtgtctctgtcaccgctggagtcccaggcacacagccccaggtacacggcctccagccagcgggagcgcgagagcctggaggtgcgcatgcgcgaggtggaggaggagaaccgcgccctccgcaggcagctcagcctggcccagggccgagccccatcccatcgccgaggcaaccactccaagacctactccatggaggagggcactgg

SEQ ID NO: 324194 - DNA, 408 bp, Artificial Sequence
  derived and/or modified sequence
atgctgggcatctgccggggccggcggaagttcctggccgccagcctcagcctactgtgtataccggctataacttggatctacctcttttctggctcattcgaggacggaaagccggtgtccttatcccctctggagtcccaagctcacagcccccgctacacggctagttcccagcgcgagcgcgaatccctggaggttagaatgagagaagtggaggaggagaaccgggccctccgccgccagctgagtttagctcaggggagggccccctcccatcgccgggggaaccatagcaaaacttatagtatggaggaaggtactggagacagtgaaaacctcagagccgggatagttgcaggcaacagctccgaatgtgggcagcagccagtggtggaaaagtgctag

SEQ ID NO: 324195 - DNA, 144 bp, Artificial Sequence
  derived and/or modified sequence
atgctgggcatctgccggggccggcggaagttcctggccgccagcctgtctctattatgtattccagcaatcacctggatatacctgtttagcgggtccttcgaggacggcaagcctgtgtccctgtcacctttggaaagttag

SEQ ID NO: 324196 - DNA, 411 bp, Artificial Sequence
  derived and/or modified sequence
atgctgggcatctgccggggccggcggaagttcctggccgccagcctctctcttctgtgcattcccgcgatcacttggatctatcttttctccggcagcttcgaggatgggaaaccagtcagcctgtcccctctggagagtcaagcacactctccccgatacacagcctcttcacagagggaacgggaatccctcgaggtgcggatgagagaagtggaagaggaaaatagagcgctccgccgccagctttcgttagctcagggccgagcaccatcccataggagaggcaatcactccaaaacttattctatggaggagggtaccggtgacagcgagaatctgagggctggcatcgtcgcggggaattctagcgaatgcgggcagcaacctgtcgtggaaaagtgcgaatag

SEQ ID NO: 324197 - DNA, 183 bp, Artificial Sequence
  derived and/or modified sequence
atgctgggcatctgccggggccggcggaagttcctggccgccagcctatcgctgctgtgcattcccgcgatcacttggatatacctctttagtggatctttcgaggacggaaaaccggtcagtctttccccgctcgagagccaagctcatagcccaagatacaccgcaagctcccaacgatag

SEQ ID NO: 324198 - DNA, 330 bp, Artificial Sequence
  derived and/or modified sequence
atgctgggcatctgccggggccggcggaagttcctggccgccagcttgtcactgctctgcatacctgctatcacatggatttaccttttttccggctcctttgaagatggcaagccagtgtccttgtcccccttagaaagtcaggcgcatagcccacgctatacggcctcctctcagcgtgagcgcgaatctctggaggtgaggatgagagaggtcgaggaagagaaccgtgccctgaggcgtcaactctctctcgctcagggacgcgctccaagccaccgacggggaaatcattcgaagacctattcaatggaagaggggacagggtag

SEQ ID NO: 324199 - DNA, 408 bp, Artificial Sequence
  derived and/or modified sequence
atgcttgggatttgtcgaggccgaaggaaattcctggcagctagcctgagcctcttgtgcattccagccattacttggatctacctcttctctggatcctttgaggacgggaaacccgtgagtctgagcccccttgagtcacaggcacatagcccccgatataccgcatcttcccagcgagaacgcgaatccctagaggtacgtatgagggaagtggaggaagagaaccgtgccctcagacgacagctctctctagcccaggggagagctccttctcacaggagaggcaaccacagcaaaacttactctatggaggaggggaccggcgactctgaaaacttgagggccggaatcgttgctgggaattcctcagagtgtgggcagcagcctgtggttgaaaagtgttag

SEQ ID NO: 324200 - DNA, 144 bp, Artificial Sequence
  derived and/or modified sequence
atgttgggcatctgtcgcggtcggaggaagtttttggccgcatctctcagtttactctgcattccggctatcacttggatctatttattcagcggatccttcgaggatggaaagcctgtctccctttcaccgttagaatcttag

SEQ ID NO: 324201 - DNA, 411 bp, Artificial Sequence
  derived and/or modified sequence
atgctgggtatatgcagggggaggcgcaaattcctggccgctagcctgagtctcctctgtattccagccattacctggatttatctgtttagtggaagtttcgaagacgggaaacccgtatccctttcacccctggagtctcaggctcatagccccaggtacaccgcttcaagtcagcgggaacgggagagcctcgaagttcggatgagagaggttgaggaagagaaccgggcacttagaagacagctgagcctcgcccagggacgcgctccgtctcatcgcaggggaaaccactctaagacctatagtatggaggaaggcactggcgacagtgagaacctgcgggctggcattgtagcgggaaatagtagcgagtgtgggcagcagcccgtggtggaaaaatgcgagtag

SEQ ID NO: 324202 - DNA, 183 bp, Artificial Sequence
  derived and/or modified sequence
atgctgggcatctgccgcggaagacggaaatttttggccgcatcactgtccctcctctgcatacctgccataacatggatctatctcttctccggtagttttgaagatggcaagccggtgagcctcagtccactcgaaagccaggcccattcccctcgctacaccgctagctcccaaaggtag

SEQ ID NO: 324203 - DNA, 330 bp, Artificial Sequence
  derived and/or modified sequence
atgctgggtatatgtcggggtcgtcgaaagttcctcgcggcatcactctccctcctatgtattcctgcaataacttggatctacctgttctcaggatctttcgaagacgggaaacccgtaagcttatcaccgctggaaagtcaggctcactctccacggtataccgcttcttcccagagggagcgcgagagtttggaagtccggatgagagaggttgaggaagagaaccgtgcattgagacggcaactatcactcgcacaaggaagggcacccagccacaggagagggaaccactcaaagacgtactccatggaagagggaacaggctag

SEQ ID NO: 324204 - DNA, 408 bp, Artificial Sequence
  derived and/or modified sequence
atgctgggcatctgcagaggcagaagaaagttcctggccgccagcctgagcctgctgtgcatccccgccatcacctggatctacctgttcagcggcagcttcgaggacggcaagcccgtgagcctgagccccctggagagccaggcccacagccccagatacaccgccagcagccagagagagagagagagcctggaggtgagaatgagagaggtggaggaggagaacagagccctgagaagacagctgagcctggcccagggcagagcccccagccacagaagaggcaaccacagcaagacctacagcatggaggagggcaccggcgacagcgagaacctgagagccggcatcgtggccggcaacagcagcgagtgcggccagcagcccgtggtggagaagtgctag

SEQ ID NO: 324205 - DNA, 144 bp, Artificial Sequence
  derived and/or modified sequence
atgctgggcatctgcagaggcagaagaaagttcctggccgccagcctgagcctgctgtgcatccccgccatcacctggatctacctgttcagcggcagcttcgaggacggcaagcccgtgagcctgagccccctggagagctag

SEQ ID NO: 324206 - DNA, 411 bp, Artificial Sequence
  derived and/or modified sequence
atgctgggcatctgcagaggcagaagaaagttcctggccgccagcctgagcctgctgtgcatccccgccatcacctggatctacctgttcagcggcagcttcgaggacggcaagcccgtgagcctgagccccctggagagccaggcccacagccccagatacaccgccagcagccagagagagagagagagcctggaggtgagaatgagagaggtggaggaggagaacagagccctgagaagacagctgagcctggcccagggcagagcccccagccacagaagaggcaaccacagcaagacctacagcatggaggagggcaccggcgacagcgagaacctgagagccggcatcgtggccggcaacagcagcgagtgcggccagcagcccgtggtggagaagtgcgagtag

SEQ ID NO: 324207 - DNA, 183 bp, Artificial Sequence
  derived and/or modified sequence
atgctgggcatctgcagaggcagaagaaagttcctggccgccagcctgagcctgctgtgcatccccgccatcacctggatctacctgttcagcggcagcttcgaggacggcaagcccgtgagcctgagccccctggagagccaggcccacagccccagatacaccgccagcagccagagatag

SEQ ID NO: 324208 - DNA, 330 bp, Artificial Sequence
  derived and/or modified sequence
atgctgggcatctgcagaggcagaagaaagttcctggccgccagcctgagcctgctgtgcatccccgccatcacctggatctacctgttcagcggcagcttcgaggacggcaagcccgtgagcctgagccccctggagagccaggcccacagccccagatacaccgccagcagccagagagagagagagagcctggaggtgagaatgagagaggtggaggaggagaacagagccctgagaagacagctgagcctggcccagggcagagcccccagccacagaagaggcaaccacagcaagacctacagcatggaggagggcaccggctag

SEQ ID NO: 324209 - DNA, 405 bp, Artificial Sequence
  derived and/or modified sequence
atgtttgcggacctcgactatgacatagaggaggacaagctggggattccaaccgtccctggcaaagttaccctgcagaaggacgctcagaatctcataggcatctctatcgggggcggcgctcaatactgtccgtgcctttacatcgttcaggtgttcgacaacacgcccgctgctctggatggaaccgttgccgcgggcgacgagatcactggtgtcaacgggcggtccattaagggcaagacaaaagtagaagtagccaaaatgattcaggaggtgaaaggcgaggtgactatacactacaacaagctacaggctgatcccaagcagggtatgtcactcgacatcgtgcttaaaaaagtcaaacatcggctcgtggagaatatgagctccggcacagcttag

SEQ ID NO: 324210 - DNA, 393 bp, Artificial Sequence
  derived and/or modified sequence
atgttcgccgacttggactatgacatcgaagaggacaaacttggaatcccaaccgtccctgggaaggtcacattgcaaaaagatgctcagaacctgattggcattagtatcggagggggcgctcagtactgtccttgtctttacatcgtccaggttttcgataataccccagccgcccttgatggaaccgtagctgccggtgacgaaatcacaggtgtcaatggccgcagcatcaagggaaaaactaaagtggaagtggccaaaatgatccaggaggtgaaaggggaggtcacaatccactataacaagctgcaggcagatcctaagcagggcatgtctctggatattggccagagactcggatttcatggccctggcccacatagctcgtag

SEQ ID NO: 324211 - DNA, 117 bp, Artificial Sequence
  derived and/or modified sequence
atgttcgccgacctggattacgatattgaggaggataagctgggaatcccaaccgtccccggaaaggtcacactgcagaaggacgcgcagaaccttataggaatctccattggatag

SEQ ID NO: 324212 - DNA, 405 bp, Artificial Sequence
  derived and/or modified sequence
atgtttgctgacctggactatgacatcgaggaggacaagctgggcatccccaccgtgcctgggaaggtgaccctgcagaaggatgcccagaacctgattggcatcagcattggaggaggagcccagtactgcccctgcctgtacatcgtgcaggtgtttgacaacaccccagctgccctggatggcaccgtggccgctggagatgagatcactggagtgaatggccgcagcatcaagggcaagaccaaggtggaggtggccaagatgatccaggaggtgaagggggaggtgaccatccactacaacaagctgcaggccgaccccaagcagggcatgagcctggacatcgtgctgaagaaggtgaagcaccggctggtggagaacatgagcagcggcacagcctag

SEQ ID NO: 324213 - DNA, 393 bp, Artificial Sequence
  derived and/or modified sequence
atgtttgctgacctggactatgacatcgaggaggacaagctgggcatccccaccgtgcctgggaaggtgaccctgcagaaggatgcccagaacctgattggcatcagcattggaggaggagcccagtactgcccctgcctgtacatcgtgcaggtgtttgacaacaccccagctgccctggatggcaccgtggccgctggagatgagatcactggagtgaatggccgcagcatcaagggcaagaccaaggtggaggtggccaagatgatccaggaggtgaagggggaggtgaccatccactacaacaagctgcaggccgaccccaagcagggcatgagcctggacatcggccagaggctgggcttccacggccctggcccccacagcagctag

SEQ ID NO: 324214 - DNA, 117 bp, Artificial Sequence
  derived and/or modified sequence
atgtttgctgacctggactatgacatcgaggaggacaagctgggcatccccaccgtgcctgggaaggtgaccctgcagaaggatgcccagaacctgattggcatcagcattggatag

SEQ ID NO: 324215 - DNA, 405 bp, Artificial Sequence
  derived and/or modified sequence
atgttcgccgacctggactacgacatcgaggaggacaagctgggcatccccacggtccctggtaaggtgacccttcagaaagacgcccagaacctcatcggtatctccatcgggggaggagcccagtactgtccatgtctctacattgtgcaggtgttcgacaatacacccgctgccctcgatgggacagtggctgctggcgatgagataactggggttaatggcagatccataaaggggaaaacaaaagtcgaagtggccaagatgatacaagaagttaaaggagaagtcactattcactacaataagttgcaagcagaccccaaacaaggtatgtcccttgatatcgtgctgaaaaaggtgaaacatcgcctagtcgagaatatgagctccggcaccgcgtag

SEQ ID NO: 324216 - DNA, 393 bp, Artificial Sequence
  derived and/or modified sequence
atgttcgccgacctggactacgacatcgaggaggacaagctgggcattcccaccgtgccggggaaggtgaccctgcaaaaggatgcgcagaacttaattggcatctcaattggagggggagctcagtattgcccgtgcttgtacatcgtgcaggtgttcgacaacacacctgcagcgctagatggcactgtggccgccggagacgagataactggcgtcaacggccgatctatcaagggtaaaactaaggttgaggtggcaaaaatgatccaggaagttaagggggaggtaaccattcattacaacaagcttcaagccgaccctaaacaaggtatgagcctggacataggccagaggctgggctttcacgggcccggcccacactcctcctag

SEQ ID NO: 324217 - DNA, 117 bp, Artificial Sequence
  derived and/or modified sequence
atgttcgccgacctggactacgacatcgaggaggacaagctgggcatccctaccgtgcctggaaaggtgactctccagaaagacgcccagaatcttatcggtattagtatcgggtag

SEQ ID NO: 324218 - DNA, 405 bp, Artificial Sequence
  derived and/or modified sequence
atgttcgccgacttagattatgatatagaagaagacaagctaggcattccaactgtgcccggtaaagttactctgcaaaaagacgcgcaaaacctgattggaataagtattggaggtggggctcagtactgcccatgcctgtacatcgtccaggtgttcgacaacaccccagctgccttggatggtacggtggctgccggagatgagataaccggcgttaacggtcgatccatcaaaggtaagaccaaagtggaggtcgccaagatgatccaggaagtgaagggcgaagtgaccattcactacaataaactgcaagccgaccccaagcaaggcatgtcgctcgacatcgttcttaagaaagtgaagcatcgactggtcgagaacatgtcgagcggcaccgcatag

SEQ ID NO: 324219 - DNA, 393 bp, Artificial Sequence
  derived and/or modified sequence
atgttcgccgatttggactatgatatcgaagaagacaaactcggaatacctacagtgcccggtaaggttacgctgcaaaaagatgcccagaatctgataggcatctctatcggagggggagcacaatactgcccgtgcctttatatcgttcaggtctttgacaacacccctgccgctctcgatggcaccgtggcagctggtgacgaaatcactggcgtgaatggtcgctcaattaaaggcaagaccaaagtcgaggtggcaaagatgattcaggaggtgaagggtgaagtcacaatacattataataagctgcaggcagatcctaaacagggaatgtccctggacattggccagcgcctgggcttccacggcccagggcctcacagctcctag

SEQ ID NO: 324220 - DNA, 117 bp, Artificial Sequence
  derived and/or modified sequence
atgttcgcagatctcgactacgacatagaagaggacaaactgggtattcccacagtacctggcaaggtaacattgcagaaggacgcccagaatctgatcgggatctccattgggtag

SEQ ID NO: 324221 - DNA, 559 bp, Artificial Sequence
  derived and/or modified sequence
ggcactgctgtcccgtatgaggtggtggagggaggggtggcgttggcatttaggcacttgggttccttaaatcctatgctcctttctctcccggatccagttccccattcccctaccgagctgggcagttagccagcccactccaactctcggaaccatgtttgcagacttggattatgacatcgaagaggataaactcggaatcccgactgtgcctgggaaggtgaccctgcagaaggatgctcagaacctgatcgggatcagcattggaggaggggcccagtactgtccctgcctctatatcgtccaggtatttgacaacaccccagcagccttggacggcacagtggcagctggcgatgagatcaccggtgtcaatggcaggtcaatcaaagggaaaactaaggtggaggtggcgaagatgattcaggaggtgaagggggaggtgaccatccactacaacaagctgcaggcggaccccaagcagggcatgtccctggacattgtgttgaagaaagtcaagcaccggctggtggagaacatgagttcagggaccgca

SEQ ID NO: 324222 - DNA, 544 bp, Artificial Sequence
  derived and/or modified sequence
aagtgacgtgacaatcgcggccaccgccaggtggaacggcaggtgggttcaggtaccagcctggccgggacccggctgtgggaccaacgcttccgttccccattcccctaccgagctgggcagttagccagcccactccaactctcggaaccatgtttgcagacttggattatgacatcgaagaggataaactcggaatcccgactgtgcctgggaaggtgaccctgcagaaggatgctcagaacctgatcgggatcagcattggaggaggggcccagtactgtccctgcctctatatcgtccaggtatttgacaacaccccagcagccttggacggcacagtggcagctggcgatgagatcaccggtgtcaatggcaggtcaatcaaagggaaaactaaggtggaggtggcgaagatgattcaggaggtgaagggggaggtgaccatccactacaacaagctgcaggcggaccccaagcagggcatgtccctggacattggccagcgcctcggcttccatggcccagggcctcactcttcata

SEQ ID NO: 324223 - DNA, 631 bp, Artificial Sequence
  derived and/or modified sequence
actcaattagccacctaaggagagagtagggcggggcttccaccggccgtgggatatgtggataatcatccttctgtatctttcttccatggctcctggggcagctggggaagcaagctggatgggcctggccccatgctgccggatgaggtggatgcctggctgtggctctgggagagccaacctcccccagggaacccactttacacaatagcagtggcagcagaggctggcgaggagacaagattcggactctggggagcactgatagcatttcccgagcctcagcgagcttccgccaatacttgttctcgttcttggttccgagcgtcccgggagccgggaagggaaggattgtctgcagggattggagcaaatatccagtggggggaaagccgggacttccgcgtcttgccggaagtgacgtgacaatcgcggccaccgccaggtggaacggcagttccccattcccctaccgagctgggcagttagccagcccactccaactctcggaaccatgtttgcagacttggattatgacatcgaagaggataaactcggaatcccgactgtgcctgggaaggtgaccctgcagaaggatgctcagaacctgatcgggatcagcattgga

SEQ ID NO: 324224 - DNA, 405 bp, Artificial Sequence
  derived and/or modified sequence
atgttcgccgacctggactacgacatcgaggaggacaagctgggcatccccaccgtgcccggcaaggtgaccctgcagaaggacgcccagaacctgatcggcatcagcatcggcggcggcgcccagtactgcccctgcctgtacatcgtgcaggtgttcgacaacacccccgccgccctggacggcaccgtggccgccggcgacgagatcaccggcgtgaacggcagaagcatcaagggcaagaccaaggtggaggtggccaagatgatccaggaggtgaagggcgaggtgaccatccactacaacaagctgcaggccgaccccaagcagggcatgagcctggacatcgtgctgaagaaggtgaagcacagactggtggagaacatgagcagcggcaccgcctag

SEQ ID NO: 324225 - DNA, 393 bp, Artificial Sequence
  derived and/or modified sequence
atgttcgccgacctggactacgacatcgaggaggacaagctgggcatccccaccgtgcccggcaaggtgaccctgcagaaggacgcccagaacctgatcggcatcagcatcggcggcggcgcccagtactgcccctgcctgtacatcgtgcaggtgttcgacaacacccccgccgccctggacggcaccgtggccgccggcgacgagatcaccggcgtgaacggcagaagcatcaagggcaagaccaaggtggaggtggccaagatgatccaggaggtgaagggcgaggtgaccatccactacaacaagctgcaggccgaccccaagcagggcatgagcctggacatcggccagagactgggcttccacggccccggcccccacagcagctag

SEQ ID NO: 324226 - DNA, 117 bp, Artificial Sequence
  derived and/or modified sequence
atgttcgccgacctggactacgacatcgaggaggacaagctgggcatccccaccgtgcccggcaaggtgaccctgcagaaggacgcccagaacctgatcggcatcagcatcggctag

SEQ ID NO: 324227 - DNA, 180 bp, Artificial Sequence
  derived and/or modified sequence
atgatgatgaagatgatgatgcggatgaaaatcagaaaaatccgctaccattgtcagaggaagcagaaccttattcacaataacggcaacggcctgggctccgtgcctgtggagaagctggtccttcacccttctccaatccaaaacccccagcaaagtgccgtcgtgtcatgcgaatag

SEQ ID NO: 324228 - protein, 76 aa, Artificial Sequence
  derived and/or modified sequence
MKVLAVSLAFLLIAGLISTSLAQNEEGGEKELVRVRRGGYYCPFFQDKCHRHCRSFGRKAGYCGGFLKKTCICVMK

SEQ ID NO: 324229 - DNA, 4194 bp, Artificial Sequence
  derived and/or modified sequence
atggccccccctccaccacctgtgcttccagtgctgctcctgttggccgcagcagctgcactcccagccatgggcctgcgggctgcagcatgggaaccccgcgtcccggggggcacccgcgctttcgctctgaggccaggatgcacctacgctgtgggcgccgcttgcacacccagggcccccagagaactccttgacgtcggccgagacggacggctggccgggaggcgcagggtcagtggggccggcagaccgttaccgctgcaggtgcgactagtcgcacgttctgcgcccacagcgctttcccggcgcctccgcgccaggacgcatctccccggttgcggcgccagagcgagactttgtggtacaggcgcccgcctatgcggggccttatgttttccagtccccggtggctgtgcggccgcccagcactccgcgctcgcagccccaaccactttacccgcttgccgctgccccccaagaccccgacctaggtgccctggcaggcccatttgcctcccgcccggaggatccgtgaggcttcggctcctctgtgcactgagaagggcggctggggcggtgagagttggactggcattagaggccgctactgccggcactccctctgcttcgccatcccccagccctcccctgcccccgaatctccccgaggcccgcgccggcccagcccgccgtgctcggcgcggaacgagcggtcgcgggagcctgaagtttccaatgccgaactaccaggtggccttgtttgaaaacgagccagctggaacactgatcctgcaattacacgcacattataccatcgaaggagaggaggagagggtcagctactatatggaggggctcttcgacgaacggagcagaggatactttagaatagattctgccaccggggccgtctcaaccgattctgtgctcgacagggagaccaaagaaacacacgtgctgcgtgttaaagccgtcgactattctaccccacctagatcagccactacatacataaccgtgttagtaaaggacacgaacgaccacagtcctgtgttcgagcagagtgagtaccgagaacgggttcgggagaacctggaggtggggtatgaggtcttgacaatccgggctagtgatcgcgattctccaattaacgctaatcttaggtaccgcgtcctgggcggggcatgggacgtttttcagctcaatgagtcgtctggcgtcgtgagtacgcgagccgtgctcgaccgggaggaggcagctgagtaccagctgctagtggaagccaatgaccaggggcggaaccccggccctctctcagctactgcaacagtctatattgaggtagaagatgaaaacgataattacccgcagttttcagagcagaattatgtggtgcaagtgcccgaggacgtgggattaaatactgcagtgctgagggtgcaggccacagatcgcgatcaggggcagaatgcagcgatacactacagtatcctgtcaggcaatgttgctggccagttttacctccattccctctcgggcattttggacgtgataaaccccttagatttcgaggatgtccaaaagtattccctctcaatcaaggctcaggatggaggccgccctcccctaataaacagctctggggtcgtgagtgtgcaggtcttggacgtcaatgataatgagcctatctttgtttcatcaccattccaggccacagtgctagagaacgtaccgctgggctaccctgtggtgcacattcaggccgtcgatgctgacagcggggaaaacgcacggcttcactacagactcgtggataccgccagtacattcctcgggggcgggtccgcgggccccaagaacccagcacccacacctgattttccgttccaaattcacaactctagcggctggataacagtgtgtgcagagctagatagagaggaggtggagcactatagtttcggagtcgaggcggtggaccacgggagtcctccaatgagctctagtacctccgtcagtattaccgtgttggatgtgaatgacaacgacccggtcttcactcagcccacctatgagttgcgacttaatgaagatgctgctgttggctctagcgtgctgaccctgcaggcgcgtgacagagacgccaattcagtaattacttatcaattaacgggcgggaatacacgcaatcgattcgcactgtcttcccaacgggggggagggcttatcactctggccctcccactagattataaacaagaacaacagtatgtactggcggtcacagcttctgacggcacccgcagccataccgcccatgtcttgattaatgtaacagatgccaacacccaccgcccagtcttccaatcctcccactatactgtgagtgtcagtgaggaccgcccagtcggcacatcaattgcgacgctatcagcaaatgacgaggacaccggtgaaaatgcccgtatcacatacgttattcaggacccagtcccacagttccgcattgaccccgatagtggcactatgtataccatgatggagctggactacgaaaatcaggtggcctacaccctcaccataatggcacaggataatggaatacctcagaagagcgataccactacgctcgaaatcctgatcctcgacgcaaatgacaacgcgccacagtttctttgggatttttatcagggttccatctttgaggacgcacccccctctacatcaatcctgcaggtaagtgcaactgacagggacagcggccccaatggccggctgctgtacaccttccagggcggagacgatggggacggggacttttacattgagcctacttctggcgtgattagaacccaacgccgcctggaccgggaaaatgttgctgtctacaacttgtgggcgctcgccgtcgataggggttcccccacaccacttagtgccagtgtggaaatccaagtgactatccttgacattaacgacaacgctcccatgtttgagaaggacgagctagaattatttgtggaagagaacaaccccgtgggatccgttgtggcaaagatccgggcaaatgacccagatgaaggccctaacgctcagatcatgtatcagatcgtggagggggacatgcgacacttcttccagctggatctgctgaatggagatttgagggctatggtggaactggattttgaggttcgtcgcgagtatgtgctagtcgtgcaggcaacttccgctccccttgtgtctagggcgaccgttcatatactgctggttgaccagaacgataatccaccagtgctcccagatttccagattctgtttaacaactatgttaccaataagagcaactcctttcctacaggggtcattggctgcatccctgcacatgatcctgacgtcagcgacagcctcaattatacctttgtgcagggtaacgagctccgcctgctactcctggatccagccacaggagaactgcagctgagccgagacctcgacaataaccggccgctcgaggctctcatggaagtgtctgtcagcgatgggatacacagcgttacagccttttgtacactccgggtgacaattatcacggacgacatgcttacaaacagcattaccgttcgcctggagaatatgagtcaggagaagtttttgtcacctctgcttgccctttttgttgagggcgtggccgccgtgctgagcacaacaaaggacgatgtgtttgtttttaatgtgcagaatgacactgatgtgtcgtccaatatcctgaacgtcacattttcggcgctgctccctgggggtgttcgggggcaatttttcccaagtgaagatctgcaggagcaaatctacctgaaccggaccctgcttaccacaatctccacgcagcgcgttctgcctttcgatgataatatctgtttgagggaaccctgtgaaaactatatgaaatgcgtgagcgtcttgcgatttgactcctccgccccctttctttcttccaccacagtactttttcggccaatccaccccatcaacggactgagatgtcgctgcccacctggttttaccggcgattactgcgagactgagattgacctctgttattccgacccttgtggtgccaatggccgttgtcgtagccgggaggggggatacacctgtgagtgttttgaagactttaccgccgtgtcctag

SEQ ID NO: 324230 - DNA, 2319 bp, Artificial Sequence
  derived and/or modified sequence
tgagattttcctttccagatccataactcctccggatggattaccgtctgcgccgagctcgacagagaggaagtagaacactactcttttggcgtggaggccgtggatcacggcagtccgccgatgtctagctctacatcagtatctatcactgtgttagacgtgaacgataatgaccctgtgttcacccagcccacatacgaactccggctcaatgaggatgctgccgtggggtcatcggtattgactctgcaggcgcgtgatagagacgcaaattcagtgatcacataccagctcaccggcggcaacacccgcaacaggtttgcgctctcatcacagcgaggtgggggcctcattacgctggccctccctctagattataagcaggaacagcagtacgtgttagcggtgacggccagtgacggcacgcgtagtcatactgcgcatgtgctgattaatgtgaccgatgccaacacacacagaccagtgttccaatcatcccactatacagtttccgtgagcgaagacaggcctgtcgggacaagtatagctacactgtctgctaatgatgaagatacaggcgaaaacgcgagaattacatacgtcatacaagatcccgtgccacaatttcggatcgatccggatagcggcacaatgtacaccatgatggaacttgattatgaaaatcaggttgcttataccctgacaataatggcgcaggataacggaattcctcagaagtccgacacaaccacactggagattctcatcctggacgctaacgacaatgcgcctcagttcctttgggacttttatcaggggtccattttcgaggatgctcctccctccacgtccattctgcaggtgtccgcaacagatagggatagcggacccaatgggagattgctctacacctttcaggggggcgacgacggagatggggacttctatatagaacctacatctggagtgattaggactcagaggaggcttgacagggagaacgttgcagtgtacaatctgtgggcactggcagtcgatcgcggctccccaacccctctgtccgctagcgttgagatccaggtaactattctggacatcaatgataatgcacccatgttcgaaaaggatgagttggagctctttgtcgaggagaacaacccagtgggttccgtcgttgcaaaaatacgagctaacgaccccgatgagggtcctaacgcgcagattatgtaccagattgttgaaggagatatgagacacttcttccagctcgacctgttgaatggtgatctccgcgcaatggtcgagctggatttcgaggtgcgccgcgagtatgtactggttgtccaggccacatccgccccgctggtcagtcgggccacagtgcatatcctattggtggaccagaatgataacccccccgtgctgccagactttcagattcttttcaacaattatgtgaccaataagtccaactcttttcctaccggagtgattggttgcattcccgcccacgatccagatgtgtcagacagcctgaactataccttcgttcagggtaacgagctgcgcctgttgctcctggaccctgccacgggtgaattgcaactgtctcgggatctagacaataaccgaccgctggaggcgctgatggaagtttcagtgtccgacgggatccattccgtgacggccttctgtacgttacgggtaaccatcattaccgacgacatgcttactaattccataacagtccgcctagaaaacatgtcccaggagaaatttctgagcccactgctggccctgttcgtcgagggagtggccgccgtccttagtacgaccaaggatgatgtattcgtgtttaatgttcagaacgacactgacgtctcttctaacatcctcaacgttactttcagcgcacttctccccggcggtgtgcgcggccagttctttccatcagaagacctgcaggagcagatttaccttaatcgaaccttactgaccaccatctccacacagagagtactcccctttgatgataacatctgcctgcgcgaaccatgcgagaattatatgaagtgcgtgtctgtgctacggttcgactcctcagctccttttttgagctcaactacagtgttatttagacctatccatcctattaacggccttagatgcagatgtccaccaggctttacaggcgattactgcgagacagagattgacctctgctattccgatccttgtggcgctaacgggaggtgcaggtcccgagagggagggtacacctgcgaatgtttcgaggattttacagaaatcagttag

SEQ ID NO: 324231 - DNA, 4194 bp, Artificial Sequence
  derived and/or modified sequence
atggcccctcctcctcctcctgtgctgcctgtgctgctgctgctggccgctgctgctgccctgcctgccatgggcctgcgggctgctgcctgggagccccgggtgcctgggggcacccgggcctttgccctgcggcccggctgcacctatgctgtgggcgccgcctgcaccccccgggccccccgggagctgctggatgtgggcagagatggccgcctggccggcagaagaagagtgtctggggccggccggcccctgcccctgcaggtgcggctggtggcccggagcgcccccacagccctgagccggcggctgcgggcccggacccacctgcccggctgtggggcccgggcccggctgtgtggcactggagcccggctgtgtggggccctgtgcttccctgtgcctgggggctgtgccgccgcccagcacagcgccctggccgcccccaccaccctgcctgcctgccgctgccccccccggccccggccccgctgccccggccggcccatctgcctgcccccaggcggctctgtgcggctgcggctgctgtgtgccctgcggcgggctgctggagctgtgcgggtgggcctggccctggaggccgccacagctggcaccccatctgccagccccagccccagcccccccctgccccccaacctgcctgaggcccgggccggccctgcccggcgggcccggcggggcaccagcggccggggcagcctgaagttccccatgcccaactaccaggtggccctgtttgaaaatgaacctgctggcaccctcatcctgcagctgcacgcccactacaccattgaaggagaggaggagcgggtgtcctactacatggagggcctgtttgatgagaggagccggggctacttcagaattgacagcgccaccggggctgtgtccacagattctgtgctggaccgggagaccaaggagacccacgtgctgcgggtgaaggctgtggactacagcaccccacccaggtctgccaccacctacatcaccgtgctggtgaaggacaccaatgaccacagccctgtgtttgagcagagcgagtaccgggagcgggtgcgggagaacctggaggtgggctatgaggtgctgaccatccgggccagtgaccgggacagccccatcaatgccaacctgcgctacagagtgctgggcggggcctgggatgtgttccagctgaatgaaagcagcggcgtggtgtccaccagggctgtgctggaccgggaggaggccgctgagtaccagctgctggtggaggccaatgaccagggcaggaaccctggccccctgagcgccacagccaccgtgtacatcgaggtggaggatgaaaatgacaactacccccagttcagcgagcagaactacgtggtgcaggtgcctgaagatgtgggcctgaacacagctgtgctgcgggtgcaggccacagaccgggaccagggccagaatgctgccatccactacagcatcctgtctggaaatgtggccggccagttctacctgcacagcctgagcggcatcctggatgtgatcaaccccctggactttgaagatgtgcagaagtacagcctgagcatcaaggcccaggacggcggccggcccccactcatcaacagcagcggcgtggtgtctgtgcaggtgctggatgtgaatgacaatgagcccatctttgtgagcagccccttccaggccaccgtgctggagaatgtgcccctgggctaccctgtggtgcacatccaggccgtggatgctgacagcggggagaatgcccggctgcactaccgcctggtggacacagccagcaccttcctgggcggcggcagcgctggccccaagaacccagcccccaccccagacttccccttccagatccacaacagcagcggctggatcaccgtgtgtgccgagctggaccgggaggaggtggagcactacagctttggagtggaggccgtggaccacggcagcccccccatgagcagcagcacctctgtgtccatcaccgtgctggatgtgaatgacaatgaccctgtgttcacccagcccacctatgagctgcggctgaatgaagatgctgctgtgggcagctctgtgctgaccctgcaggcccgggacagagatgccaacagcgtcatcacctaccagctgactggaggcaacaccaggaacagatttgccctgagcagccagaggggcggcggcctcatcaccctggccctgcccctggactacaagcaggagcagcagtatgtgctggccgtgacagccagtgatggcaccaggagccacacagcccacgtgctgatcaacgtgacagatgccaacacccacaggcctgtgttccagagcagccactacacagtgtctgtgtctgaggacaggcctgtgggcaccagcatcgccaccctgagcgccaatgatgaggacaccggggagaatgcccgcatcacctacgtgatccaggaccctgtgccccagttcagaattgatcctgattctggcaccatgtacaccatgatggagctggactatgagaaccaggtggcctacaccctgaccatcatggcccaggacaatggcatcccccagaagagtgacaccaccaccctggagatcctgatcctggatgccaatgacaatgccccccagttcctgtgggacttctaccagggcagcatctttgaagatgccccacccagcaccagcatcctgcaggtgtctgccacagaccgggacagcggccccaacggccgcctgctgtacaccttccagggcggagatgatggagatggagacttctacatcgagcccaccagcggggtcatccgcacccagaggcggctggacagagaaaatgtggccgtgtacaacctgtgggccctggccgtggaccggggcagccccacccccctgagcgcctctgtggagatccaggtgaccatcctggacatcaatgacaatgcccccatgtttgagaaggatgagctggagctgtttgtggaggagaacaaccctgtgggctctgtggtggccaagatccgggccaatgaccctgatgagggccccaatgcccagatcatgtaccagatcgtggagggggacatgaggcacttcttccagctggacctgctgaatggagacctgcgggccatggtggagctggactttgaggtgagaagagaatatgtgctggtggtgcaggccaccagcgcccccctggtgtcccgggccaccgtgcacatcctgctggtggaccagaatgacaacccccctgtgctgcctgacttccagatcctcttcaacaactacgtgaccaacaagagcaacagcttccccactggagtcatcggctgcatcccagcccatgaccctgatgtgtctgacagcctgaactacacctttgtgcagggcaatgagctgcggctgctgctgctggaccctgccactggagagctgcagctgagccgggacctggacaacaaccggcccctggaggccctgatggaggtgtctgtgtctgatggcatccacagcgtgacagccttctgcaccctgcgggtgaccatcatcacagatgacatgctgaccaacagcatcaccgtgcggctggagaacatgagccaggagaagttcctgagccccctgctggccctgtttgtggagggcgtggccgctgtgctgagcaccaccaaggatgatgtgtttgtgttcaacgtgcagaatgacacagatgtgagcagcaacatcctgaatgtgaccttcagcgccctgctgcctggaggagtgcggggccagttcttccccagcgaggacctgcaggagcagatctacctgaacagaaccctgctgaccaccatcagcacccagagggtgctgccctttgatgacaacatctgcctgcgggagccctgtgagaactacatgaagtgtgtgtctgtgctgcgctttgacagcagcgcccccttcctgagcagcaccaccgtgctcttccggcccatccaccccatcaatggcctgcgctgccgctgccccccaggcttcaccggggactactgtgaaacagaaattgacctgtgctacagcgacccctgtggggccaacggccgctgccgcagccgggagggcggctacacctgtgagtgctttgaggacttcaccgctgtgtcctag

SEQ ID NO: 324232 - DNA, 2319 bp, Artificial Sequence
  derived and/or modified sequence
tgagacttccccttccagatccacaacagcagcggctggatcaccgtgtgtgccgagctggaccgggaggaggtggagcactacagctttggagtggaggccgtggaccacggcagcccccccatgagcagcagcacctctgtgtccatcaccgtgctggatgtgaatgacaatgaccccgtcttcacccagcccacctatgagctgcggctgaatgaagatgctgctgtgggcagctctgtgctgaccctgcaggcccgggacagagatgccaacagcgtcatcacctaccagctgaccggcggcaacaccaggaacagatttgccctgagcagccagagaggaggcggcctcatcaccctggccctgcccctggactacaagcaggagcagcagtatgtgctggccgtgacagccagtgatggcaccaggagccacacagcccacgtgctgatcaacgtgacagatgccaacacccacaggcctgtgttccagagcagccactacacagtgtctgtgtctgaagatagacctgtgggcaccagcatcgccaccctgagcgccaatgatgaagatactggagaaaatgcccgcatcacctacgtgatccaggaccctgtgccccagttcagaattgatcctgacagcggcaccatgtacaccatgatggagctggactatgagaaccaggtggcctacaccctgaccatcatggcccaggacaatggcatcccccagaagagtgacaccaccaccctggagatcctgatcctggatgccaatgacaatgccccccagttcctgtgggacttctaccagggcagcatctttgaagatgccccacccagcaccagcatcctgcaggtgtctgccacagaccgggacagcggccccaacggccgcctgctgtacaccttccagggcggagatgatggagatggagacttctacatcgagcccaccagcggggtcatccgcacccagaggcggctggaccgggagaatgtggccgtgtacaacctgtgggccctggccgtggaccggggcagccccacccccctgagcgcctctgtggagatccaggtgaccatcctggacatcaatgacaatgcccccatgtttgagaaggatgagctggagctgtttgtggaggagaacaaccctgtgggctctgtggtggccaagatccgggccaatgaccctgatgagggccccaatgcccagatcatgtaccagatcgtggagggggacatgaggcacttcttccagctggacctgctgaatggagacctgcgggccatggtggagctggactttgaggtgcggcgggagtatgtgctggtggtgcaggccaccagcgcccccctggtgtcccgggccaccgtgcacatcctgctggtggaccagaatgacaacccccctgtgctgcctgacttccagatcctcttcaacaactacgtgaccaacaagagcaacagcttccccaccggggtgattggctgcatcccagcccatgaccctgatgtgtctgacagcctgaactacacctttgtgcagggcaatgagctgcggctgctgctgctggaccctgccaccggggagctgcagctgagccgggacctggacaacaaccggcccctggaggccctgatggaggtgtctgtgtctgatggcatccacagcgtgacagccttctgcaccctgcgggtgaccatcatcacagatgacatgctgaccaacagcatcaccgtgcggctggagaacatgagccaggagaagttcctgagccccctgctggccctgtttgtggagggcgtggccgctgtgctgagcaccaccaaggatgatgtgtttgtgttcaacgtgcagaatgacacagatgtgagcagcaacatcctgaatgtgaccttcagcgccctgctgcccggcggcgtgcggggccagttcttccccagcgaggacctgcaggagcagatctacctgaacagaaccctgctgaccaccatcagcacccagagggtgctgccctttgatgacaacatctgcctgcgggagccctgtgagaactacatgaagtgtgtgtctgtgctgcgctttgacagcagcgcccccttcctgagcagcaccaccgtgctcttccggcccatccaccccatcaatggcctgcgctgccgctgccccccaggcttcaccggggactactgtgaaacagaaattgacctgtgctacagcgacccctgtggggccaacggccgctgccgcagccgggagggcggctacacctgtgaatgttttgaggacttcacagagatctcctag

SEQ ID NO: 324233 - DNA, 4194 bp, Artificial Sequence
  derived and/or modified sequence
atggcccccccccccccccccgtgctgcccgtgctgctgctgctggccgcagctgcggcactcccagcgatgggcctccgcgcggccgcatgggaacctcgggtgcccggcggcactagagcgtttgcactgagacctgggtgtacttatgccgtgggagctgcctgcacccccagggcgccaagagagttgttagacgtaggtcgagatggacggctggccgggcggagacgggtgtctggcgccggccggccgttacccctacaagtgaggctggtggcccgctccgcaccaactgcactgagccgacgactgcgcgcgaggacccacctccctggctgtggtgccagggcaaggttatgtggcactggcgcacgtttgtgcggcgccctgtgtttcccagttccgggagggtgcgcggcagctcagcattccgcactagctgcccccacgaccctaccggcttgtcggtgcccccctcggcctcgccccaggtgcccgggccgtccaatatgtctgcccccgggcggttctgtcagactgagactgctttgtgcccttagacgcgccgctggggctgtccgggttgggctggccctggaagctgccaccgcaggtacacccagcgcgagcccttccccaagtccgccactccccccaaatctccctgaggctcgcgctgggcctgcaaggcgagcccgaaggggcacgagcgggcggggatccctgaagtttccaatgcctaattatcaggtggccctatttgaaaacgagccagcaggaaccctcatcctgcagttgcatgcccactacacaatcgagggcgaggaggagagagtttcatattatatggaaggtctcttcgatgaacggagcagaggatattttcgcattgactctgccacaggtgctgtctcgacagactcagtcctggatcgcgaaaccaaggaaacccacgttttgcgtgtgaaggccgtggactacagtaccccccccaggagcgccaccacatatatcaccgttctggtcaaagacacaaacgaccacagccctgtttttgaacagagcgaataccgcgaaagagtccgggaaaatcttgaagtcggatatgaagtgcttaccatcagagcttcagatagagactctcctattaatgccaatctaagataccgagtgcttggcggagcatgggatgtgtttcagttgaatgagagcagcggcgtcgtgtcaacccgagccgtgctggaccgggaggaggcagctgaataccagttacttgtggaggccaatgaccagggacggaatccaggcccactgtccgcaacagcaactgtctacatagaggtcgaggacgagaatgataactaccctcaattctctgaacagaattacgttgtgcaggtgcctgaggatgtaggccttaacactgccgtgctaagggtgcaggcgacggatcgggaccaggggcagaacgccgccatacattacagtatcctttcagggaacgtggccggccagttctacctccactcactatcaggaattctcgatgtgataaaccccctcgacttcgaggatgtgcaaaagtactctctgtctatcaaagcacaggacggcggtcggccgcctctaattaacagctctggggttgtgagcgtgcaggtgctggacgtgaacgacaacgagcctatctttgtgtcctccccctttcaagcaacagtcctagagaacgtgcctctcggatatcccgttgtgcacatccaagcagtggatgctgacagtggcgagaacgcaaggttgcactataggctggttgacacagccagcaccttcctcgggggggggagtgccggccccaagaaccccgcccccacccctgactttccgttccagatccataacagcagtggctggatcacagtttgcgccgaattggacagagaggaggtggagcattattcttttggcgtggaggcagtcgatcatggatctccacctatgtcctcaagcacctctgtcagcattactgtcctggacgtgaatgataatgacccagtctttacacaaccaacctacgaactgcggctcaatgaagatgcagctgtgggctcatctgtgttgacactccaagcccgcgacagggatgctaactcagtgatcacatatcagctgacaggcggtaatactaggaaccgattcgccttatcatcacagcggggaggaggactgataacccttgccttaccactggactataagcaggaacaacagtacgtcctagctgtgaccgccagcgacggtacgagatcccatacagcccatgtactgatcaacgtgactgatgctaatacacaccggccagtgttccaatccagtcattacaccgtatccgtctccgaagacagacccgtcgggacctctattgctacgctgtccgctaacgacgaagatactggtgagaacgctaggatcacctatgtcatccaagatccagtgccacagttcaggatcgatcctgatagcgggacgatgtatactatgatggaactggattatgagaatcaggtcgcttacacactcactataatggcacaggataatggaatcccacaaaagtctgacacgacaactttggagattctcattcttgacgcaaatgataatgcgcctcaatttctgtgggatttttatcagggtagcatctttgaggacgctccaccgagcacatctattctgcaggtgagcgctacagatcgtgattcgggacccaatgggaggctgctgtacacttttcaggggggcgacgacggagatggggacttttacattgaacctactagcggcgtcatccgtacacagcgacggctggacagggagaacgtggcagtttacaacctatgggcactcgccgtagatcggggatctcctaccccgctctctgcctctgttgagatccaggttaccatactcgatatcaacgataacgcccctatgttcgagaaagatgagttggaactgtttgtagaagaaaacaacccagtgggatcggttgtcgctaagatccgcgctaacgaccctgatgaagggcccaatgcgcagattatgtaccagatcgtggagggggatatgcgccatttctttcaactggatcttctcaacggtgacctccgggccatggtggagctcgacttcgaggtgagaagagaatatgtactcgttgtgcaagcaacatccgctcccttggttagtagagccacagtgcatattctattggtggaccagaatgataatccccccgttctacccgatttccaaatcctcttcaataattacgttaccaataaaagcaactcctttccgacaggtgtgattggatgtatacccgcacacgaccctgatgtcagcgatagtttgaattacacttttgttcaggggaacgagctgagactcctccttctggaccctgcaacgggtgagctgcaactctcccgggatctggacaacaacagaccactggaagccctcatggaagtgtctgtgagcgacggtatccactctgtgacagcattctgtaccctgcgagtgactattattacagatgacatgcttacgaactcaattaccgtccgactggaaaatatgtcacaagagaaattcctgtccccgctgctggcactgttcgtggaaggcgtggccgcggtactgtcaacaactaaagacgatgtgttcgtgtttaatgtccaaaatgacacggacgtcagctcaaatatactcaatgtgaccttttctgcactactacctggaggcgtgcgaggacagttctttcctagtgaagatcttcaggaacagatttacctgaaccgcacacttctgaccacgatatctacccaacgggtgcttccttttgacgacaatatctgtctgcgcgagccttgtgaaaattatatgaaatgtgtatctgtcttgaggtttgacagcagcgcgccatttctgtctagtactactgtactgttcaggccgatacatcccatcaacgggctgagatgtcgctgtccccccggatttacgggtgactactgtgagacggaaatcgacctgtgttactcggatccgtgcggggcaaatggacgatgtcggagcagagaaggaggctatacctgtgaatgctttgaggacttcactgccgtctcctag

SEQ ID NO: 324234 - DNA, 2319 bp, Artificial Sequence
  derived and/or modified sequence
tgagacttccccttccagatccacaacagcagcggctggatcaccgtgtgtgctgagctcgatcgcgaggaagtggagcattactccttcggcgtcgaggcggtcgaccacggatccccaccaatgagcagtagtactagtgtcagcatcaccgtgctggacgtaaacgataatgatcctgtgtttacgcagcctacctacgagctcagactcaacgaagacgctgccgtaggatcatcggttctaactctacaggcccgtgaccgggatgcaaactccgtcatcacctaccagcttacaggcggaaatacacggaacagatttgcactgtcctcccagcgtggagggggcctaatcactctggcccttcctctagactataagcaagagcagcagtacgtgttggccgtcaccgccagtgatggtactcggtcccacacagcccacgtgctgatcaacgtgaccgacgcgaatacccacaggcccgtgttccagtcatcccactacactgtatccgtgtctgaagatagacctgttgggacctctattgctaccctgagcgcgaatgatgaagataccggcgagaatgcaaggataacatacgtcatccaggatcccgtacctcagtttagaatcgatcctgactctggcacaatgtacactatgatggagctggattacgaaaatcaggttgcctacactctgaccattatggcccaggacaacgggattccacagaagagcgatacaaccaccctcgagattctaatcctcgacgctaacgataacgcacctcaattcctctgggacttttatcaggggagtattttcgaggacgcgccaccctccacctctatattgcaggtatcggcaaccgaccgcgattctggccctaatggaaggcttctttataccttccagggcggcgacgatggagatggggacttttacatcgaaccaacctctggcgttatcagaacacagagacgcctcgatcgcgagaacgtagccgtttacaatctctgggccctcgccgtagatagaggttcccccacacccctttcagccagcgtggaaatccaggtgactattctcgatatcaacgataatgctccgatgtttgaaaaggacgagctggagttatttgtcgaggaaaacaatccggtgggcagtgtggttgcgaagatccgcgcaaatgatccggacgagggacccaatgctcaaataatgtaccagatagtggagggggacatgagacacttttttcagctcgatctcctgaatggtgaccttagggcaatggtggagctggacttcgaagtcagaagggagtacgtcctggtcgtgcaagcgacaagtgcccccctggtatctagagcaacggtccatattctcctggtcgatcagaatgataatcctcctgtgctgcctgacttccagattctgttcaacaactacgtgactaacaaatccaacagcttccctacaggcgtgattggatgtattccagctcacgaccccgatgtgtctgactcactgaactataccttcgtgcaaggtaatgagttgcgcctacttctgctcgacccggcaactggagagctgcagctgtcacgggacctcgacaataaccggcccttggaggctctcatggaggtgtccgtaagcgatggcatacacagcgtgactgccttctgtacccttcgagttacgatcataactgatgacatgttgactaacagtatcactgtcagattggaaaatatgagccaagaaaagttcctgtcccccctgctggctctgtttgttgaaggggtggcagccgtgctcagcaccaccaaggacgacgtgttcgtgttcaatgtccaaaacgatacagacgttagcagtaatattttgaacgtgacattctccgcgcttctgcccggaggggttcgaggccaattcttcccgtctgaggaccttcaagagcaaatatatctcaatagaaccctgttaaccacaatttctacacagcgcgtgctcccattcgatgacaatatctgtctgcgggaaccgtgtgaaaactacatgaaatgtgtctctgtgttgcgcttcgactcaagtgcccccttcttgtcatcaaccaccgtgttgtttagaccgatccatcctatcaatgggcttcgttgtcgttgtccgccggggttcaccggcgactattgtgagactgagattgatttgtgttactccgacccgtgcggtgctaatggacgttgtcgctcaagagaagggggttacacatgtgaatgcttcgaggatttcaccgaaatcagctag

SEQ ID NO: 324235 - DNA, 4194 bp, Artificial Sequence
  derived and/or modified sequence
atggcccctcctcctccacctgtgttgccagtcctactcctgctggcagccgctgccgcattgcccgctatgggattgcgtgctgccgcttgggaacccagggtgcctggtggtaccagggccttcgccctcagaccagggtgcacatacgccgtcggggctgcctgtacacctagagcaccccgagagctcctggacgttggaagagacggcaggcttgcaggacggagacgcgtaagtggtgcaggtcggccattgccactgcaggtccgcttggtggcgagatctgctcctacagcactcagtcgacggctcagggccagaactcacctccctgggtgtggggctcgggctcgcctctgtggcaccggtgcacgcttgtgtggtgctctctgtttccctgtccccggtggctgcgccgctgctcagcattctgcactcgccgctcctactactctcccagcctgtcgatgtcctccaagaccaagacctcgctgccctgggcgacccatttgtctgccacctggaggctctgttcgactgcgcttgctgtgcgccctgagacgcgcagctggcgctgtgcgggtgggcctcgctctggaggccgcaactgccggaaccccctccgcatccccgagtcctagccctcctctgccacccaatctccctgaagctcgagctggcccagctaggcgggcaaggcgcggaacctccggcagaggatcccttaagtttcctatgcccaattatcaggtggccctgtttgaaaatgaacccgctgggactctgatactgcagctccatgcgcactacaccattgagggagaggaggaaagggtcagttattatatggaaggtctctttgacgaaagatctcgagggtattttagaattgatagtgccacaggtgccgtttctactgactccgttctcgacagggagacgaaagagacacacgtccttagagtgaaggccgtagattatagcacccccccacggtccgctacaacgtatatcactgtgctcgtgaaggatacaaacgatcactccccggtcttcgagcagagcgaatatcgcgagcgggtacgggaaaacctggaggttggctatgaagtgttgaccatcagggcctcggatcgcgactcccctatcaatgcaaacctcaggtaccgggtcctggggggagcatgggatgtgttccagcttaatgagtccagcggggtggtctccacccgtgccgtattagatcgtgaggaagccgcagagtaccagttattggtggaggccaatgaccaaggcagaaatccaggtcctttgagcgccaccgctaccgtatatatagaagtcgaggatgagaatgataactatccgcaattttcggaacagaactacgtcgtgcaggtgcctgaagacgtcgggttgaacactgctgtccttagagtacaggcgacagatagagaccagggacagaacgcagccattcactactcgatcctgagtgggaacgtcgctgggcagttctaccttcactcactatcaggtatactcgatgtgattaatcccctggacttcgaagatgtacagaagtactcattgtctattaaggcccaggatggcggacggccaccattaataaattcctctggcgtagtttctgtgcaggtcctggatgtcaacgacaacgagccaattttcgtctctagtccgttccaagcgacggtcttggaaaacgttccattggggtaccccgtggtgcatatccaggcagtggacgccgattctggagaaaatgcaaggctccactaccggctcgtagacactgcgtcgactttcctgggaggtggctccgctggccctaaaaacccggctcccacccccgacttccccttccaaatccacaactccagtggctggatcacagtatgcgcagagctggacagagaggaagttgagcattactcatttggtgttgaggctgtcgatcacgggtcaccaccaatgtcttccagcacatccgtttccataactgttctcgacgtcaatgataacgacccagtattcacccagccgacttacgagttacgacttaacgaggacgctgccgtagggagcagcgtactgacactccaggccagagaccgagacgcgaactctgtgatcacttatcagctgaccggagggaatacaaggaataggttcgccctgtctagccaacgcggtggcggtctgattactctggctctgccactggactataaacaggagcagcagtacgtgcttgcggtgactgcctcggatgggacccgctctcatactgcccatgtgttaatcaacgtgactgacgccaacacccatcggcctgtgtttcagagctcgcactacaccgtctcggtgtctgaggatcggccagttggtactagcattgccaccttgtccgccaacgacgaagataccggtgaaaacgctagaataacgtacgtgattcaagaccctgtaccacaattcagaatagaccccgactctgggaccatgtatacgatgatggagctcgattacgaaaaccaggtggcatacactcttacaattatggcccaggacaatggaatccctcagaagtctgatacaacaacactggagattctcatcctcgacgcaaacgataatgcccctcaatttttatgggacttctatcagggctccatcttcgaggacgcccctccctctacttctatcctgcaggtctccgccactgaccgcgatagtggacccaacgggaggctcctttacacctttcagggtggggacgacggcgacggtgatttctacattgaaccaacatccggagttatccgcacccaacgcaggcttgatcgcgaaaatgtggcagtgtacaatctgtgggctctggcggtggacagaggaagtcctacccctctgagcgccagcgtcgagatccaggtcacaatattagacatcaacgacaacgcaccgatgttcgaaaaagatgagcttgagttgttcgtggaggagaacaaccctgtgggtagtgtggtggcaaaaatccgggcaaacgaccctgatgaaggccctaatgcccagataatgtatcaaatcgtagaaggcgacatgcggcatttctttcagctggatctcctgaacggggacttgagagccatggtggaactggatttcgaggttagaagagagtacgtcctggtcgtccaggcaacaagcgcccctttggtgagccgcgcaacagtgcacatcttacttgtggatcagaatgataatccacccgtgctgcccgacttccagatcttattcaataactacgtaaccaacaaaagtaatagctttccaacaggtgtgattggctgcatacctgctcacgatcctgacgtttcagattcactgaattacactttcgtacagggcaacgagctacgtctgcttcttttagatcctgctactggggaactgcaactcagtcgtgacctagataacaacaggccccttgaggcattgatggaggttagcgtcagcgatgggatacactccgtcaccgcattttgtacattacgtgttacgatcataacagatgacatgctgacaaacagcattacggtgaggctagagaacatgagtcaggagaaatttctgtcacctttgttagccctcttcgtggagggcgtggccgcagtgttgtctaccacgaaagacgacgtgtttgtgtttaatgttcaaaacgacaccgacgtttcttccaacatcttaaatgtcacgttttctgctctattgcccggtggggtgcggggacaatttttcccgagtgaggacctccaggagcagatatacctaaatcgcaccctgctgacaacaattagcacgcagagagtcttacctttcgatgacaatatctgcctgcgggaaccttgtgaaaactatatgaaatgcgtgtccgtgttacggtttgacagttctgctcctttcctgagcagcaccacagtcttgtttagacctatccaccctattaatgggctgagatgtaggtgtcctccgggttttacgggcgattattgtgagaccgagatcgacctgtgctattccgacccctgcggcgcaaatgggcgatgtcgttcccgggagggaggatatacgtgcgagtgttttgaggattttacagcggtctcatag

SEQ ID NO: 324236 - DNA, 2319 bp, Artificial Sequence
  derived and/or modified sequence
taagatttcccattccagatccacaactccagcgggtggatcacagtgtgtgcagagctggatagagaagaagtagaacactactccttcggggtcgaagcagtggaccatgggagcccacccatgagcagctccacttcggtgagcataaccgtactggatgtcaacgataacgatcccgtgttcacccaacccacatacgagctccgtctcaatgaagacgcagcagttgggagtagcgtgctcacactccaggcaagggatcgcgacgcaaactctgtgattacttatcagctgactggcggtaacacgagaaatcgtttcgcattgtcttcccagagaggcggaggcttgataacacttgcactgcctctagactataaacaggagcagcagtatgtactcgctgttacagcatctgatggcaccaggagtcacacggcccatgtcttgataaacgtcactgacgccaacactcatagaccagtattccagagcagtcactacactgtaagtgtctctgaagacaggcccgtcgggacatctatagcaacactctccgccaacgacgaggacacaggcgaaaatgccaggatcacatacgtcatacaggatccggtcccccagttcagaatcgatcctgacagtgggacaatgtatacaatgatggaactggactatgagaaccaagtagcctataccctaaccatcatggctcaggacaacggcatcccacagaagtctgatacaaccaccttggagattctgattcttgacgctaatgacaacgcacctcagttcttgtgggatttctaccaaggtagtattttcgaagatgcccctccttccacaagtatcttgcaagtgagcgcgacagacagagactcaggcccaaacggcaggttgctgtatacttttcagggcggtgacgacggagacggagatttctatattgaacctaccagcggtgtgatccgtacacaacgcaggcttgaccgggagaacgttgcagtctataacctgtgggctttggctgtcgaccggggaagccccacccctctgtccgcctccgtcgaaattcaggtgaccatcctggacatcaacgataacgctccgatgttcgagaaggacgagctggagttgtttgtagaggagaacaacccggttggttcagtggtggcaaagatacgcgctaacgatcccgacgaagggcctaacgcacagatcatgtatcagatagtcgagggcgacatgagacactttttccagttagatctgctgaatggcgatttgcgggcaatggtcgagctggatttcgaagtacgcagagagtacgttctagtggtccaggctacgtccgcaccattggtgtcgcgtgcaaccgtgcacatcctgctcgtggaccagaatgacaatcctccagtgttgccagacttccagatcctttttaacaattacgtgaccaataagagtaattctttccctaccggcgtgatcggctgtatcccagcccacgaccctgatgtttctgattctctaaattacaccttcgtgcaaggcaacgagctgaggctgctgctcttggacccagctaccggcgagctgcaattatcccgcgatctagataacaacaggcccctggaggccctgatggaagtgtctgtttcagatggtatccacagtgtgaccgcgttctgcacactcagagtgactatcattaccgatgacatgttgactaattctattacggtgcgtctggagaacatgagccaggagaagttcctgtctcctctgctggctctctttgtggagggggtggccgcagtgctcagcaccaccaaggacgatgttttcgtcttcaatgtgcagaatgataccgacgtgagcagtaacatcctcaacgtgacgttctctgccctacttcctggtggcgtgcggggtcagtttttcccaagcgaggacctacaggagcagatatacttaaaccgcacactactgacaacaatctcaacccagcgcgtgctcccatttgatgataatatctgcctgagagaaccatgcgagaattatatgaagtgcgtgagcgtactcagattcgactcgagtgccccatttcttagcagcacaaccgtgctcttcagacccatccaccccatcaacggcttaagatgccgatgtcccccagggttcacaggcgattattgcgagacagaaatcgacttgtgctatagcgatccgtgcggggcaaatgggaggtgtcgctccagagaaggcggatacacatgtgagtgtttcgaagactttaccgagatcagctag

SEQ ID NO: 324237 - DNA, 4194 bp, Artificial Sequence
  derived and/or modified sequence
atggcgccgccgccgccgcccgtgctgcccgtgctgctgctcctggccgccgccgccgccctgccggcgatggggctgcgagcggccgcctgggagccgcgcgtacccggcgggacccgcgccttcgccctccggcccggctgtacctacgcggtgggcgccgcttgcacgccccgggcgccgcgggagctgctggacgtgggccgcgatgggcggctggcaggacgtcggcgcgtctcgggcgcggggcgcccgctgccgctgcaagtccgcttggtggcccgcagtgccccgacggcgctgagccgccgcctgcgggcgcgcacgcaccttcccggctgcggagcccgtgcccggctctgcggaaccggtgcccggctctgcggggcgctctgcttccccgtccccggcggctgcgcggccgcgcagcattcggcgctcgcagctccgaccaccttacccgcctgccgctgcccgccgcgccccaggccccgctgtcccggccgtcccatctgcctgccgccgggcggctcggtccgcctgcgtctgctgtgcgccctgcggcgcgcggctggcgccgtccgggtgggactggcgctggaggccgccaccgcggggacgccctccgcgtcgccatccccatcgccgcccctgccgccgaacttgcccgaagcccgggcggggccggcgcgacgggcccggcggggcacgagcggcagagggagcctgaagtttccgatgcccaactaccaggtggcgttgtttgagaacgaaccggcgggcaccctcatcctccagctgcacgcgcactacaccatcgagggcgaggaggagcgcgtgagctattacatggaggggctgttcgacgagcgctcccggggctacttccgaatcgactctgccacgggcgccgtgagcacggacagcgtactggaccgcgagaccaaggagacgcacgtcctcagggtgaaagccgtggactacagtacgccgccgcgctcggccaccacctacatcactgtcttggtcaaagacaccaacgaccacagcccggtcttcgagcagtcggagtaccgcgagcgcgtgcgggagaacctggaggtgggctacgaggtgctgaccatccgcgccagcgaccgcgactcgcccatcaacgccaacttgcgttaccgcgtgttggggggcgcgtgggacgtcttccagctcaacgagagctctggcgtggtgagcacacgggcggtgctggaccgggaggaggcggccgagtaccagctcctggtggaggccaacgaccaggggcgcaatccgggcccgctcagtgccacggccaccgtgtacatcgaggtggaggacgagaacgacaactacccccagttcagcgagcagaactacgtggtccaggtgcccgaggacgtggggctcaacacggctgtgctgcgagtgcaggccacggaccgggaccagggccagaacgcggccattcactacagcatcctcagcgggaacgtggccggccagttctacctgcactcgctgagcgggatcctggatgtgatcaaccccttggatttcgaggatgtccagaaatactcgctgagcattaaggcccaggatgggggccggcccccgctcatcaattcttcaggggtggtgtctgtgcaggtgctggatgtcaacgacaacgagcctatctttgtgagcagccccttccaggccacggtgctggagaatgtgcccctgggctaccccgtggtgcacattcaggcggtggacgcggactctggagagaacgcccggctgcactatcgcctggtggacacggcctccacctttctggggggcggcagcgctgggcctaagaatcctgcccccacccctgacttccccttccagatccacaacagctccggttggatcacagtgtgtgccgagctggaccgcgaggaggtggagcactacagcttcggggtggaggcggtggaccacggctcgccccccatgagctcctccaccagcgtgtccatcacggtgctggacgtgaatgacaacgacccggtgttcacgcagcccacctacgagcttcgtctgaatgaggatgcggccgtggggagcagcgtgctgaccctgcaggcccgcgaccgtgacgccaacagtgtgattacctaccagctcacaggcggcaacacccggaaccgctttgcactcagcagccagagagggggcggcctcatcaccctggcgctacctctggactacaagcaggagcagcagtacgtgctggcggtgacagcatccgacggcacacggtcgcacactgcgcatgtcctaatcaacgtcactgatgccaacacccacaggcctgtctttcagagctcccattacacagtgagtgtcagtgaggacaggcctgtgggcacctccattgctaccctcagtgccaacgatgaggacacaggagagaatgcccgcatcacctacgtgattcaggaccccgtgccgcagttccgcattgaccccgacagtggcaccatgtacaccatgatggagctggactatgagaaccaggtcgcctacacgctgaccatcatggcccaggacaacggcatcccgcagaaatcagacaccaccaccctagagatcctcatcctcgatgccaatgacaatgcaccccagttcctgtgggatttctaccagggttccatctttgaggatgctccaccctcgaccagcatcctccaggtctctgccacggaccgggactcaggtcccaatgggcgtctgctgtacaccttccagggtggggacgacggcgatggggacttctacatcgagcccacgtccggtgtgattcgcacccagcgccggctggaccgggagaatgtggccgtgtacaacctttgggctctggctgtggatcggggcagtcccactccccttagcgcctcggtagaaatccaggtgaccatcttggacattaatgacaatgcccccatgtttgagaaggacgaactggagctgtttgttgaggagaacaacccagtggggtcggtggtggcaaagattcgtgctaacgaccctgatgaaggccctaatgcccagatcatgtatcagattgtggaaggggacatgcggcatttcttccagctggacctgctcaacggggacctgcgtgccatggtggagctggactttgaggtccggcgggagtatgtgctggtggtgcaggccacgtcggctccgctggtgagccgagccacggtgcacatccttctcgtggaccagaatgacaacccgcctgtgctgcccgacttccagatcctcttcaacaactatgtcaccaacaagtccaacagtttccccaccggcgtgatcggctgcatcccggcccatgaccccgacgtgtcagacagcctcaactacaccttcgtgcagggcaacgagctgcgcctgttgctgctggaccccgccacgggcgaactgcagctcagccgcgacctggacaacaaccggccgctggaggcgctcatggaggtgtctgtgtctgatggcatccacagcgtcacggccttctgcaccctgcgtgtcaccatcatcacggacgacatgctgaccaacagcatcactgtccgcctggagaacatgtcccaggagaagttcctgtccccgctgctggccctcttcgtggagggggtggccgccgtgctgtccaccaccaaggacgacgtcttcgtcttcaacgtccagaacgacaccgacgtcagctccaacatcctgaacgtgaccttctcggcgctgctgcctggcggcgtccgcggccagttcttcccgtcggaggacctgcaggagcagatctacctgaatcggacgctgctgaccaccatctccacgcagcgcgtgctgcccttcgacgacaacatctgcctgcgcgagccctgcgagaactacatgaagtgcgtgtccgttctgcgattcgacagctccgcgcccttcctcagctccaccaccgtgctcttccggcccatccaccccatcaacggcctgcgctgccgctgcccgcccggcttcaccggcgactactgcgagacggagatcgacctctgctactccgacccgtgcggcgccaacggccgctgccgcagccgcgagggcggctacacctgcgagtgcttcgaggacttcactgctgtttcttag

SEQ ID NO: 324238 - DNA, 2446 bp, Artificial Sequence
  derived and/or modified sequence
ctgacttccccttccagatccacaacagctccggttggatcacagtgtgtgccgagctggaccgcgaggaggtggagcactacagcttcggggtggaggcggtggaccacggctcgccccccatgagctcctccaccagcgtgtccatcacggtgctggacgtgaatgacaacgacccggtgttcacgcagcccacctacgagcttcgtctgaatgaggatgcggccgtggggagcagcgtgctgaccctgcaggcccgcgaccgtgacgccaacagtgtgattacctaccagctcacaggcggcaacacccggaaccgctttgcactcagcagccagagagggggcggcctcatcaccctggcgctacctctggactacaagcaggagcagcagtacgtgctggcggtgacagcatccgacggcacacggtcgcacactgcgcatgtcctaatcaacgtcactgatgccaacacccacaggcctgtctttcagagctcccattacacagtgagtgtcagtgaggacaggcctgtgggcacctccattgctaccctcagtgccaacgatgaggacacaggagagaatgcccgcatcacctacgtgattcaggaccccgtgccgcagttccgcattgaccccgacagtggcaccatgtacaccatgatggagctggactatgagaaccaggtcgcctacacgctgaccatcatggcccaggacaacggcatcccgcagaaatcagacaccaccaccctagagatcctcatcctcgatgccaatgacaatgcaccccagttcctgtgggatttctaccagggttccatctttgaggatgctccaccctcgaccagcatcctccaggtctctgccacggaccgggactcaggtcccaatgggcgtctgctgtacaccttccagggtggggacgacggcgatggggacttctacatcgagcccacgtccggtgtgattcgcacccagcgccggctggaccgggagaatgtggccgtgtacaacctttgggctctggctgtggatcggggcagtcccactccccttagcgcctcggtagaaatccaggtgaccatcttggacattaatgacaatgcccccatgtttgagaaggacgaactggagctgtttgttgaggagaacaacccagtggggtcggtggtggcaaagattcgtgctaacgaccctgatgaaggccctaatgcccagatcatgtatcagattgtggaaggggacatgcggcatttcttccagctggacctgctcaacggggacctgcgtgccatggtggagctggactttgaggtccggcgggagtatgtgctggtggtgcaggccacgtcggctccgctggtgagccgagccacggtgcacatccttctcgtggaccagaatgacaacccgcctgtgctgcccgacttccagatcctcttcaacaactatgtcaccaacaagtccaacagtttccccaccggcgtgatcggctgcatcccggcccatgaccccgacgtgtcagacagcctcaactacaccttcgtgcagggcaacgagctgcgcctgttgctgctggaccccgccacgggcgaactgcagctcagccgcgacctggacaacaaccggccgctggaggcgctcatggaggtgtctgtgtctgatggcatccacagcgtcacggccttctgcaccctgcgtgtcaccatcatcacggacgacatgctgaccaacagcatcactgtccgcctggagaacatgtcccaggagaagttcctgtccccgctgctggccctcttcgtggagggggtggccgccgtgctgtccaccaccaaggacgacgtcttcgtcttcaacgtccagaacgacaccgacgtcagctccaacatcctgaacgtgaccttctcggcgctgctgcctggcggcgtccgcggccagttcttcccgtcggaggacctgcaggagcagatctacctgaatcggacgctgctgaccaccatctccacgcagcgcgtgctgcccttcgacgacaacatctgcctgcgcgagccctgcgagaactacatgaagtgcgtgtccgttctgcgattcgacagctccgcgcccttcctcagctccaccaccgtgctcttccggcccatccaccccatcaacggcctgcgctgccgctgcccgcccggcttcaccggcgactactgcgagacggagatcgacctctgctactccgacccgtgcggcgccaacggccgctgccgcagccgcgagggcggctacacctgcgagtgcttcgaggacttcactgaaatttcgtgactcatcctcccgcctctgaagatgctctttccttgatacctcctgactcatcaccaagatgaattactccaaatgtagccaacggtggtttttaaaaataaagagccaccccgagagcggtacagaaa

SEQ ID NO: 324239 - DNA, 4194 bp, Artificial Sequence
  derived and/or modified sequence
atggcccccccccccccccccgtgctgcccgtgctgctgctgctggccgccgccgccgccctgcccgccatgggcctgagagccgccgcctgggagcccagagtgcccggcggcaccagagccttcgccctgagacccggctgcacctacgccgtgggcgccgcctgcacccccagagcccccagagagctgctggacgtgggcagagacggcagactggccggcagaagaagagtgagcggcgccggcagacccctgcccctgcaggtgagactggtggccagaagcgcccccaccgccctgagcagaagactgagagccagaacccacctgcccggctgcggcgccagagccagactgtgcggcaccggcgccagactgtgcggcgccctgtgcttccccgtgcccggcggctgcgccgccgcccagcacagcgccctggccgcccccaccaccctgcccgcctgcagatgcccccccagacccagacccagatgccccggcagacccatctgcctgccccccggcggcagcgtgagactgagactgctgtgcgccctgagaagagccgccggcgccgtgagagtgggcctggccctggaggccgccaccgccggcacccccagcgccagccccagccccagcccccccctgccccccaacctgcccgaggccagagccggccccgccagaagagccagaagaggcaccagcggcagaggcagcctgaagttccccatgcccaactaccaggtggccctgttcgagaacgagcccgccggcaccctgatcctgcagctgcacgcccactacaccatcgagggcgaggaggagagagtgagctactacatggagggcctgttcgacgagagaagcagaggctacttcagaatcgacagcgccaccggcgccgtgagcaccgacagcgtgctggacagagagaccaaggagacccacgtgctgagagtgaaggccgtggactacagcaccccccccagaagcgccaccacctacatcaccgtgctggtgaaggacaccaacgaccacagccccgtgttcgagcagagcgagtacagagagagagtgagagagaacctggaggtgggctacgaggtgctgaccatcagagccagcgacagagacagccccatcaacgccaacctgagatacagagtgctgggcggcgcctgggacgtgttccagctgaacgagagcagcggcgtggtgagcaccagagccgtgctggacagagaggaggccgccgagtaccagctgctggtggaggccaacgaccagggcagaaaccccggccccctgagcgccaccgccaccgtgtacatcgaggtggaggacgagaacgacaactacccccagttcagcgagcagaactacgtggtgcaggtgcccgaggacgtgggcctgaacaccgccgtgctgagagtgcaggccaccgacagagaccagggccagaacgccgccatccactacagcatcctgagcggcaacgtggccggccagttctacctgcacagcctgagcggcatcctggacgtgatcaaccccctggacttcgaggacgtgcagaagtacagcctgagcatcaaggcccaggacggcggcagaccccccctgatcaacagcagcggcgtggtgagcgtgcaggtgctggacgtgaacgacaacgagcccatcttcgtgagcagccccttccaggccaccgtgctggagaacgtgcccctgggctaccccgtggtgcacatccaggccgtggacgccgacagcggcgagaacgccagactgcactacagactggtggacaccgccagcaccttcctgggcggcggcagcgccggccccaagaaccccgcccccacccccgacttccccttccagatccacaacagcagcggctggatcaccgtgtgcgccgagctggacagagaggaggtggagcactacagcttcggcgtggaggccgtggaccacggcagcccccccatgagcagcagcaccagcgtgagcatcaccgtgctggacgtgaacgacaacgaccccgtgttcacccagcccacctacgagctgagactgaacgaggacgccgccgtgggcagcagcgtgctgaccctgcaggccagagacagagacgccaacagcgtgatcacctaccagctgaccggcggcaacaccagaaacagattcgccctgagcagccagagaggcggcggcctgatcaccctggccctgcccctggactacaagcaggagcagcagtacgtgctggccgtgaccgccagcgacggcaccagaagccacaccgcccacgtgctgatcaacgtgaccgacgccaacacccacagacccgtgttccagagcagccactacaccgtgagcgtgagcgaggacagacccgtgggcaccagcatcgccaccctgagcgccaacgacgaggacaccggcgagaacgccagaatcacctacgtgatccaggaccccgtgccccagttcagaatcgaccccgacagcggcaccatgtacaccatgatggagctggactacgagaaccaggtggcctacaccctgaccatcatggcccaggacaacggcatcccccagaagagcgacaccaccaccctggagatcctgatcctggacgccaacgacaacgccccccagttcctgtgggacttctaccagggcagcatcttcgaggacgccccccccagcaccagcatcctgcaggtgagcgccaccgacagagacagcggccccaacggcagactgctgtacaccttccagggcggcgacgacggcgacggcgacttctacatcgagcccaccagcggcgtgatcagaacccagagaagactggacagagagaacgtggccgtgtacaacctgtgggccctggccgtggacagaggcagccccacccccctgagcgccagcgtggagatccaggtgaccatcctggacatcaacgacaacgcccccatgttcgagaaggacgagctggagctgttcgtggaggagaacaaccccgtgggcagcgtggtggccaagatcagagccaacgaccccgacgagggccccaacgcccagatcatgtaccagatcgtggagggcgacatgagacacttcttccagctggacctgctgaacggcgacctgagagccatggtggagctggacttcgaggtgagaagagagtacgtgctggtggtgcaggccaccagcgcccccctggtgagcagagccaccgtgcacatcctgctggtggaccagaacgacaacccccccgtgctgcccgacttccagatcctgttcaacaactacgtgaccaacaagagcaacagcttccccaccggcgtgatcggctgcatccccgcccacgaccccgacgtgagcgacagcctgaactacaccttcgtgcagggcaacgagctgagactgctgctgctggaccccgccaccggcgagctgcagctgagcagagacctggacaacaacagacccctggaggccctgatggaggtgagcgtgagcgacggcatccacagcgtgaccgccttctgcaccctgagagtgaccatcatcaccgacgacatgctgaccaacagcatcaccgtgagactggagaacatgagccaggagaagttcctgagccccctgctggccctgttcgtggagggcgtggccgccgtgctgagcaccaccaaggacgacgtgttcgtgttcaacgtgcagaacgacaccgacgtgagcagcaacatcctgaacgtgaccttcagcgccctgctgcccggcggcgtgagaggccagttcttccccagcgaggacctgcaggagcagatctacctgaacagaaccctgctgaccaccatcagcacccagagagtgctgcccttcgacgacaacatctgcctgagagagccctgcgagaactacatgaagtgcgtgagcgtgctgagattcgacagcagcgcccccttcctgagcagcaccaccgtgctgttcagacccatccaccccatcaacggcctgagatgcagatgcccccccggcttcaccggcgactactgcgagaccgagatcgacctgtgctacagcgacccctgcggcgccaacggcagatgcagaagcagagagggcggctacacctgcgagtgcttcgaggacttcaccgccgtgagctag

SEQ ID NO: 324240 - DNA, 2319 bp, Artificial Sequence
  derived and/or modified sequence
tgagacttccccttccagatccacaacagcagcggctggatcaccgtgtgcgccgagctggacagagaggaggtggagcactacagcttcggcgtggaggccgtggaccacggcagcccccccatgagcagcagcaccagcgtgagcatcaccgtgctggacgtgaacgacaacgaccccgtgttcacccagcccacctacgagctgagactgaacgaggacgccgccgtgggcagcagcgtgctgaccctgcaggccagagacagagacgccaacagcgtgatcacctaccagctgaccggcggcaacaccagaaacagattcgccctgagcagccagagaggcggcggcctgatcaccctggccctgcccctggactacaagcaggagcagcagtacgtgctggccgtgaccgccagcgacggcaccagaagccacaccgcccacgtgctgatcaacgtgaccgacgccaacacccacagacccgtgttccagagcagccactacaccgtgagcgtgagcgaggacagacccgtgggcaccagcatcgccaccctgagcgccaacgacgaggacaccggcgagaacgccagaatcacctacgtgatccaggaccccgtgccccagttcagaatcgaccccgacagcggcaccatgtacaccatgatggagctggactacgagaaccaggtggcctacaccctgaccatcatggcccaggacaacggcatcccccagaagagcgacaccaccaccctggagatcctgatcctggacgccaacgacaacgccccccagttcctgtgggacttctaccagggcagcatcttcgaggacgccccccccagcaccagcatcctgcaggtgagcgccaccgacagagacagcggccccaacggcagactgctgtacaccttccagggcggcgacgacggcgacggcgacttctacatcgagcccaccagcggcgtgatcagaacccagagaagactggacagagagaacgtggccgtgtacaacctgtgggccctggccgtggacagaggcagccccacccccctgagcgccagcgtggagatccaggtgaccatcctggacatcaacgacaacgcccccatgttcgagaaggacgagctggagctgttcgtggaggagaacaaccccgtgggcagcgtggtggccaagatcagagccaacgaccccgacgagggccccaacgcccagatcatgtaccagatcgtggagggcgacatgagacacttcttccagctggacctgctgaacggcgacctgagagccatggtggagctggacttcgaggtgagaagagagtacgtgctggtggtgcaggccaccagcgcccccctggtgagcagagccaccgtgcacatcctgctggtggaccagaacgacaacccccccgtgctgcccgacttccagatcctgttcaacaactacgtgaccaacaagagcaacagcttccccaccggcgtgatcggctgcatccccgcccacgaccccgacgtgagcgacagcctgaactacaccttcgtgcagggcaacgagctgagactgctgctgctggaccccgccaccggcgagctgcagctgagcagagacctggacaacaacagacccctggaggccctgatggaggtgagcgtgagcgacggcatccacagcgtgaccgccttctgcaccctgagagtgaccatcatcaccgacgacatgctgaccaacagcatcaccgtgagactggagaacatgagccaggagaagttcctgagccccctgctggccctgttcgtggagggcgtggccgccgtgctgagcaccaccaaggacgacgtgttcgtgttcaacgtgcagaacgacaccgacgtgagcagcaacatcctgaacgtgaccttcagcgccctgctgcccggcggcgtgagaggccagttcttccccagcgaggacctgcaggagcagatctacctgaacagaaccctgctgaccaccatcagcacccagagagtgctgcccttcgacgacaacatctgcctgagagagccctgcgagaactacatgaagtgcgtgagcgtgctgagattcgacagcagcgcccccttcctgagcagcaccaccgtgctgttcagacccatccaccccatcaacggcctgagatgcagatgcccccccggcttcaccggcgactactgcgagaccgagatcgacctgtgctacagcgacccctgcggcgccaacggcagatgcagaagcagagagggcggctacacctgcgagtgcttcgaggacttcaccgagatcagctag

SEQ ID NO: 324241 - DNA, 861 bp, Artificial Sequence
  derived and/or modified sequence
atggaggacagacacgtgagcctgcccagcttcaaccagctgttcggcctgagcgaccccgtgaacagagcctacttcgccgtgttcgacggccacggcggcgtggacgccgccagatacgccgccgtgcacgtgcacaccaacgccgccagacagcccgagctgcccaccgaccccgagggcgccctgagagaggccttcagaagaaccgaccagatgttcctgagaaaggccaagagagagagactgcagagcggcaccaccggcgtgtgcgccctgatcgccggcgccaccctgcacgtggcctggctgggcgacagccaggtgatcctggtgcagcagggccaggtggtgaagctgatggagccccacagacccgagagacaggacgagaaggccagaatcgaggccctgggcggcttcgtgagccacatggactgctggagagtgaacggcaccctggccgtgagcagagccatcggcgacgtgttccagaagccctacgtgagcggcgaggccgacgccgccagcagagccctgaccggcagcgaggactacctgctgctggcctgcgacggcttcttcgacgtggtgccccaccaggaggtggtgggcctggtgcagagccacctgaccagacagcagggcagcggcctgagagtggccgaggagctggtggccgccgccagagagagaggcagccacgacaacatcaccgtgatggtggtgttcctgagagacccccaggagctgctggagggcggcaaccagggcgagggcgacccccaggccgagggcagaagacaggacctgcccagcagcctgcccgagcccgagacccaggccccccccagaagctag

SEQ ID NO: 324242 - DNA, 861 bp, Artificial Sequence
  derived and/or modified sequence
atggaagaccgacacgtctcactcccatcgttcaaccaattgttcggactgtctgatccagttaacagggcctacttcgccgtcttcgacggacacggcggggtagacgctgcccgatacgctgcagtgcacgtgcacacaaacgctgctcggcagccagaattgcctacagaccccgagggtgccctccgggaggcctttaggaggaccgaccagatgttcctgaggaaggcaaagagagaaaggttacagagcggtactacaggggtatgtgctctcatagccggggctacccttcacgtcgcatggctgggagactcacaggttatcctggtgcagcagggccaagttgtgaaactcatggagcctcaccgtcctgaacgccaggacgagaaggctagaattgaggccctgggcggtttcgtatctcacatggattgttggagagtcaacgggaccctggccgtgtctcgagccattggggatgttttccagaagccatacgtgagcggcgaggcagacgcagctagcagagccctgactggctccgaagattaccttctgctcgcatgcgatgggttttttgatgtggttccgcaccaggaggtggtagggctggtgcaaagtcatctgactcggcaacagggatcaggcctcagggttgccgaagagctagtggcagcggcccgagaacggggaagtcatgataacatcactgtgatggttgtttttctgcgagacccccaggagctgcttgagggtggaaatcagggggagggggatccccaggccgaagggaggcggcaagaccttccgtcatctttgcccgaacctgagacgcaggctccgccgagaagttag

SEQ ID NO: 324243 - DNA, 861 bp, Artificial Sequence
  derived and/or modified sequence
atggaggaccgacatgtatcgctaccctcttttaatcagctgtttgggttgtccgatcccgtcaaccgtgcgtattttgcagtgttcgatggccatggaggggttgatgcagccaggtatgcggccgttcacgtgcacaccaacgcagctcggcagccggagctcccgactgatcctgaaggtgcactgcgcgaagcatttcgaaggacagaccagatgtttcttcggaaggctaaaagggagcggcttcagtccggaactaccggggtgtgcgccttaatcgcaggggctactctccacgtggcttggctgggagattcacaggttatcttggttcagcagggacaggtggtaaaattgatggagcctcacagacccgaacgacaggatgaaaaggctcgcatagaagcactcggcggctttgtaagccacatggattgttggcgtgttaatggtacgctggcagtgagcagagctattggtgacgtctttcagaagccctacgtgtcaggcgaggctgatgccgcttctagagcgctgactggatcagaggattatctcctgctggcctgcgatggattctttgatgtggtcccacaccaagaggtcgttgggctggtgcaaagtcacctgacccgacaacaggggtcggggctccgagtcgcagaggaactcgtggcagccgctcgcgagcggggcagccacgataacatcacagtcatggtcgtgttccttcgtgacccccaagagctgctggagggggggaatcagggggaaggcgaccctcaagctgagggtcgcagacaggacctgccctcctcacttcctgagcccgagacccaggcccctccccgaagttag

SEQ ID NO: 324244 - DNA, 861 bp, Artificial Sequence
  derived and/or modified sequence
atggaggacagacatgtgtccctgcccagcttcaaccagctgtttggcctgagtgaccctgtgaacagagcctactttgctgtgtttgatggccacggcggcgtggatgctgcccgctatgctgctgtgcacgtgcacaccaatgctgcccggcagcctgagctgcccacagatcctgagggcgccctgcgggaggccttccggaggacagaccagatgttcctgaggaaggccaagcgggagcggctgcagagcggcaccaccggggtgtgtgccctgattgctggggccaccctgcacgtggcctggctgggggacagccaggtgatcctggtgcagcagggccaggtggtgaagctgatggagccccacaggcctgagcggcaggatgagaaggccagaattgaggccctgggcggctttgtgagccacatggactgctggagggtgaatggcaccctggccgtgtcccgggccatcggagatgtgttccagaagccctacgtgtctggagaggctgatgctgccagccgggccctgactggaagtgaggactacctgctgctggcctgtgatggcttctttgatgtggtgccccaccaggaggtggtgggcctggtgcagagccacctgacccggcagcagggcagcggcctgcgggtggccgaggagctggtggccgccgcccgggagcggggcagccatgacaacatcaccgtgatggtggtgttcctgcgggacccccaggagctgctggagggcggcaaccagggcgagggggacccccaggccgagggccggcggcaggacctgcccagcagcctgcctgagcctgagacccaggccccacccaggagctag

SEQ ID NO: 324245 - DNA, 861 bp, Artificial Sequence
  derived and/or modified sequence
atggaggaccggcacgtgagcctgcccagcttcaaccagctgttcgggttaagtgacccggtgaaccgagcctattttgcagtgtttgacgggcacggcggcgtcgatgctgcaagatacgcagcagtgcatgtccatactaatgccgcccgtcagcctgaactgccaactgacccggagggtgcattgcgggaggccttccgtagaaccgatcagatgttcctcagaaaagccaagcgcgaacgccttcagtctggtactacaggagtgtgcgcattgattgctggtgcgacattgcacgtggcctggttgggcgacagccaagtcatcctggtccagcagggtcaggtggtcaaactgatggagcctcatcggcccgagcgacaggacgagaaggccaggattgaagccctaggtggtttcgtgagccacatggattgctggcgggtgaatggcacactagcggtgtcaagagccattggtgatgtttttcagaaaccatatgtgtcaggagaagctgacgcagcctctcgagccctgactgggtccgaggattaccttcttttagcatgtgatgggttttttgatgtggtaccccaccaggaagtggttggattggtccagtctcacctgacccgccagcaaggctccgggctgcgggtggcagaggaattggttgccgcagcgcgggagcggggaagccatgacaacatcacagttatggtcgtgttcttgagggaccctcaggaactcctagagggggggaaccagggggagggcgacccacaggccgagggacgccggcaggatctgcccagctcgctgcctgaacccgaaacccaggcccctcctcgatcctag

SEQ ID NO: 324246 - DNA, 861 bp, Artificial Sequence
  derived and/or modified sequence
atggaggaccggcacgtgagcctgcccagcttcaaccagctgttcggactgtcggatcctgtgaatagggcctacttcgcagtttttgacgggcatggtggggttgacgccgcaagatatgccgctgtacatgttcacacaaacgcagcacgtcaacccgagctgccaactgacccggagggggccctgcgggaggcatttcggaggaccgaccagatgttccttaggaaggctaagagagaaaggttacagagcggcacaactggtgtgtgcgcactgatagctggggccactcttcacgtcgcatggctgggagattctcaggttatcctggttcaacaggggcaggttgtcaagctcatggagccccaccgaccagagcggcaagacgaaaaagccagaattgaggccctcggtggatttgttagccatatggactgttggcgcgtaaacggtaccctcgccgtctctcgagctatcggagacgtcttccaaaagccctacgttagcggcgaggcagacgcagccagccgtgcactgacaggttctgaagactatctcttactggcttgcgatgggttcttcgatgtcgtgccacaccaagaggtcgtgggcctggtgcagtcacacctaacgcggcagcaggggtcaggcttaagagtggccgaagagttggtcgctgcggcacgggagagagggtcacacgataacatcacagttatggtagtgttccttcgcgatccccaggaactgctggaaggggggaaccagggcgaaggagatccccaggccgagggcagacgccaggatttgccttccagccttccagaaccagagactcaagcgccacctcgcagctag

SEQ ID NO: 324247 - DNA, 861 bp, Artificial Sequence
  derived and/or modified sequence
atggaagacaggcacgtatccttaccttcattcaatcagttgtttggcctaagcgatcccgtgaatcgggcatacttcgccgtattcgacggacatggcggagtcgacgccgcaaggtacgccgctgtccatgtccacactaacgcggctcgccagcctgaactgccgacagacccggagggcgctttgagagaggcattccgccgtacggaccagatgtttttgaggaaggctaaaagggaaaggctgcagagcgggaccaccggcgtgtgcgcattgattgccggtgctacgctgcacgtggcttggctgggcgattcacaggtaatcctggtccagcaaggccaagtggtaaagctgatggaacctcaccggccagaacgacaggacgagaaagccaggatcgaagctttgggaggttttgtctcacacatggactgttggcgcgtgaacgggacactcgccgtctcaagagctattggggatgtgttccagaagccttatgtgagtggcgaagccgatgctgcttcaagagccctcaccggttcggaagactatctgcttttagcctgcgatggattctttgatgtggtaccacaccaggaggtcgtcggccttgttcagtcccatctgacccgacagcaaggaagtggcttgagggtagcagaggaattggtggcagcagcccgagagagaggcagccatgacaacatcaccgttatggtggtctttttacgggatccccaggaactgctcgaagggggaaatcagggagagggcgaccctcaggccgaaggcaggagacaggatctccctagtagcttaccagaacccgagactcaggccccaccaagatcttag

SEQ ID NO: 324248 - DNA, 861 bp, Artificial Sequence
  derived and/or modified sequence
atggaggacaggcacgtgtcactgccgtccttcaatcagctgtttggcctgagtgaccctgtgaacagggcctactttgcagtgttcgacggccacggcggagttgacgccgctaggtatgcggctgtgcacgtgcacactaacgctgctcggcagcctgagcttcccactgatccagagggcgcactgcgggaggcctttcggcgtaccgatcagatgttccttcggaaggcaaagagagaacgactgcagagcggaacgacgggagtatgtgcccttattgccggagcaacactccacgttgcctggctcggcgatagccaggtgattttagttcagcagggtcaggtggtgaagttaatggagcctcacaggcccgaacgccaggacgagaaagcccgaattgaggcactagggggttttgtctcacatatggactgctggcgcgtgaatgggacattagccgtttcccgggctattggagatgtgtttcagaaaccttacgtctcgggagaggctgacgccgcttctcgcgcactgaccggaagcgaggactatctgcttctggcatgcgacggcttttttgacgtcgttccgcatcaggaggtcgtgggtctcgtccagagccacctgacccggcagcaagggtccggactgcgtgtggccgaagaactggtcgccgctgctagggaacggggaagccatgacaatattacagtgatggtggtttttctgagagatccccaggaactcttagaaggaggcaatcaaggtgagggagatccacaagccgagggtcgtcggcaggatctgccttcctccctccctgagccagagacgcaggccccaccccgatcatag

SEQ ID NO: 324249 - protein, 1581 aa, Artificial Sequence
  derived and/or modified sequence
MRTTKVYKLVIHKKGFGGSDDELVVNPKVFPHIKLGDIVEIAHPNDEYSPLLLQVKSLKEDLQKETISVDQTVTQVFRLRPYQDVYVNVVDPKDVTLDLVELTFKDQYIGRGDMWRLKKSLVSTCAYITQKVEFAGIRAQAGELWVKNEKVMCGYISEDTRVVFRSTSAMVYIFIQMSCEMWDFDIYGDLYFEKAVNGFLADLFTKWKEKNCSHEVTVVLFSRTFYDAKSVDEFPEINRASIRQDHKGRFYEDFYKVVVQNERREEWTSLLVTIKKLFIQYPVLVRLEQAEGFPQGDNSTSAQGNYLEAINLSFNVFDKHYINRNFDRTGQMSVVITPGVGVFEVDRLLMILTKQRMIDNGIGVDLVCMGEQPLHAVPLFKLHNRSAPRDSRLGDDYNIPHWINHSFYTSKSQLFCNSFTPRIKLAGKKPASEKAKNGRDTSLGSPKESENALPIQVDYDAYDAQVFRLPGPSRAQCLTTCRSVRERESHSRKSASSCDVSSSPSLPSRTLPTEEVRSQASDDSSLGKSANILMIPHPHLHQYEVSSSLGYTSTRDVLENMMEPPQRDSSAPGRFHVGSAESMLHVRPGGYTPQRALINPFAPSRMPMKLTSNRRRWMHTFPVGPSGEAIQIHHQTRQNMAELQGSGQRDPTHSSAELLELAYHEAAGRHSNSRQPGDGMSFLNFSGTEELSVGLLSNSGAGMNPRTQNKDSLEDSVSTSPDPILTLSAPPVVPGFCCTVGVDWKSLTTPACLPLTTDYFPDRQGLQNDYTEGCYDLLPEADIDRRDEDGVQMTAQQVFEEFICQRLMQGYQIIVQPKTQKPNPAVPPPLSSSPLYSRGLVSRNRPEEEDQYWLSMGRTFHKVTLKDKMITVTRYLPKYPYESAQIHYTYSLCPSHSDSEFVSCWVEFSHERLEEYKWNYLDQYICSAGSEDFSLIESLKFWRTRFLLLPACVTATKRITEGEAHCDIYGDRPRADEDEWQLLDGFVRFVEGLNRIRRRHRSDRMMRKGTAMKGLQMTGPISTHSLESTAPPVGKKGTSALSALLEMEASQKCLGEQQAAVHGGKSSAQSAESSSVAMTPTYMDSPRKVSVDQTATPMLDGTSLGICTGQSMDRGNSQTFGNSQNIGEQGYSSTNSSDSSSQQLVASSLTSSSTLTEILEAMKHPSTGVQLLSEQKGLSPYCFISAEVVHWLVNHVEGIQTQAMAIDIMQKMLEEQLITHASGEAWRTFIYGFYFYKIVTDKEPDRVAMQQPATTWHTAGVDDFASFQRKWFEVAFVAEELVHSEIPAFLLPWLPSRPASYASRHSSFSRSFGGRSQAAALLAATVPEQRTVTLDVDVNNRTDRLEWCSCYYHGNFSLNAAFEIKLHWMAVTAAVLFEMVQGWHRKATSCGFLLVPVLEGPFALPSYLYGDPLRAQLFIPLNISCLLKEGSEHLFDSFEPETYWDRMHLFQEAIAHRFGFVQDKYSASAFNFPAENKPQYIHVTGTVFLQLPYSKRKFSGQQRRRRNSTSSTNQNMFCEERVGYNWAYNTMLTKTWRSSATGDEKFADRLLKDFTDFCINRDNRLVTFWTSCLEKMHASAP

SEQ ID NO: 324250 - protein, 420 aa, Artificial Sequence
  derived and/or modified sequence
MKHPSTGVQLLSEQKGLSPYCFISAEVVHWLVNHVEGIQTQAMAIDIMQKMLEEQLITHASGEAWRTFIYGFYFYKIVTDKEPDRVAMQQPATTWHTAGVDDFASFQRKWFEVAFVAEELVHSEIPAFLLPWLPSRPASYASRHSSFSRSFGGRSQAAALLAATVPEQRTVTLDVDVNNRTDRLEWCSCYYHGNFSLNAAFEIKLHWMAVTAAVLFEMVQGWHRKATSCGFLLVPVLEGPFALPSYLYGDPLRAQLFIPLNISCLLKEGSEHLFDSFEPETYWDRMHLFQEAIAHRFGFVQDKYSASAFNFPAENKPQYIHVTGTVFLQLPYSKRKFSGQQRRRRNSTSSTNQNMFCEERVGYNWAYNTMLTKTWRSSATGDEKFADRLLKDFTDFCINRDNRLVTFWTSCLEKMHASAP

SEQ ID NO: 324251 - DNA, 4746 bp, Artificial Sequence
  derived and/or modified sequence
atgaggaccaccaaagtgtataaactcgttatacataaaaaaggctttggtggatccgacgatgagttggttgtcaacccaaaggtgtttcctcacattaaattaggagacatcgtggaaattgcgcatcctaatgacgagtactccccgctcttactccaggtgaaaagtctaaaggaagatctgcagaaagaaacaatttcagtcgaccaaacagtcacgcaagtcttcagactgcggccataccaggacgtgtatgtgaatgtcgtagatcctaaagacgtgaccctcgatttagtggagttaactttcaaggatcagtatattggaagaggggacatgtggagactgaagaaaagcttggtgtccacctgtgcctatattacacaaaaggtggagtttgcagggatcagggcccaggccggcgagctgtgggttaagaacgagaaggtcatgtgcggctatatttcagaagatactcgtgtggtctttagatcaacttcagccatggtgtacatatttatccaaatgtcttgtgagatgtgggattttgatatctatggggatctatacttcgagaaagccgttaatggattcctggctgacctctttaccaaatggaaggaaaagaactgctctcatgaggtgaccgtcgtgctgttttcccggactttctacgatgccaagtctgttgacgaatttcccgagataaatcgcgcctccatcagacaggaccataagggtcgattctacgaggacttctacaaggttgtggtccagaatgaaagacgcgaggaatggacctccctgttagtcactatcaaaaagctgtttattcagtatcctgtgcttgtgaggctggaacaggccgagggctttccccagggggataatagcacctccgcacagggaaattatctggaagccattaacctcagtttcaatgtgttcgataagcattacatcaaccggaactttgacaggacaggtcaaatgtctgtggtcatcacgcctggcgtcggcgtgttcgaggtggataggttgcttatgatcttaaccaaacagcgaatgattgacaacgggatcggagtggacctcgtttgcatgggcgagcaacctctgcatgccgtcccactcttcaagctgcacaaccgcagcgcccctcgtgattcacgtctcggggacgattataatataccccattggattaaccattcattctacactagtaaatctcaactattctgcaatagcttcacccccagaatcaagttggccggtaagaagcccgcgtcagaaaaagccaagaatggcagggatacgtctttaggatccccaaaagagagcgaaaacgctctccctattcaggtagattacgacgcatacgacgcccaggtgttccgactccccggccctagtcgagcccaatgcctgactacttgccggtccgtgcgggagcgggagtcccatagcaggaaaagcgcttctagttgtgacgtgtcttcctctccctccctgccatcacgtacactgcctaccgaagaagttcggtcgcaggcaagcgacgacagctccctgggtaagagcgccaatatcttaatgatcccacacccacacctgcaccaatatgaggtttcgtcaagtttagggtatacaagcactcgagacgtgttggagaacatgatggaaccccctcagagggactcttctgcccctggcagattccatgttggatcagccgagtccatgctgcatgtgaggccaggtggttacacaccccagagggcattgatcaatcccttcgccccctccagaatgccaatgaaactgactagcaatcgacgtagatggatgcacaccttccccgttggacccagtggtgaggcaatccaaattcatcaccagacgcgacagaatatggctgagttacaggggagtgggcaaagagaccccacccactcatcagctgagctcctcgagttagcataccacgaagccgccggacggcacagcaactcaagacaacctggagatggcatgagtttcctgaatttctccggaactgaggagctgtctgtaggattgctttccaactctggagcgggtatgaacccacggacccagaataaagattctttggaagattccgtaagcacatccccagatcctatcctcacactgtccgcaccacccgtggtgcctgggttctgctgcaccgttggtgtggactggaaatcactgacaacccccgcatgtctcccactcacaaccgattatttccccgacaggcagggactgcaaaacgattacaccgagggctgctatgacctgctccctgaagccgatatcgatcggcgggacgaggacggtgtgcagatgactgcacagcaggtgtttgaggagttcatttgtcagagacttatgcaggggtaccagattattgttcagcccaagacccagaaacccaatcctgccgtgcctccaccactttcctccagccccctttatagccgcggattagtctctcggaatagacccgaggaggaagatcaatattggctatccatgggcaggacctttcacaaggtgacccttaaagacaaaatgattacagtcacgcgataccttcccaaatatccctacgagagtgctcaaatccattacacctactccctatgtccgagccacagcgattctgaatttgtctcctgctgggtggaattcagccacgagaggctggaggagtataagtggaattacctggaccagtacatttgttcagcgggctctgaagatttttccctgattgaatctctgaagttttggaggacaagatttctcctgttacccgcatgcgtgactgcaacaaagagaatcaccgagggggaagcccactgcgatatttatggtgatcgaccaagggctgacgaggatgagtggcagctgctcgacgggtttgtgaggttcgtggagggtctgaaccgtatcaggaggagacaccgaagcgatcgcatgatgcgtaagggaaccgcgatgaaaggtttacaaatgacgggaccaatttcaacgcacagtttagaatccactgctccacctgtggggaagaaaggcaccagcgcgctgtcagctctgcttgaaatggaagctagccagaagtgtctgggcgagcagcaggctgctgtccatgggggaaaatcgagtgcccagagcgctgagagcagctccgtggccatgaccccaacatatatggattctcctagaaaggtgtctgtggatcagaccgctacacctatgctggatggcacttctctgggcatttgcacagggcaatcgatggacaggggaaactctcagacattcggcaatagtcaaaatataggcgagcaagggtacagttccacgaatagctctgactcctcctcacagcaactcgtggcatcttcacttacctctagttctaccctgacggagattctcgaggccatgaaacaccccagcacaggagttcagctcctgtctgagcagaagggcttgagtccctattgttttatcagcgctgaggtcgtgcactggctcgtgaatcatgtagagggtattcaaacccaggctatggccatcgacataatgcaaaagatgcttgaagagcagctgatcacacacgccagcggcgaggcctggagaacattcatatatgggttttacttttacaagattgtgacagacaaggagcctgaccgtgtggcgatgcagcagcctgctaccacttggcataccgctggcgtggacgacttcgcctccttccagaggaaatggtttgaggttgcattcgtggccgaagaactcgtccacagcgagattccagccttcctgctgccttggctcccttcccggcctgccagctacgccagtagacacagcagcttcagcagatctttcggaggacggtcccaggccgccgcactcctcgctgccaccgtgcctgaacaacgaacagttacgcttgacgttgatgtgaacaatagaaccgacaggctggagtggtgctcgtgttattatcacggaaatttttcactgaatgccgcatttgagattaagctccattggatggccgtgactgccgctgtcctttttgagatggtccagggctggcatagaaaagcaacaagttgtggctttcttcttgtccccgttctagagggccccttcgccctgccatcgtacctgtacggggaccctttacgagcccaacttttcatccctttaaatatttcttgcttgttgaaagagggcagtgagcaccttttcgatagctttgaacccgaaacatattgggacagaatgcacctttttcaggaagctatcgcacaccggtttggtttcgttcaggacaaatactctgccagcgctttcaacttccctgccgagaacaagccccagtacattcacgtaaccggtactgttttcctgcagcttccatattccaagagaaaattctcaggacagcagcgaagacgcaggaatagcacatctagcaccaatcagaacatgttttgcgaagagcgtgttgggtataactgggcctataataccatgctgacgaagacctggcggagtagcgctaccggagatgaaaagtttgctgaccgccttctgaaagattttaccgatttctgcataaatagggataatagactcgtgactttctggaccagctgtctggagaagatgcacgcgtccgccccgtag

SEQ ID NO: 324252 - DNA, 4746 bp, Artificial Sequence
  derived and/or modified sequence
atgaggaccaccaaggtgtacaagctggtgatccacaagaagggctttggaggcagtgatgatgagctggtggtgaaccccaaggtgttcccccacatcaagctgggggacatcgtggagatcgcccaccccaatgatgagtacagccccctgctgctgcaggtgaagagcctgaaggaggacctgcagaaggagaccatctctgtggaccagacagtgacccaggtgttccggctgcggccctaccaggatgtgtatgtgaatgtggtggaccccaaggatgtgaccctggacctggtggagctgaccttcaaggaccagtacatcggccgcggggacatgtggaggctgaagaagagcctggtgtccacctgtgcctacatcacccagaaggtggagtttgctggcatccgggcccaggccggggagctgtgggtgaagaatgagaaggtgatgtgtggctacatcagcgaggacaccagggtggtgttccgcagcaccagcgccatggtgtacatcttcatccagatgagctgtgagatgtgggactttgacatctatggagacctgtactttgagaaggctgtgaatggcttcctggccgacctcttcaccaagtggaaggagaagaactgcagccatgaggtgacagtggtgctcttcagcaggaccttctatgatgccaagtctgtggatgagttccctgagatcaacagagccagcatccggcaggaccacaagggccgcttctatgaggacttctacaaggtggtggtgcagaatgaaagaagagaggagtggaccagcctgctggtgaccatcaagaagctgttcatccagtaccctgtgctggtgcggctggagcaggccgagggcttcccccagggcgacaacagcaccagcgcccagggcaactacctggaggccatcaacctgtccttcaacgtgtttgacaagcactacatcaacagaaactttgacagaacaggccagatgtctgtggtgatcaccccaggagtgggcgtgtttgaggtggaccggctgctgatgatcctgaccaagcagaggatgattgacaatggcatcggcgtggacctggtgtgcatgggagagcagcccctgcatgctgtgcccctcttcaagctgcacaacagaagtgccccccgggacagccggctgggagatgactacaacatcccccactggatcaaccacagcttctacaccagcaagagccagctgttctgcaacagcttcaccccccgcatcaagctggccggcaagaagccagccagcgagaaggccaagaatggccgggacaccagcctgggcagccccaaggagagtgaaaatgccctgcccatccaggtggactatgatgcctatgatgcccaggtgttccggctgcccggccccagccgggcccagtgcctgaccacctgccgctctgtgcgggagcgggagagccacagcaggaagagcgccagcagctgtgatgtgagcagcagccccagcctgcccagcaggaccctgcccacagaggaggtgcgcagccaggccagtgatgacagcagcctgggcaagagcgccaacatcctgatgatcccccacccccacctgcaccagtatgaggtgagcagcagcctgggctacaccagcaccagagatgtgctggagaacatgatggagcccccccagagggacagcagcgcccctggccgcttccacgtgggcagcgctgagagcatgctgcacgtgcggcctgggggctacaccccccagagggccctgatcaacccctttgcccccagcaggatgcccatgaagctgaccagcaacagaagacgctggatgcacaccttccctgtgggccccagcggggaggccatccagatccaccaccagacccggcagaacatggccgagctgcagggcagcggccagagggaccccacccacagcagcgctgagctgctggagctggcctaccacgaggccgccggccgccacagcaacagccggcagcctggagatggcatgtccttcctgaacttcagcggcacagaggagctgtctgtgggcctgctgagcaacagcggggccggcatgaaccccaggacccagaacaaggacagcctggaggacagcgtgtccaccagcccagaccccatcctgaccctgagcgcccctcctgtggtgcccggcttctgctgcaccgtgggcgtggactggaagagcctgaccaccccagcctgcctgcccctgaccacagactacttcccagaccggcagggcctgcagaatgactacacagagggctgctatgacctgctgcctgaggccgacatcgacagaagagatgaagatggagtgcagatgacagcccagcaggtgtttgaggagttcatctgccagaggctgatgcagggctaccagatcatcgtgcagcccaagacccagaagcccaacccagctgtgcccccacccctgagcagcagccccctgtacagccggggcctggtgtccaggaacagacctgaggaggaggaccagtactggctgtccatgggccgcaccttccacaaggtgaccctgaaggacaagatgatcaccgtgacccgctacctgcccaagtacccctatgaaagtgcccagatccactacacctacagcctgtgccccagccacagcgacagcgagtttgtgtcctgctgggtggagttcagccatgagcggctggaggagtacaagtggaactacctggaccagtacatctgcagcgctggcagcgaggacttcagcctcatcgagagcctgaagttctggaggacccgcttcctgctgctgcctgcctgtgtgacagccaccaagaggatcacagaaggagaggcccactgtgacatctatggagaccggcccagggcagatgaagatgagtggcagctgctggatggctttgtgcgctttgtggagggcctgaaccgcatcagaagaagacacagaagtgacaggatgatgaggaagggcacagccatgaagggcctgcagatgacaggccccatcagcacccacagcctggagagcacagcccctcctgtgggcaagaagggcaccagcgccctgagcgccctgctggagatggaggccagccagaagtgcctgggggagcagcaggccgctgtgcacggcggcaagagcagcgcccagagcgctgagagcagctctgtggccatgacccccacctacatggacagccccaggaaggtgtctgtggaccagacagccacccccatgctggatggcaccagcctgggcatctgcaccggccagagcatggaccggggcaacagccagaccttcggcaacagccagaacatcggggagcagggctacagcagcaccaacagcagtgacagcagcagccagcagctggtggccagcagcctgaccagcagcagcaccctgacagagatcctggaggccatgaagcaccccagcactggagtgcagctgctgtctgagcagaagggcctgagcccctactgcttcatctctgctgaggtggtgcactggctggtgaaccacgtggagggcatccagacccaggccatggccatcgacatcatgcagaagatgctggaggagcagctgatcacccacgccagcggggaggcctggaggaccttcatctacggcttctacttctacaagatcgtgacagacaaggagccagacagagtggccatgcagcagcctgccaccacctggcacacagctggggtggatgactttgccagcttccagaggaagtggtttgaggtggcctttgtggccgaggagctggtgcacagcgagatcccagccttcctgctgccctggctgcccagcaggcctgccagctatgccagccgccacagcagcttcagccgcagctttggaggccgcagccaggccgccgccctgctggccgccaccgtgcctgagcagaggacagtgaccctggatgtggatgtgaacaacagaacagaccggctggagtggtgcagctgctactaccacggcaacttcagcctgaatgctgcctttgagatcaagctgcactggatggctgtgacagctgctgtgctgtttgagatggtgcagggctggcacaggaaggccaccagctgtggcttcctgctggtgcctgtgctggagggcccctttgccctgcccagctacctgtatggagaccccctgcgggcccagctgttcatccccctgaacatcagctgcctgctgaaggagggcagcgagcacctgtttgacagctttgagcctgagacctactgggacaggatgcacctgttccaggaggccatcgcccaccgcttcggctttgtgcaggacaagtacagcgccagcgccttcaacttccctgctgagaacaagccccagtacatccacgtgacaggcaccgtcttcctgcagctgccctacagcaagaggaagttcagcggccagcagaggagaagaagaaacagcaccagcagcaccaaccagaacatgttctgtgaggagcgggtgggctacaactgggcctacaacaccatgctgaccaagacctggaggagcagcgccactggagatgagaagtttgctgaccggctgctgaaggacttcacagacttctgcatcaacagagacaaccggctggtgaccttctggaccagctgcctggagaagatgcacgccagcgccccctag

SEQ ID NO: 324253 - DNA, 4746 bp, Artificial Sequence
  derived and/or modified sequence
atgcggaccaccaaggtgtacaagctggtgatccacaagaagggcttcgggggcagcgacgatgagctagtggtaaatcccaaggtgttccctcacatcaagcttggcgacattgtggaaattgcgcatcccaacgatgaatattctcctctgctcctgcaggtgaagtcactgaaggaagacctgcagaaggaaaccatatctgtggatcagaccgttacccaggtgttcagactccgaccttatcaggacgtgtacgtgaacgtagtagatccaaaggacgtcacactggacctagtcgagctgacgttcaaggaccagtacatcgggcggggggacatgtggcgcttaaagaaatccctcgtatccacttgcgcctacattacacagaaagtggagttcgccggcatccgggcacaggccggtgaactgtgggtgaagaacgagaaagtgatgtgcggctacatcagtgaggataccagagtggtcttcaggagtacctcggccatggtgtatatattcattcaaatgtcatgcgaaatgtgggattttgacatctacggagatctctatttcgaaaaagccgttaatggttttctcgccgatcttttcacaaaatggaaagaaaagaactgtagtcacgaagtaactgtggtgctgttctccaggactttttatgacgcgaaatccgtcgacgagttccctgaaatcaatagggccagcatcagacaggaccataagggcagattttatgaagatttttacaaggtcgtcgttcagaatgagcggcgcgaagaatggacctcccttcttgtgacaatcaagaaactatttatacagtaccccgtgcttgtccgattagaacaggccgagggctttccccagggggacaacagcacatccgcacagggcaactatcttgaagctatcaacctcagcttcaatgtgtttgacaaacactatattaacagaaacttcgacaggacaggacagatgtccgtggttattacccctggcgtgggagtttttgaagtcgaccggctacttatgatcctgactaagcagagaatgatcgacaacgggatcggggtggatcttgtatgcatgggtgagcagcccctccacgcagtgccactgttcaaattgcacaatcggtcagccccaagggacagccgactcggagacgattataacatccctcactggattaaccattcattctacacctcaaaatctcagcttttctgcaattcattcaccccaagaatcaaactggccggaaaaaagcctgcgtctgagaaggccaagaatggtcgcgataccagcctgggatctccaaaggaatctgagaacgccctcccaattcaagtcgactatgatgcctatgacgcccaggtcttccggcttccaggcccatccagagctcagtgtttaacaacatgccgatctgtgcgagaacgcgagtcccacagcaggaagtctgcctcctcttgcgacgttagttctagccccagccttccctctcgcacactcccaactgaggaggtgcgctcacaagcatccgacgatagcagtttgggcaagtctgccaacatactgatgatcccacaccctcacctacaccagtatgaggtgtccagctcattgggttacacctctacccgggacgtgctggaaaatatgatggagcccccccagagggacagttccgcgccaggccgcttccacgtaggcagcgctgagagtatgctgcacgttcgccccggaggttatactcctcaacgggccttaattaatcccttcgctccatcaagaatgcctatgaagttaacctccaataggcggaggtggatgcacacatttcctgtaggcccttccggcgaagccatccagattcatcaccagacgcgccaaaatatggccgagctgcagggatccggacagcgggaccctacacatagctctgcagagctcctcgaacttgcctatcatgaagccgctggccggcactccaattctcgccagccaggggacgggatgagctttctaaatttttcgggaactgaggagctgtccgtaggactgctcagtaactccggcgcagggatgaatccccgcactcagaataaagactcgctggaggacagcgtatccactagccctgatccaatactcacgctgtctgcccctccggtggtaccaggtttttgttgcaccgtgggcgtcgactggaaaagtcttacgactccagcatgtctcccattaactacagactatttccccgaccgtcagggccttcaaaacgattataccgagggctgctatgatttactcccggaagccgatattgatcgccgtgacgaggacggcgtccagatgaccgctcaacaggtctttgaggagtttatctgccagagactcatgcagggctatcagatcatagtgcaacccaaaacccagaaacccaacccagccgtccccccacccttaagctcatctccattatatagtcggggcctagtatctcggaacagaccggaagaagaggaccagtactggctctcaatgggtcgcaccttccacaaagttacgcttaaggataagatgatcaccgtgactcgatacctgcctaagtatccctacgagtctgcacagatccattatacctactctctgtgtcctagtcattccgactccgagtttgtgtcctgttgggtagagttctctcacgagcgcctggaggagtacaagtggaactatctggatcagtacatctgttccgctgggagtgaggatttcagtctgatcgagagtctcaagttctggaggactcgttttttactcctacccgcctgtgtcaccgcaactaaaagaattaccgagggcgaagctcattgtgatatttacggggacagacccagagccgacgaagatgagtggcagttattggatggatttgtgcggtttgtggaaggtcttaaccgaatcaggcggaggcatcgttctgatcgtatgatgcgtaagggcactgctatgaaaggcctccaaatgaccggccctatctctacccactccctcgaaagcacagcgccacccgtgggcaagaaaggaaccagcgcactctccgctctcctggaaatggaggcatcccaaaagtgtctgggggaacagcaagccgctgtgcacggcggtaaatccagcgcccagtcagccgagtcatcgtcagtggccatgacgccgacatacatggacagtccccggaaggtctctgtggaccagaccgcaactcccatgctggatggaacatccctgggaatctgcacgggacaatcaatggaccgtgggaacagccagacctttggaaatagccaaaacataggggaacagggctactctagtactaactcgagcgacagcagttcccagcaacttgtcgcctcctcactgacctcttcctcaacgctaaccgagattctcgaagcgatgaagcacccaagcaccggagtccaattgctgtccgaacagaaaggcttgagcccctattgcttcattagtgcagaggtggttcactggctcgtaaatcatgtggaagggatacaaactcaagccatggctatagatattatgcagaagatgttagaggagcagcttatcacccacgctagtggcgaggcttggcgcaccttcatctacgggttttacttttacaaaatcgtgaccgataaggagcccgacagggttgccatgcaacaaccagccaccacttggcacacagcgggggtcgatgacttcgctagcttccaacgaaaatggtttgaggtcgcgttcgtggcagaggagctcgtgcatagcgagatacccgcgttcttgctcccttggttgccctcgaggcccgcctcctatgcttccagacattccagcttcagtcgatctttcggaggcaggtctcaggccgccgccctgttagcagccacagtgcctgagcagagaaccgttacgctggacgtcgatgtgaataaccggactgacagactggagtggtgttcctgttactatcatggaaacttctcgttaaatgccgcctttgaaatcaaactgcattggatggccgttacagccgccgttctgttcgagatggtccaagggtggcataggaaggccactagctgtggatttctcctagtcccagtgctggaaggccctttcgcactgccgtcatatctgtatggtgacccactgcgcgcccaactttttatccccctgaacattagctgcctgctgaaggaaggttccgagcaccttttcgatagctttgaacccgagacctattgggaccgaatgcatcttttccaggaagctattgctcacagattcgggtttgtacaagacaaatactcagcatccgctttcaacttccctgcagagaacaaaccacagtatatacacgtcacgggaactgtcttcttgcagctaccatactccaaacgcaagttttcaggccagcagagacggaggcggaactcgacgagttcaacaaatcagaacatgttttgtgaagagagggtggggtacaactgggcttacaataccatgcttactaagacatggagaagcagtgccaccggggacgagaagttcgccgatagactgctgaaagatttcacagatttttgcattaatcgagataataggcttgtgactttctggacatcatgcttggagaaaatgcatgcttctgcgccctag

SEQ ID NO: 324254 - DNA, 4746 bp, Artificial Sequence
  derived and/or modified sequence
atgcggacgaccaaagtttataagctggtgattcacaaaaagggcttcggcggttcagacgatgagcttgttgttaacccaaaagtatttccccacatcaagctgggggacatagtcgagatcgcacaccccaacgatgagtactcccccttactgctccaggtgaagtcactcaaagaggacctccaaaaagagaccatctcagtggatcagactgtaacacaggtcttcagactgcggccttaccaagatgtgtatgtgaatgtcgtggatcctaaagatgtgacattagacctggtggagttaacattcaaggatcagtatatcggcagaggcgatatgtggcgacttaagaaaagcctcgtgtccacatgtgcctatattactcagaaggtcgagttcgccggtatccgggctcaagccggagagctgtgggtaaagaatgagaaggtaatgtgtggatatatttccgaggataccagagtggtgttccgatctacatccgctatggtgtatatctttatccagatgtcttgtgaaatgtgggacttcgatatctacggcgacctgtattttgagaaagccgtcaatgggttcctggccgatctctttacaaaatggaaagagaaaaattgttctcatgaagtgactgtggtccttttcagccgcacattctatgatgccaagtctgttgatgagttcccggagattaatcgcgcttcaattagacaggaccacaaaggcaggttttatgaggatttctacaaggttgtagtgcagaatgagagacgggaagagtggaccagtctgctcgtcacaatcaaaaaactcttcatccagtacccggttttggtgagactggaacaggcagagggcttccctcagggtgacaattctacaagcgctcagggtaattatctcgaggcgatcaatctttccttcaacgtatttgataagcattatattaatcggaatttcgatagaaccgggcaaatgtcagtcgtcatcacacccggtgtgggggtctttgaggtggaccgcctattaatgatactcaccaaacaaagaatgatagataacggcattggcgtggatttggtgtgtatgggtgaacagcctctccatgcggtgccactgtttaagctccataacagatcagcccctagggactctaggctcggagatgactacaacatcccacactggattaaccattctttttataccagcaagagtcaactgttctgtaattctttcacgcctagaatcaaactggctggcaaaaaacctgcaagcgaaaaggcaaagaacggcagagatacaagcctcggctcccctaaggaatccgagaacgctctgcccattcaggtggattatgatgcttacgacgcgcaagtgtttcgcttgcctggacctagccgggctcaatgccttaccacgtgccggtctgtgagggagagagagagtcatagccgaaagtccgcatcctcatgtgatgtgtcctctagtcctagcctcccctcaaggacattgcctaccgaagaggtgcgatcacaggcgtctgacgactccagcctgggaaaaagcgcgaacatcttgatgattccccacccacacctccatcagtacgaggtcagcagctccctgggttataccagcacacgtgatgttctggagaatatgatggagcctccccagcgtgacagcagtgctcctggcagatttcatgtcggcagtgcagagtcaatgttacacgtccgcccaggcggatataccccacagagagcattgattaacccttttgctcctagtcggatgcccatgaaacttacaagcaacaggcgcaggtggatgcacacatttccagtaggaccctctggcgaggctatccaaatccatcaccaaaccagacagaatatggccgagctacagggcagcggacagcgggaccccacacactccagcgcagagttgctggaacttgcctaccacgaagcggctggacgccattctaatagtagacagcccggagacgggatgtcattcttaaacttctcaggcaccgaggagttatccgtcggcctactgtccaacagtggcgcaggcatgaatccacgtacccaaaataaagactctctggaggattccgtctcaacttcaccagatcctatactcaccctttcagcacccccagttgtgccagggttctgctgtactgtcggcgtggactggaaatcactgaccacccccgcttgtctgcctcttaccacagactacttccctgatcggcagggattacagaatgactacactgaaggatgctatgatttacttccggaggcggacatagacagacgcgatgaggatggcgtgcaaatgactgcccagcaagtttttgaggagttcatctgtcagcgtctgatgcaggggtaccagatcatcgttcagccaaagacccagaaacccaacccagccgtccctccgcctctgagtagctcaccgctttactctcgcggtcttgtgagtcgtaataggcctgaagaggaggaccagtactggctctccatgggcagaacatttcacaaagttaccttaaaggacaagatgatcaccgttactcggtaccttcctaagtacccttatgagagcgcacagattcactatacatattctctctgtccgtctcacagcgactccgagttcgtgtcttgttgggtggagttctcccacgagcgacttgaggaatacaagtggaattacctggaccagtacatctgttctgccggaagtgaagatttcagtttgatcgagagtctgaagttttggcgtacgagattccttctgctgcccgcatgcgttacagcgactaagcgcatcaccgagggtgaggctcattgtgacatttacggggacagaccacgtgccgacgaagatgaatggcagttactggacggcttcgtgcgattcgtggagggccttaatcggatcagacggcgtcataggagtgatagaatgatgagaaaggggaccgcaatgaagggactgcagatgacaggcccaatcagcacccactctcttgagtcaaccgctccacctgtcggaaaaaagggaactagcgccctgtccgccttactggagatggaagctagtcaaaagtgtctgggagagcagcaagcagcagttcatgggggaaaatcgagcgctcaatcagcggagtccagtagcgtggccatgacacctacatatatggactcaccacgcaaggtctccgtcgaccaaacagcaactccaatgctggatggtacctctcttggaatttgcactggacagtctatggacagaggaaattcgcagacattcggcaatagccaaaatattggggaacagggctattcttctaccaattcctcagattcttcatctcagcagctcgtggcgtccagtcttacatcctcctccacactaactgaaattctggaggcgatgaagcacccaagcactggagttcagctgctcagcgagcagaaaggcctttcaccttattgcttcatcagtgctgaggtggttcactggttagtcaaccatgtggaggggatccagacccaggcgatggccatcgacattatgcagaagatgctcgaagagcagctcattactcacgcttctggcgaggcttggcgtacttttatctacggattttacttttacaaaatcgtgaccgacaaagagcctgatagggtggccatgcaacagccagcgactacttggcacacagctggcgtagatgactttgcgagtttccaaagaaagtggttcgaggtggccttcgtggctgaggaactggtccactctgagataccggcatttctcttgccatggctcccaagccggcctgcctcatacgcctcccggcatagttcatttagtcggtcattcggaggccgaagtcaagccgctgcgctgctggcagcgaccgtgcccgaacaaagaaccgtgaccctggacgtcgatgtgaacaaccggactgaccgcctggaatggtgttcctgttactatcacggtaatttcagtttgaatgctgcattcgaaatcaaactgcactggatggccgtgaccgcagcagtgcttttcgaaatggtccagggatggcatcgtaaggccacctcgtgcggctttctcctcgtgcctgttctggagggaccatttgccttaccctcttatctatacggcgaccccctgagagctcaactgttcatccccctgaacatctcgtgtctgctgaaggaaggatcggagcatctcttcgattcctttgagcctgagacatactgggaccggatgcatctcttccaggaggcaattgctcatcgattcggttttgtgcaggataagtattctgccagcgcgttcaatttcccagcggagaataagccccaatacatccacgtgactggcaccgtatttttacaactgccctacagcaaaaggaaattctcgggccagcagaggagaaggcgaaattcaacctcttccaccaatcaaaacatgttttgtgaagagcgggtgggatataattgggcctataatacgatgctgacaaagacatggcgctcctcagcaacaggagatgagaagttcgctgacaggctccttaaggactttactgatttctgcattaacagagacaataggctcgtgaccttctggacaagttgcctcgagaagatgcatgcttctgccccatag

SEQ ID NO: 324255 - DNA, 4746 bp, Artificial Sequence
  derived and/or modified sequence
atgagaaccaccaaggtgtacaagctggtgatccacaagaagggcttcggcggcagcgacgacgagctggtggtgaaccccaaggtgttcccccacatcaagctgggcgacatcgtggagatcgcccaccccaacgacgagtacagccccctgctgctgcaggtgaagagcctgaaggaggacctgcagaaggagaccatcagcgtggaccagaccgtgacccaggtgttcagactgagaccctaccaggacgtgtacgtgaacgtggtggaccccaaggacgtgaccctggacctggtggagctgaccttcaaggaccagtacatcggcagaggcgacatgtggagactgaagaagagcctggtgagcacctgcgcctacatcacccagaaggtggagttcgccggcatcagagcccaggccggcgagctgtgggtgaagaacgagaaggtgatgtgcggctacatcagcgaggacaccagagtggtgttcagaagcaccagcgccatggtgtacatcttcatccagatgagctgcgagatgtgggacttcgacatctacggcgacctgtacttcgagaaggccgtgaacggcttcctggccgacctgttcaccaagtggaaggagaagaactgcagccacgaggtgaccgtggtgctgttcagcagaaccttctacgacgccaagagcgtggacgagttccccgagatcaacagagccagcatcagacaggaccacaagggcagattctacgaggacttctacaaggtggtggtgcagaacgagagaagagaggagtggaccagcctgctggtgaccatcaagaagctgttcatccagtaccccgtgctggtgagactggagcaggccgagggcttcccccagggcgacaacagcaccagcgcccagggcaactacctggaggccatcaacctgagcttcaacgtgttcgacaagcactacatcaacagaaacttcgacagaaccggccagatgagcgtggtgatcacccccggcgtgggcgtgttcgaggtggacagactgctgatgatcctgaccaagcagagaatgatcgacaacggcatcggcgtggacctggtgtgcatgggcgagcagcccctgcacgccgtgcccctgttcaagctgcacaacagaagcgcccccagagacagcagactgggcgacgactacaacatcccccactggatcaaccacagcttctacaccagcaagagccagctgttctgcaacagcttcacccccagaatcaagctggccggcaagaagcccgccagcgagaaggccaagaacggcagagacaccagcctgggcagccccaaggagagcgagaacgccctgcccatccaggtggactacgacgcctacgacgcccaggtgttcagactgcccggccccagcagagcccagtgcctgaccacctgcagaagcgtgagagagagagagagccacagcagaaagagcgccagcagctgcgacgtgagcagcagccccagcctgcccagcagaaccctgcccaccgaggaggtgagaagccaggccagcgacgacagcagcctgggcaagagcgccaacatcctgatgatcccccacccccacctgcaccagtacgaggtgagcagcagcctgggctacaccagcaccagagacgtgctggagaacatgatggagcccccccagagagacagcagcgcccccggcagattccacgtgggcagcgccgagagcatgctgcacgtgagacccggcggctacaccccccagagagccctgatcaaccccttcgcccccagcagaatgcccatgaagctgaccagcaacagaagaagatggatgcacaccttccccgtgggccccagcggcgaggccatccagatccaccaccagaccagacagaacatggccgagctgcagggcagcggccagagagaccccacccacagcagcgccgagctgctggagctggcctaccacgaggccgccggcagacacagcaacagcagacagcccggcgacggcatgagcttcctgaacttcagcggcaccgaggagctgagcgtgggcctgctgagcaacagcggcgccggcatgaaccccagaacccagaacaaggacagcctggaggacagcgtgagcaccagccccgaccccatcctgaccctgagcgccccccccgtggtgcccggcttctgctgcaccgtgggcgtggactggaagagcctgaccacccccgcctgcctgcccctgaccaccgactacttccccgacagacagggcctgcagaacgactacaccgagggctgctacgacctgctgcccgaggccgacatcgacagaagagacgaggacggcgtgcagatgaccgcccagcaggtgttcgaggagttcatctgccagagactgatgcagggctaccagatcatcgtgcagcccaagacccagaagcccaaccccgccgtgcccccccccctgagcagcagccccctgtacagcagaggcctggtgagcagaaacagacccgaggaggaggaccagtactggctgagcatgggcagaaccttccacaaggtgaccctgaaggacaagatgatcaccgtgaccagatacctgcccaagtacccctacgagagcgcccagatccactacacctacagcctgtgccccagccacagcgacagcgagttcgtgagctgctgggtggagttcagccacgagagactggaggagtacaagtggaactacctggaccagtacatctgcagcgccggcagcgaggacttcagcctgatcgagagcctgaagttctggagaaccagattcctgctgctgcccgcctgcgtgaccgccaccaagagaatcaccgagggcgaggcccactgcgacatctacggcgacagacccagagccgacgaggacgagtggcagctgctggacggcttcgtgagattcgtggagggcctgaacagaatcagaagaagacacagaagcgacagaatgatgagaaagggcaccgccatgaagggcctgcagatgaccggccccatcagcacccacagcctggagagcaccgccccccccgtgggcaagaagggcaccagcgccctgagcgccctgctggagatggaggccagccagaagtgcctgggcgagcagcaggccgccgtgcacggcggcaagagcagcgcccagagcgccgagagcagcagcgtggccatgacccccacctacatggacagccccagaaaggtgagcgtggaccagaccgccacccccatgctggacggcaccagcctgggcatctgcaccggccagagcatggacagaggcaacagccagaccttcggcaacagccagaacatcggcgagcagggctacagcagcaccaacagcagcgacagcagcagccagcagctggtggccagcagcctgaccagcagcagcaccctgaccgagatcctggaggccatgaagcaccccagcaccggcgtgcagctgctgagcgagcagaagggcctgagcccctactgcttcatcagcgccgaggtggtgcactggctggtgaaccacgtggagggcatccagacccaggccatggccatcgacatcatgcagaagatgctggaggagcagctgatcacccacgccagcggcgaggcctggagaaccttcatctacggcttctacttctacaagatcgtgaccgacaaggagcccgacagagtggccatgcagcagcccgccaccacctggcacaccgccggcgtggacgacttcgccagcttccagagaaagtggttcgaggtggccttcgtggccgaggagctggtgcacagcgagatccccgccttcctgctgccctggctgcccagcagacccgccagctacgccagcagacacagcagcttcagcagaagcttcggcggcagaagccaggccgccgccctgctggccgccaccgtgcccgagcagagaaccgtgaccctggacgtggacgtgaacaacagaaccgacagactggagtggtgcagctgctactaccacggcaacttcagcctgaacgccgccttcgagatcaagctgcactggatggccgtgaccgccgccgtgctgttcgagatggtgcagggctggcacagaaaggccaccagctgcggcttcctgctggtgcccgtgctggagggccccttcgccctgcccagctacctgtacggcgaccccctgagagcccagctgttcatccccctgaacatcagctgcctgctgaaggagggcagcgagcacctgttcgacagcttcgagcccgagacctactgggacagaatgcacctgttccaggaggccatcgcccacagattcggcttcgtgcaggacaagtacagcgccagcgccttcaacttccccgccgagaacaagccccagtacatccacgtgaccggcaccgtgttcctgcagctgccctacagcaagagaaagttcagcggccagcagagaagaagaagaaacagcaccagcagcaccaaccagaacatgttctgcgaggagagagtgggctacaactgggcctacaacaccatgctgaccaagacctggagaagcagcgccaccggcgacgagaagttcgccgacagactgctgaaggacttcaccgacttctgcatcaacagagacaacagactggtgaccttctggaccagctgcctggagaagatgcacgccagcgccccctag

SEQ ID NO: 324256 - DNA, 5405 bp, Artificial Sequence
  derived and/or modified sequence
atctggaggaggcgcagggaacctggagagggtccagccctcagtgccccggccagaggcgggaaggggctctagagcttcgggaggcaagatgacttctctgccccaagcttggaacagctaaagggaaaaacagtgcaagatgagaacaacaaaggtctacaaactcgtcatccacaagaagggctttgggggcagtgatgatgagctagttgtgaaccccaaagtgttccctcacatcaagcttggagacattgtagagattgcacaccccaacgatgaatacagccctctgcttttgcaggtcaagtctcttaaggaagatttacagaaggaaactatcagtgtggaccagactgtgactcaagtgttccggctgagaccttatcaggatgtctatgttaatgtcgtagaccctaaggatgtgacccttgacctagtggaattaacttttaaggatcagtatattggccgtggggatatgtggcgactaaagaaaagtttggtcagcacatgtgcctatatcacccagaaggtggagtttgctggcatcagagcacaggctggtgaactgtgggttaagaatgagaaggtcatgtgtggctacatcagtgaagataccagggtggtgtttcgttctacgtcggctatggtttacatatttattcagatgagctgtgaaatgtgggattttgatatttatggggatttgtattttgagaaagctgtgaatggtttccttgctgatctatttaccaagtggaaggagaagaactgtagtcatgaagtgacagtggtcctgttttctagaactttctatgatgcaaaatctgttgatgaatttcctgaaataaaccgagcctcaattcgacaggatcacaaggggagattctatgaagacttttacaaagtggtggtgcagaatgagagaagagaagaatggacttcacttctcgtaaccattaaaaaactcttcatccagtatccagtgttggtgcgactggaacaggcagagggctttcctcaaggagataattctacctcagcacaaggaaactacctggaggccatcaatctgtcattcaatgtgtttgataagcactacatcaaccgcaactttgaccgaactgggcagatgtcagtggtgatcacgcccggggtgggtgtctttgaagtggaccgcctactcatgatcctgaccaagcagcggatgatagataatggaattggtgtggatttggtgtgcatgggagagcaaccgttacatgctgtcccattgttcaagctccataatcggagtgctccccgtgattctcgtctgggcgatgactataatatccctcactggataaaccacagtttctacacatccaaaagccagctcttttgtaatagtttcaccccacgaataaaactggcaggaaagaagcccgcctctgagaaagcaaaaaatggccgtgatacatctctcgggagtccaaaagaatctgagaacgcccttcccatccaagtagattatgacgcctatgacgctcaagtgttcaggctgcccggcccatcccgggcccagtgcctcaccacctgcagatctgtgcgagagcgagagagtcacagtcgaaagagtgccagctcctgtgatgtttcatccagcccttccctaccaagccgcacactgcccactgaggaagtgaggagccaggcttctgacgacagctccctaggcaagagtgccaacatcctgatgatcccacacccccacctgcaccagtatgaagtcagcagctccttgggatacaccagcactcgagatgtcctggagaacatgatggagccaccacagcgagactccagtgcaccagggaggtttcacgttggcagtgcagaatccatgctgcatgttcgacctggtggatacacgccccagagagcactgattaaccccttcgctccctctcggatgcccatgaagcttacgtccaacagaaggcgctggatgcacacttttcctgtggggccatccggagaagccatccagatccaccaccagacccgacagaatatggcggagctacaaggcagcgggcagagggatccaactcactcctctgcagagctgctggagttagcatatcatgaagctgctggaaggcacagcaattcccgccagcctggtgacggcatgtccttcttgaacttcagtggaacagaggagctttctgtcggcctgcttagcaacagtggtgcaggtatgaatcctaggacccagaataaggattctctagaggacagtgtttctacctctccagacccaattctgacactgtctgctccccctgtagtgccaggcttctgttgcacagttggagtggactggaagtctctcactactccggcgtgcctcccccttaccaccgactacttccctgaccgccagggcctgcagaatgactacacagagggctgttatgatctccttccagaagcagacatcgacaggagggacgaagatggtgtgcagatgacagcccagcaggtatttgaagagtttatttgccaacgtctcatgcagggctaccaaatcatagtgcagcccaagacacagaaacccaatcctgctgtcccgcccccgctgagcagtagcccactctatagccgaggccttgtgtcccgaaaccgccctgaggaggaggaccagtattggctgagtatgggcagaacgttccacaaagtgacgctgaaggataagatgatcacagtgacgcgataccttcccaagtatccttatgaatctgcccagatccactacacctacagcctctgtccttcccactcagactcagagttcgtctcctgctgggtggaattctcccacgaacggctggaggagtacaagtggaattacttagatcagtatatctgttctgccggctctgaagacttcagcttaattgagtccctgaagttctggaggacccgcttcctgctgctgccagcctgtgtcaccgccaccaagcgcatcacggagggggaggcccactgcgacatctatggggacaggccccgtgcagacgaggacgagtggcaactcctggatggttttgtccgctttgtggagggcttgaatcgcattcgcaggcggcatcgctcggatcgcatgatgcggaaagggaccgccatgaaaggcttgcagatgactgggcccatttccacgcattctctggagtcaactgcacccccagtggggaagaagggaacctcagctctctctgccctgttggagatggaggccagtcagaagtgcctgggagaacagcaggcagctgtgcatggtgggaagagctccgcccagtcagccgagagcagcagcgttgccatgactcccacctacatggacagcccacgaaaggtatctgtggaccaaacagccactcctatgttggacggcaccagtttgggcatatgcacaggccaatccatggacagaggcaacagccagacctttgggaactcccagaacataggagaacagggctactcctccacaaactccagtgacagcagctctcagcagctggtggcaagctccttgacctcatcctctaccctgacagagatcctggaagccatgaagcacccctcgacaggagtccagctgctctctgaacagaagggcctctcaccgtactgcttcatcagcgcggaggtggtacactggttggtgaaccacgtggaggggatccagacacaggcgatggccattgacatcatgcagaaaatgctggaagagcagctcatcacacatgcatctggcgaagcctggcggaccttcatctacggcttctatttctacaagatagtaacggacaaagagcccgaccgagtggccatgcagcagcccgccaccacctggcacacagcaggagtggacgacttcgccagcttccagcgcaagtggtttgaggtggcctttgtggcagaagagctcgtgcactctgagattcctgcctttctcctgccctggctgcctagccggccagcctcctatgcaagtaggcacagctcctttagccgaagttttggaggacggagccaggcggcagcacttttagctgccactgtcccagagcagaggactgtgaccctggatgttgacgtgaacaaccgcacagaccggctggagtggtgcagctgttattaccatggcaacttttctctgaatgcagcctttgagatcaagctgcactggatggcggtgaccgcagcagtactcttcgagatggtccaaggttggcatcggaaagccacctcctgtggcttcttgttagtcccagttttggaggggccttttgcactgcccagttacctgtatggcgacccccttcgtgcccagctcttcatcccactcaacatcagctgcttgctcaaggagggcagcgagcacctgtttgatagctttgaacccgaaacgtactgggatcgaatgcacctcttccaggaagccattgcacacaggtttgggtttgtacaagataaatattctgcctctgcttttaacttccctgctgagaacaagcctcagtatatccacgttacaggaacagtgtttctgcagctgccctactccaagcgcaagttctcagggcagcagcggcggcggcggaactccaccagctccaccaaccagaacatgttctgcgaggagcgggtcggctacaactgggcctacaacaccatgctcaccaaaacatggcgctccagcgccacaggggatgaaaagtttgctgatcggctgctgaaggacttcacggacttctgcatcaaccgtgacaaccggctggtcacgttctggacaagttgcctggagaagatgcatgccagtgccccgtgaggccaggctgcacctgtgctgggggaaggtgggtgagccactgccctcaaacccggggcggaggattccaggcaggctctaggagtcaggtgtccgtttgctgctatcagtgagtgggggccattgttttttgtttgtttgtttgtttgtttgtttgtttttggcccccacgacaagtcttctactctagaagaaagactttggaagcagctgctgctgctgccaccactcctgtcagcaagtgctcagagcaggtgggaggcacagattgtccgtgggagggctccagtgtctgggaagagggcaggcggcccccatgaatgtcctcggaagggggtggctcctggtagcatccttttccttcaccatctatgggatattaggggcagaatctgccacttcttgcccaggagtgtgcacagatgtaagataattttgtgaaataatgtaccatagactctcaccaactgtatatacctgtacatatcagaagcaaataaagagctccacgtgcatc

SEQ ID NO: 324257 - protein, 1229 aa, Artificial Sequence
  derived and/or modified sequence
MRTTKVYKLVIHKKGFGGSDDELVVNPKVFPHIKLGDIVEIAHPNDEYSPLLLQVKSLKEDLQKETISVDQTVTQVFRLRPYQDVYVNVVDPKDVTLDLVELTFKDQYIGRGDMWRLKKSLVSTCAYITQKVEFAGIRAQAGELWVKNEKVMCGYISEDTRVVFRSTSAMVYIFIQMSCEMWDFDIYGDLYFEKAVNGFLADLFTKWKEKNCSHEVTVVLFSRTFYDAKSVDEFPEINRASIRQDHKGRFYEDFYKVVVQNERREEWTSLLVTIKKLFIQYPVLVRLEQAEGFPQGDNSTSAQGNYLEAINLSFNVFDKHYINRNFDRTGQMSVVITPGVGVFEVDRLLMILTKQRMIDNGIGVDLVCMGEQPLHAVPLFKLHNRSAPRDSRLGDDYNIPHWINHSFYTSKSQLFCNSFTPRIKLAGKKPASEKAKNGRDTSLGSPKESENALPIQVDYDAYDAQVFRLPGPSRAQCLTTCRSVRERESHSRKSASSCDVSSSPSLPSRTLPTEEVRSQASDDSSLGKSANILMIPHPHLHQYEVSSSLGYTSTRDVLENMMEPPQRDSSAPGRFHVGSAESMLHVRPGGYTPQRALINPFAPSRMPMKLTSNRRRWMHTFPVGMNPRTQNKDSLEDSVSTSPDPILTLSAPPVVPGFCCTVGVDWKSLTTPACLPLTTDYFPDRQGLQNDYTEGCYDLLPEADIDRRDEDGVQMTAQQVFEEFICQRLMQGYQIIVQPKTQKPNPAVPPPLSSSPLYSRGLVSRNRPEEEDQYWLSMGRTFHKVTLKDKMITVTRYLPKYPYESAQIHYTYSLCPSHSDSEFVSCWVEFSHERLEEYKWNYLDQYICSAGSEDFSLIESLKFWRTRFLLLPACVTATKRITEGEAHCDIYGDRPRADEDEWQLLDGFVRFVEGLNRIRRRHRSDRMMRKGTAMKGLQMTGPISTHSLESTAPPVGKKGTSALSALLEMEASQKCLGEQQAAVHGGKSSAQSAESSSVAMTPTYMDSPRKDGAFFMEFVRSPRTASSAFYPQVSVDQTATPMLDGTSLGICTGQSMDRGNSQTFGNSQNIGEQGYSSTNSSDSSSQQLVASSLTSSSTLTEILEAMKHPSTGVQLLSEQKGLSPYCFISAEVVHWLVNHVEGIQTQAMAIDIMQWPCSSPPPPGTQQEWTTSPASSASGLRWPLWQKSSCTLRFLPFSCPGCLAGQPPMQVGTAPLAEVLEDGARRQHF

SEQ ID NO: 324258 - protein, 664 aa, Artificial Sequence
  derived and/or modified sequence
MRTTKVYKLVIHKKGFGGSDDELVVNPKVFPHIKLGDIVEIAHPNDEYSPLLLQVKSLKEDLQKETISVDQTVTQVFRLRPYQDVYVNVVDPKVSTCAYITQKVEFAGIRAQAGELWVKNEKVMCGYISEDTRVVFRSTSAMVYIFIQMSCEMWDFDIYGDLYFEKAVNGFLADLFTKWKEKNCSHEVTVVLFSRTFYDAKSVDEFPEINRASIRQDHKGRFYEDFYKVVVQNERREEWTSLLVTIKKLFIQYPVLVRLEQAEGFPQGDNSTSAQGNYLEAINLSFNVFDKHYINRNFDRTGQMSVVITPGVGVFEVDRLLMILTKQRMIDNGIGVDLVCMGEQPLHAVPLFKLHNRSAPRDSRLGDDYNIPHWINHSFYTSKSQLFCNSFTPRIKLAGKKPASEKAKNGRDTSLGSPKESENALPIQVDYDAYDAQVFRLPGPSRAQCLTTCRSVRERESHSRKSASSCDVSSSPSLPSRTLPTEEVRSQASDDSSLGKSANILMIPHPHLHQYEVSSSLGYTSTRDVLENMMEPPQRDSSAPGRFHVGSAESMLHVRPGGYTPQRALINPFAPSRMPMKLTSNRRRWMHTFPVGMNPRTQNKDSLEDSVSTSPDPSKRGQLTGERGRQGVWGGQSMRKQEEALWEVSGPEVHIPLGYGKAMW

SEQ ID NO: 324259 - DNA, 3690 bp, Artificial Sequence
  derived and/or modified sequence
atgcgcactaccaaagtttacaagcttgtgatccacaaaaaggggtttggcggatcagacgatgagctcgttgtgaacccgaaggtatttcctcacatcaagctgggagatatcgttgagatagctcatcctaacgatgagtacagtcctctgttgctccaggtgaagtcccttaaggaggaccttcagaaagaaactatctccgtagatcaaactgttacccaggtgttcagactgagaccctaccaggatgtgtacgtcaatgttgtggaccctaaggacgtcaccctagacctcgtggagctcacgtttaaagaccaatatattggccgaggcgacatgtggcggctcaaaaaatccttggtctccacatgcgcatacataacccagaaagtcgagttcgccggtattagagcccaggccggagagctgtgggtcaaaaatgagaaggtcatgtgcggatacatatcagaagatacccgggtggtgtttaggagtactagcgccatggtctacatcttcatccagatgtcctgtgaaatgtgggactttgatatatacggggacctgtatttcgagaaagccgtgaacgggtttttggctgatctcttcactaagtggaaagaaaagaactgttcccatgaagtcaccgtggttctcttcagccggactttttacgacgctaagagcgtggacgaatttccagaaatcaacagagctagcattagacaggaccacaaaggtaggttctatgaggatttctacaaagtcgtggtgcaaaatgagcggagagaggagtggactagcctccttgtcacgattaagaaactctttatccagtatcctgtcctggtaaggctggagcaggccgaaggatttccccagggtgacaattctacctcagcccagggcaactatctggaggctatcaacctttccttcaatgttttcgacaagcactatattaaccggaacttcgatcgcacaggccaaatgtccgtcgtgattacaccaggggtgggagtgttcgaggttgatcgactgctgatgattttaacaaagcagaggatgatcgataacggcataggggtggatctcgtctgtatgggggagcagcccctgcatgcagtgccgttgtttaagttacacaatcgctccgcacctagggacagccgtttaggcgacgattacaacattcctcattggatcaaccattccttctatacctcaaagtctcaattattttgtaattctttcactccgcgtattaaattggctgggaagaaaccagccagcgagaaggccaagaatggacgcgatacttcactgggcagcccaaaggagtccgagaacgcactccccattcaggtggactacgacgcctacgacgcacaggtctttcgcctgcctggcccttctcgggctcagtgcctaacaacatgtcgatcagttcgcgaacgcgaaagccatagtcgcaagtccgcaagctcgtgtgatgtgtcctcttctccgagccttccctcccgtaccctgcctacagaggaggttcggtctcaggccagtgatgactcttccctcggtaagtcagcaaatattctaatgataccacatccccatctgcaccagtatgaagtgagttcaagcctggggtacaccagtactcgcgatgtgctcgaaaacatgatggaaccccctcagcgggatagctcagcaccagggcggtttcatgtaggttcagcggagagcatgctccacgtgcgaccaggaggatatactccccagagggcactgattaaccctttcgcaccaagtcgaatgcctatgaaactgacatcaaatcgtcggagatggatgcacacttttcccgtggggatgaatcccagaacacaaaataaagattcgctggaagatagcgtgtcaacaagtcccgaccctattttgactctgtctgccccaccagtggtcccgggattttgctgtacagtcggtgtggactggaagtcactgacgacgcccgcgtgtctccctctgacgacagactatttccccgacaggcagggcctgcagaacgattacactgagggctgttacgacctgctgcccgaagccgacatcgatcggcgggatgaggacggagtgcagatgacagcacagcaagtctttgaagagttcatttgtcagcggctgatgcaagggtaccagattatcgtacagccaaagactcagaagcccaatccagccgtacctcctccactttctagctcgcctctctattctagggggctagtgagccgaaatcgccccgaggaagaggatcagtattggcttagcatgggccggacgtttcacaaggtgacactgaaggataaaatgatcaccgtgacacgctatctgcctaaatatccgtacgaatctgcccagattcactacacctattcactttgtcccagccactctgactctgagtttgttagctgctgggtcgaattcagtcacgagcgattggaagaatacaaatggaactaccttgatcaatacatatgttccgcaggatcagaagacttctctttaattgaatcactgaagttttggcgtacacggttcttactgctccccgcctgtgtaacagcaactaaaagaatcactgaaggggaggcgcattgcgatatttacggcgaccgcccacgagctgatgaagacgagtggcagctcctggatggcttcgtgaggtttgtcgagggcctgaacagaatcagaagaaggcacaggagtgatcgcatgatgaggaagggaaccgcaatgaaagggctgcaaatgacgggtccaataagcacccacagtttagagtcaactgcaccgcctgtgggaaagaagggcacctctgcattgagcgccttgttggaaatggaggcatctcagaagtgccttggggagcagcaggccgccgtccacggggggaaaagcagcgcgcaaagtgccgagagctcctctgtggctatgacccccacctacatggacagtccacgtaaggacggcgccttctttatggagttcgtgcgaagcccccgcaccgcgagttctgcattctaccctcaggtgtccgtggatcaaacagcgactcctatgctagacggaactagtctggggatatgcaccgggcagtcaatggatagggggaacagtcagacattcggcaatagccagaacatcggagagcaggggtattcatcaacaaactcttctgacagttcttcacagcagctggtggcctcatcgctaaccagtagtagcacgttaacagagatcttagaggcgatgaaacacccttctaccggggtccaactgcttagcgagcagaaagggttgtccccttactgtttcatttcggccgaagtcgtccattggcttgtcaaccacgttgagggaattcagacccaagcaatggcaatcgacataatgcagtggccttgctcatccccccccccgcctggcacacagcaggagtggacaacaagccctgcaagttctgcttccggactgcggtggccgctgtggcagaaatcttcctgcacgctcaggttcctgccgttctcatgcccaggttgcctggccggccagccgcctatgcaggtaggcaccgctcccctggcagaggtgctagaggatggcgcgagaagacagcatttctag

SEQ ID NO: 324260 - DNA, 3690 bp, Artificial Sequence
  derived and/or modified sequence
atgaggaccaccaaggtgtacaagctggtgatccacaagaagggctttggaggcagtgatgatgagctggtggtgaaccccaaggtgttcccccacatcaagctgggggacatcgtggagatcgcccaccccaatgatgagtacagccccctgctgctgcaggtgaagagcctgaaggaggacctgcagaaggagaccatctctgtggaccagacagtgacccaggtgttccggctgcggccctaccaggatgtgtatgtgaatgtggtggaccccaaggatgtgaccctggacctggtggagctgaccttcaaggaccagtacatcggccgcggggacatgtggaggctgaagaagagcctggtgtccacctgtgcctacatcacccagaaggtggagtttgctggcatccgggcccaggccggggagctgtgggtgaagaatgagaaggtgatgtgtggctacatcagcgaggacaccagggtggtgttccgcagcaccagcgccatggtgtacatcttcatccagatgagctgtgagatgtgggactttgacatctatggagacctgtactttgagaaggctgtgaatggcttcctggccgacctcttcaccaagtggaaggagaagaactgcagccatgaggtgacagtggtgctcttcagcaggaccttctatgatgccaagtctgtggatgagttccctgagatcaacagagccagcatccggcaggaccacaagggccgcttctatgaggacttctacaaggtggtggtgcagaatgaaagaagagaggagtggaccagcctgctggtgaccatcaagaagctgttcatccagtaccctgtgctggtgcggctggagcaggccgagggcttcccccagggcgacaacagcaccagcgcccagggcaactacctggaggccatcaacctgtccttcaacgtgtttgacaagcactacatcaacagaaactttgacagaacaggccagatgtctgtggtgatcaccccaggagtgggcgtgtttgaggtggaccggctgctgatgatcctgaccaagcagaggatgattgacaatggcatcggcgtggacctggtgtgcatgggagagcagcccctgcatgctgtgcccctcttcaagctgcacaacagaagtgccccccgggacagccggctgggagatgactacaacatcccccactggatcaaccacagcttctacaccagcaagagccagctgttctgcaacagcttcaccccccgcatcaagctggccggcaagaagccagccagcgagaaggccaagaatggccgggacaccagcctgggcagccccaaggagagtgaaaatgccctgcccatccaggtggactatgatgcctatgatgcccaggtgttccggctgcccggccccagccgggcccagtgcctgaccacctgccgctctgtgcgggagcgggagagccacagcaggaagagcgccagcagctgtgatgtgagcagcagccccagcctgcccagcaggaccctgcccacagaggaggtgcgcagccaggccagtgatgacagcagcctgggcaagagcgccaacatcctgatgatcccccacccccacctgcaccagtatgaggtgagcagcagcctgggctacaccagcaccagagatgtgctggagaacatgatggagcccccccagagggacagcagcgcccctggccgcttccacgtgggcagcgctgagagcatgctgcacgtgcggcctgggggctacaccccccagagggccctgatcaacccctttgcccccagcaggatgcccatgaagctgaccagcaacagaagacgctggatgcacaccttccctgtgggcatgaaccccaggacccagaacaaggacagcctggaggacagcgtgtccaccagcccagaccccatcctgaccctgagcgcccctcctgtggtgcccggcttctgctgcaccgtgggcgtggactggaagagcctgaccaccccagcctgcctgcccctgaccacagactacttcccagaccggcagggcctgcagaatgactacacagagggctgctatgacctgctgcctgaggccgacatcgacagaagagatgaagatggagtgcagatgacagcccagcaggtgtttgaggagttcatctgccagaggctgatgcagggctaccagatcatcgtgcagcccaagacccagaagcccaacccagctgtgcccccacccctgagcagcagccccctgtacagccggggcctggtgtccaggaacagacctgaggaggaggaccagtactggctgtccatgggccgcaccttccacaaggtgaccctgaaggacaagatgatcaccgtgacccgctacctgcccaagtacccctatgaaagtgcccagatccactacacctacagcctgtgccccagccacagcgacagcgagtttgtgtcctgctgggtggagttcagccatgagcggctggaggagtacaagtggaactacctggaccagtacatctgcagcgctggcagcgaggacttcagcctcatcgagagcctgaagttctggaggacccgcttcctgctgctgcctgcctgtgtgacagccaccaagaggatcacagaaggagaggcccactgtgacatctatggagaccggcccagggcagatgaagatgagtggcagctgctggatggctttgtgcgctttgtggagggcctgaaccgcatcagaagaagacacagaagtgacaggatgatgaggaagggcacagccatgaagggcctgcagatgacaggccccatcagcacccacagcctggagagcacagcccctcctgtgggcaagaagggcaccagcgccctgagcgccctgctggagatggaggccagccagaagtgcctgggggagcagcaggccgctgtgcacggcggcaagagcagcgcccagagcgctgagagcagctctgtggccatgacccccacctacatggacagccccaggaaggatggagccttcttcatggagtttgtgcgcagccccaggacagccagcagcgccttctacccccaggtgtctgtggaccagacagccacccccatgctggatggcaccagcctgggcatctgcaccggccagagcatggaccggggcaacagccagaccttcggcaacagccagaacatcggggagcagggctacagcagcaccaacagcagtgacagcagcagccagcagctggtggccagcagcctgaccagcagcagcaccctgacagagatcctggaggccatgaagcaccccagcactggagtgcagctgctgtctgagcagaagggcctgagcccctactgcttcatctctgctgaggtggtgcactggctggtgaaccacgtggagggcatccagacccaggccatggccatcgacatcatgcagtggccctgcagcagccccccacctcctggcacccagcaggagtggaccaccagccctgccagcagcgccagcggcctgcgctggcccctgtggcagaagagcagctgcaccctgcgcttcctgcccttcagctgccccggctgcctggccggccagccccccatgcaggtgggcacagcccccctggccgaggtgctggaggatggagcccggcggcagcacttctag

SEQ ID NO: 324261 - DNA, 3690 bp, Artificial Sequence
  derived and/or modified sequence
atgcggaccaccaaggtgtacaagctggtgatccacaagaagggcttcggcggctccgatgacgagctcgtggtgaacccaaaggttttccctcacattaagctgggagacattgtggagattgcacatccgaatgatgagtacagccctctcctcctccaggtcaagtctctcaaggaggacctccagaaggaaactatctctgtcgaccaaacagtaacgcaggtgttcagactaaggccataccaggatgtctacgtgaacgtggtcgaccccaaggatgtaaccctcgatctagtggagctcacattcaaggatcagtacataggccgaggagatatgtggcggcttaagaagtccctggtgtcaacctgtgcatacataacccagaaggttgagtttgcaggtatacgagctcaggctggcgaactttgggtgaagaatgagaaggtgatgtgtggttacataagcgaagacactagagtggttttcaggtcaactagtgccatggtctatatcttcatccagatgagctgcgagatgtgggacttcgatatatacggcgatctttatttcgagaaagcggtcaatgggttcctggctgacctgttcaccaaatggaaggagaaaaactgttcccatgaagtaacagtggtgttgttctccagaaccttctatgacgcaaaatccgtggacgaatttcccgagattaaccgggcttcaataaggcaagaccacaagggaagattctacgaagacttttacaaggttgtcgttcaaaacgagaggcgggaagaatggacgtccctgctggtcacgatcaagaagctgttcatccagtaccctgtgctagtgaggttggaacaggccgaaggtttccctcagggggacaactcaacctcggcccagggcaactatctcgaggctattaatttaagtttcaacgtctttgacaaacactatatcaaccggaatttcgaccgtacaggtcaaatgtccgtggttatcacaccaggagtaggtgtcttcgaagtggacagactgctcatgatcctgactaaacagcgaatgatcgataacggaataggcgtagacttggtttgcatgggagagcagcctcttcacgcagtgccactttttaagctccataaccgctcagcccctagagattcccgtctcggtgacgattataatattccccactggataaaccacagcttctatacctctaaatcacagctgttctgcaacagcttcacccccagaatcaaactcgctgggaaaaaacctgcgtccgagaaagctaagaacggcagagacacctctctggggtctccaaaggagtctgaaaatgctctgcctattcaggtggactacgatgcatatgacgcccaagtcttcagactgcccggcccaagccgtgcccagtgtctcaccacatgtcgaagcgtccgggaacgggagtcccatagtaggaagagcgcatcatcctgtgatgtgagctcctcaccttctctgcccagcagaaccctgcccaccgaggaagtgcgatctcaggcgtcagacgattcttctctcggtaaatcagccaatatccttatgatccctcatcctcacctacaccaatatgaagtgagtagctccttgggctatacgtccacacgagacgttctggaaaatatgatggagccgccccagagagatagcagtgctcctggacgctttcatgtggggagcgccgagtcgatgctgcacgtgcggcccggcggatatacgcctcagcgcgccctcatcaatccttttgcgcccagcaggatgccaatgaagctcacgtctaatcgtaggcgttggatgcacaccttccccgtaggaatgaatcccaggacacagaacaaagacagcctggaagacagcgttagcacaagccccgacccaatcctaacattaagcgccccacctgtcgtccccggattctgttgcaccgtgggtgtcgactggaagtccctaacaacgcctgcttgcctgcccctgaccactgattacttccccgatcgacaggggttacagaacgattacacagaaggttgttacgatctgctgcctgaagccgacatcgaccgccgtgatgaggatggagtccagatgacggctcagcaggtcttcgaagaatttatctgccaacggctgatgcagggatatcaaatcatcgttcagccaaagacacagaagcctaaccccgcggttccccctccgctttcttcctcaccactctattctcggggcctagtgtctagaaaccgcccagaggaagaagaccagtattggctctccatgggccgcacttttcacaaggtaacccttaaggataagatgatcaccgttactagatacctccccaaatatccttacgagtctgcgcagatccattacacatactctctgtgtcctagccactctgacagcgagttcgttagctgctgggttgagttttcccacgagcggctagaggaatacaaatggaattatctggatcagtatatctgttcagccggatccgaagacttctccctaatagaaagtctcaagttttggagaacaagattcttgctgctacccgcatgtgtaacggctacaaagagaatcaccgagggtgaagcgcactgtgatatctatggcgaccgcccgcgggcagatgaggatgagtggcagttactggatggattcgtgcgtttcgttgaaggactgaataggatcagacggcgacacagatcggaccggatgatgcggaaggggactgccatgaagggtctccagatgacgggacctattagtacccacagcttggaatctacagcaccacccgtcggcaagaagggaacttctgctctgtctgccctgttggaaatggaagcgtcacaaaagtgcctgggcgagcaacaggcagccgttcacggggggaaatcatcagcccaatctgccgagagttcgtctgttgcgatgactccgacttatatggatagcccacggaaggatggcgccttctttatggagttcgtcaggtctccacggacggcatcctccgccttctatccgcaggtcagtgtggaccagaccgctactcccatgttagatggaacttccctgggtatttgtacaggccagtccatggacagaggaaattctcagacgtttggtaactcacaaaacattggggagcagggctactccagcacaaattcttccgactcttccagccaacagctggtggcttcatccctaaccagcagcagcacattaaccgagatacttgaagccatgaaacatccctctactggggtgcagttgctgagcgagcaaaaggggctcagtccttattgctttatcagcgcggaggttgtgcactggctggtgaatcatgtggaggggatccaaacccaggccatggcaattgatataatgcagtggccttgttcaagtcctcccccgcccggaacgcaacaagagtggaccacttcccctgcgagctcggctagcggcttgcggtggcccctgtggcagaaaagcagctgtacacttcgtttcctgcccttttcatgcccagggtgcctggccgggcagccacctatgcaggtgggtaccgcccccctcgctgaagtgctggaggatggagctagacggcagcacttttag

SEQ ID NO: 324262 - DNA, 3690 bp, Artificial Sequence
  derived and/or modified sequence
atgaggacgaccaaggtctataagctggttatccataaaaagggcttcggaggcagcgacgatgaacttgtagtgaatcccaaggtattccctcacatcaaacttggcgacatcgttgaaattgcacatccaaacgacgaatactcccctctgcttttgcaggtcaagtcactgaaagaagatttacagaaagaaactattagtgtcgaccagaccgtgacgcaagtcttccggttgaggccctatcaggatgtgtacgttaacgtcgtggatccaaaagatgtgaccctggacctcgtcgagttaacatttaaggatcagtatatcggacggggtgacatgtggcggctcaagaaaagtctcgttagtacatgtgcttatatcacgcagaaggtggagttcgccggaattcgcgctcaggcaggcgagctctgggtcaagaatgaaaaggttatgtgcggatacatctctgaggacactagagtcgtatttcgaagtacttccgcaatggtatatatatttattcagatgagttgtgaaatgtgggactttgacatttatggcgatctttacttcgagaaagccgttaatggattcttggccgacctgtttactaagtggaaagaaaagaactgctcacatgaggttaccgttgtgctgttcagtaggacgttctacgatgctaaaagcgtggatgaatttcccgagattaaccgggcaagtatacggcaagatcacaagggacgcttctacgaggatttctacaaggtggtggtgcaaaatgaacggcgagaggagtggacctcattgttggtcacgatcaagaaactgttcattcagtacccggtgctcgtccgtctggaacaggcggaggggtttccacagggcgacaatagcacatccgcccaaggcaattacctggaggcaatcaacctgtcatttaacgttttcgacaaacactacataaacaggaatttcgatcgaaccggccagatgagcgtggttatcactcccggagtcggggtgttcgaggtggatagactgctgatgatcttgacaaagcagcggatgattgataacgggatcggagtggacctcgtctgcatgggagaacagccgctccacgccgtcccattattcaagcttcataaccgtagcgcgccaagggattccaggttaggcgatgactataatataccccactggattaatcattctttctacacttccaaaagtcaactgttttgcaattcattcacgccacgaatcaaattagccggtaagaagcccgcttctgagaaggccaagaacgggagggacacttcgttggggtcacccaaggaaagtgagaacgccctgcctatccaggtggattacgacgcgtatgacgcccaagtgttccgcttgccaggcccttctcgtgcccaatgtctgactacttgtcggagcgtacgcgaaagggagagccacagcaggaaatccgccagttcatgtgacgtctcctccagcccaagccttcccagtagaaccctgcctactgaggaagtacgtagccaggccagtgatgactcaagcctaggaaagtccgcgaatatcctgatgatcccccacccacacctgcaccagtacgaggtatccagctcactcggctacacctcaacaagagatgttcttgaaaacatgatggagccgcctcagagggacagctccgctcccggaagatttcacgtaggatccgccgagtccatgcttcacgtgcgccctggcggatacaccccccagcgagccctgatcaatccgtttgccccaagccgaatgcctatgaaattgactagcaataggcgccgatggatgcacaccttcccagtgggaatgaacccaagaacccagaataaggacagcttagaagatagtgtatcaacgtccccggaccctatcctgacgttatcggccccaccagtggtgcctggtttctgttgcaccgttggggtagactggaaatccctgacaactccggcatgccttccacttacaactgattattttcccgatagacagggcttacaaaacgattatacggaaggctgttatgatcttttgccagaggctgacatcgatcggagggacgaagacggggtgcagatgacagcacagcaggtcttcgaagagttcatttgtcagcggttgatgcagggctatcagatcattgtccaacctaagactcagaagcccaatccagcggtccctcccccactcagctccagcccactgtacagtagaggactagtatcccggaacagacccgaggaggaagatcagtactggctgtcaatgggcagaactttccacaaggtgaccttgaaagacaagatgataaccgttacaaggtatttacccaagtatccatatgaatctgcccagatccactatacgtactcactctgtccctctcatagcgactcagagttcgtgtcttgttgggtggaattctcccacgagaggctggaggaatataagtggaattacctcgaccagtacatctgctctgctgggagcgaagatttcagtctgatcgagagtctgaaattctggcgcacaaggtttctactcttacccgcttgtgttacagccacaaagcggatcactgagggagaagcacattgtgatatatacggcgatcgccctcgggctgatgaggatgagtggcagctgctagatggtttcgttaggtttgttgagggcctgaacagaatccgacggcgacacaggtcggaccgcatgatgaggaaaggaaccgcaatgaaagggttgcagatgactggccctattagcacacactcactggaatctacagcccctccagtgggcaaaaaagggacctccgccctctccgcacttttggagatggaggcctctcagaagtgtctgggggaacagcaggccgcagtccacgggggtaaaagctcagcgcagtctgctgagtcctcctctgtcgcgatgactccaacatacatggacagcccccgtaaagatggggcattcttcatggagtttgtaaggtcccccaggactgcatccagtgcattctatccccaagtgtccgtcgaccagaccgcaactcctatgctcgatgggacttcccttggtatttgcaccggccagtctatggaccgcggaaattcacagactttcggtaattcacaaaatattggggaacagggctactcatcaaccaactcctctgacagctcctcacaacaactggtggccagctcattgacaagtagtagcacgctgacggagattctcgaagcaatgaaacacccctctaccggcgtccagcttctttctgagcagaaaggattgtctccctactgcttcatcagcgcagaggtggtgcattggctagtgaatcacgtggaggggattcagacacaggccatggcaatcgatatcatgcagtggccatgctcgtcccccccaccacccggaactcagcaggagtggacgacctcacccgcttctagcgcttctggcctgcggtggccgttatggcagaaatcgtcttgcaccctgcgcttccttcctttcagctgtcctggatgtctcgccggacaacccccaatgcaggtaggaaccgctccactcgcagaggtccttgaagatggggcaagacgccaacatttttag

SEQ ID NO: 324263 - DNA, 3690 bp, Artificial Sequence
  derived and/or modified sequence
atgagaaccaccaaggtgtacaagctggtgatccacaagaagggcttcggcggcagcgacgacgagctggtggtgaaccccaaggtgttcccccacatcaagctgggcgacatcgtggagatcgcccaccccaacgacgagtacagccccctgctgctgcaggtgaagagcctgaaggaggacctgcagaaggagaccatcagcgtggaccagaccgtgacccaggtgttcagactgagaccctaccaggacgtgtacgtgaacgtggtggaccccaaggacgtgaccctggacctggtggagctgaccttcaaggaccagtacatcggcagaggcgacatgtggagactgaagaagagcctggtgagcacctgcgcctacatcacccagaaggtggagttcgccggcatcagagcccaggccggcgagctgtgggtgaagaacgagaaggtgatgtgcggctacatcagcgaggacaccagagtggtgttcagaagcaccagcgccatggtgtacatcttcatccagatgagctgcgagatgtgggacttcgacatctacggcgacctgtacttcgagaaggccgtgaacggcttcctggccgacctgttcaccaagtggaaggagaagaactgcagccacgaggtgaccgtggtgctgttcagcagaaccttctacgacgccaagagcgtggacgagttccccgagatcaacagagccagcatcagacaggaccacaagggcagattctacgaggacttctacaaggtggtggtgcagaacgagagaagagaggagtggaccagcctgctggtgaccatcaagaagctgttcatccagtaccccgtgctggtgagactggagcaggccgagggcttcccccagggcgacaacagcaccagcgcccagggcaactacctggaggccatcaacctgagcttcaacgtgttcgacaagcactacatcaacagaaacttcgacagaaccggccagatgagcgtggtgatcacccccggcgtgggcgtgttcgaggtggacagactgctgatgatcctgaccaagcagagaatgatcgacaacggcatcggcgtggacctggtgtgcatgggcgagcagcccctgcacgccgtgcccctgttcaagctgcacaacagaagcgcccccagagacagcagactgggcgacgactacaacatcccccactggatcaaccacagcttctacaccagcaagagccagctgttctgcaacagcttcacccccagaatcaagctggccggcaagaagcccgccagcgagaaggccaagaacggcagagacaccagcctgggcagccccaaggagagcgagaacgccctgcccatccaggtggactacgacgcctacgacgcccaggtgttcagactgcccggccccagcagagcccagtgcctgaccacctgcagaagcgtgagagagagagagagccacagcagaaagagcgccagcagctgcgacgtgagcagcagccccagcctgcccagcagaaccctgcccaccgaggaggtgagaagccaggccagcgacgacagcagcctgggcaagagcgccaacatcctgatgatcccccacccccacctgcaccagtacgaggtgagcagcagcctgggctacaccagcaccagagacgtgctggagaacatgatggagcccccccagagagacagcagcgcccccggcagattccacgtgggcagcgccgagagcatgctgcacgtgagacccggcggctacaccccccagagagccctgatcaaccccttcgcccccagcagaatgcccatgaagctgaccagcaacagaagaagatggatgcacaccttccccgtgggcatgaaccccagaacccagaacaaggacagcctggaggacagcgtgagcaccagccccgaccccatcctgaccctgagcgccccccccgtggtgcccggcttctgctgcaccgtgggcgtggactggaagagcctgaccacccccgcctgcctgcccctgaccaccgactacttccccgacagacagggcctgcagaacgactacaccgagggctgctacgacctgctgcccgaggccgacatcgacagaagagacgaggacggcgtgcagatgaccgcccagcaggtgttcgaggagttcatctgccagagactgatgcagggctaccagatcatcgtgcagcccaagacccagaagcccaaccccgccgtgcccccccccctgagcagcagccccctgtacagcagaggcctggtgagcagaaacagacccgaggaggaggaccagtactggctgagcatgggcagaaccttccacaaggtgaccctgaaggacaagatgatcaccgtgaccagatacctgcccaagtacccctacgagagcgcccagatccactacacctacagcctgtgccccagccacagcgacagcgagttcgtgagctgctgggtggagttcagccacgagagactggaggagtacaagtggaactacctggaccagtacatctgcagcgccggcagcgaggacttcagcctgatcgagagcctgaagttctggagaaccagattcctgctgctgcccgcctgcgtgaccgccaccaagagaatcaccgagggcgaggcccactgcgacatctacggcgacagacccagagccgacgaggacgagtggcagctgctggacggcttcgtgagattcgtggagggcctgaacagaatcagaagaagacacagaagcgacagaatgatgagaaagggcaccgccatgaagggcctgcagatgaccggccccatcagcacccacagcctggagagcaccgccccccccgtgggcaagaagggcaccagcgccctgagcgccctgctggagatggaggccagccagaagtgcctgggcgagcagcaggccgccgtgcacggcggcaagagcagcgcccagagcgccgagagcagcagcgtggccatgacccccacctacatggacagccccagaaaggacggcgccttcttcatggagttcgtgagaagccccagaaccgccagcagcgccttctacccccaggtgagcgtggaccagaccgccacccccatgctggacggcaccagcctgggcatctgcaccggccagagcatggacagaggcaacagccagaccttcggcaacagccagaacatcggcgagcagggctacagcagcaccaacagcagcgacagcagcagccagcagctggtggccagcagcctgaccagcagcagcaccctgaccgagatcctggaggccatgaagcaccccagcaccggcgtgcagctgctgagcgagcagaagggcctgagcccctactgcttcatcagcgccgaggtggtgcactggctggtgaaccacgtggagggcatccagacccaggccatggccatcgacatcatgcagtggccctgcagcagcccccccccccccggcacccagcaggagtggaccaccagccccgccagcagcgccagcggcctgagatggcccctgtggcagaagagcagctgcaccctgagattcctgcccttcagctgccccggctgcctggccggccagccccccatgcaggtgggcaccgcccccctggccgaggtgctggaggacggcgccagaagacagcacttctag

SEQ ID NO: 324264 - DNA, 5128 bp, Artificial Sequence
  derived and/or modified sequence
atctggaggaggcgcagggaacctggagagggtccagccctcagtgccccggccagaggcgggaaggggctctagagcttcgggaggcaagatgacttctctgccccaagcttggaacagctaaagggaaaaacagtgcaagatgagaacaacaaaggtctacaaactcgtcatccacaagaagggctttgggggcagtgatgatgagctagttgtgaaccccaaagtgttccctcacatcaagcttggagacattgtagagattgcacaccccaacgatgaatacagccctctgcttttgcaggtcaagtctcttaaggaagatttacagaaggaaactatcagtgtggaccagactgtgactcaagtgttccggctgagaccttatcaggatgtctatgttaatgtcgtagaccctaaggatgtgacccttgacctagtggaattaacttttaaggatcagtatattggccgtggggatatgtggcgactaaagaaaagtttggtcagcacatgtgcctatatcacccagaaggtggagtttgctggcatcagagcacaggctggtgaactgtgggttaagaatgagaaggtcatgtgtggctacatcagtgaagataccagggtggtgtttcgttctacgtcggctatggtttacatatttattcagatgagctgtgaaatgtgggattttgatatttatggggatttgtattttgagaaagctgtgaatggtttccttgctgatctatttaccaagtggaaggagaagaactgtagtcatgaagtgacagtggtcctgttttctagaactttctatgatgcaaaatctgttgatgaatttcctgaaataaaccgagcctcaattcgacaggatcacaaggggagattctatgaagacttttacaaagtggtggtgcagaatgagagaagagaagaatggacttcacttctcgtaaccattaaaaaactcttcatccagtatccagtgttggtgcgactggaacaggcagagggctttcctcaaggagataattctacctcagcacaaggaaactacctggaggccatcaatctgtcattcaatgtgtttgataagcactacatcaaccgcaactttgaccgaactgggcagatgtcagtggtgatcacgcccggggtgggtgtctttgaagtggaccgcctactcatgatcctgaccaagcagcggatgatagataatggaattggtgtggatttggtgtgcatgggagagcaaccgttacatgctgtcccattgttcaagctccataatcggagtgctccccgtgattctcgtctgggcgatgactataatatccctcactggataaaccacagtttctacacatccaaaagccagctcttttgtaatagtttcaccccacgaataaaactggcaggaaagaagcccgcctctgagaaagcaaaaaatggccgtgatacatctctcgggagtccaaaagaatctgagaacgcccttcccatccaagtagattatgacgcctatgacgctcaagtgttcaggctgcccggcccatcccgggcccagtgcctcaccacctgcagatctgtgcgagagcgagagagtcacagtcgaaagagtgccagctcctgtgatgtttcatccagcccttccctaccaagccgcacactgcccactgaggaagtgaggagccaggcttctgacgacagctccctaggcaagagtgccaacatcctgatgatcccacacccccacctgcaccagtatgaagtcagcagctccttgggatacaccagcactcgagatgtcctggagaacatgatggagccaccacagcgagactccagtgcaccagggaggtttcacgttggcagtgcagaatccatgctgcatgttcgacctggtggatacacgccccagagagcactgattaaccccttcgctccctctcggatgcccatgaagcttacgtccaacagaaggcgctggatgcacacttttcctgtgggtatgaatcctaggacccagaataaggattctctagaggacagtgtttctacctctccagacccaattctgacactgtctgctccccctgtagtgccaggcttctgttgcacagttggagtggactggaagtctctcactactccggcgtgcctcccccttaccaccgactacttccctgaccgccagggcctgcagaatgactacacagagggctgttatgatctccttccagaagcagacatcgacaggagggacgaagatggtgtgcagatgacagcccagcaggtatttgaagagtttatttgccaacgtctcatgcagggctaccaaatcatagtgcagcccaagacacagaaacccaatcctgctgtcccgcccccgctgagcagtagcccactctatagccgaggccttgtgtcccgaaaccgccctgaggaggaggaccagtattggctgagtatgggcagaacgttccacaaagtgacgctgaaggataagatgatcacagtgacgcgataccttcccaagtatccttatgaatctgcccagatccactacacctacagcctctgtccttcccactcagactcagagttcgtctcctgctgggtggaattctcccacgaacggctggaggagtacaagtggaattacttagatcagtatatctgttctgccggctctgaagacttcagcttaattgagtccctgaagttctggaggacccgcttcctgctgctgccagcctgtgtcaccgccaccaagcgcatcacggagggggaggcccactgcgacatctatggggacaggccccgtgcagacgaggacgagtggcaactcctggatggttttgtccgctttgtggagggcttgaatcgcattcgcaggcggcatcgctcggatcgcatgatgcggaaagggaccgccatgaaaggcttgcagatgactgggcccatttccacgcattctctggagtcaactgcacccccagtggggaagaagggaacctcagctctctctgccctgttggagatggaggccagtcagaagtgcctgggagaacagcaggcagctgtgcatggtgggaagagctccgcccagtcagccgagagcagcagcgttgccatgactcccacctacatggacagcccacgaaaggacggggccttctttatggagtttgtccgcagcccacgcacagcatcgtccgccttctaccctcaggtatctgtggaccaaacagccactcctatgttggacggcaccagtttgggcatatgcacaggccaatccatggacagaggcaacagccagacctttgggaactcccagaacataggagaacagggctactcctccacaaactccagtgacagcagctctcagcagctggtggcaagctccttgacctcatcctctaccctgacagagatcctggaagccatgaagcacccctcgacaggagtccagctgctctctgaacagaagggcctctcaccgtactgcttcatcagcgcggaggtggtacactggttggtgaaccacgtggaggggatccagacacaggcgatggccattgacatcatgcagtggccatgcagcagcccgccaccacctggcacacagcaggagtggacgacttcgccagcttccagcgcaagtggtttgaggtggcctttgtggcagaagagctcgtgcactctgagattcctgcctttctcctgccctggctgcctagccggccagcctcctatgcaagtaggcacagctcctttagccgaagttttggaggacggagccaggcggcagcacttttagctgccactgtcccagagcagaggactgtgaccctggatgttgacgtgaacaaccgcacagaccggctggagtggtgcagctgttattaccatggcaacttttctctgaatgcagcctttgagatcaagctgcactggatggcggtgaccgcagcagtactcttcgagatggtccaaggttggcatcggaaagccacctcctgtggcttcttgttagtcccagttttggaggggccttttgcactgcccagttacctgtatggcgacccccttcgtgcccagctcttcatcccactcaacatcagctgcttgctcaaggagggcagcgagcacctgtttgatagctttgaacccgaaacgtactgggatcgaatgcacctcttccaggaagccattgcacacaggtttgggtttgtacaagataaatattctgcctctgcttttaacttccctgctgagaacaagcctcagtatatccacgttacaggaacagtgtttctgcagctgccctactccaagcgcaagttctcagggcagcagcggcggcggcggaactccaccagctccaccaaccagaacatgttctgcgaggagcgggtcggctacaactgggcctacaacaccatgctcaccaaaacatggcgctccagcgccacaggggatgaaaagtttgctgatcggctgctgaaggacttcacggacttctgcatcaaccgtgacaaccggctggtcacgttctggacaagttgcctggagaagatgcatgccagtgccccgtgaggccaggctgcacctgtgctgggggaaggtgggtgagccactgccctcaaacccggggcggaggattccaggcaggctctaggagtcaggtgtccgtttgctgctatcagtgagtgggggccattgttttttgtttgtttgtttgtttgtttgtttgtttttggcccccacgacaagtcttctactctagaagaaagactttggaagcagctgctgctgctgccaccactcctgtcagcaagtgctcagagcaggtgggaggcacagattgtccgtgggagggctccagtgtctgggaagagggcaggcggcccccatgaatgtcctcggaagggggtggctcctggtagcatccttttccttcaccatctatgggatattaggggcagaatctgccacttcttgcccaggagtgtgcacagatgtaagataattttgtgaaataatgtaccatagactctcaccaactgtatatacctgtacatatcagaagcaaataaagagctccacgtgcatc

SEQ ID NO: 324265 - DNA, 1263 bp, Artificial Sequence
  derived and/or modified sequence
atgaagcatcctagcaccggtgttcagctcctgagcgagcagaagggtctgtccccatactgtttcattagcgccgaagtggtacactggctggtgaaccacgtcgagggcatccagacccaggcaatggcgatagacattatgcagaagatgctggaggaacagctgatcacacatgcgagcggcgaggcctggaggacatttatctatggattctacttttacaagatagtgaccgataaagaaccagatcgagtggccatgcagcaaccagcaacaacatggcatactgcaggcgtcgatgatttcgcctcttttcagcggaaatggtttgaagtggcttttgttgctgaagaacttgtgcactcagagattccagctttcttactcccgtggctgccatcccgacctgcttcctatgcgtctcgacactccagctttagtcgaagcttcggcggcagaagccaggccgccgcactgttagcagctacagtccccgaacagcggaccgtcaccctggatgtcgatgtaaacaacaggaccgatcggctcgagtggtgttcctgctactaccacggcaacttttctctgaacgctgcctttgaaataaaactacactggatggctgtgactgcagcagtgcttttcgagatggtgcaggggtggcaccggaaggcaacctcttgcggattcctgctcgtccccgtccttgaaggcccatttgctctgccaagctatctctacggggatcccctcagggcccagttgttcatccccttgaatatatcctgcctgctcaaggaaggaagcgaacatctcttcgacagcttcgagccagagacctactgggaccgcatgcatctgtttcaggaagccattgcccatagattcggctttgtccaggataagtattctgcctccgccttcaattttccagcggagaataagccccagtacatacatgtgaccggaacagtatttctccagttaccttactctaagcgcaagtttagcggacagcagcgcagacgaagaaacagtactagttccaccaaccagaatatgttttgtgaggagcgcgtcgggtacaactgggcttataacacaatgctgacaaagacctggcgatcctctgccactggagacgaaaaatttgccgaccggttactaaaagactttaccgacttctgcattaaccgagataatcgactggtgaccttctggacctcgtgtctggagaagatgcacgcttccgccccgtag

SEQ ID NO: 324266 - DNA, 1263 bp, Artificial Sequence
  derived and/or modified sequence
atgaagcaccccagcactggagtgcagctgctgtctgagcagaagggcctgagcccctactgcttcatctctgctgaggtggtgcactggctggtgaaccacgtggagggcatccagacccaggccatggccatcgacatcatgcagaagatgctggaggagcagctgatcacccacgccagcggggaggcctggaggaccttcatctacggcttctacttctacaagatcgtgacagacaaggagccagacagagtggccatgcagcagcctgccaccacctggcacacagctggggtggatgactttgccagcttccagaggaagtggtttgaggtggcctttgtggccgaggagctggtgcacagcgagatcccagccttcctgctgccctggctgcccagcaggcctgccagctatgccagccgccacagcagcttcagccgcagctttggaggccgcagccaggccgccgccctgctggccgccaccgtgcctgagcagaggacagtgaccctggatgtggatgtgaacaacagaacagaccggctggagtggtgcagctgctactaccacggcaacttcagcctgaatgctgcctttgagatcaagctgcactggatggctgtgacagctgctgtgctgtttgagatggtgcagggctggcacaggaaggccaccagctgtggcttcctgctggtgcctgtgctggagggcccctttgccctgcccagctacctgtatggagaccccctgcgggcccagctgttcatccccctgaacatcagctgcctgctgaaggagggcagcgagcacctgtttgacagctttgagcctgagacctactgggacaggatgcacctgttccaggaggccatcgcccacagatttggatttgtgcaggacaagtacagcgccagcgccttcaacttccctgctgagaacaagccccagtacatccacgtgactggaacagtgttcctgcagctgccctacagcaagaggaagttcagcggccagcagaggagaagaagaaacagcaccagcagcaccaaccagaacatgttctgtgaggagcgggtgggctacaactgggcctacaacaccatgctgaccaagacctggaggagcagcgccactggagatgagaagtttgctgaccggctgctgaaggacttcacagacttctgcatcaacagagacaaccggctggtgaccttctggaccagctgcctggagaagatgcacgccagcgccccctag

SEQ ID NO: 324267 - DNA, 1263 bp, Artificial Sequence
  derived and/or modified sequence
atgaagcaccccagcaccggcgtgcagctgctgagcgagcagaaggggctctcaccatattgcttcatttccgcagaggtcgttcactggctcgtgaaccacgttgaaggaattcaaacgcaagccatggctattgatattatgcaaaagatgctggaggaacagcttattacacacgcctccggcgaggcttggcgaacgtttatctacggattttatttttacaagatcgtgaccgacaaagagcctgatcgtgttgctatgcagcagccagcaaccacatggcacacagcgggagtagacgacttcgcatcttttcagcggaagtggttcgaggtagcatttgtcgccgaggagcttgtgcatagtgagataccagcgttccttcttccttggctgccaagccggccagcgtcctatgcctccagacattcctctttcagccgttcattcggcggtagaagtcaagcagctgcgctgctggctgctaccgttccagagcaacgtaccgtcacattggacgtggatgtgaacaacagaacagatcggcttgaatggtgtagctgctactatcacggaaatttttccctcaacgcagcgtttgaaataaaactccactggatggctgtgacagcagcagtgttgttcgagatggtgcagggttggcaccgcaaagcgacctcttgcgggtttctcttggtgcccgttcttgagggtcctttcgcattgcctagttacttgtatggtgatccactcagggcgcagctgttcatcccactgaatatctcgtgccttctgaaggagggaagtgagcatctgtttgattcctttgagcctgaaacatattgggaccgcatgcatctgtttcaggaggccatcgcacacagatttgggttcgtgcaggacaagtacagcgcttccgcctttaattttccggcagaaaacaaaccccagtatatccatgttacaggcaccgtctttctccaactgccatattccaaacgcaagttttcaggtcagcagaggcgaaggaggaactctacctcgtctactaatcaaaatatgttctgcgaggagagggtgggttacaattgggcgtataacactatgctgaccaagacttggcgcagcagcgcaactggtgacgaaaaatttgccgatcggctgctgaaagatttcaccgatttctgcatcaaccgtgacaacaggctggtcactttttggacaagctgccttgagaagatgcacgcatccgcgccgtag

SEQ ID NO: 324268 - DNA, 1263 bp, Artificial Sequence
  derived and/or modified sequence
atgaaacacccctccacgggcgtccagctactgtccgagcagaagggcctgtccccctactgctttatcagcgctgaagtggtccactggctcgttaaccacgtcgagggcatccagacccaagcaatggcaattgacatcatgcagaaaatgctagaagagcagcttataacacacgcttccggcgaagcttggcgcaccttcatctatggattttatttctataagattgtcacagacaaagagcccgaccgcgtcgcgatgcagcagcccgcaacaacatggcatacagctggggtagacgattttgcgtccttccaacgcaagtggttcgaggtagcattcgtggcagaggaactggtgcactctgagatccctgcctttctgctgccttggctgcctagtcggccagcctcttacgcttcgcggcactcaagtttttctcggtcttttgggggacgctctcaggccgctgccctccttgctgccacagtgcctgagcagcggacagtgactctcgacgtagacgtaaacaacaggacagaccgcctcgagtggtgcagctgttactatcacgggaatttctccctaaatgccgcatttgagatcaaattgcactggatggctgtaactgctgctgttttgttcgaaatggtgcagggatggcatcgaaaggcaacatcttgcggctttttgctcgtccccgtgctggagggtcccttcgctctgcctagctacttatacggggacccattgcgcgcacagctcttcatccctctgaatattagctgcttgttgaaagaaggctcggagcacctcttcgatagtttcgagccagagacatactgggatagaatgcatctgttccaggaagcaatagcgcaccgctttgggttcgtccaggataagtacagcgcctcagcattcaactttcccgcagagaacaaacctcagtatattcacgtaacaggcacagtctttctgcagcttccctactccaagcggaagttcagtggacagcaacgcaggcggaggaatagcacgagctccaccaatcagaatatgttttgcgaagagagagtgggttacaactgggcctacaacacaatgctgactaaaacctggaggtcttctgcaactggcgacgagaaatttgcggaccggctcttgaaggacttcaccgacttctgcattaacagagataacaggctggtaacgttttggacgtcttgcctggagaaaatgcacgcctctgcaccgtag

SEQ ID NO: 324269 - DNA, 1263 bp, Artificial Sequence
  derived and/or modified sequence
atgaagcaccccagcaccggcgtgcagctgctgagcgagcagaagggcctgagcccctactgcttcatcagcgccgaggtggtgcactggctggtgaaccacgtggagggcatccagacccaggccatggccatcgacatcatgcagaagatgctggaggagcagctgatcacccacgccagcggcgaggcctggagaaccttcatctacggcttctacttctacaagatcgtgaccgacaaggagcccgacagagtggccatgcagcagcccgccaccacctggcacaccgccggcgtggacgacttcgccagcttccagagaaagtggttcgaggtggccttcgtggccgaggagctggtgcacagcgagatccccgccttcctgctgccctggctgcccagcagacccgccagctacgccagcagacacagcagcttcagcagaagcttcggcggcagaagccaggccgccgccctgctggccgccaccgtgcccgagcagagaaccgtgaccctggacgtggacgtgaacaacagaaccgacagactggagtggtgcagctgctactaccacggcaacttcagcctgaacgccgccttcgagatcaagctgcactggatggccgtgaccgccgccgtgctgttcgagatggtgcagggctggcacagaaaggccaccagctgcggcttcctgctggtgcccgtgctggagggccccttcgccctgcccagctacctgtacggcgaccccctgagagcccagctgttcatccccctgaacatcagctgcctgctgaaggagggcagcgagcacctgttcgacagcttcgagcccgagacctactgggacagaatgcacctgttccaggaggccatcgcccacagattcggcttcgtgcaggacaagtacagcgccagcgccttcaacttccccgccgagaacaagccccagtacatccacgtgaccggcaccgtgttcctgcagctgccctacagcaagagaaagttcagcggccagcagagaagaagaagaaacagcaccagcagcaccaaccagaacatgttctgcgaggagagagtgggctacaactgggcctacaacaccatgctgaccaagacctggagaagcagcgccaccggcgacgagaagttcgccgacagactgctgaaggacttcaccgacttctgcatcaacagagacaacagactggtgaccttctggaccagctgcctggagaagatgcacgccagcgccccctag

SEQ ID NO: 324270 - DNA, 2052 bp, Artificial Sequence
  derived and/or modified sequence
aagaggcagctgaagctggatggagggtgatgatgagatgaaaaggaagggatgaagaacacggcagggtgcctacggtgcctgggagaacagcaggcagctgtgcatggtgggaagagctccgcccagtcagccgagagcagcagcgttgccatgactcccacctacatggacagcccacgaaaggtatctgtggaccaaacagccactcctatgttggacggcaccagtttgggcatatgcacaggccaatccatggacagaggcaacagccagacctttgggaactcccagaacataggagaacagggctactcctccacaaactccagtgacagcaggaagtggagactgttcctaatattcgtgctcttgactgcatacgtgccatcttgctttgctgacctgacaccctgtgttacagctctcagcagctggtggcaagctccttgacctcatcctctaccctgacagagatcctggaagccatgaagcacccctcgacaggagtccagctgctctctgaacagaagggcctctcaccgtactgcttcatcagcgcggaggtggtacactggttggtgaaccacgtggaggggatccagacacaggcgatggccattgacatcatgcagaaaatgctggaagagcagctcatcacacatgcatctggcgaagcctggcggaccttcatctacggcttctatttctacaagatagtaacggacaaagagcccgaccgagtggccatgcagcagcccgccaccacctggcacacagcaggagtggacgacttcgccagcttccagcgcaagtggtttgaggtggcctttgtggcagaagagctcgtgcactctgagattcctgcctttctcctgccctggctgcctagccggccagcctcctatgcaagtaggcacagctcctttagccgaagttttggaggacggagccaggcggcagcacttttagctgccactgtcccagagcagaggactgtgaccctggatgttgacgtgaacaaccgcacagaccggctggagtggtgcagctgttattaccatggcaacttttctctgaatgcagcctttgagatcaagctgcactggatggcggtgaccgcagcagtactcttcgagatggtccaaggttggcatcggaaagccacctcctgtggcttcttgttagtcccagttttggaggggccttttgcactgcccagttacctgtatggcgacccccttcgtgcccagctcttcatcccactcaacatcagctgcttgctcaaggagggcagcgagcacctgtttgatagctttgaacccgaaacgtactgggatcgaatgcacctcttccaggaagccattgcacacaggtttgggtttgtacaagataaatattctgcctctgcttttaacttccctgctgagaacaagcctcagtatatccacgttacaggaacagtgtttctgcagctgccctactccaagcgcaagttctcagggcagcagcggcggcggcggaactccaccagctccaccaaccagaacatgttctgcgaggagcgggtcggctacaactgggcctacaacaccatgctcaccaaaacatggcgctccagcgccacaggggatgaaaagtttgctgatcggctgctgaaggacttcacggacttctgcatcaaccgtgacaaccggctggtcacgttctggacaagttgcctggagaagatgcatgccagtgccccgtgaggccaggctgcacctgtgctgggggaaggtgggtgagccactgccctcaaacccggggcggaggattccaggcaggctctaggagtcaggtgtccgtttgctgctatcagtgagtgggggccattgttttttgtttgtttgtttgtttgtttgtttgtttttggcccccacgacaagtcttctactctagaagaaagactttggaagcagctgctgctgctgccaccactcctgtcagcaagtgctcagagcaggtgggaggcacagattgtccgtgggagggctccagtgtctgggaaga

SEQ ID NO: 324271 - protein, 991 aa, Artificial Sequence
  derived and/or modified sequence
MKNLLTEKCISSHNFHQKVIKQRMEKKVDSRYFKDGAVKKPYSAKTLSNKKSSASFGIRRELPSTSHLVQYRGTHTCTRQGRLRELRIRFYYEQRLLRKVFEEWKEEWWVFQHEWKLCVRADCHYRYYLYNLMFQTWKTYVRQQQEMRNKYIRAEVHDAKQKMRQAWKSWLIYVVVRRTKLQMQTTALEFRQRIILRVWWSTWRQRLGQVRVSRALHASALKHRALSLQVQAWSQWREQLLYVQKEKQKVVSAVKHHQHWQKRRFLKAWLEYLQVRRVKRQQNEMAERFHHVTVLQIYFCDWQQAWERRESLYAHHAQVEKLARKMALRRAFTHWKHYMLLCAEEAAQFEMAEEHHRHSQLYFCFRALKDNVTHAHLQQIRRNLAHQQHGVTLLHRFWNLWRSQIEQKKERELLPLLHAAWDHYRIALLCKCIELWLQYTQKRRYKQLLQARADGHFQQRALPAAFHTWNRLWRWRHQENVLSARATRFHRETLEKQVFSLWRQKMFQHRENRLAERMAILHAERQLLYRSWFMWHQQAAARHQEQEWQTVACAHHRHGRLKKAFCLWRESAQGLRTERTGRVRAAEFHMAQLLRWAWSQWRECLALRGAERQKLMRADLHHQHSVLHRALQAWVTYQGRVRSILREVAARESQQLQAQQQVQAAHSLHRAVRRCATLWKQKVLGRGGKPQPLAAIAPSRKVTFEGPLLNRIAAGAGDGTLETKRPQASRPLGALGRLAAEEPHALELNTAHSARKQPRRPHFLLEPAQSQRPQKPQEHGLGMAQPAAPSLTRPFLAEAPTALVPHSPLPGALSSAPGPKQPPTASTGPELLLLPLSSFMPCGAAAPARVSAQRATPRDKPPVPSSLASVPDPHLLLPGDFSATRAGPGLSTAGSLDLEAELEEIQQQLLHYQTTKQNLWSCRRQASSLRRWLELNREEPGPEDQEVEQQVQKELEQVEMQIQLLAEELQAQRQPIGACVARIQALRQALC

SEQ ID NO: 324272 - DNA, 2976 bp, Artificial Sequence
  derived and/or modified sequence
atgaagaatcttcttactgagaagtgcatttcctcccacaattttcaccaaaaagtaatcaagcagagaatggaaaagaaggtggacagccgctactttaaagatggggccgtcaaaaagccatatagcgccaaaacattatccaataagaagtctagcgcctcctttggaataagaagagaactccctagtaccagccatctggttcagtatcgcggaactcacacttgcacgagacaaggcaggctgcgagaactccgaatccgattctattacgagcagaggctgctgcgaaaggtgttcgaagagtggaaggaagaatggtgggtgtttcagcatgaatggaagctgtgtgtcagggccgactgccattatcgttattacctctataacctgatgtttcagacgtggaaaacctacgtgcggcagcagcaagaaatgcgaaataagtacattagagccgaagtccatgatgccaagcagaaaatgcgtcaggcctggaaaagctggctgatatacgtcgtggtgcgccgcacaaaactgcagatgcaaacaactgctttagagttccgccagagaattatccttcgcgtgtggtggtccacttggcggcaacgactgggccaggtccgcgttagcagggccctgcatgcctccgccctaaaacaccgagccctgagcctccaggtccaggcttggtcacagtggcgggaacaactgctgtacgttcagaaagaaaaacaaaaggtggtgagtgccgttaagcaccatcaacactggcagaagcggcgttttctgaaggcttggctggagtacttgcaggtgcggcgggtgaagcgccagcagaacgaaatggctgaacgatttcaccacgtcactgtcctgcagatctacttttgtgactggcagcaagcatgggagagacgggagtcactgtatgctcatcacgctcaggtcgaaaagcttgccagaaagatggcccttcggagggcatttacccactggaaacattacatgcttctctgcgcagaagaagccgcgcagtttgaaatggctgaagaacaccacagacactcccagttatatttttgtttccgagcactcaaggacaacgtcactcacgcacacctgcaacagatccggcgcaatctcgcccatcagcaacacggagtcacgctgctgcacaggttctggaacctctggaggtctcagatcgagcagaagaaggaacgcgagttgctccccttgctgcatgcggcctgggaccactatcgcattgctttgctgtgtaaatgtattgagctatggctccaatatacacagaaacggcgttataagcaactattgcaggcccgtgctgatggacacttccagcaacgcgctctcccagccgcattccatacctggaacagactatggcgctggaggcaccaggaaaacgtgctgtccgctagggccaccaggttccaccgtgagacgctggagaagcaagtattcagtctttggcgccagaagatgtttcagcacagggagaatcgtctcgcagagaggatggccattttgcatgccgaacggcagctgctgtacagaagctggtttatgtggcatcagcaggccgccgctagacaccaggaacaggagtggcagactgtcgcctgcgcacatcacaggcacggcaggctgaagaaagccttctgtctgtggcgcgagtctgctcaaggcctcaggaccgagcgtacagggcgtgtgagagcggccgagttccatatggctcaactcttacgctgggcttggtctcagtggagggaatgtttagcactgaggggtgcagaaagacagaaactcatgcgcgcagatctgcaccatcaacacagcgtgctccaccgagccctgcaagcgtgggtcacctatcaggggagagtccggagtatcctccgggaagtggcagccagggaaagccagcagttgcaggcccagcagcaggtacaagcggcccactcgctccatcgggccgtaaggaggtgtgccacgctgtggaagcaaaaagtactgggccgggggggtaagccccagccgttggctgctatagccccttctagaaaggtgacttttgagggtccactcctcaatcggattgcagctggcgctggcgacggaacccttgagacaaagagacctcaagcctcaagacctttgggagctttgggccggctagccgccgaagagccgcacgctctcgaacttaacaccgcacactctgctcgaaagcagcctcgccggccacacttcttgctggagcccgcccagagccagagaccccaaaaacctcaggagcacggcctggggatggcacagccagccgctcccagcctgactcgaccttttcttgctgaagccccgaccgccttggtgccacactcaccattgcccggcgcactcagcagcgcacctggccctaaacaaccacctactgcttctaccggacctgaacttctgctccttccattaagttctttcatgccatgcggagcagcggcccctgctcgtgtgagcgcacagagagccaccccacgcgataagcctccggtcccaagcagccttgctagcgttccagatcctcatcttctgctgcctggcgacttttcagcgaccagagccggccctggcctgtctacagcaggatctctggatcttgaggccgaactggaagagatccagcagcagctcctgcattatcaaactacaaagcagaatttatggtcatgtcgaagacaggccagctcactccgacggtggctggagttgaaccgtgaggaaccgggacccgaagatcaagaggtagagcaacaggtgcagaaggagcttgagcaggtggagatgcagatacagctgctcgccgaggagctgcaggcgcaacggcagcccattggtgcctgtgtggcccgcatccaggcgctccgtcaggctctttgttag

SEQ ID NO: 324273 - DNA, 2976 bp, Artificial Sequence
  derived and/or modified sequence
atgaagaacctgctgacagagaagtgcatcagcagccacaacttccaccagaaggtgatcaagcagaggatggagaagaaggtggacagccgctacttcaaggatggagctgtgaagaagccctacagcgccaagaccctgagcaacaagaagagcagcgccagctttggcatcagaagagagctgcccagcaccagccacctggtgcagtaccggggcacccacacctgcacccggcagggccgcctgcgggagctgcgcatccgcttctactatgagcagaggctgctgaggaaggtgtttgaggagtggaaggaggagtggtgggtgttccagcacgagtggaagctgtgtgtgcgggctgactgccactaccgctactacctgtacaacctgatgttccagacctggaagacctacgtgcggcagcagcaggagatgaggaacaagtacatccgggcagaggtgcatgatgccaagcagaagatgaggcaggcctggaagtcctggctgatctacgtggtggtgcggaggaccaagctgcagatgcagaccacagccctggagttccggcagaggatcatcctgcgggtgtggtggagcacctggaggcagaggctgggccaggtgcgggtgtcccgggccctgcacgccagcgccctgaagcaccgggccctgagcctgcaggtgcaggcctggagccagtggagggagcagctgctgtatgtgcagaaggagaagcagaaggtggtgtctgctgtgaagcaccaccagcactggcagaagaggcgcttcctgaaggcctggctggagtacctgcaggtgcggcgggtgaagaggcagcagaatgagatggccgagcgcttccaccacgtgacagtgctgcagatctacttctgtgactggcagcaggcctgggagcggcgggagagcctgtatgcccaccacgcccaggtggagaagctggccaggaagatggccctgcggcgggccttcacccactggaagcactacatgctgctgtgtgccgaggaggccgcccagtttgagatggccgaggagcaccaccgccacagccagctgtacttctgcttccgggccctgaaggacaacgtgacccacgcccacctgcagcagatcagaagaaacctggcccaccagcagcacggcgtgaccctgctgcaccgcttctggaacctgtggaggagccagatcgagcagaagaaggagcgggagctgctgcccctgctgcatgctgcctgggaccactaccgcatcgccctgctgtgcaagtgcatcgagctgtggctgcagtacacccagaagaggcgctacaagcagctgctgcaggcccgggcagatggccacttccagcagagggccctgcctgctgccttccacacctggaaccggctgtggcgctggaggcaccaggagaatgtgctgagcgcccgggccacccgcttccaccgggagaccctggagaagcaggtgttcagcctgtggaggcagaagatgttccagcacagagaaaatcggctggccgagaggatggccatcctgcatgctgagcggcagctgctgtaccgctcctggttcatgtggcaccagcaggccgccgcccggcaccaggagcaggagtggcagacagtggcctgtgcccaccaccgccacggccgcctgaagaaggccttctgcctgtggagggagagcgcccagggcctgaggacagagaggacaggccgggtgcgggctgctgagttccacatggcccagctgctgcgctgggcctggagccagtggagagaatgtctggccctgcggggagctgagcggcagaagctgatgagagctgacctgcaccaccagcacagcgtgctgcaccgggccctgcaggcctgggtgacctaccagggccgggtgcgcagcatcctgcgggaggtggccgcccgggagagccagcagctgcaggcccagcagcaggtgcaggccgcccacagcctgcacagagctgtgagaagatgtgccaccctgtggaagcagaaggtgctgggccggggcggcaagccccagcccctggccgccatcgcccccagcaggaaggtgacctttgagggccccctgctgaacagaattgctgctggagctggagatggcaccctggagaccaagaggccccaggccagccggcccctgggcgccctgggccgcctggccgctgaggagccccacgccctggagctgaacacagcccacagcgccaggaagcagccccggcggccccacttcctgctggagcccgcccagagccagaggccccagaagccccaggagcacggcctgggcatggcccagcctgctgcccccagcctgacccggcccttcctggccgaggcccccacagccctggtgccccacagccccctgcccggggccctgagcagcgcccctggccccaagcagcccccaacagccagcactggacctgagctgctgctgctgcccctgagcagcttcatgccctgtggggctgctgccccagcccgggtgtctgcccagagggccaccccccgggacaagccccctgtgcccagcagcctggcctctgtgcctgacccccacctgctgctgcccggggacttcagcgccacccgggccggccctggcctgagcacagctggcagcctggacctggaggccgagctggaggagatccagcagcagctgctgcactaccagaccaccaagcagaacctgtggagctgccggcggcaggccagcagcctgcggcgctggctggagctgaaccgggaggagcccggccctgaggaccaggaggtggagcagcaggtgcagaaggagctggagcaggtggagatgcagatccagctgctggccgaggagctgcaggcccagaggcagcccatcggggcctgtgtggcccgcatccaggccctgcggcaggccctgtgctag

SEQ ID NO: 324274 - DNA, 2976 bp, Artificial Sequence
  derived and/or modified sequence
atgaagaacctgctgaccgagaagtgcatcagcagccacaacttccatcagaaggtcattaagcagagaatggagaagaaggtggacagtagatatttcaaggatggagctgtcaaaaaaccctattccgctaaaacgctgtcaaacaaaaagagcagcgcgtcatttgggatcagaagagaactgccaagcacgtctcatctggtgcagtaccgcggcacacacacctgcacgaggcaaggaaggttacgtgagctgcgcatcagattttactacgagcagcgcctccttcggaaggtatttgaggaatggaaggaggagtggtgggtgttccaacatgaatggaagctgtgcgtgcgcgctgactgccactacaggtactatttgtacaacctcatgttccagacctggaaaacctatgtccggcagcaacaggagatgaggaataagtacattcgagcggaggtgcatgatgcaaagcagaaaatgcggcaggcttggaaaagctggctaatctatgtcgtggtgaggcgaaccaagttgcagatgcaaaccacagctctcgaatttaggcagagaatcattttgcgcgtctggtggagcacctggcgccagagactcgggcaggtgagagttagtagagctctgcacgcgagcgctcttaaacaccgggcgctgtcgctacaggtacaggcttggtcccagtggagggagcagctcctgtatgtgcaaaaggagaagcagaaggtagtgagtgccgtaaagcaccatcaacattggcagaagaggcgattcctgaaggcatggctcgaatacctccaagtgcgaagagtcaagcgacagcaaaatgaaatggctgaacgtttccaccacgtcaccgtcctccagatctatttttgcgattggcagcaggcctgggagcgccgcgaaagtctgtacgcccatcacgctcaggtagagaaattagcccggaaaatggctctccggcgcgccttcactcattggaaacactatatgctcctgtgcgccgaagaagccgcccaatttgaaatggccgaagagcaccacaggcattctcagttgtacttctgttttcgagccctcaaagataacgttacccatgcccacctgcagcagatccgcaggaacttggcccaccagcaacatggcgttaccctgttgcatcgcttttggaatctctggcgctcccagatcgagcagaagaaggaaagggagctcctgcccctgctgcacgcagcttgggatcactaccgaatagctctgctatgcaaatgcatagaactttggttacagtacactcagaagagaaggtataaacagctgctgcaggcaagggctgatggtcactttcagcagagagccctgccggccgcctttcacacttggaatcgcctctggagatggcgccaccaggagaacgttctatctgcccgagccacgcgctttcatcgtgaaactctagaaaaacaagtattctccctgtggcggcagaagatgtttcaacaccgggaaaatagacttgctgagcgcatggccattctccacgccgaacgtcagctgctgtacagatcctggttcatgtggcatcagcaggcggccgcaaggcaccaagaacaggaatggcaaaccgtcgcttgcgctcatcaccgccacggcaggctgaagaaggccttctgtctgtggagggaaagcgctcagggccttaggacggagcgaaccggccgcgtcagagcagccgagttccacatggcccagttgctcagatgggcctggtcccagtggcgagaatgtctggctctccggggcgcggagaggcaaaaattgatgagagcagatctgcaccatcagcatagcgtgctgcatcgagccctccaagcgtgggtgacctatcagggacgggtcaggtcaatacttcgggaggtcgcagcacgtgaaagccaacagctgcaagcccagcagcaggtgcaagcagcacactccctccatagagcggtccgtcgatgtgccaccttgtggaagcagaaggtcctcgggagaggggggaagccccagcctctggccgccatcgctccttcgcggaaggtgacatttgaaggacctcttctaaacagaattgcagcgggggcgggagacggcaccctcgagacaaagagaccacaggcctcacgtcctcttggcgcgctgggtcggctcgctgccgaagagcctcatgcgctggagctgaataccgcacactctgctcgaaaacagccgcgacgtcctcacttcctactagagccggcgcagtctcaaagaccccagaaaccccaggagcatggcctgggcatggcccagcccgctgccccttcacttacccgtcctttccttgcagaagcaccaacagcactggtgccacactcaccacttccaggagctctgtcctctgcccccgggccgaagcagccaccgacagcttccacaggacctgagctgttgctgctgccactcagttccttcatgccatgcggggccgcggcaccagcccgggtgagcgcccagagggctacacctagggataagccgcccgtgccttcttccctggcatccgtacccgatccccacctcttattacccggagactttagcgctaccagagcgggtcctggcttgtctaccgcaggatccctggatctggaggctgagttggaagaaattcagcagcagttactgcattatcagaccacaaagcagaacttgtggtcctgtagaaggcaggcctccagtcttcggcgatggttggaattgaatcgggaagagccaggacctgaggaccaagaggtggagcagcaggtacaaaaagagctagagcaggtcgaaatgcagatccagttgttggcagaagagctccaagcgcaacgccagccaattggcgcctgtgtcgcccgcatccaggcactgcgccaagctctatgttag

SEQ ID NO: 324275 - DNA, 2976 bp, Artificial Sequence
  derived and/or modified sequence
atgaagaacctgcttacagaaaaatgcatcagttcccacaatttccatcagaaggtcatcaaacaacggatggagaagaaagtcgactccagatacttcaaggacggggcagtaaaaaaaccttactccgcaaaaacattgtcgaacaaaaagagctcagcgtcgttcggaattcggcgagagctgccctccacctcccacttggtgcagtatagaggtactcatacctgcactcgccagggcagacttagggaactccgcattcgcttttactatgaacaaaggcttctgcgaaaggtctttgaggaatggaaggaagaatggtgggttttccagcacgaatggaagctgtgcgtgcgcgctgattgtcattacagatattacctctacaatctgatgtttcaaacgtggaaaacatatgtccgccaacagcaagaaatgagaaacaagtatataagagccgaggtacacgatgcaaagcagaaaatgcggcaggcctggaagagttggctcatttatgtcgtagttaggcggacaaagctgcagatgcaaactactgccctggaattcagacagcggattattttacgggtatggtggtcgacctggaggcaaagacttggacaagttcgcgtttcaagagctttgcacgcgagtgccctgaaacaccgtgcgctgagcttgcaggtgcaggcttggtcccagtggagggaacagctattgtatgtacagaaggaaaaacagaaagtggtgtctgccgtcaaacaccatcagcattggcagaagcgcagattcttgaaagcatggcttgaatatctccaagtgcgccgtgttaaacgtcagcagaacgaaatggccgagcgatttcaccatgttaccgtcctccaaatctacttctgcgattggcagcaggcctgggagcgaagagagtccctgtacgcacatcatgcccaggttgagaaactggctcgcaaaatggctctgaggcgcgcatttacccactggaagcattacatgttactgtgcgctgaagaggctgcccagtttgagatggcagaggaacaccatagacattctcagctctacttctgcttcagagccctaaaagacaacgtaacacacgcccacctgcagcagattcgcagaaacttggcacaccagcagcacggggtgaccttgcttcatcgcttttggaacctgtggcggtctcagatcgagcagaaaaaggagcgtgagttgcttcccttgctccatgcagcatgggaccactatagaatcgctttgctgtgtaagtgtatagaattgtggctccagtacacacagaaacgcaggtacaaacagctgctgcaggcccgagcagacggacactttcagcagagagctttacccgctgcttttcatacttggaaccggctgtggagatggcgtcaccaggagaatgttctctctgctcgcgctactcgcttccacagggagactctagaaaaacaggtattctcgttatggcggcagaagatgttccaacatcgagagaataggctagcagagcgcatggccatcctgcatgcagagaggcaacttctgtaccgaagttggtttatgtggcatcaacaggctgctgcaaggcaccaggagcaagaatggcaaactgtcgcatgcgcccatcaccggcacggccgtcttaagaaggctttctgcttgtggagagaatctgcccagggtttgcggaccgagcgcaccggcagggtccgagcagctgagtttcacatggcacagctgctaagatgggcctggtcccagtggcgtgagtgtctcgctctgagaggcgctgaacgtcagaaattgatgagagctgatctccaccatcagcacagcgttctccatcgggctctccaggcatgggtcacctaccagggtcgcgtgcgcagtattctgcgagaagtagcagcacgtgaaagccagcagctccaagcccagcagcaagtgcaggccgcacacagcctccatcgtgccgtgcggaggtgtgcgacactttggaaacagaaggtgctaggtaggggcggtaaaccccaaccgctggcagcgatcgcacccagccgaaaggtaacgttcgagggtccactgcttaatcgcatcgccgcaggcgctggcgacgggaccctggagactaaacgcccacaggccagtcgtccactgggcgcactgggacgcctagcagccgaggagcctcacgcgttggagctgaacacagcacattccgctagaaagcagcctaggcgaccccacttcttgcttgaacctgctcagtctcaacgccctcagaaaccacaggagcatggcctgggtatggctcagccagccgcaccatctctgaccagaccctttcttgccgaggcccctactgccttagtgccacacagtccccttcccggagctcttagctccgctcctggccctaagcagcctcccacagctagcaccggtcctgagctcctgctgctaccactgtccagttttatgccatgtggtgcggctgcacccgcacgggtgagcgctcagcgcgcaacaccacgggataagccgcctgttcctagttcgctcgcaagcgtgcccgaccctcacttgctcttgcccggtgatttcagtgcaaccagagccggaccaggactgtcaacggccggaagtctcgatctagaggcggagctggaagagattcagcagcagttacttcactaccagactacgaagcagaacctatggtcttgcaggcggcaggcttctagcctgcgcagatggctcgagcttaatagggaagagcccggtcctgaggatcaggaagtggagcagcaggtgcagaaagagttagagcaggtcgaaatgcagattcagttgttagctgaggagctacaggcacaacggcagcccatcggggcttgtgttgcgagaatccaggccctgagacaggccctctgctag

SEQ ID NO: 324276 - DNA, 3498 bp, Artificial Sequence
  derived and/or modified sequence
agcaagctgagctcagagcgaagctggcgagccaaggagataaagaaccctcggtggggatgcccagagggtgcatgctccacgcccctcgaaaccgattctcattgctgctgctgcaaagcaacccgaagtgcgccacctacccgactgaggctgcgcaagccccggggtctgggcggggtggtcctcgtgcgcgccgcgtcgccgtggagacgagggcgggcccgcgcgagactggcgtctagaggcgcgcgaagcgctgaggcgggcgtggaccgcgcgggagttaagaagcaggtcccggatcgccgtataccgccgggttttctcccaacgtcaggcccgatggctcggcttccccagttagaaggggaagataaaagactttgattcatgaagaatctgctcactgagaagtgtatatcaagccacaatttccatcaaaaagtgattaagcagagaatggagaagaaggttgattccaggtattttaaggatggtgcagttaagaaaccttattctgcaaagacactgtccaacaagaagtcttctgcatcctttgggatccggagggagttacctagtaccagtcatctagtgcagtatcgtggcacacatacttgtacccgacagggccggttaagagaactgcgcatcagattttactatgagcagcgattactacggaaggtcttcgaagaatggaaagaggagtggtgggttttccagcacgagtggaaactctgtgttcgagctgactgtcactacaggtattacctgtacaacctgatgttccagacgtggaagacctatgtgcgtcagcagcaggagatgaggaacaagtacattagagccgaggttcatgatgcaaagcaaaagatgcgacaggcctggaagtcctggttgatctacgtggttgttcgtaggaccaaacttcagatgcagactacagctctggagtttaggcaacggattatcttacgggtgtggtggagcacgtggaggcagcgactaggacaggtccgtgtgagccgtgccctccatgcctctgctttgaagcacagggccctgagcctccaggtgcaggcttggtcacagtggcgggaacagctcctgtatgtccagaaggagaaacaaaaggttgtctctgcagtgaaacatcatcagcactggcaaaaacggagatttctaaaggcctggcttgaatacctgcaagtccgcagagtgaagagacagcagaatgagatggctgagcgattccatcatgtcactgtgctccagatatacttctgtgactggcagcaggcctgggagcggagggagagcttgtacgctcaccatgcccaggtggagaaactggccaggaagatggccctgcggcgcgcctttactcactggaaacactacatgctgctgtgtgcagaagaagctgcccagtttgagatggcagaagagcaccacaggcacagccagctgtatttttgctttagagccctaaaagacaatgtgacccacgctcatctccagcaaataagaaggaatcttgctcaccagcagcatggtgtcacgctgctgcacaggttctggaacctctggcggtctcagattgagcagaaaaaggaaagagagctgctccccttactgcatgctgcctgggaccactacagaatagcactgctgtgcaaatgtatcgaattgtggctacagtatactcagaagaggcggtacaagcagctgctacaggccagagcggatggtcatttccagcagagagccctgcctgctgccttccacacatggaacagactctggcgatggcgccaccaggaaaatgtcctcagtgcaagagcaacacgtttccacagggagacattagagaagcaagtattttctctctggaggcagaagatgtttcagcatcgagaaaaccgcctggcagagagaatggccatccttcacgcagagcgacagcttctgtataggtcttggttcatgtggcaccagcaggcagcagcacgtcaccaggagcaggagtggcaaacagtggcctgtgcccaccaccgccacgggcggctcaagaaagctttctgcctctggagggaaagtgcccaagggctcagaacagagaggacgggcagggtgcgggcagcagaattccacatggcccagctcctgcgttgggcctggagccagtggagggagtgcctggccctgcggggagcggagcggcagaagctgatgcgagcagacctgcaccaccagcacagcgtgctgcacagggcgctgcaggcatgggtgacttaccagggcagggtgcgaagcatcctccgggaggtggcagccagggagagccagcagctgcaggcccagcagcaggtccaggcggctcacagtctccatcgtgccgtccgccgctgtgccacgctctggaaacagaaagtgctgggccggggcgggaagcctcagcccctggcagccatcgcacccagcaggaaagtgacgtttgagggtccccttctcaaccgcattgctgctggggctggggatggcacccttgagaccaagaggccacaggcttctcggcctctgggagctctgggccgcctggctgctgaggagccccacgccctggagctcaacactgcccactcagcgaggaagcagccgcgacgcccacacttcctgttggagcctgcgcagagccagaggcctcagaagccacaggaacatggcctaggcatggctcagccagcagccccctccctgacgcggcccttcctggcagaggccccgacagcactggtcccacacagccccctgcctggggccctgtcaagcgcccctggcccgaagcagcccccgacggcaagcacaggcccggagctgctgctgctgcctctttcctccttcatgccctgcggggcggctgcaccagccagggtgtcagcacagcgggctactcctagggataagcccccggtcccctcatccctggccagtgtccctgacccccatctactccttcctggggacttctcagccaccagggctgggcctggactttcaactgcaggcagcctggaccttgaggctgaacttgaggagatccagcagcaactactgcactaccagaccaccaagcagaacctctggtcctgtcggcggcaagcgagcagcctgcgcaggtggctggagctgaacagagaggagccggggcctgaggaccaggaagtagagcagcaggtgcagaaagagctggaacaggtggaaatgcagatccagctgctggcagaggagctccaggctcagcgccagcccattggcgcctgcgttgcccgcatccaggccctgcggcaggccctgtgctagcgtgttcgcaccaggaacgcaggtgctgggctgtcggggaggcctcaggccacctccaggaacagaacacagttttaagtttgattttttttatttcaaaatgctttgcaattaaatgaattactgttc

SEQ ID NO: 324277 - DNA, 2976 bp, Artificial Sequence
  derived and/or modified sequence
atgaagaacctgctgaccgagaagtgcatcagcagccacaacttccaccagaaggtgatcaagcagagaatggagaagaaggtggacagcagatacttcaaggacggcgccgtgaagaagccctacagcgccaagaccctgagcaacaagaagagcagcgccagcttcggcatcagaagagagctgcccagcaccagccacctggtgcagtacagaggcacccacacctgcaccagacagggcagactgagagagctgagaatcagattctactacgagcagagactgctgagaaaggtgttcgaggagtggaaggaggagtggtgggtgttccagcacgagtggaagctgtgcgtgagagccgactgccactacagatactacctgtacaacctgatgttccagacctggaagacctacgtgagacagcagcaggagatgagaaacaagtacatcagagccgaggtgcacgacgccaagcagaagatgagacaggcctggaagagctggctgatctacgtggtggtgagaagaaccaagctgcagatgcagaccaccgccctggagttcagacagagaatcatcctgagagtgtggtggagcacctggagacagagactgggccaggtgagagtgagcagagccctgcacgccagcgccctgaagcacagagccctgagcctgcaggtgcaggcctggagccagtggagagagcagctgctgtacgtgcagaaggagaagcagaaggtggtgagcgccgtgaagcaccaccagcactggcagaagagaagattcctgaaggcctggctggagtacctgcaggtgagaagagtgaagagacagcagaacgagatggccgagagattccaccacgtgaccgtgctgcagatctacttctgcgactggcagcaggcctgggagagaagagagagcctgtacgcccaccacgcccaggtggagaagctggccagaaagatggccctgagaagagccttcacccactggaagcactacatgctgctgtgcgccgaggaggccgcccagttcgagatggccgaggagcaccacagacacagccagctgtacttctgcttcagagccctgaaggacaacgtgacccacgcccacctgcagcagatcagaagaaacctggcccaccagcagcacggcgtgaccctgctgcacagattctggaacctgtggagaagccagatcgagcagaagaaggagagagagctgctgcccctgctgcacgccgcctgggaccactacagaatcgccctgctgtgcaagtgcatcgagctgtggctgcagtacacccagaagagaagatacaagcagctgctgcaggccagagccgacggccacttccagcagagagccctgcccgccgccttccacacctggaacagactgtggagatggagacaccaggagaacgtgctgagcgccagagccaccagattccacagagagaccctggagaagcaggtgttcagcctgtggagacagaagatgttccagcacagagagaacagactggccgagagaatggccatcctgcacgccgagagacagctgctgtacagaagctggttcatgtggcaccagcaggccgccgccagacaccaggagcaggagtggcagaccgtggcctgcgcccaccacagacacggcagactgaagaaggccttctgcctgtggagagagagcgcccagggcctgagaaccgagagaaccggcagagtgagagccgccgagttccacatggcccagctgctgagatgggcctggagccagtggagagagtgcctggccctgagaggcgccgagagacagaagctgatgagagccgacctgcaccaccagcacagcgtgctgcacagagccctgcaggcctgggtgacctaccagggcagagtgagaagcatcctgagagaggtggccgccagagagagccagcagctgcaggcccagcagcaggtgcaggccgcccacagcctgcacagagccgtgagaagatgcgccaccctgtggaagcagaaggtgctgggcagaggcggcaagccccagcccctggccgccatcgcccccagcagaaaggtgaccttcgagggccccctgctgaacagaatcgccgccggcgccggcgacggcaccctggagaccaagagaccccaggccagcagacccctgggcgccctgggcagactggccgccgaggagccccacgccctggagctgaacaccgcccacagcgccagaaagcagcccagaagaccccacttcctgctggagcccgcccagagccagagaccccagaagccccaggagcacggcctgggcatggcccagcccgccgcccccagcctgaccagacccttcctggccgaggcccccaccgccctggtgccccacagccccctgcccggcgccctgagcagcgcccccggccccaagcagccccccaccgccagcaccggccccgagctgctgctgctgcccctgagcagcttcatgccctgcggcgccgccgcccccgccagagtgagcgcccagagagccacccccagagacaagccccccgtgcccagcagcctggccagcgtgcccgacccccacctgctgctgcccggcgacttcagcgccaccagagccggccccggcctgagcaccgccggcagcctggacctggaggccgagctggaggagatccagcagcagctgctgcactaccagaccaccaagcagaacctgtggagctgcagaagacaggccagcagcctgagaagatggctggagctgaacagagaggagcccggccccgaggaccaggaggtggagcagcaggtgcagaaggagctggagcaggtggagatgcagatccagctgctggccgaggagctgcaggcccagagacagcccatcggcgcctgcgtggccagaatccaggccctgagacaggccctgtgctag

SEQ ID NO: 324278 - protein, 79 aa, Artificial Sequence
  derived and/or modified sequence
MKNLLTEKCISSHNFHQKVIKQRMEKKVDSRYFKDGAVKKPYSAKTLSNKKSSASFGIRRELPSTSHLVQYRGTHTCTR

SEQ ID NO: 324279 - DNA, 624 bp, Artificial Sequence
  derived and/or modified sequence
atgggcatgagactgcagctgctgagagacagaagaatcagcagcagaggccccggcctgcacagagccaaggccgacccccagcagcagaagagactgaccaccggcctgatgacccaggccgagacccagaaggaggcccagcagagacaggccgccatgagaaagaccgccctgtggcacaccggccacctgcagcccaagacccacacccacaccggcatgcacacccagacccacagagagagagagagaaacacccagagactgagagacagagagagaagagagaacggcagacacacccacagacacacccacaccctgacccacacccacacccacagagacacccacaccgccagctacagaagaggcatcgagacccacaccaccagacagcccctgagactgagaggcagcgcccacgacgagaacgaccccagagtgagagagcagcccagaggcacccaggccgacctgagcagcagaagcagaatggccgccagactgctgggcagactgacccccaccaacaccgtgagagccggcctgagactgggcagcagagccgccagccccgaccccgcctggggcttcctgatcgtggtgggccccctgtag

SEQ ID NO: 324280 - DNA, 240 bp, Artificial Sequence
  derived and/or modified sequence
atgaagaacctgctgacagaaaagtgcatctcctcgcacaattttcatcagaaggttattaagcagcgcatggagaaaaaggtcgatagtcggtattttaaagatggggccgtgaagaagccatattcggctaaaaccttgtcaaacaagaagtccagcgcatccttcggcataaggagggagctccccagcacgagccacctcgtccagtaccgtggaacacacacatgcaccagatag

SEQ ID NO: 324281 - DNA, 240 bp, Artificial Sequence
  derived and/or modified sequence
atgaagaacctgctgacagagaagtgcatcagcagccacaacttccaccagaaggtgatcaagcagaggatggagaagaaggtggacagccgctacttcaaggatggagctgtgaagaagccctacagcgccaagaccctgagcaacaagaagagcagcgccagctttggcatcagaagagagctgcccagcaccagccacctggtgcagtaccggggcacccacacctgcaccaggtag

SEQ ID NO: 324282 - DNA, 240 bp, Artificial Sequence
  derived and/or modified sequence
atgaagaacctgctgaccgagaagtgcatcagcagccacaacttccaccagaaggttatcaaacagcgcatggagaaaaaggtggatagcagatacttcaaagatggggccgttaaaaagccttactctgccaagactctgtccaacaagaagtcttccgcttctttcggcatcaggagggaactgccctccacatctcacctcgtgcagtatcgtggcacacatacctgtactaggtag

SEQ ID NO: 324283 - DNA, 240 bp, Artificial Sequence
  derived and/or modified sequence
atgaaaaacttgctgactgaaaaatgtataagctcccacaatttccatcagaaggtcattaagcaacggatggaaaagaaagtggattctcggtactttaaagacggcgctgtcaaaaagccatactccgcaaagacactatccaataaaaaaagcagtgccagctttggtattcgcagggagctgccttccacgtcccacctcgtgcagtatcggggaacacatacctgtacgcgttag

SEQ ID NO: 324284 - DNA, 449 bp, Artificial Sequence
  derived and/or modified sequence
gagttaagaagcaggtcccggatcgccgtataccgccgggttttctcccaacgtcaggcccgatggctcggcttccccagataccgtgttttttacaaattgaaagtttgtagcaagcagccctgcaccgagcaactattttttcaacagcatgtgcccacttcctgtcacttacactttgttagaaggggaagataaaagactttgattcatgaagaatctgctcactgagaagtgtatatcaagccacaatttccatcaaaaagtgattaagcagagaatggagaagaaggttgattccaggtattttaaggatggtgcagttaagaaaccttattctgcaaagacactgtccaacaagaagtcttctgcatcctttgggatccggagggagttacctagtaccagtcatctagtgcagtatcgtggcacacatacttgtacccgac

SEQ ID NO: 324285 - DNA, 240 bp, Artificial Sequence
  derived and/or modified sequence
atgaagaacctgctgaccgagaagtgcatcagcagccacaacttccaccagaaggtgatcaagcagagaatggagaagaaggtggacagcagatacttcaaggacggcgccgtgaagaagccctacagcgccaagaccctgagcaacaagaagagcagcgccagcttcggcatcagaagagagctgcccagcaccagccacctggtgcagtacagaggcacccacacctgcaccagatag

SEQ ID NO: 324286 - DNA, 678 bp, Artificial Sequence
  derived and/or modified sequence
atgacaagcgaattcttcgcagcccagctgcgcagtcagatctccgaccacaccacgcatccaatatcctattacaaacctgagttttatacaccagacgatgggggaaccgcgcatctgtcagtagtggcggaagacggttccgcggtcagcgctacttccaccatcaatctttatttcggctcgaaggtttgttcacccgtcagcgggatcctgtttaacaacgagtggacgactagtgcactgcccgcttttactaacgagtttggcgcgccgcccagcccagcaaacttcatacaacctggtaagcagcccctgctgtcaatgtgccccactataatggtgggtcaggacgggcaggtgcgaatggtcgtgggagctgctggaggcacccagatcacaaccgacaccgctctcgcaatcatttataatctgtggttcgggtatgacgtcaaacgcgcagtggaagagccaaggttgcataacaagcttctacccaatgtgaccacggtggagaggaacatcgaccaggcggtgacggccgcgttagagacaaggcaccaccatacacagatagcgagtacattcattgcggtggtccaggccattgtcagaacggctggaggctgggccgccgcttccgactctcgcaagggcggcgagccagcaggctactag

SEQ ID NO: 324287 - DNA, 711 bp, Artificial Sequence
  derived and/or modified sequence
ccagccctgggcagtcagcaggttgtaagaaatatgaccagcgagttttttgcggcccagctgcggtctcaaatatctgaccacactacacacccaatatcttactacaagccagagttctatacaccagatgacggcggtaccgctcatctgtccgtagtggccgaggatggaagcgcggttagcgccactagcaccattaatctgtacttcggtagcaaggtatgcagtccagtgagcggcatacttttcaacaatgaatggactacttcggctctgccagcgttcaccaacgagtttggggcccctccatccccggccaacttcattcagcctgggaagcagccgttgttaagcatgtgcccaaccattatggtgggtcaagacggtcaggttcgcatggtcgtgggagcagctggaggcacccagatcacaacggacactgcattggcgatcatctataacttgtggttcggatatgatgttaagcgggccgtcgaggagccccgtctgcacaataagctcctgccaaacgtaaccacagtggaaaggaatatcgaccaggccgtgacagctgcattagagaccagacaccaccatacacaaattgcctctacattcatcgcggtcgtgcaggctatcgtgcgaactgccgggggatgggctgccgcctctgattccaggaaaggcggcgagccagccggctactag

SEQ ID NO: 324288 - DNA, 968 bp, Artificial Sequence
  derived and/or modified sequence
attgaatgcggcaagggtctggaggctgaggaccaggcagacagacattcagagttgctggaacgcgacagagacagggagtcagactggtcatgcaaggccagctctggggtctcagcaggtggtccgcaacatgacctctgagttcttcgctgcccagctccggtcccagatctctgaccacaccactcacccgatctcctactacaagcccgagttctacacgccggatgacgggggcactgctcacctgtctgtcgtcgcagaggacggcagtgctgtgtccgccaccagcaccatcaacctctactttggctccaaggtctgctccccggtcagtgggatcctgttcaataatgaatggacgacttcagctctcccagcattcaccaatgagtttggggcacccccctcacctgccaatttcatccagccagggaagcagccgctcttgtccatgtgcccgacgatcatggtgggccaggacggccaggtccggatggtggtgggagctgctgggggcacgcagatcaccacagacactgcactggccatcatctacaacctctggttcggctatgacgtgaagagggccgtggaggagccccggctgcacaacaagcttctgcccaacgtcacgacagtggagagaaacattgaccaggcagtgactgcagccctggagacccggcaccatcacacccagatcgcatccaccttcatcgctgtggtgcaagccatcgtccgcacggctggtggctgggcagctgcctcggactccaggaaaggcggggaacctgctggctactgattgctccaggcagacaaggctgacaagcaatccagggacaagatactcaccaggatgaggaagaggactttgggggacgggcttcccctgtgagcagcagagcagcataataaatgaggccactgtgccaggctccaggtggcctccctggcctgtc

SEQ ID NO: 324289 - DNA, 873 bp, Artificial Sequence
  derived and/or modified sequence
ccagctctggggtctcagcaggtggtccgcaacatgacctctgagttcttcgctgcccagctccggtcccagatctctgaccacaccactcacccgatctcctactacaagcccgagttctacacgccggatgacgggggcactgctcacctgtctgtcgtcgcagaggacggcagtgctgtgtccgccaccagcaccatcaacctctactttggctccaaggtctgctccccggtcagtgggatcctgttcaataatgaatggacgacttcagctctcccagcattcaccaatgagtttggggcacccccctcacctgccaatttcatccagccagggaagcagccgctcttgtccatgtgcccgacgatcatggtgggccaggacggccaggtccggatggtggtgggagctgctgggggcacgcagatcaccacagacactgcactggccatcatctacaacctctggttcggctatgacgtgaagagggccgtggaggagccccggctgcacaacaagcttctgcccaacgtcacgacagtggagagaaacattgaccaggcagtgactgcagccctggagacccggcaccatcacacccagatcgcatccaccttcatcgctgtggtgcaagccatcgtccgcacggctggtggctgggcagctgcctcggactccaggaaaggcggggaacctgctggctactgattgctccaggcagacaaggctgacaagcaatccagggacaagatactcaccaggatgaggaagaggactttgggggacgggcttcccctgtgagcagcagagcagcataataaatgaggccactgtgccaggctccaggtggcctccctggcctgtctcccc

SEQ ID NO: 324290 - DNA, 678 bp, Artificial Sequence
  derived and/or modified sequence
atgaccagcgagttctttgctgcccagctgcggagccagatcagtgaccacaccacccaccccatctcctactacaagccagagttctacaccccagatgatggcggcacagcccacctgtctgtggtggctgaagatggcagcgctgtgtctgccaccagcaccatcaacctgtacttcggcagcaaggtgtgcagccctgtgtctggcatcctcttcaacaatgagtggaccaccagcgccctgcctgccttcaccaatgaatttggagccccacccagccctgccaacttcatccagcccgggaagcagcccctgctgtccatgtgccccaccatcatggtgggccaggacggccaggtgaggatggtggtgggcgccgccggcggcacccagatcaccacagacacagccctggccatcatctacaacctgtggtttggctatgatgtgaagagagctgtggaggagccccggctgcacaacaagctgctgcccaacgtgaccaccgtggagagaaatattgaccaggccgtgacagctgccctggagaccaggcaccaccacacccagatcgccagcaccttcatcgctgtggtgcaggccatcgtgaggacagctgggggctgggccgccgccagtgacagcaggaagggcggggagcctgctggctactag

SEQ ID NO: 324291 - DNA, 711 bp, Artificial Sequence
  derived and/or modified sequence
ccagccctgggcagccagcaggtggtgaggaacatgaccagcgagttctttgctgcccagctgcggagccagatcagtgaccacaccacccaccccatctcctactacaagccagagttctacaccccagatgatggcggcacagcccacctgtctgtggtggccgaggatggcagcgctgtgtctgccaccagcaccatcaacctgtacttcggcagcaaggtgtgcagccctgtgtctggcatcctcttcaacaatgagtggaccaccagcgccctgcctgccttcaccaatgaatttggagccccacccagccctgccaacttcatccagcccgggaagcagcccctgctgtccatgtgccccaccatcatggtgggccaggacggccaggtgaggatggtggtgggcgctgctgggggcacccagatcaccacagacacagccctggccatcatctacaacctgtggtttggctatgatgtgaagagagctgtggaggagccccggctgcacaacaagctgctgcccaacgtgaccaccgtggagaggaacatcgaccaggccgtgacagctgccctggagaccaggcaccaccacacccagatcgccagcaccttcatcgctgtggtgcaggccatcgtgaggacagctgggggctgggccgccgccagtgacagcaggaaaggaggagagcccgccggctactag

SEQ ID NO: 324292 - DNA, 678 bp, Artificial Sequence
  derived and/or modified sequence
atgaccagcgagttcttcgccgcccagctgcggagccagatcagcgaccacaccactcatccaattagctattataagcccgaattttacacccccgacgatggcggaaccgctcatctgtccgttgtcgcagaggacggcagtgccgtcagtgccacctccacaataaatctgtacttcggctccaaagtgtgttctccggtatctggtatcctgtttaataacgaatggactaccagtgccctacccgcattcacaaacgaattcggtgcacccccaagcccagccaacttcatccagcctgggaaacagcctttgctgtcaatgtgccccacaattatggtaggccaagatgggcaggtcagaatggtggtcggcgcagctggcgggactcagattactactgatacagccctggctataatatacaatctttggtttggttacgatgtcaagcgagcagtcgaggagccgcggcttcacaacaaactcctgcccaatgtcaccaccgtcgagagaaacatcgaccaggctgtgaccgctgcgttggagacaaggcaccatcacacacagattgccagcacatttatcgccgtggtccaggccatcgtgcgtactgccgggggttgggccgcagccagcgatagcagaaaagggggcgagcccgctgggtattag

SEQ ID NO: 324293 - DNA, 711 bp, Artificial Sequence
  derived and/or modified sequence
cccgccctgggcagccagcaggtggtgcggaacatgaccagcgagttcttcgccgcccagcttaggagtcagatttccgaccacaccacacaccccatcagttactacaagcctgaattttatacccccgacgacggtggaacagctcacctgagcgttgtggcagaagacggcagtgcagtaagtgctacttccacaataaacctgtattttggaagcaaggtctgctcacccgtcagtggcatattatttaacaacgagtggacaaccagtgccttaccggcgttcaccaacgagtttggcgctcccccttcccccgccaatttcatccaacccgggaagcagccgttactgagtatgtgtcctacaattatggtggggcaggacggtcaggtgcggatggtcgtgggcgcagcaggcgggacgcagatcactaccgacaccgctctcgccatcatttataacctctggtttggctacgacgtcaagagagccgttgaagaacctcgtctgcataataagcttttgccaaacgtcaccacggtggagcggaacattgaccaggctgttaccgcggctttggagacgcggcaccaccacactcagatcgcctccacattcattgctgtagtgcaggcaattgttagaacagccggaggttgggcagccgcatcggacagtaggaaggggggtgagcccgccgggtactag

SEQ ID NO: 324294 - DNA, 678 bp, Artificial Sequence
  derived and/or modified sequence
atgactagcgaattctttgccgcacagctaagatcccagatttccgaccacactactcaccctattagctactataaacccgagttctacacacccgatgacggcggaactgctcacctaagcgttgtggccgaagatggttctgcagtctcagccaccagtacgatcaatttatacttcggttctaaagtgtgctctcctgtatcagggatcctgtttaacaacgagtggactacctctgccctgccagcttttaccaatgagtttggagcgccaccaagcccagcaaactttattcagcctggcaagcagcctctcctgtctatgtgtcccacgattatggttgggcaggacggtcaagttaggatggtcgtgggagcagctggtggcactcagataacaacagacacagcactggctattatctataatctgtggtttggctatgacgttaagcgagctgtggaggaacccaggctgcacaacaagttgttgcctaatgtcacaactgttgagagaaacatcgaccaggcagtgactgctgcattggagactcgacatcatcatacacaaattgcatcgacatttatcgctgttgtgcaggcaattgtccgcaccgctgggggatgggctgccgcatccgactcccgaaaaggtggcgagccagcaggctattag

SEQ ID NO: 324295 - DNA, 711 bp, Artificial Sequence
  derived and/or modified sequence
cctgcactgggcagccaacaggttgtccgtaacatgacatctgagttcttcgcagctcaactccgctcgcagatctcagaccacaccactcatcctatcagctattacaagcccgagttctataccccagatgacggcggtacggcccacctgagtgtcgttgcagaagatgggtctgctgtttctgccacgtccactatcaatctgtactttggatccaaagtgtgttctcctgtgtctggcatcttgttcaacaacgagtggacgacctccgcacttcctgccttcaccaatgaattcggggcacccccttcacctgcgaacttcatccagcccggtaaacagccccttttgtccatgtgtccaactattatggtcggccaagatgggcaagtgcgcatggtagttggcgctgccggtggcactcagatcactaccgataccgcccttgccatcatctataatctttggtttggttatgacgttaagcgcgcagttgaggagccgaggctccacaacaaactcctgccaaacgttaccaccgtggagaggaacatcgaccaggctgttaccgccgctctcgagaccaggcaccaccatacccagatcgccagcacctttattgcggtggtgcaggctatcgtgaggacggccggtggctgggccgcagcttccgactcaaggaaaggcggtgagcccgctgggtattag

SEQ ID NO: 324296 - DNA, 678 bp, Artificial Sequence
  derived and/or modified sequence
atgaccagcgagttcttcgccgcccagctgagaagccagatcagcgaccacaccacccaccccatcagctactacaagcccgagttctacacccccgacgacggcggcaccgcccacctgagcgtggtggccgaggacggcagcgccgtgagcgccaccagcaccatcaacctgtacttcggcagcaaggtgtgcagccccgtgagcggcatcctgttcaacaacgagtggaccaccagcgccctgcccgccttcaccaacgagttcggcgccccccccagccccgccaacttcatccagcccggcaagcagcccctgctgagcatgtgccccaccatcatggtgggccaggacggccaggtgagaatggtggtgggcgccgccggcggcacccagatcaccaccgacaccgccctggccatcatctacaacctgtggttcggctacgacgtgaagagagccgtggaggagcccagactgcacaacaagctgctgcccaacgtgaccaccgtggagagaaacatcgaccaggccgtgaccgccgccctggagaccagacaccaccacacccagatcgccagcaccttcatcgccgtggtgcaggccatcgtgagaaccgccggcggctgggccgccgccagcgacagcagaaagggcggcgagcccgccggctactag

SEQ ID NO: 324297 - DNA, 711 bp, Artificial Sequence
  derived and/or modified sequence
cccgccctgggcagccagcaggtggtgagaaacatgaccagcgagttcttcgccgcccagctgagaagccagatcagcgaccacaccacccaccccatcagctactacaagcccgagttctacacccccgacgacggcggcaccgcccacctgagcgtggtggccgaggacggcagcgccgtgagcgccaccagcaccatcaacctgtacttcggcagcaaggtgtgcagccccgtgagcggcatcctgttcaacaacgagtggaccaccagcgccctgcccgccttcaccaacgagttcggcgccccccccagccccgccaacttcatccagcccggcaagcagcccctgctgagcatgtgccccaccatcatggtgggccaggacggccaggtgagaatggtggtgggcgccgccggcggcacccagatcaccaccgacaccgccctggccatcatctacaacctgtggttcggctacgacgtgaagagagccgtggaggagcccagactgcacaacaagctgctgcccaacgtgaccaccgtggagagaaacatcgaccaggccgtgaccgccgccctggagaccagacaccaccacacccagatcgccagcaccttcatcgccgtggtgcaggccatcgtgagaaccgccggcggctgggccgccgccagcgacagcagaaagggcggcgagcccgccggctactag

SEQ ID NO: 324298 - protein, 569 aa, Artificial Sequence
  derived and/or modified sequence
MKKKLVVLGLLAVVLVLVIVGLCLWLPSASKEPDNHVYTRAAMAADAKQCLEIGRDTLRDGGSAVDAAIAALLCVGLMNAHSMGIGVGLFLTIYNSTTRKAEVINAREVAPRLAFASMFNSSEQSQKGGLSVAVPGEIRGYELAHQRHGRLPWARLFQPSIQLARQGFPVGKGLAAVLENKRTVIEQQPVLWYVFCRDRKVLREGERLTLPRLADTYEMLAIEGAQAFYNGSLMAQIVKDIQAAGGIVTAEDLNNYRAELIEHPLNISLGDAVLYMPSARLSGPVLALILNILKGYNFSRESVETPEQKGLTYHRIVEAFRFAYAKRTLLGDPKFVDVTEVVRNMTSEFFAAQLRSQISDHTTHPISYYKPEFYTPDDGGTAHLSVVAEDGSAVSATSTINLYFGSKVCSPVSGILFNNEWTTSALPAFTNEFGAPPSPANFIQPGKQPLLSMCLTIMVGQDGQVRMVVGAAGGTQITTDTALAIIYNLWFGYDVKRAVEEPRLHNKLLPNVTTVERNIDQAVTAALETRHHHTQIASTFIAVVQAIVRTAGGWAAASDSRKGGEPAGY

SEQ ID NO: 324299 - protein, 559 aa, Artificial Sequence
  derived and/or modified sequence
MKKKLVVLGLLAVVLVLVIVGLCLWLPSASKEPDNHVYTRAAMAADAKQCLEIGRDTLRDGGSAVDAAIAALLCVGLMNAHSMGIGVGLFLTIYNSTTRKAEVINAREVAPRLAFASMFNSSEQSQKGGLSVAVPGEIRGYELAHQRHGRLPWARLFQPSIQLARQGFPVGKGLAAVLENKRTVIEQQPVLWYVFCRDRKVLREGERLTLPRLADTYEMLAIEGAQAFYNGSLMAQIVKDIQAAGGIVTAEDLNNYRAELIEHPLNISLGDAVLYMPSARLSGPVLALILNILKGYNFSRESVETPEQKGLTYHRIVEAFRFAYAKRTLLGDPKFVDVTEVVRNMTSEFFAAQLRSQISDHTTHPISYYKPEFYTPDDGGTAHLSVVAEDGSAVSATSTINLYGILFNNEWTTSALPAFTNEFGAPPSPANFIQPGKQPLLSMCLTIMVGQDGQVRMVVGAAGGTQITTDTALAIIYNLWFGYDVKRAVEEPRLHNKLLPNVTTVERNIDQAVTAALETRHHHTQIASTFIAVVQAIVRTAGGWAAASDSRKGGEPAGY

SEQ ID NO: 324300 - DNA, 1710 bp, Artificial Sequence
  derived and/or modified sequence
atgaagaagaaattggtggtactcggtttattggccgtagtgttggttctggtgatcgtgggtctctgtctttggctgccatctgcatccaaggagcctgataatcacgtatataccagagctgctatggccgccgacgcaaagcagtgcttggaaattgggcgcgacacactgcgggacggtggcagcgccgtggatgccgccattgctgcgctgctatgtgtgggtcttatgaatgctcactccatgggaatcggagtgggactcttcctgacaatctacaatagcactactagaaaggccgaagtgattaacgcccgcgaggttgccccacgcctagctttcgcctctatgttcaattcgtctgaacaatcccaaaagggaggactgtcagtggctgtgccaggggagattcgcggttacgaactagcccatcaaaggcatgggcgcctcccctgggcgcggctgttccagccttccattcaactggcccggcagggattccccgttggcaagggcctcgctgctgttctggagaataaaagaaccgtgattgaacagcagccggtgctgtggtatgtgttctgccgcgacagaaaggttcttcgggaaggggagcgtctcaccctccccaggctggctgacacatacgagatgctcgctatcgagggtgcccaagctttttacaatggtagtcttatggcgcaaattgtgaaagacatccaagcagctggaggaattgtcacagccgaggatcttaataactaccgggcggaacttatcgagcaccccctgaacatctcactgggcgacgctgtgctctatatgccttctgcccggctaagcggccccgtgttagcgcttatattaaacatcctcaaggggtacaatttcagcagagaatcggtggagactccagagcagaaaggattgacatatcacagaatagtggaggctttccgcttcgcctatgctaaacggactctcctgggcgaccccaagtttgtcgatgtgactgaagtggtgagaaacatgaccagcgagttcttcgcagctcaactgcggagccagataagcgaccacacaacgcaccccatctcgtactataagccagagttttataccccggacgacggcggaacagctcatctctccgtggtagccgaagatggcagcgccgtttctgcaacttcaacaataaacctctactttgggtccaaagtttgcagccccgtctcaggtattctatttaacaatgagtggacaacgagcgccctgcccgccttcactaacgaattcggagctcccccctcacctgccaactttatccaacctggcaagcagccactgctctctatgtgtctcacaatcatggttggccaggacggtcaggtgaggatggtggtcggcgcggcgggcggcacacagattacaacagacaccgctctggccatcatctataatctatggtttggatatgacgtgaagagagccgtggaagagccacggctgcataataagctgcttcccaatgtcacaaccgttgagcgcaatatcgaccaagctgtaaccgctgctctcgagacacgacatcaccatactcagattgcctccactttcattgccgtcgttcaagccatcgtccgtaccgccggtggctgggccgctgccagcgactcacggaagggcggagaacctgccgggtactag

SEQ ID NO: 324301 - DNA, 1680 bp, Artificial Sequence
  derived and/or modified sequence
atgaagaaaaagctggtagttctcggactactcgctgttgtgttagtgctggttattgtggggctgtgtctgtggctgccctccgcgtccaaggaacctgataatcacgtctataccagagccgccatggcggcagatgcaaagcagtgcctggagatcggccgggataccctgagagatggggggagcgcagtggacgccgccatagcggcgcttttgtgcgtcggactgatgaatgcccactcgatgggcatcggcgtagggctgttcctaacaatttacaattccactactagaaaggccgaagttatcaatgcccgggaagttgcgcctaggctggcttttgcctcaatgttcaacagttctgagcaaagccagaaaggcggattgtctgtggccgtgccaggcgaaatcagaggctatgagttagcccatcagagacatgggcgattgccttgggcgcgcctgttccaaccctcaatccagctcgctcgacagggctttcccgtgggaaaaggcctcgctgcagtgttagagaataagcgaaccgtgatagaacagcaaccagtgctttggtatgtcttctgccgagaccgtaaggttttgcgcgaaggagagcggctcaccctgccccgactggctgacacctatgaaatgctcgctatagagggagcacaggctttttacaacggctcacttatggcacaaatcgtcaaggacattcaagccgccggagggatcgttaccgctgaggacctcaacaattatcgtgctgaacttatcgagcatcccctgaacatttccttaggcgatgcggtgctgtatatgccctctgcacggctgtctggcccagtactcgcacttatcctgaatattttgaagggttacaatttcagccgcgaatcagtggagacccctgagcagaaaggccttacttatcaccgaatcgttgaggccttccgattcgcatacgccaagcgtacattactgggcgaccctaaatttgtcgatgtaaccgaggtggtgcgcaatatgacctctgaattcttcgcagcccagctcagatcccagattagcgaccacactacccacccaatctcttactataagcccgaattttatacacccgacgatggcggaaccgctcacctgtcggtcgttgctgaggatggatctgccgtgtccgcaacgagtaccatcaacttgtacggcatactattcaataacgagtggaccacaagcgcccttcctgcctttactaatgaatttggcgccccaccttctcccgcgaactttattcagcccgggaagcagcctttgctgagcatgtgtctcaccataatggtaggccaggatggtcaggtgcggatggtagtgggagcagcaggtggaacacaaattaccacagatacagcactcgccatcatctacaacctttggttcggttatgatgtgaaacgagctgtggaggagcctagactgcataataaactattgccaaacgtgacaacagtcgaaagaaatatagatcaggcggtcaccgccgccctagaaacaagacatcatcacactcagatcgccagcacgttcattgctgttgtgcaggccattgttagaacggccggaggctgggccgccgcctccgatagcaggaaaggaggcgaaccagccggatactag

SEQ ID NO: 324302 - DNA, 1710 bp, Artificial Sequence
  derived and/or modified sequence
atgaagaagaagctcgtcgtcctgggactgctcgcggttgtactcgtgctcgtcatcgtgggcctgtgtttgtggctgccctccgcaagtaaagagccagacaatcatgtgtatacccgggctgccatggctgccgatgctaagcagtgtttggagatcgggcgcgatacgttgagagatggcgggtcggccgtcgatgctgcaatagccgccctgctctgtgtaggactcatgaacgctcacagcatgggaatcggagttggtctatttctgaccatctataactcaacaacccgcaaggcggaagttattaatgcgagagaagtcgcaccccgcctcgcctttgcgtctatgttcaattcttctgagcaatcgcagaagggcggcttgtcagtggccgttccaggggaaattagaggctacgaacttgcccaccagagacacggcaggctaccctgggcccggctgtttcagccaagcatccaactcgctcggcagggttttcccgtaggcaaagggctggctgccgtgttggagaacaagcggaccgtgattgagcaacaaccggttctgtggtatgttttttgtagggatagaaaggtactgcgagaaggagagaggctcactctgccaaggctggcggatacttacgagatgctggccatcgaaggtgcccaagcgttctataacgggagtcttatggcgcagatcgtcaaggatatacaggccgcagggggcattgtgacagctgaagatctgaataattaccgcgccgagctaattgaacatccccttaacatatcgctgggcgatgcagtgctctatatgccctcagcccggctgagcggcccagtactggcgctgatccttaacatcctaaaaggctataacttctctagagaatctgttgaaaccccagaacagaaagggctgacttatcaccgaatcgtggaggcatttaggttcgcttatgcaaagaggaccctcctcggggaccctaaatttgtggacgtaactgaagtcgtcaggaatatgacttctgaattcttcgccgcgcagctccggtcacaaatatcagaccacacgacacaccccatttcctactataaaccagagttttacacacctgacgatggagggaccgcccatctcagcgtggtggctgaggacggctctgcagttagcgcaactagtacgatcaatctttacttcggatcaaaagtgtgttccccggtgagtgggattttgtttaataacgagtggaccactagtgcactgcccgcctttaccaacgaatttggagctccccctagcccagccaacttcattcagcccggaaaacagccactactaagtatgtgcttgaccattatggttgggcaggacggacaggtccgcatggtggtgggtgctgccggcggcactcagatcacaaccgacacagctttggctattatctacaatctgtggtttgggtatgacgtcaaacgggcagtggaggaaccgagactgcataataagcttctgccgaatgttacaactgtcgaacgcaatatcgatcaggccgtcacagccgccctggagaccagacatcatcatacacagatcgcaagtacatttatagctgttgttcaggccattgtgagaaccgcaggggggtgggcggccgccagcgattctagaaagggcggggaaccagctgggtactag

SEQ ID NO: 324303 - DNA, 2366 bp, Artificial Sequence
  derived and/or modified sequence
atgctgcatattgctggcccagctcctgaggctctttggacctccaggaatcggtgtctctaccaggaacccttaaccctgacccggactcccggctgggacccggggtgttggagtggcaagagcgctgtcaggcctggtgaagggtgtgagctgtccaacagggcagggaggaggcagggcctgttctgcagttggacagacagagccctctagctgctttctggaagactgaagggcagcaaggcaagtgaggtgctgccgtcatccaggctggacagttcagtgatttgcctgaggccccacagcaggagaacgagaaggctgcctgatcagagagtctctgaagaagattctgtggctacaggcttcagcagagtgtgagggagaccccggttatttcctcagctgtttccaccaaatcctcctgtctttcgtggccaacaccccaggcaaggcttggggcccccgtctgctgctggacgcagagccatgaagaagaagttagtggtgctgggcctgctggccgtggtcctggtgctggtcattgtcggcctctgtctctggctgccctcggcctccaaggaacctgacaaccatgtgtacaccagggctgccatggccgcggatgccaagcagtgcttggagattgggagggacacactgcgggacggtggctctgcagtggatgcagccattgcagccctgttgtgtgtggggctcatgaatgcccacagcatgggcatcggggttggcctcttcctcaccatctacaacagcaccactcgaaaagctgaggtcatcaatgcccgcgaggtggcccccaggctggcctttgccagcatgttcaacagctcggagcagtcccagaagggagggctgtcggtggcggtgcctggggagatccgaggctatgagctggcacaccagcggcatgggcggctgccctgggctcgcctcttccagcccagcatccagctggcccgccagggcttccctgtgggcaagggcttggcggcagtcctggaaaacaagcggactgtcatcgagcagcagcctgtcttgtggtatgtgttctgccgggatagaaaggtgcttcgggagggggagagactgaccctgccgcggctggctgacacctatgagatgctggccatcgagggtgcccaggccttctacaacggcagcctcatggcccagattgtgaaggacatccaggcggctgggggcattgtgacagctgaggacctgaacaactaccgtgctgagctgatcgagcacccgctgaacatcagcctgggagacgcggtgctgtacatgcccagtgcgcggctcagcgggcccgtgctggccctcatcctcaacatcctcaaagggtacaacttctcccgggagagcgtggagacccccgagcagaagggcctgacgtaccaccgcatcgtagaggctttccggtttgcctacgccaagaggaccctgcttggggaccccaagtttgtggatgtgactgaggtggtccgcaacatgacctctgagttcttcgctgcccagctccggtcccagatctctgaccacaccactcacccgatctcctactacaagcccgagttctacacgccggatgacgggggcactgctcacctgtctgtcgtcgcagaggacggcagtgctgtgtccgccaccagcaccatcaacctctactttggctccaaggtctgctccccggtcagtgggatcctgttcaataatgaatggacgacttcagctctcccagcattcaccaatgagtttggggcacccccctcacctgccaatttcatccagccagggaagcagccgctcttgtccatgtgcctgacgatcatggtgggccaggacggccaggtccggatggtggtgggagctgctgggggcacgcagatcaccacagacactgcactggccatcatctacaacctctggttcggctatgacgtgaagagggccgtggaggagccccggctgcacaacaagcttctgcccaacgtcacgacagtggagagaaacattgaccaggcagtgactgcagccctggagacccggcaccatcacacccagatcgcgtccaccttcatcgctgtggtgcaagccatcgtccgcacggctggtggctgggcagctgcctcggactccaggaaaggcggggaacctgctggctactgattgctccaggcagacaaggctgacaagcaatccagggacaagatactcaccaggatgaggaagaggactttgggggacgggcttcccctgtgagcagcagagcagcataataaatgaggccactgtgccaggctccaggtggcctccctggcctgtctccccac

SEQ ID NO: 324304 - DNA, 1845 bp, Artificial Sequence
  derived and/or modified sequence
atgaagaagaagttagtggtgctgggcctgctggccgtggtcctggtgctggtcattgtcggcctctgtctctggctgccctcggcctccaaggaacctgacaaccatgtgtacaccagggctgccatggccgcggatgccaagcagtgcttggagattgggagggacacactgcgggacggtggctctgcagtggatgcagccattgcagccctgttgtgtgtggggctcatgaatgcccacagcatgggcatcggggttggcctcttcctcaccatctacaacagcaccactcgaaaagctgaggtcatcaatgcccgcgaggtggcccccaggctggcctttgccagcatgttcaacagctcggagcagtcccagaagggagggctgtcggtggcggtgcctggggagatccgaggctatgagctggcacaccagcggcatgggcggctgccctgggctcgcctcttccagcccagcatccagctggcccgccagggcttccctgtgggcaagggcttggcggcagtcctggaaaacaagcggactgtcatcgagcagcagcctgtcttgtggtatgtgttctgccgggatagaaaggtgcttcgggagggggagagactgaccctgccgcggctggctgacacctatgagatgctggccatcgagggtgcccaggccttctacaacggcagcctcatggcccagattgtgaaggacatccaggcggctgggggcattgtgacagctgaggacctgaacaactaccgtgctgagctgatcgagcacccgctgaacatcagcctgggagacgcggtgctgtacatgcccagtgcgcggctcagcgggcccgtgctggccctcatcctcaacatcctcaaagggtacaacttctcccgggagagcgtggagacccccgagcagaagggcctgacgtaccaccgcatcgtagaggctttccggtttgcctacgccaagaggaccctgcttggggaccccaagtttgtggatgtgactgaggtggtccgcaacatgacctctgagttcttcgctgcccagctccggtcccagatctctgaccacaccactcacccgatctcctactacaagcccgagttctacacgccggatgacgggggcactgctcacctgtctgtcgtcgcagaggacggcagtgctgtgtccgccaccagcaccatcaacctctatgggatcctgttcaataatgaatggacgacttcagctctcccagcattcaccaatgagtttggggcacccccctcacctgccaatttcatccagccagggaagcagccgctcttgtccatgtgcctgacgatcatggtgggccaggacggccaggtccggatggtggtgggagctgctgggggcacgcagatcaccacagacactgcactggccatcatctacaacctctggttcggctatgacgtgaagagggccgtggaggagccccggctgcacaacaagcttctgcccaacgtcacgacagtggagagaaacattgaccaggcagtgactgcagccctggagacccggcaccatcacacccagatcgcgtccaccttcatcgctgtggtgcaagccatcgtccgcacggctggtggctgggcagctgcctcggactccaggaaaggcggggaacctgctggctactgattgctccaggcagacaaggctgacaagcaatccagggacaagatactcaccaggatgaggaagaggactttgggggacgggcttcccctgtgagcagcagagcagcataataaatgaggccactgtgccaggctccaggtggcctccctggcctgtctccccact

SEQ ID NO: 324305 - DNA, 2039 bp, Artificial Sequence
  derived and/or modified sequence
tcccttgaccttcaggagaacgagaaggctgcctgatcagagagtctctgaagaagattctgtggctacaggcttcagcagagtgtgagggagaccccggttatttcctcagctgtttccaccaaatcctcctgtctttcgtggccaacaccccaggcaaggcttggggcccccgtctgctgctggacgcagagccatgaagaagaagttagtggtgctgggcctgctggccgtggtcctggtgctggtcattgtcggcctctgtctctggctgccctcggcctccaaggaacctgacaaccatgtgtacaccagggctgccatggccgcggatgccaagcagtgcttggagattgggagggacacactgcgggacggtggctctgcagtggatgcagccattgcagccctgttgtgtgtggggctcatgaatgcccacagcatgggcatcggggttggcctcttcctcaccatctacaacagcaccactcgaaaagctgaggtcatcaatgcccgcgaggtggcccccaggctggcctttgccagcatgttcaacagctcggagcagtcccagaagggagggctgtcggtggcggtgcctggggagatccgaggctatgagctggcacaccagcggcatgggcggctgccctgggctcgcctcttccagcccagcatccagctggcccgccagggcttccctgtgggcaagggcttggcggcagtcctggaaaacaagcggactgtcatcgagcagcagcctgtcttgtggtatgtgttctgccgggatagaaaggtgcttcgggagggggagagactgaccctgccgcggctggctgacacctatgagatgctggccatcgagggtgcccaggccttctacaacggcagcctcatggcccagattgtgaaggacatccaggcggctgggggcattgtgacagctgaggacctgaacaactaccgtgctgagctgatcgagcacccgctgaacatcagcctgggagacgcggtgctgtacatgcccagtgcgcggctcagcgggcccgtgctggccctcatcctcaacatcctcaaagggtacaacttctcccgggagagcgtggagacccccgagcagaagggcctgacgtaccaccgcatcgtagaggctttccggtttgcctacgccaagaggaccctgcttggggaccccaagtttgtggatgtgactgaggtggtccgcaacatgacctctgagttcttcgctgcccagctccggtcccagatctctgaccacaccactcacccgatctcctactacaagcccgagttctacacgccggatgacgggggcactgctcacctgtctgtcgtcgcagaggacggcagtgctgtgtccgccaccagcaccatcaacctctactttggctccaaggtctgctccccggtcagtgggatcctgttcaataatgaatggacgacttcagctctcccagcattcaccaatgagtttggggcacccccctcacctgccaatttcatccagccagggaagcagccgctcttgtccatgtgcctgacgatcatggtgggccaggacggccaggtccggatggtggtgggagctgctgggggcacgcagatcaccacagacactgcactggccatcatctacaacctctggttcggctatgacgtgaagagggccgtggaggagccccggctgcacaacaagcttctgcccaacgtcacgacagtggagagaaacattgaccaggcagtgactgcagccctggagacccggcaccatcacacccagatcgcgtccaccttcatcgctgtggtgcaagccatcgtccgcacggctggtggctgggcagctgcctcggactccaggaaaggcggggaacctgctggctactgattgctccaggcagacaaggctgacaagcaatccagggacaagatactcaccaggatgaggaagaggactttgggggacgggcttcccctgtgagcagcagagcagcataataaatgaggccactgtgccaggc

SEQ ID NO: 324306 - DNA, 1710 bp, Artificial Sequence
  derived and/or modified sequence
atgaagaagaagctggtggtgctgggcctgctggccgtggtgctggtgctggtgattgtgggcctgtgcctgtggctgcccagcgccagcaaggagccagacaaccacgtgtacaccagggctgccatggctgctgatgccaagcagtgcctggagatcggccgggacaccctgagagatggcggcagcgctgtggatgctgccatcgccgccctgctgtgtgtgggcctgatgaatgcccacagcatgggcattggagtgggcctcttcctgaccatctacaacagcaccaccaggaaggccgaggtgatcaatgcccgggaggtggccccccggctggcctttgcctccatgttcaacagcagcgagcagagccagaagggcggcctgtctgtggccgtgcctggagagatccggggctatgagctggcccaccagagacatggccgcctgccctgggcccggctcttccagcccagcatccagctggcccggcagggcttccctgtgggcaagggcctggccgctgtgctggagaacaagaggacagtgattgagcagcagcctgtgctgtggtacgtgttctgccgggacaggaaggtgctgcgggagggggagcggctgaccctgccccggctggccgacacctatgagatgctggccatcgagggcgcccaggccttctacaacggcagcctgatggcccagatcgtgaaggacatccaggccgccggcggcatcgtgacagctgaggacctgaacaactacagagctgagctgattgagcaccccctgaacatcagcctgggagatgctgtgctgtacatgcccagcgcccggctgagcggccctgtgctggccctgatcctgaacatcctgaagggctacaacttcagccgggagagcgtggagaccccagagcagaagggcctgacctaccaccgcatcgtggaggccttccgctttgcctatgccaagaggaccctgctgggggaccccaagtttgtggatgtgacagaggtggtgaggaacatgaccagcgagttctttgctgcccagctgcggagccagatcagtgaccacaccacccaccccatctcctactacaagccagagttctacaccccagatgatggcggcacagcccacctgtctgtggtggctgaagatggcagcgctgtgtctgccaccagcaccatcaacctgtacttcggcagcaaggtgtgcagccctgtgtctggcatcctcttcaacaatgagtggaccaccagcgccctgcctgccttcaccaatgaatttggagccccacccagccctgccaacttcatccagcccgggaagcagcccctgctgtccatgtgcctgaccatcatggtgggccaggacggccaggtgaggatggtggtgggcgccgccggcggcacccagatcaccacagacacagccctggccatcatctacaacctgtggtttggctatgatgtgaagagagctgtggaggagccccggctgcacaacaagctgctgcccaacgtgaccaccgtggagagaaatattgaccaggccgtgacagctgccctggagaccaggcaccaccacacccagatcgccagcaccttcatcgctgtggtgcaggccatcgtgaggacagctgggggctgggccgccgccagtgacagcaggaagggcggggagcctgctggctactag

SEQ ID NO: 324307 - DNA, 1680 bp, Artificial Sequence
  derived and/or modified sequence
atgaagaagaagctggtggtgctgggcctgctggccgtggtgctggtgctggtgattgtgggcctgtgcctgtggctgcccagcgccagcaaggagccagacaaccacgtgtacaccagggctgccatggctgctgatgccaagcagtgcctggagatcggccgggacaccctgagagatggcggcagcgctgtggatgctgccatcgccgccctgctgtgtgtgggcctgatgaatgcccacagcatgggcattggagtgggcctcttcctgaccatctacaacagcaccaccaggaaggccgaggtgatcaatgcccgggaggtggccccccggctggcctttgcctccatgttcaacagcagcgagcagagccagaagggcggcctgtctgtggccgtgcctggagagatccggggctatgagctggcccaccagagacatggccgcctgccctgggcccggctcttccagcccagcatccagctggcccggcagggcttccctgtgggcaagggcctggccgctgtgctggagaacaagaggacagtgattgagcagcagcctgtgctgtggtacgtgttctgccgggacaggaaggtgctgcgggagggggagcggctgaccctgccccggctggccgacacctatgagatgctggccatcgagggcgcccaggccttctacaacggcagcctgatggcccagatcgtgaaggacatccaggccgccggcggcatcgtgacagctgaggacctgaacaactacagagctgagctgattgagcaccccctgaacatcagcctgggagatgctgtgctgtacatgcccagcgcccggctgagcggccctgtgctggccctgatcctgaacatcctgaagggctacaacttcagccgggagagcgtggagaccccagagcagaagggcctgacctaccaccgcatcgtggaggccttccgctttgcctatgccaagaggaccctgctgggggaccccaagtttgtggatgtgacagaggtggtgaggaacatgaccagcgagttctttgctgcccagctgcggagccagatcagtgaccacaccacccaccccatctcctactacaagccagagttctacaccccagatgatggcggcacagcccacctgtctgtggtggctgaagatggcagcgctgtgtctgccaccagcaccatcaacctgtatggcatcctcttcaacaatgagtggaccaccagcgccctgcctgccttcaccaatgaatttggagccccacccagccctgccaacttcatccagcccgggaagcagcccctgctgtccatgtgcctgaccatcatggtgggccaggacggccaggtgaggatggtggtgggcgccgccggcggcacccagatcaccacagacacagccctggccatcatctacaacctgtggtttggctatgatgtgaagagagctgtggaggagccccggctgcacaacaagctgctgcccaacgtgaccaccgtggagagaaatattgaccaggccgtgacagctgccctggagaccaggcaccaccacacccagatcgccagcaccttcatcgctgtggtgcaggccatcgtgaggacagctgggggctgggccgccgccagtgacagcaggaagggcggggagcctgctggctactag

SEQ ID NO: 324308 - DNA, 1710 bp, Artificial Sequence
  derived and/or modified sequence
atgaagaagaagctggtggtgctgggcctgctggccgtggtgctggtgctggtgatagtaggcctttgtttgtggctgccgtcggcatctaaggagcctgataaccacgtgtataccagagcagccatggctgctgatgcgaagcaatgcctggagattggacgggacactctgagggacggcggaagcgccgtggacgcggctatagcggcccttctgtgtgttggtctcatgaacgcccatagtatgggcattggagtcggtttattcctcactatatataatagcacaaccaggaaggcagaggtcattaacgccagggaagtcgctccaaggctcgcgtttgcctctatgtttaattcctccgagcagtcacaaaagggtggacttagcgtagctgtaccaggagaaattcggggctacgagcttgcacaccagcgacacggacgccttccttgggcccgcctcttccagcctagcatacagcttgcaaggcagggttttcctgtgggaaaggggctagcagccgtcctggaaaacaaacgtacggtgatcgaacagcagcctgttctgtggtatgtcttttgcagagatcggaaagttctgagagaaggggagcgactgacacttcccaggctagcggacacatacgaaatgttagccattgagggagcccaggcgttctataatggctctcttatggctcagattgtcaaagacatccaagccgcaggcggcattgtgaccgccgaggacctgaacaattatcgggcggagcttattgaacatcctttgaatatttcactgggggacgccgtcctgtatatgccctcagccaggctttcaggtcctgttctggccctcattctcaacattctaaagggttacaacttcagcagagaaagcgttgagacccctgaacagaagggtctaacataccatagaattgtggaagcctttcgcttcgcatacgctaaaagaacactactgggggaccctaagtttgtggatgtaaccgaggtggtcaggaacatgacttcagagttcttcgctgcccagctgagaagccagatcagtgaccacacaactcatcctattagctattacaaacctgagttctacacaccagacgacggaggtaccgctcacctgtctgttgtggcagaggatggatctgctgtgtcggccacatccacgatcaacctctacttcggaagcaaagtgtgttctcccgtgagcggcattttgttcaacaacgagtggactacatccgcccttccagcattcaccaatgagttcggcgcaccaccttctcctgctaacttcattcaaccgggcaagcagcctctgttatccatgtgcctcacaattatggtcggccaggacgggcaggttcgcatggtcgttggggccgctggggggacacagataaccacagatactgccctcgccataatttataatctctggttcggttacgacgtgaaacgggcagtggaagaaccccgtctgcataacaaacttctccccaatgtcaccacagttgagcgcaacatcgaccaggctgttactgccgcgttggagactcgacaccaccatacacagatcgcttcaacctttatcgcggtggtgcaggcaattgttcgcactgcaggcggatgggcagcggccagtgattcccggaagggtggcgaacctgcaggctactag

SEQ ID NO: 324309 - DNA, 1680 bp, Artificial Sequence
  derived and/or modified sequence
atgaagaagaagctggtggtgctgggcctgctggccgtggtgctggtccttgtgatcgtagggctctgtttgtggctgccatcagctagcaaggaacctgacaaccatgtgtacacacgggcagccatggctgcagacgccaagcagtgcctcgagatcggacgtgatactctccgagacggagggtccgctgtcgacgccgctattgcggccctactgtgtgttggcttgatgaatgcacatagtatgggcattggggtagggttgtttctgacgatttacaatagcaccacgcgaaaggcggaagtgattaacgcccgcgaggtggctcccagactggctttcgccagcatgttcaattcctccgaacagagccagaagggcggcctcagtgtggctgtacctggagagattagaggctacgaactggcacatcagcggcacggaaggttgccgtgggcaagactattccaaccctccattcagcttgccaggcagggttttccagtgggaaaagggttggctgcagtgctggaaaacaagcgaacagttatcgaacagcagcctgtcttgtggtatgtcttttgccgcgatcggaaagtgctcagggaaggagaacgacttaccttaccacgactggctgatacctatgaaatgctagccattgagggagcacaggccttctacaacgggagcctgatggcccagatcgtgaaggacattcaagccgccggaggtatcgtgactgcagaagatctcaataattatcgagccgagttaatcgaacatccgttaaacatcagcctgggggacgcagttctgtacatgccatccgctcgcttatccggtcctgtgcttgctctgatcctcaatatattgaaggggtataatttcagccgcgagagcgtggagacgccagaacagaagggacttacttatcatagaatcgttgaggccttcaggtttgcatacgcaaagcggacccttctcggcgatcccaagttcgttgatgtaacagaagtggtccggaacatgaccagcgaattttttgctgcccagcttcgcagtcagatctctgaccatactacacaccccatctcttattacaagccagagttctatactcctgatgacggtggcaccgcccatttgtctgtggtggccgaggacgggtctgctgtctctgcgaccagtaccattaacctctacggcatactcttcaacaacgaatggactactagcgctttacccgcatttactaatgagttcggtgctccccccagcccagcaaatttcatccaaccaggtaaacaacccctgctttccatgtgtctgactatcatggtgggccaagacggacaggttagaatggttgtgggggcagctgggggtacgcagataaccacagacacagcactggcgattatttataacttatggttcggctacgatgtgaaaagagcagtggaagaaccaaggctccataacaaattgctgcctaacgtgaccacggtcgagcgaaatatcgatcaggcagtcactgccgcacttgagacaagacaccatcacacccaaattgccagcacttttattgccgtcgtacaggctatagtgcgtaccgccggcggctgggctgccgcctcagacagccgcaaaggcggtgaaccggcagggtactag

SEQ ID NO: 324310 - DNA, 1710 bp, Artificial Sequence
  derived and/or modified sequence
atgaagaagaagctggtggtgctgggcctgctggccgtggtgctggtcttggtcatcgtcgggttgtgtctgtggctgccttccgctagcaaagagccagataaccacgtctacacacgtgcagcaatggcagctgatgccaagcagtgcttagagatcgggagggatacacttagagatggcggaagtgccgtggacgccgcaatcgctgctttgctgtgtgtgggtctcatgaacgcacattctatgggcataggagttggcctatttctgactatttacaactcaaccactaggaaggcggaagtgattaacgcccgggaagtcgccccacggctcgccttcgctagtatgttcaactcttccgagcagagccaaaagggcgggctgagtgtggcggtgcctggcgagatccgtgggtacgagttagcccatcagcgtcacggccgcctcccatgggcgaggcttttccaaccatctatccaattggcgagacaagggttcccggttggaaagggactggccgccgtacttgagaacaagaggacagtaatcgagcagcagcctgttctctggtacgttttctgccgcgataggaaggttctcagggagggggagcggttgacactgcctcgtctcgcggacacatatgagatgctggcaatcgaaggggcacaggcattttacaacgggtcacttatggcccagatagtgaaggacattcaagctgctgggggtattgtgactgctgaagacctgaacaattaccgggccgaattgattgagcacccactaaacataagtctcggagatgccgtattgtacatgccttccgcaagattgtcagggcctgtgctggccctgatcctcaatattttaaaggggtacaacttttccagggaaagtgttgagacaccggaacagaagggattgacataccataggatcgtggaggcttttaggtttgcgtacgccaagcggacccttcttggtgatccaaaattcgtcgacgtcactgaagttgtgaggaatatgacttctgaattctttgccgcccagttacgctctcagatctctgatcacaccacccacccaatctcttactacaagcctgaattctacacccccgatgatggcggtacggcacacctgtccgtcgtggcagaggatggtagtgcagtctctgcaacttctactataaacctctatttcggttctaaagtttgttcccctgtgagtggtattctctttaacaatgaatggacaacttctgcgctccccgccttcaccaatgaatttggtgcccctccgagccccgccaattttattcagccagggaaacagcccctgctctcgatgtgcctcaccattatggtgggacaggacgggcaggttagaatggtagttggggccgccggcggtactcagattacaacagacacagcgcttgctattatatataacctgtggtttggatacgacgtgaaaagggcagttgaggagccccgtctgcacaataagctgctgccaaatgttactactgtggagaggaatattgaccaagccgtgaccgccgccctggaaactagacaccaccacacgcagattgcttcaaccttcatcgcggtggtccaggctatcgtgcgcaccgccggaggctgggcagcggcttccgatagtcggaaagggggcgaaccagccggatattag

SEQ ID NO: 324311 - DNA, 1710 bp, Artificial Sequence
  derived and/or modified sequence
atgaagaagaagctggtggtgcttggcttgctggctgtcgttttggtcttagtgatagtggggctgtgtctgtggctgcccagcgcctcaaaggaaccagacaatcacgtgtacaccagggcagccatggcggctgatgccaaacagtgcctggagattggacgggacaccctgcgggatggtggaagcgctgtggatgcggcaattgccgcactcctgtgcgtaggcttgatgaacgcacattctatgggtatcggggttggactcttcttaacgatttacaactccaccacccgcaaggccgaagtaattaatgcacgggaagtagcgccacgcctggcattcgcctcaatgtttaacagtagcgagcaatcacaaaaggggggtttaagcgttgctgttccgggagaaatccggggttacgaattagcccaccagcgacatggcagactgccgtgggctcggcttttccagccctccatccagctcgcacgccaagggttccccgtgggaaaggggctcgcggcagtgttggaaaacaaaaggactgttatagaacagcaaccggtgctgtggtatgtgttttgcagagatcggaaagtactccgcgagggagaaagactcacactgcccagactggctgacacttatgagatgcttgctatcgagggcgctcaggcattctataatgggagtctgatggcgcagattgtaaaagacatacaggcggctggaggcatcgtcactgccgaggacctaaacaactatcgcgctgagcttatcgaacaccccctcaacatctctctaggcgacgctgtcctctatatgccctccgccaggctgagcggcccagtgctagcgctcatcctgaacatccttaagggctataatttttctagggaatctgtggagactccagagcagaaaggattaacctatcacagaatcgtcgaggcatttagatttgcctatgcaaagaggacactgctaggtgacccgaagtttgtggatgtcaccgaagttgtcagaaatatgacgagtgagttctttgccgctcaactccgctcccagattagtgatcatacgactcatccaatcagctactataaaccggagttttatacacccgatgatggcggaaccgcacacttgtctgtagtggccgaggacgggtcggcagtttcagcgacaagcacaatcaacttatattttggttctaaggtttgctcccctgtgtcagggatactgtttaacaacgaatggactacctccgcactgccagcctttacaaatgagttcggagcccctccatcacccgctaactttattcagcccggtaaacagccactgctgtccatgtgcctcactattatggttgggcaggatggacaggtgaggatggtagtaggagccgctggcggtacccagataaccacagataccgccttagccattatttataatctctggtttggttacgatgtaaagcgcgctgtcgaggaaccgcgactgcacaacaagctgctgccaaacgtgaccactgtcgagcggaatattgaccaggctgtgaccgctgcgctagaaacccggcatcatcacacccagatcgcgtctacattcatcgctgtagttcaagcaatcgtccgcacagcaggaggatgggcagcagcaagcgattcacgcaaggggggagagccagctgggtattag

SEQ ID NO: 324312 - DNA, 1680 bp, Artificial Sequence
  derived and/or modified sequence
atgaagaagaagctggttgtgctaggcctgctagcggtcgtgctagttctagtgatcgtcggcctgtgtttatggctgccgagcgcctcaaaagagcccgacaaccacgtttacactcgagcagccatggctgctgatgccaagcagtgcctggagataggcagagacactctgagggatgggggatcagctgttgatgctgcgattgctgccctgttatgcgtcggcctgatgaacgctcatagcatgggcattggagtcgggttatttctgacgatttataacagtactactcgaaaggccgaagtaatcaacgccagggaagtggccccacggttagcgttcgcttcaatgttcaattcctctgaacagtctcagaagggcggtctttctgtagcagtgcctggcgagataagagggtacgagctggctcatcagcgccatgggagactgccatgggccagactgttccagcctagcatccagttggccaggcagggattccctgtgggcaaaggactcgcagcagttttagagaataagaggacagtgatagaacaacagcccgtactatggtatgtgttctgccgggaccgcaaagtcctccgggaaggggaacggctcactctcccaaggctggccgacacttatgagatgctggctatagaaggcgctcaagccttttataacggatccctcatggcccagatcgtaaaggacatccaggccgctggtggtatagtcaccgccgaagacctgaacaactatagggccgagctgattgaacacccacttaacatttccctgggggacgcggtcttatacatgcccagcgctagactgtccggtcccgtgcttgccctgatactcaacattctgaaaggctacaacttctcacgcgagtcagttgagaccccagagcagaaagggctgacctaccacagaatcgtggaagctttcaggttcgcctatgccaaacgcacattgttgggcgaccccaagttcgtcgacgtgactgaagtagtgaggaacatgacttccgaattctttgcagcacaactccgcagccagatctcagatcacacaacccaccccatatcatactataaacccgagttttatacgccagacgacggtggtactgcccacctgtctgtagtggccgaagacgggtcagcagtgagtgccacttccacaataaatctgtacggtattctctttaataatgagtggacaacctccgctctgcctgcattcaccaatgagttcggggctccgcctagtcccgctaattttatccagcctgggaaacagcccttgctgtcaatgtgtttaacaatcatggttgggcaggatggccaggtccgcatggtggttggcgcagcaggaggaacgcagattacaaccgataccgctctagccatcatctataacctgtggttcggatacgacgtgaaacgggctgtcgaggagcctaggctacacaacaagcttttacccaacgtgacgaccgtggaaagaaatattgaccaggcggtgacagctgccctggagacacgccaccaccacacccagattgcgagtacttttatcgccgtcgtgcaggctattgtgaggaccgccggtggttgggccgctgcgtcagactcacgcaagggaggggagcccgcaggctattag

SEQ ID NO: 324313 - DNA, 1710 bp, Artificial Sequence
  derived and/or modified sequence
atgaagaagaagctggtcgttctgggtctgctggctgtggtcttggtgctggttatcgtgggactgtgcctgtggctgccgtcggcatctaaggaacccgataaccacgtctacacgcgggctgcgatggctgccgacgccaaacagtgtcttgaaatcgggcgagatactctgcgggacggaggaagtgctgtggatgcagctattgccgcactcctgtgtgttggcctgatgaatgctcattctatgggtatcggcgtaggcctattcctgacaatctacaactctacaactagaaaagccgaggtgatcaacgctagggaagtcgccccaaggctggcgttcgcttccatgtttaattctagcgagcagagccagaaaggcggtctttcagtggctgttcccggagaaatccgcggatatgaacttgcgcaccagaggcacggcaggctcccatgggcgagactgtttcaaccctcgatccaacttgctcggcagggttttcctgtaggcaagggactggcggctgtgcttgagaacaaaagaacggtcatcgagcagcagccagtgctctggtatgtgttttgcagggatagaaaggtgctccgggagggggagcgacttactctcccccgactggctgacacctatgagatgttggccatcgagggcgcacaggctttctataatggctccttgatggcccagatcgtgaaagacatccaggccgctggaggcatagtgaccgccgaagaccttaacaactatcgtgctgaactgatagagcatcccttaaacattagcctgggagatgccgttctttacatgccctcagcacggttatcaggtccagtgctcgcgctgatccttaacatccttaaaggctacaatttcagcagggagtccgtcgagacaccagagcagaagggtcttacctaccaccgcattgttgaagccttcagattcgcgtacgctaagcggacactcttgggagacccaaaatttgttgacgtgactgaagttgtaaggaatatgaccagcgaattctttgcagcgcagcttaggagccagataagcgaccatacaacccatcctattagctattataagcccgagttttacacccctgatgacggtggcaccgcccatctgtcggttgtggcagaggatgggtccgctgtcagcgccacttccaccatcaacctgtattttggaagcaaggtttgcagtcccgtcagtggaatcctttttaacaatgagtggaccaccagcgccctgcccgcattcacgaacgaatttggagctcccccatcccctgcaaatttcattcagcctggcaagcagcctctgctgtctatgtgcttgactattatggtaggccaagacggccaggtacggatggttgtgggggctgccggaggcactcagataactactgacactgccctcgctattatttataacctttggttcggctacgatgtgaagcgcgctgtcgaggaaccgcgtctgcacaacaagctgttaccaaacgtgacaactgtggaacgcaatatcgaccaagccgtaaccgcagctctcgaaacacggcaccaccacacccagatagcttctactttcattgccgtcgtgcaggcaattgttagaactgctgggggatgggccgcagcttctgactcgagaaagggcggtgaaccggcaggatactag

SEQ ID NO: 324314 - DNA, 1710 bp, Artificial Sequence
  derived and/or modified sequence
atgaagaagaagctggtggtgctgggcctgctggccgtggtgctggtgctggtgatcgtgggcctgtgcctgtggctgcccagcgccagcaaggagcccgacaaccacgtgtacaccagagccgccatggccgccgacgccaagcagtgcctggagatcggcagagacaccctgagagacggcggcagcgccgtggacgccgccatcgccgccctgctgtgcgtgggcctgatgaacgcccacagcatgggcatcggcgtgggcctgttcctgaccatctacaacagcaccaccagaaaggccgaggtgatcaacgccagagaggtggcccccagactggccttcgccagcatgttcaacagcagcgagcagagccagaagggcggcctgagcgtggccgtgcccggcgagatcagaggctacgagctggcccaccagagacacggcagactgccctgggccagactgttccagcccagcatccagctggccagacagggcttccccgtgggcaagggcctggccgccgtgctggagaacaagagaaccgtgatcgagcagcagcccgtgctgtggtacgtgttctgcagagacagaaaggtgctgagagagggcgagagactgaccctgcccagactggccgacacctacgagatgctggccatcgagggcgcccaggccttctacaacggcagcctgatggcccagatcgtgaaggacatccaggccgccggcggcatcgtgaccgccgaggacctgaacaactacagagccgagctgatcgagcaccccctgaacatcagcctgggcgacgccgtgctgtacatgcccagcgccagactgagcggccccgtgctggccctgatcctgaacatcctgaagggctacaacttcagcagagagagcgtggagacccccgagcagaagggcctgacctaccacagaatcgtggaggccttcagattcgcctacgccaagagaaccctgctgggcgaccccaagttcgtggacgtgaccgaggtggtgagaaacatgaccagcgagttcttcgccgcccagctgagaagccagatcagcgaccacaccacccaccccatcagctactacaagcccgagttctacacccccgacgacggcggcaccgcccacctgagcgtggtggccgaggacggcagcgccgtgagcgccaccagcaccatcaacctgtacttcggcagcaaggtgtgcagccccgtgagcggcatcctgttcaacaacgagtggaccaccagcgccctgcccgccttcaccaacgagttcggcgccccccccagccccgccaacttcatccagcccggcaagcagcccctgctgagcatgtgcctgaccatcatggtgggccaggacggccaggtgagaatggtggtgggcgccgccggcggcacccagatcaccaccgacaccgccctggccatcatctacaacctgtggttcggctacgacgtgaagagagccgtggaggagcccagactgcacaacaagctgctgcccaacgtgaccaccgtggagagaaacatcgaccaggccgtgaccgccgccctggagaccagacaccaccacacccagatcgccagcaccttcatcgccgtggtgcaggccatcgtgagaaccgccggcggctgggccgccgccagcgacagcagaaagggcggcgagcccgccggctactag

SEQ ID NO: 324315 - DNA, 1680 bp, Artificial Sequence
  derived and/or modified sequence
atgaagaagaagctggtggtgctgggcctgctggccgtggtgctggtgctggtgatcgtgggcctgtgcctgtggctgcccagcgccagcaaggagcccgacaaccacgtgtacaccagagccgccatggccgccgacgccaagcagtgcctggagatcggcagagacaccctgagagacggcggcagcgccgtggacgccgccatcgccgccctgctgtgcgtgggcctgatgaacgcccacagcatgggcatcggcgtgggcctgttcctgaccatctacaacagcaccaccagaaaggccgaggtgatcaacgccagagaggtggcccccagactggccttcgccagcatgttcaacagcagcgagcagagccagaagggcggcctgagcgtggccgtgcccggcgagatcagaggctacgagctggcccaccagagacacggcagactgccctgggccagactgttccagcccagcatccagctggccagacagggcttccccgtgggcaagggcctggccgccgtgctggagaacaagagaaccgtgatcgagcagcagcccgtgctgtggtacgtgttctgcagagacagaaaggtgctgagagagggcgagagactgaccctgcccagactggccgacacctacgagatgctggccatcgagggcgcccaggccttctacaacggcagcctgatggcccagatcgtgaaggacatccaggccgccggcggcatcgtgaccgccgaggacctgaacaactacagagccgagctgatcgagcaccccctgaacatcagcctgggcgacgccgtgctgtacatgcccagcgccagactgagcggccccgtgctggccctgatcctgaacatcctgaagggctacaacttcagcagagagagcgtggagacccccgagcagaagggcctgacctaccacagaatcgtggaggccttcagattcgcctacgccaagagaaccctgctgggcgaccccaagttcgtggacgtgaccgaggtggtgagaaacatgaccagcgagttcttcgccgcccagctgagaagccagatcagcgaccacaccacccaccccatcagctactacaagcccgagttctacacccccgacgacggcggcaccgcccacctgagcgtggtggccgaggacggcagcgccgtgagcgccaccagcaccatcaacctgtacggcatcctgttcaacaacgagtggaccaccagcgccctgcccgccttcaccaacgagttcggcgccccccccagccccgccaacttcatccagcccggcaagcagcccctgctgagcatgtgcctgaccatcatggtgggccaggacggccaggtgagaatggtggtgggcgccgccggcggcacccagatcaccaccgacaccgccctggccatcatctacaacctgtggttcggctacgacgtgaagagagccgtggaggagcccagactgcacaacaagctgctgcccaacgtgaccaccgtggagagaaacatcgaccaggccgtgaccgccgccctggagaccagacaccaccacacccagatcgccagcaccttcatcgccgtggtgcaggccatcgtgagaaccgccggcggctgggccgccgccagcgacagcagaaagggcggcgagcccgccggctactag

SEQ ID NO: 324316 - protein, 223 aa, Artificial Sequence
  derived and/or modified sequence
MTQEPFREELAYDRMPTLERGRQDPASYAPDAKPSDLQLSKRLPPCFSHKTWVFSVLMGCIPSAIVSFTVSRRNANVIPNFQILFVSTFAVTTTCLIWFGCKLVLNPSAININFNLILLLLLELLMAATVIIAARSSEEDCKKKKGSMSDSANILDEVPFPARVLKSYSVVEVIAGISAVLGGIIALNVDDSVSGPHLSVTFFWILVACFPSAIASHVAAECP

SEQ ID NO: 324317 - DNA, 672 bp, Artificial Sequence
  derived and/or modified sequence
atgacccaagagccgttccgcgaagagttggcgtacgaccggatgcctaccctggaaagaggtcgacaggatcctgccagttatgcaccagacgccaagccgagcgacctccagctatcaaaaaggctgcccccgtgcttcagccataaaacgtgggttttcagcgtgctcatgggatgcattccttccgccatcgtgagtttcaccgtgtcacggcgcaatgcaaacgtaattccaaattttcagattctctttgtgtccacctttgccgtgaccacgacttgtctgatctggttcgggtgtaagcttgtcctgaacccgtctgcaatcaatataaacttcaacctcattctgctgttgctgctggagttgcttatggctgcaacggtcataatagcagcacgaagcagtgaagaggattgtaaaaagaaaaaagggtcgatgagcgacagcgccaacattctcgacgaagtgcctttcccagccagagtactgaagagttatagcgtggtcgaggtgatcgccggaatttccgctgtgttaggtggcatcatcgccttgaatgtggatgattccgtgagtgggccacatctttccgtgacgttcttctggattctggttgcctgctttccatccgccatagcatcccatgttgctgccgaatgtccttag

SEQ ID NO: 324318 - DNA, 672 bp, Artificial Sequence
  derived and/or modified sequence
atgacccaggagcccttccgggaggagctggcctatgacaggatgcccaccctggagcggggccggcaggaccctgccagctatgccccagatgccaagcccagcgacctgcagctgagcaagaggctgcccccctgcttcagccacaagacctgggtgttttctgtgctgatgggctgcatccccagcgccatcgtgtccttcaccgtgtccagaagaaatgccaacgtcatccccaacttccagatcctgtttgtgtccacctttgctgtgaccaccacctgcctgatctggtttggctgcaagctggtgctgaaccccagcgccatcaacatcaacttcaacctgatcctgctgctgctgctggagctgctgatggccgccaccgtcatcatcgccgcccggagcagcgaggaggactgcaagaagaagaagggctccatgtctgattctgccaacatcctggatgaggtgcccttccctgcccgggtgctgaagagctacagcgtggtggaggtgattgctggcatctctgctgtgctgggcggcatcatcgccctgaatgtggatgacagcgtgtctggcccccacctgtctgtgaccttcttctggatcctggtggcctgcttccccagcgccatcgccagccacgtggccgcagaatgtccctag

SEQ ID NO: 324319 - DNA, 758 bp, Artificial Sequence
  derived and/or modified sequence
agtgctcccaacggcagagcagcgggggagataaagaactggtgacacgtggctgtacattcagcacagctgtggtgtccccaagtgccatgacccaggagccattcagagaggagctggcctatgaccggatgcccacgctggagcggggccggcaagaccccgccagctatgccccagacgcgaagccgagcgacctgcagctgtcgaagagactgcccccctgcttcagccacaagacgtgggtcttctctgtgctgatggggtgcatcccctcggcaattgtgagcttcaccgtctccaggaggaacgccaatgtgattcccaactttcagatattgtttgtttccacgtttgctgtgaccactacgtgtttaatttggtttggatgcaaactagtcctgaacccatcagcaataaacatcaacttcaacctcatcctgctgctcctgctggagctgctcatggcggccacggtgatcatcgctgcacggtccagcgaggaggactgcaagaaaaagaagggctccatgtctgacagcgccaacattctggacgaagtgccatttcctgctcgggtcctgaaatcttactcagtcgtcgaggtaatcgcaggcatctctgccgtcctcggggggatcattgccctgaacgtggatgactcagtttcaggcccacacctctcagtgacgttcttttggatcctagtggcctgctttccaagtgccattgccagtcatgtggcagcagagtgtccc

SEQ ID NO: 324320 - DNA, 672 bp, Artificial Sequence
  derived and/or modified sequence
atgacccaggagcccttccgggaggagctggcctacgaccggatgccaactcttgaacgaggaagacaggatcctgccagctacgcccccgatgccaaaccaagtgatcttcagctgtccaagagattaccaccatgcttttcacacaagacctgggtcttcagtgtgttaatgggttgcatccctagtgcaatagtgagctttaccgtatccaggcgcaacgccaacgtaatcccaaatttccagattctgtttgtgtctaccttcgcggtcacaaccacctgtctaatttggttcggctgcaagcttgtactgaatcctagcgcgattaatatcaattttaacctcatcttgttgcttcttctcgagctgctgatggcagcgactgtgattatcgccgcgcgtagtagcgaggaggactgtaaaaagaaaaaggggtccatgagtgatagcgccaacattctggacgaggtcccgttcccagctagggtattaaaaagttacagcgttgttgaagtgattgctggtattagcgcagtgttgggcgggatcatcgcgctgaacgtcgatgattccgtcagtgggccccacctgtctgttacctttttttggattctggtggcatgcttcccatcggcaattgcttctcacgtcgccgctgaatgtccgtag

SEQ ID NO: 324321 - DNA, 672 bp, Artificial Sequence
  derived and/or modified sequence
atgactcaagaacccttccgggaagagctcgcgtacgaccggatgccgacactcgagcgaggccgtcaggaccccgcttcttatgctcccgacgccaaaccaagcgacttacagctctccaagaggctgccaccctgtttttcccataagacatgggtgtttagcgtccttatggggtgcatcccttctgctatcgtgagctttaccgtgtcaaggagaaatgctaatgtgattccaaactttcagatcctttttgtgtctaccttcgcagtgacgacaacttgcctaatatggtttggatgtaagctcgtactgaatcccagtgctatcaatataaattttaacctgatactgttgctgcttctggaattgctgatggcagccacagtcataattgcagcgaggtcttcggaggaggattgcaagaaaaagaagggtagtatgagcgattccgcaaatatccttgacgaagtcccctttccagcgcgtgtgcttaagtcctatagtgtggtggaggtgatcgccggtatctccgccgtgctaggcggaattatcgccctaaacgtggacgactccgtctctggaccgcatctctctgttacctttttctggatcctggtagcctgctttcccagcgccatcgcctcccatgtcgccgctgaatgtccttag

SEQ ID NO: 324322 - DNA, 672 bp, Artificial Sequence
  derived and/or modified sequence
atgacccaggagcccttcagagaggagctggcctacgacagaatgcccaccctggagagaggcagacaggaccccgccagctacgcccccgacgccaagcccagcgacctgcagctgagcaagagactgcccccctgcttcagccacaagacctgggtgttcagcgtgctgatgggctgcatccccagcgccatcgtgagcttcaccgtgagcagaagaaacgccaacgtgatccccaacttccagatcctgttcgtgagcaccttcgccgtgaccaccacctgcctgatctggttcggctgcaagctggtgctgaaccccagcgccatcaacatcaacttcaacctgatcctgctgctgctgctggagctgctgatggccgccaccgtgatcatcgccgccagaagcagcgaggaggactgcaagaagaagaagggcagcatgagcgacagcgccaacatcctggacgaggtgcccttccccgccagagtgctgaagagctacagcgtggtggaggtgatcgccggcatcagcgccgtgctgggcggcatcatcgccctgaacgtggacgacagcgtgagcggcccccacctgagcgtgaccttcttctggatcctggtggcctgcttccccagcgccatcgccagccacgtggccgccgagtgcccctag

SEQ ID NO: 324323 - protein, 598 aa, Artificial Sequence
  derived and/or modified sequence
MLPDFPSPSTWAPGLLLPSGPALLSPSVLQDSLSLGRSEQPHPICSFQDDFQEFEMIDDNEEEDDEDEEEEEEEEEGDGEGQEGGDPGSEAPAPGPLIPSPSVEEPHKHRPTTLRLTTLGAQDSQDPEAAAGPGGVELVDMETLNPTRDTITPLWAAPGRAARPGRACSAACSEEEDEEDDEEEEDAEDSAGSPGGRGTGPSAPRDASLVYDAVKYTLVVDEHTQLELVSLRRCAGLGHDSEEDSGGEASEEEAGAALLGGGQVSGDTSPDSPDLTFSKKFLNVFVNSTSRSSSTESFGLFSCLVNGEEREQTHRAVFRFIPRHPDELELDVDDPVLVEAEEDDFWFRGFNMRTGERGVFPAFYAHAVPGPAKDLLGSKRSPCWVERFDVQFLGSVEVPCHQGNGILCAAMQKIATARKLTVHLRPPASCDLEISLRGVKLSLSGGGPEFQRCSHFFQMKNISFCGCHPRNSCEAPQGAAFQWERGVDRKRVLQTRGNVQPHLGAGQGAALNRATEGSSTGSEKGEWTPLVIMELTQSVNSCYFGFITKHPLLSRFACHVFVSQESMRPVAQSVGRAFLEYYQEHLAYACPTEDIYLE

SEQ ID NO: 324324 - protein, 444 aa, Artificial Sequence
  derived and/or modified sequence
MADRAEMFSLSTFHSLSPPGCRPPQDISLEEFDDEDLSEITDDCGLGLSYDSDHCEKDSLSLGRSEQPHPICSFQDDFQEFEMIDDNEEEEDEEDDEEEEDAEDSAGSPGGRGTGPSAPRDASLVYDAVKYTLVVDEHTQLELVSLRRCAGLGHDSEEDSGGEASEEEAGAALLGGGQVSGDTSPDSPDLTFSKKFLNVFVNSTSRSSSTESFGLFSCLVNGEEREQTHRAVFRFIPRHPDELELDVDDPVLVEAEEDDFWFRGFNMRTGERGVFPAFYAHAVPGPAKDLLGSKRSPCWVERFDVQFLGSVEVPCHQGNGILCAAMQKIATARKLTVHLRPPASCDLEISLRGVKLSLSGGGPEFQRCSHFFQMKNISFCGCHPRNSCYFGFITKHPLLSRFACHVFVSQESMRPVAQSVGRAFLEYYQEHLAYACPTEDIYLE

SEQ ID NO: 324325 - protein, 558 aa, Artificial Sequence
  derived and/or modified sequence
MISSISETELELSSDGGSSSSGRSSHLTNSIEEASSPASEPEPPREPPRRPAFLPVGPDDTNSEYESGSESEPDLSEDADSPWLLSNLVSRMISEGSSPIRCPGQCLSPAPRPPGEPVSPAGGAAQDSQDPEAAAGPGGVELVDMETLCAPPPPAPAAPRPGPAQPGPCLFLSNPTRDTITPLWAAPGRAARPGRACSAACSEEEDEEDDEEEEDAEDSAGSPGGRGTGPSAPRDASLVYDAVKYTLVVDEHTQLELVSLRRCAGLGHDSEEDSGGEASEEEAGAALLGGGQVSGDTSPDSPDLTFSKKFLNVFVNSTSRSSSTESFGLFSCLVNGEEREQTHRAVFRFIPRHPDELELDVDDPVLVEAEEDDFWFRGFNMRTGERGVFPAFYAHAVPGPAKDLLGSKRSPCWVERFDVQFLGSVEVPCHQGNGILCAAMQKIATARKLTVHLRPPASCDLEISLRGVKLSLSGGGPEFQRCSHFFQMKNISFCGCHPRNSCYFGFITKHPLLSRFACHVFVSQESMRPVAQSVGRAFLEYYQEHLAYACPTEDIYLE

SEQ ID NO: 324326 - DNA, 1797 bp, Artificial Sequence
  derived and/or modified sequence
atgttacccgattttccaagtccatccacttgggcacctgggttgcttcttcccagtggcccggccctattaagccctagcgtgcttcaggactctctctcattgggccggtccgaacagccacacccaatatgtagctttcaggacgactttcaagaattcgagatgattgatgataacgaagaggaggacgatgaagacgaggaagaagaggaggaggaggaggaaggtgatggtgagggtcaagagggcggagatcccgggtctgaggccccagcacccggcccccttatcccgagcccgagcgtggaagaaccacacaaacaccggcctactacactgcgcttaaccaccctcggagctcaggactcccaggaccctgaggcagcagccggccctgggggggtggaactcgtcgatatggaaaccttgaatcccacccgggatactatcaccccattgtgggcagcaccaggtcgggccgctcgaccaggcagggcgtgttctgccgcatgcagtgaggaagaggatgaggaagatgacgaggaggaagaggatgcagaagactcggccggatctcccgggggccgcggcactgggccctcggcccctcgtgatgcctcccttgtatatgacgcagttaagtacacactggtggtcgacgagcatacgcaacttgaacttgtgtcactccggagatgtgccggcctaggccatgattcagaagaagatagtggtggcgaggctagcgaagaagaggcaggtgcggcactgctcggcggcggacaggtctcaggggataccagtccggactccccagatctcacatttagcaaaaagttcttgaatgtttttgtcaactcgacaagccggtcctcttccacagaatcctttggcctgtttagctgtctggtgaatggtgaagagcgcgaacagacacaccgggcagtctttaggttcatccctagacatcccgatgaactcgaactagacgtcgatgacccagttctggtcgaagccgaggaagatgatttctggttccgcggcttcaacatgcgcacaggagaacgaggcgtgtttcccgccttctacgcccacgcggttccaggaccagccaaagaccttctgggaagcaaaagatctccctgctgggtggagcgctttgatgttcagtttctaggatctgtggaagtgccatgtcatcagggcaacggcatcttatgtgccgcaatgcagaagattgctacagcacggaagctcactgtgcatcttcggccacctgccagttgcgatctggaaatttccctgcggggggtcaaacttagtctctcaggcgggggccccgagttccagcgctgtagccatttctttcaaatgaaaaacattagcttttgcggctgccaccccaggaattcttgcgaggctccccagggcgccgcatttcagtgggagcgcggggtggatcgcaaacgagtcctccaaactcggggcaatgtgcagccacacctcggcgcaggccagggagccgcactgaacagggctactgaaggaagctctacgggctccgagaaaggcgaatggaccccactggttatcatggagcttactcaatccgtaaacagctgttacttcgggttcattaccaagcaccctttgctgagcagattcgcttgccacgtctttgtcagccaggagtcaatgaggccggtagcccaatccgtgggccgggctttcttagagtattatcaagagcatctggcctatgcctgccctacagaggacatctatctggagtag

SEQ ID NO: 324327 - DNA, 1335 bp, Artificial Sequence
  derived and/or modified sequence
atggctgatagggcggagatgttcagcctctcaacatttcattcccttagcccccctggctgtcgccctccgcaagacatcagcctggaagaatttgacgatgaagatcttagcgagataaccgacgattgtggtctggggttgtcatacgattctgaccattgcgagaaggacagtctgtccctcggtcgttccgaacagccgcacccgatttgctcttttcaggacgacttccaagaatttgagatgatcgatgataacgaggaggaagaggacgaggaagacgatgaggaagaggaagatgccgaagacagcgcaggaagccccggcgggaggggtacaggcccctcagcgcctagggacgcctcattggtctatgacgctgtgaagtacaccttggtggtcgatgagcatacacaactggagcttgtctctctgcgacgttgcgcaggcttaggtcacgattctgaggaggacagcggcggggaagccagtgaggaggaggcgggagcggctcttctgggaggagggcaagtctccggagacactagcccagattcacctgatttaacattcagtaaaaagttcctaaacgtgttcgtcaactcaaccagtcggagctcatccaccgaatccttcgggctattctcatgtctggtgaatggggaagaacgggagcagacccaccgagctgtgttcagatttatcccacgccatcccgatgagctagaactcgacgtggacgatcccgtgctagtggaggccgaggaggacgacttttggtttaggggcttcaatatgagaaccggggaacgaggcgtctttccggccttctatgctcatgccgtgccaggtccagccaaggatctgcttggctcaaagaggagcccatgctgggtggagcgcttcgacgttcagtttctgggctccgttgaagtaccatgccaccagggcaacggcatactttgcgcagccatgcagaaaatagcaacagcaagaaaactgacagtgcatctccgcccgcctgctagctgcgatttggagatttctctgcgaggcgttaaactgagcctgtccggaggcggccctgaattccaaaggtgctcacattttttccagatgaagaacatctcattctgcggatgtcaccccagaaattcgtgttacttcggatttatcaccaagcacccactcctgagcaggtttgcgtgtcacgtgttcgtttcccaggaatcaatgaggcccgttgcccagagcgtaggaagagcattcctcgagtattaccaggaacatttagcctacgcctgccccacagaggatatttatcttgagtag

SEQ ID NO: 324328 - DNA, 1677 bp, Artificial Sequence
  derived and/or modified sequence
atgatatccagcatctctgagacagagcttgaactcagtagtgatgggggcagcagcagctccggacgctctagccacctgacaaacagcattgaggaagccagctcccccgcctctgaacctgagcctcctcgggaaccccctagacggccagcattcctgccagtggggcctgacgacaccaatagcgaatatgagtcaggttctgagagcgaaccagacctgtctgaggacgccgattccccatggctactcagcaacttggtctcgagaatgatctccgaagggtcttcgcctatcagatgtcctggacaatgtctgagtcccgccccacggccgcccggtgagcccgtaagtcccgctggaggtgcggcccaggactcgcaggacccggaagctgctgctggtccaggaggagtggaacttgtggacatggagaccctgtgtgctccaccccccccagctccagcggcacctcgcccaggccctgctcaaccaggaccttgtctgttcttgtccaacccaacaagggataccataactcccttatgggccgctccaggcagggcagcaaggccagggcgtgcgtgttctgccgcttgtagtgaagaagaggatgaagaagacgacgaagaagaggaggacgctgaggactcagctgggtccccggggggacgtggaaccgggccctctgctcccagggatgcctctcttgtatatgatgccgttaagtataccctcgtggtggatgagcacacccagctggagctggtctctttgagaagatgcgcagggctggggcacgactcagaggaggactctggcggcgaggcctctgaggaagaggccggggctgctctgctgggcgggggccaggtctccggggacacatcacctgatagtcctgatctcacattctccaagaagttcctgaatgttttcgtgaactcaactagccggagctctagcacggagtctttcggactgttttcctgcctggtcaatggcgaggaacgcgaacaaacccatagagctgtatttagatttattcccagacaccctgatgagctcgagctcgatgtcgatgaccccgtactggtggaagccgaggaggatgacttctggttcaggggttttaatatgcgcaccggagagcgaggggtctttccagcattctacgcacatgccgtgcccggccccgccaaagaccttctcggctctaagaggtcgccatgctgggttgagcgctttgacgtgcagttcttggggtccgtcgaggtgccttgccaccaaggtaacggcattttgtgcgccgcaatgcagaaaatagccacagcccgcaagctgaccgtgcacctgcggccacccgccagttgcgacctggagatctctttacggggcgtcaagctctccctcagtgggggcggcccagagtttcaacgctgtagccatttctttcagatgaaaaacataagtttttgcggatgccatccgcgcaattcttgctactttgggtttattaccaagcaccctctcctctcaagattcgcttgtcacgtctttgtttcacaggaatctatgcgccccgtggcacaatccgtgggaagagccttcctggagtactatcaggaacacctcgcatatgcatgccctacagaggatatctatctggagtag

SEQ ID NO: 324329 - DNA, 1677 bp, Artificial Sequence
  derived and/or modified sequence
atgatatcatcaatctccgagaccgagcttgagctgagcagcgacggcggatcctcatcaagcggacggtcttctcacctgaccaatagcatcgaagaggctagcagcccagcttctgaaccagagcccccaagagaacccccgagacgtcctgctttcctgcccgttggacctgacgatacgaactctgagtacgaaagtggatctgaaagtgagcccgacctgtctgaggatgcagacagcccttggctcttatccaaccttgtttcccggatgatctccgaggggagcagcccaattcggtgcccagggcagtgcctttctccagctcccaggccacccggcgaacccgtgtcgcctgcgggcggagcggcccaggatagccaggatccggaagccgctgccggaccagggggagtggagttggtcgacatggagactctgtgcgcccctcccccccctgccccagccgccccaaggccgggcccagcccagcccggcccttgcctcttcttatctaacccgaccagagatactattacacctctctgggcagcgcccggcagagccgcacggcctggccgagcctgtagcgccgcctgctcagaggaggaggatgaggaagatgatgaagaagaagaggacgctgaagatagtgccggaagccctggcggtcggggaacagggccttccgctcctagagatgccagcctggtgtatgacgctgttaagtacactttagtcgttgatgaacatacacagcttgaactcgtatccttgcggagatgcgccggcctcgggcacgactctgaggaggatagcggaggcgaggcaagtgaagaagaagcaggcgctgctctcctgggtggcggccaggtgtctggggacacgagtcctgacagtcccgaccttactttcagtaaaaaatttctcaacgtgttcgtaaacagcacttctcgatcttctagtactgaaagtttcggcctctttagctgcttggtgaacggggaggagcgggaacagacccaccgcgccgtattcagattcatacccaggcacccagacgagctggaattggacgtcgacgatcctgtactggtggaggcggaggaagatgacttttggtttcgtggattcaatatgcgcacaggtgagcggggcgtgtttccagcattctatgctcatgccgtgccgggtccagctaaagatctgctaggaagtaaacgcagtccctgctgggtcgagaggttcgacgtgcagtttctgggttcagttgaggttccatgccaccaggggaatggcatcctttgtgccgctatgcagaaaattgcaacggcaagaaagctcaccgtgcacctgcggccccctgcttcctgcgacctggaaatcagcctacgcggcgtaaagttgtcgcttagcggcggtggcccagaattccagagatgcagtcacttctttcagatgaagaacatatctttttgtggttgtcacccccgtaacagctgttacttcggattcatcaccaaacatccgctcctgagtcgatttgcctgccatgtgttcgtttcacaggagagcatgagaccagtggctcagtctgtgggcagagccttcctggaatattatcaggaacacttggcatacgcctgcccgacggaagacatatacctggagtag

SEQ ID NO: 324330 - DNA, 1641 bp, Artificial Sequence
  derived and/or modified sequence
atggctgacagggccgaaatgtttagtctttcaaccttccattcgttgtctccccccggctgccggccaccacaggacatttccctcgaggagtttgacgacgaagacctgtcagagattacagacgattgtggacttggcctgtcatacgattccgaccactgcgaaaaagattctctcagccttggtcgaagtgaacagccacaccccatctgcagcttccaggatgacttccaggagtttgaaatgatagacgataatgaagaagaggatgatgaggacgaggaggaggaagaagaggaagaggaaggcgacggtgagggacaagagggcggcgatcccggttccgaagcacctgcaccgggtccactaattcctagtcccagtgtcgaagagccgcataaacacagaccgactaccctgcgactgaccacactcggggctcaagacagcctgaacaataacggggggttcgacctggtcaggcccgctagctggcaggagaccgccttatgcagccctgctcctgaggccctgagagagctgccaggcccacttcccgctacagatacaggccccgggggggctcaaagcccagttaggcccgggtgcgactgtgagggcaaccggcccgctgaacctccagcacctgggggaacctcaccctcatccgaccccggcatcgaggctgatctgcgatctcgatctagcggaggtaggggagggcgacgaagctcacaagagctgtcctctcctggatcagactccgaagacgccgggggccgactgggacggatgatctcatctatttcagagactgagctcgaactctcctccgacgggggtagttcatcctcaggacggtcatctcatctaaccttcagcaagaagttcctgaacgtgttcgttaattcaacgagcaggtcgtctagcacggagagctttggtctgttctcttgcttagttaatggtgaggaacgcgaacaaactcatcgggctgtgttccgctttattccacgacaccccgatgagttggaactagatgtcgatgatcccgtcttggtggaggccgaggaagacgacttctggtttcggggatttaacatgaggactggtgagaggggcgtgtttcctgctttttacgctcacgccgtgcccggaccagctaaagacctgctcggctctaaaagatctccctgctgggtagagcgctttgacgttcaattccttgggagtgttgaagtgccatgccatcagggtaatggaatactgtgtgcggccatgcagaagatcgcaaccgcaaggaaacttacagtacatctgcgacccccagcctcctgcgacctggaaatcagcttaagaggcgtcaaactctcgctatcaggcgggggcccagaattccagcgttgttcacattttttccagatgaagaatatttccttttgtggctgccaccccagaaatagctgttactttggattcattaccaaacaccctcttttgtccaggttcgcttgccatgtatttgtatcacaggagtcaatgagacctgtggcccagtcggtgggccgggcgtttctcgaatattatcaagagcacttagcttacgcatgccctaccgaggatatttatctggagtag

SEQ ID NO: 324331 - DNA, 1797 bp, Artificial Sequence
  derived and/or modified sequence
atgctgcctgacttccccagccccagcacctgggcccctggcctgctgctgcccagcggccctgccctgctgagccccagcgtgctgcaggacagcctgagcctgggccgctctgagcagccccaccccatctgcagcttccaggatgacttccaggagtttgagatgattgatgacaatgaggaggaggatgatgaagatgaggaggaggaggaggaggaggaggagggagatggagagggccaggagggcggggaccccggcagcgaggccccagcccctggccccctcatccccagccccagcgtggaggagccccacaagcaccggcccaccaccctgcggctgaccaccctgggcgcccaggacagccaggaccctgaggccgctgctggccctggaggagtggagctggtggacatggagaccctgaaccccacccgggacaccatcacccccctgtgggccgcccctggccgggccgcccggcccggccgggcctgcagcgctgcctgcagcgaggaggaggatgaagaagatgatgaggaggaggaggatgctgaggacagcgctggcagccctgggggccggggcaccggccccagcgcccccagagatgccagcctggtgtatgatgctgtgaagtacaccctggtggtggatgagcacacccagctggagctggtgtccctgcggcgctgtgccggcctgggccatgattctgaagaagattctggaggagaggccagcgaggaggaggccggggccgccctgctgggcggcggccaggtgtctggggacaccagcccagacagcccagacctgaccttcagcaagaagttcctgaatgtgtttgtgaacagcaccagccgcagcagcagcacagagagctttggcctcttcagctgcctggtgaatggagaggagcgggagcagacccacagagctgtgttccgcttcatccccaggcacccagatgagctggagctggatgtggatgatcctgtgctggtggaggccgaggaggatgacttctggttccggggcttcaacatgaggactggagagcggggcgtcttccctgccttctacgcccatgctgtgcccggccctgccaaggacctgctgggcagcaagaggagcccctgctgggtggagagatttgatgtgcagttcctgggctctgtggaggtgccctgccaccagggcaatggcatcctgtgtgccgccatgcagaagatcgccacagccaggaagctgactgtgcacctgcggcccccagccagctgtgacctggagatcagcctgcggggcgtgaagctgagcctgagcggcggcggccctgagttccagcgctgcagccacttcttccagatgaagaacatctccttctgtggctgccaccccaggaacagctgtgaggccccccagggcgccgccttccagtgggagcggggcgtggacaggaagagggtgctgcagaccagaggaaatgtgcagccccacctgggcgccggccagggcgccgccctgaacagagccacagagggcagcagcacaggcagcgagaagggggagtggacccccctggtgatcatggagctgacccagagcgtgaacagctgctacttcggcttcatcaccaagcaccccctgctgagcagatttgcctgccacgtgtttgtgtcccaggagagcatgaggcctgtggcccagagcgtgggccgggccttcctggagtactaccaggagcacctggcctatgcctgccccacagaggacatctacctggagtag

SEQ ID NO: 324332 - DNA, 1335 bp, Artificial Sequence
  derived and/or modified sequence
atggctgacagagctgagatgttcagcctgagcaccttccacagcctgagccccccaggctgcaggcctccccaggacatcagcctggaggagtttgatgatgaggacctgtctgagatcacagatgactgtggcctgggcctgtcctatgacagcgaccactgtgagaaggacagcctgagcctgggccgctctgagcagccccaccccatctgcagcttccaggatgacttccaggagtttgagatgattgatgacaatgaggaggaggaggatgaggaggatgatgaggaggaggaggatgctgaagattctgctggcagccctgggggccggggcaccggccccagcgcccccagagatgccagcctggtgtatgatgctgtgaagtacaccctggtggtggatgagcacacccagctggagctggtgtccctgcggcgctgtgccggcctgggccatgacagcgaggaggacagcggcggggaggccagcgaggaggaggccggggccgccctgctgggcggcggccaggtgtctggggacaccagcccagacagcccagacctgaccttcagcaagaagttcctgaatgtgtttgtgaacagcaccagccgcagcagcagcacagagagctttggcctcttcagctgcctggtgaatggagaggagcgggagcagacccacagagctgtgttccgcttcatccccaggcacccagatgagctggagctggatgtggatgatcctgtgctggtggaggccgaggaggatgacttctggttccggggcttcaacatgaggactggagagcggggcgtcttccctgccttctacgcccatgctgtgcccggccctgccaaggacctgctgggcagcaagaggagcccctgctgggtggagagatttgatgtgcagttcctgggctctgtggaggtgccctgccaccagggcaatggcatcctgtgtgccgccatgcagaagatcgccacagccaggaagctgactgtgcacctgcggcccccagccagctgtgacctggagatcagcctgcggggcgtgaagctgagcctgagcggcggcggccctgagttccagcgctgcagccacttcttccagatgaagaacatctccttctgtggctgccaccccaggaacagctgctacttcggcttcatcaccaagcaccccctgctgagcagatttgcctgccacgtgtttgtgtcccaggagagcatgaggcctgtggcccagagcgtgggccgggccttcctggagtactaccaggagcacctggcctatgcctgccccacagaggacatctacctggagtag

SEQ ID NO: 324333 - DNA, 1677 bp, Artificial Sequence
  derived and/or modified sequence
atgatcagcagcatcagcgagacagagctggagctgagcagtgatggcggcagcagcagcagcggccgcagcagccacctgaccaacagcattgaggaggccagcagccctgccagcgagcctgagcccccccgggagcccccaagaagacctgccttcctgcctgtgggcccagatgacaccaacagtgaatatgaaagtggcagcgagagcgagccagacctgtctgaagatgctgacagcccctggctgctgagcaacctggtgtccaggatgatcagcgagggcagcagccccatccgctgccccggccagtgcctgagccctgcccccaggcctcctggagagcctgtgtccccagctggaggagctgcccaggacagccaggaccctgaggccgctgctggccctggaggagtggagctggtggacatggagaccctgtgtgcccctcctcctccagccccagctgcccccaggcctggccctgcccagcccggcccctgcctcttcctgagcaaccccacccgggacaccatcacccccctgtgggccgcccctggccgggccgcccggcccggccgggcctgcagcgctgcctgcagcgaggaggaggatgaggaggatgatgaggaggaggaggatgctgaagattctgctggcagccctgggggccggggcaccggccccagcgcccccagagatgccagcctggtgtatgatgctgtgaagtacaccctggtggtggatgagcacacccagctggagctggtgtccctgcggcgctgtgccggcctgggccatgacagcgaggaggacagcggcggggaggccagcgaggaggaggccggggccgccctgctgggcggcggccaggtgtctggggacaccagcccagacagcccagacctgaccttcagcaagaagttcctgaatgtgtttgtgaacagcaccagccgcagcagcagcacagagagctttggcctcttcagctgcctggtgaatggagaggagcgggagcagacccacagagctgtgttccgcttcatccccaggcacccagatgagctggagctggatgtggatgatcctgtgctggtggaggccgaggaggatgacttctggttccggggcttcaacatgaggactggagagcggggcgtcttccctgccttctacgcccatgctgtgcccggccctgccaaggacctgctgggcagcaagaggagcccctgctgggtggagagatttgatgtgcagttcctgggctctgtggaggtgccctgccaccagggcaatggcatcctgtgtgccgccatgcagaagatcgccacagccaggaagctgactgtgcacctgcggcccccagccagctgtgacctggagatcagcctgcggggcgtgaagctgagcctgagcggcggcggccctgagttccagcgctgcagccacttcttccagatgaagaacatctccttctgtggctgccaccccaggaacagctgctacttcggcttcatcaccaagcaccccctgctgagcagatttgcctgccacgtgtttgtgtcccaggagagcatgaggcctgtggcccagagcgtgggccgggccttcctggagtactaccaggagcacctggcctatgcctgccccacagaggacatctacctggagtag

SEQ ID NO: 324334 - DNA, 1641 bp, Artificial Sequence
  derived and/or modified sequence
atggctgacagagctgagatgttcagcctgagcaccttccacagcctgagccccccaggctgcaggcctccccaggacatcagcctggaggagtttgatgatgaggacctgtctgagatcacagatgactgtggcctgggcctgtcctatgacagcgaccactgtgagaaggacagcctgagcctgggccgctctgagcagccccaccccatctgcagcttccaggatgacttccaggagtttgagatgattgatgacaatgaggaggaggatgatgaagatgaggaggaggaggaggaggaggaggagggagatggagagggccaggagggcggggaccccggcagcgaggccccagcccctggccccctcatccccagccccagcgtggaggagccccacaagcaccggcccaccaccctgcggctgaccaccctgggcgcccaggacagcctgaacaacaatggaggctttgacctggtgcggcctgcctcctggcaggagacagccctgtgcagccctgcccctgaggccctgcgggagctgcccggccccctgcctgccacagacaccggccctggaggagcccagagccctgtgcggcccggctgtgactgtgagggcaacagacctgctgagcccccagcccctgggggcaccagccccagcagtgaccccggcatcgaggccgacctgcggagccgcagcagcggcggccggggcggcagaagaagcagccaggagctgagcagccctggcagtgacagtgaagatgctgggggccgcctgggccgcatgatcagcagcatcagcgagacagagctggagctgagcagtgatggcggcagcagcagcagcggccgcagcagccacctgaccttcagcaagaagttcctgaatgtgtttgtgaacagcaccagccgcagcagcagcacagagagctttggcctcttcagctgcctggtgaatggagaggagcgggagcagacccacagagctgtgttccgcttcatccccaggcacccagatgagctggagctggatgtggatgatcctgtgctggtggaggccgaggaggatgacttctggttccggggcttcaacatgaggactggagagcggggcgtcttccctgccttctacgcccatgctgtgcccggccctgccaaggacctgctgggcagcaagaggagcccctgctgggtggagagatttgatgtgcagttcctgggctctgtggaggtgccctgccaccagggcaatggcatcctgtgtgccgccatgcagaagatcgccacagccaggaagctgactgtgcacctgcggcccccagccagctgtgacctggagatcagcctgcggggcgtgaagctgagcctgagcggcggcggccctgagttccagcgctgcagccacttcttccagatgaagaacatctccttctgtggctgccaccccaggaacagctgctacttcggcttcatcaccaagcaccccctgctgagcagatttgcctgccacgtgtttgtgtcccaggagagcatgaggcctgtggcccagagcgtgggccgggccttcctggagtactaccaggagcacctggcctatgcctgccccacagaggacatctacctggagtag

SEQ ID NO: 324335 - DNA, 2566 bp, Artificial Sequence
  derived and/or modified sequence
atgctccccgatttcccttctcctagcacctgggcccctgggctactgctgccctctggcccagccctgctatctccctccgtcctgcaggacagcctctccctggggcgctcggagcagccgcaccccatctgctccttccaggatgacttccaggagtttgagatgatcgatgacaatgaagaggaggacgatgaggacgaggaagaggaggaggaggaggaggagggagatggggaaggccaggagggaggagaccctggctcagaggcacctgcccccgggccccttatcccctccccttccgtggaggagccccacaagcaccggcccaccaccctccgtctgaccacactgggggcccaggactcccaggaccccgaggcggccgcggggcccggcggcgtggagctggtggacatggagacgctcaaccccacgcgtgacaccatcacgccgctgtgggccgcgcccggccgcgccgcccgcccgggacgagcctgctccgccgcctgctccgaggaggaggacgaagaggacgacgaggaagaggaggatgccgaggacagtgcggggtcccccgggggcaggggcacgggcccctcggcgccgcgggacgcgtcgctggtgtacgacgcggtcaagtacacgctggtggtggatgagcacacgcagctggagctggtgagcctgcggcgctgtgctgggctgggccacgacagcgaagaggacagcggcggggaggccagcgaggaggaggcgggcgcggcgctgctaggcggcggtcaggtctcgggggacacctcgccggacagccctgacctcactttctccaagaagttcctcaatgtcttcgtcaacagcacatctcggtcctccagcaccgagtcctttggccttttctcctgtctggtcaacggcgaggagcgagagcagactcaccgggctgtgttcaggttcatcccgcggcatccagacgagctggagctggatgtggatgaccctgtgttggtggaggccgaggaggacgacttctggttccgtggcttcaacatgcgcacgggggagcgcggtgtgtttcctgccttctacgcccatgcggtgcccggccctgccaaggacctgctggggagtaagcggagcccctgctgggtggagcgctttgacgtgcagttcctgggctccgtggaggtgccctgccaccagggcaacggcatcctgtgtgcagccatgcagaagattgccactgcccggaaactgaccgtccacctgcgccctcctgcctcctgtgacctcgagatctctcttcggggggtcaagctgagtctgagcggaggagggcccgagttccagcgctgcagccatttcttccagatgaagaacatctccttctgcggctgccatccccgcaacagctgcgaggccccgcaaggagctgctttccagtgggagcgaggggtagaccggaagagggttttacagaccaggggtaacgtccagccccacctcggagctgggcaaggggctgccctgaatagggccacagagggtagcagcaccggctcagagaagggagagtggacgcccctggtcatcatggaattaactcagagcgtgaactcttgctatttcggcttcatcaccaaacaccccctgctgagccgcttcgcctgccacgtctttgtctcccaggagtccatgaggccggtggcgcagagtgtgggccgcgccttcctggagtactaccaagagcacctggcgtacgcctgccccacggaggacatctacctggagtagcctgcccaccgctctgtctcctggccgtctgctccaggcgcagctggggctgaggatgtctcaagaggccaccatggctttggcaaggactggattggggggacatgggaccttacgcttgtgggggtctgcgggctgggaactctcgtcctcggtccccagggcgcagctgttggggctgcgggggagtggagcccccgtgcccctgcttttcctcagatccgttctttctctgtgttgtcctcctccttcccttcccagtctcccttttctctctcctggtgtctctgcccctctctgtgcctgcaaaccttatcctctattcttcactttggggtcagaacttcgggggtgtggaggaggtgcggctctagggacaggtaatgtcggcttccaagtgatgccctcctgccactcccctgcgatttataagggaattttaatttttatagtgaatctcaagggatcatcccatccttgaccacagggacaagaggggccccctcgccccagccccaccccacatggagctcagggggaagcagggaggggttcccaaaagagccctgcggaggctaggagtggttcttgatgctcacctgaagcccctagacgctgctaggagggggggccctcctgggcccccaatacccctccgcttgccgctgctagcgcacccctgcagtccagcgtgcatccaccccacgcacgccccgtgctgtgttcctgggccctgcccatggcctcaataaactctctgcttggtgtg

SEQ ID NO: 324336 - DNA, 2221 bp, Artificial Sequence
  derived and/or modified sequence
cgcggggcggacgccgcagggcgtgtcacgaggtgagcggggcgggccgagcgccggcgcggggcgcggcgaggctcccgcaccccccgccgcagtcgcgggcctctcccggagaagatggcggatcgcgcggagatgttttctctctccaccttccactcgctgtcgccgccgggctgcaggcctccccaggacataagcctggaagaatttgacgacgaagatctgtctgagatcactgatgactgtggcctgggcctcagctacgactcagaccactgtgagaaggacagcctctccctggggcgctcggagcagccgcaccccatctgctccttccaggatgacttccaggagtttgagatgatcgatgacaatgaagaggaggaggacgaagaggacgacgaggaagaggaggatgccgaggacagtgcggggtcccccgggggcaggggcacgggcccctcggcgccgcgggacgcgtcgctggtgtacgacgcggtcaagtacacgctggtggtggatgagcacacgcagctggagctggtgagcctgcggcgctgtgctgggctgggccacgacagcgaagaggacagcggcggggaggccagcgaggaggaggcgggcgcggcgctgctaggcggcggtcaggtctcgggggacacctcgccggacagccctgacctcactttctccaagaagttcctcaatgtcttcgtcaacagcacatctcggtcctccagcaccgagtcctttggccttttctcctgtctggtcaacggcgaggagcgagagcagactcaccgggctgtgttcaggttcatcccgcggcatccagacgagctggagctggatgtggatgaccctgtgttggtggaggccgaggaggacgacttctggttccgtggcttcaacatgcgcacgggggagcgcggtgtgtttcctgccttctacgcccatgcggtgcccggccctgccaaggacctgctggggagtaagcggagcccctgctgggtggagcgctttgacgtgcagttcctgggctccgtggaggtgccctgccaccagggcaacggcatcctgtgtgcagccatgcagaagattgccactgcccggaaactgaccgtccacctgcgccctcctgcctcctgtgacctcgagatctctcttcggggggtcaagctgagtctgagcggaggagggcccgagttccagcgctgcagccatttcttccagatgaagaacatctccttctgcggctgccatccccgcaacagctgctatttcggcttcatcaccaaacaccccctgctgagccgcttcgcctgccacgtctttgtctcccaggagtccatgaggccggtggcgcagagtgtgggccgcgccttcctggagtactaccaagagcacctggcgtacgcctgccccacggaggacatctacctggagtagcctgcccaccgctctgtctcctggccgtctgctccaggcgcagctggggctgaggatgtctcaagaggccaccatggctttggcaaggactggattggggggacatgggaccttacgcttgtgggggtctgcgggctgggaactctcgtcctcggtccccagggcgcagctgttggggctgcgggggagtggagcccccgtgcccctgcttttcctcagatccgttctttctctgtgttgtcctcctccttcccttcccagtctcccttttctctctcctggtgtctctgcccctctctgtgcctgcaaaccttatcctctattcttcactttggggtcagaacttcgggggtgtggaggaggtgcggctctagggacaggtaatgtcggcttccaagtgatgccctcctgccactcccctgcgatttataagggaattttaatttttatagtgaatctcaagggatcatcccatccttgaccacagggacaagaggggccccctcgccccagccccaccccacatggagctcagggggaagcagggaggggttcccaaaagagccctgcggaggctaggagtggttcttgatgctcacctgaagcccctagacgctgctaggagggggggccctcctgggcccccaatacccctccgcttgccgctgctagcgcacccctgcagtccagcgtgcatccaccccacgcacgccccgtgctgtgttcctgggccctgcccatggcctcaataaactctctgcttggtgtg

SEQ ID NO: 324337 - DNA, 3163 bp, Artificial Sequence
  derived and/or modified sequence
atgctccccgatttcccttctcctagcacctgggcccctgggctactgctgccctctggcccagccctgctatctccctccgtcctgcaggacagcctctccctggggcgctcggagcagccgcaccccatctgctccttccaggatgacttccaggagtttgagatgatcgatgacaatgaagaggaggacgatgaggacgaggaagaggaggaggaggaggaggagggagatggggaaggccaggagggaggagaccctggctcagaggcacctgcccccgggccccttatcccctccccttccgtggaggagccccacaagcaccggcccaccaccctccgtctgaccacactgggggcccaggactccctaaacaacaacggaggctttgacctggtgcgtccggcctcctggcaggagacagcgctatgctcacccgccccggaggccctcagagagctcccgggccccctccctgccacggacaccgggcccggcggggcgcagtcgccagtgcgcccgggttgcgactgcgaagggaaccggcctgcggaaccccctgcgccaggggggacttcgccctcctcagatcccggcatcgaggctgacctgagaagccgctcgagcggcggccgcgggggacgtcgcagcagccaggagctgtcctcgcccggctccgactcggaggacgcgggcggcgccgcctggggcgcatgatctcgtccatctcggagacggagctggagctgagcagcgatggcggaagcagcagcagcggccgctcctcgcacctcaccaactccatcgaggaggcctcgtcgcccgcctcggagccggagcccccgcgcgaacccccgcgccgccccgccttcctgcccgtgggccccgacgacaccaacagcgagtacgagtcggggtcggagtcggagccggacctcagcgaggacgcggactcgccctggctgctcagcaacctggtgagccgcatgatctccgagggctcctcgcccatccgctgccccggccagtgcctgtctcctgcgccgcgcccgcccggggagcccgtgtcgccggccggcggggccgcccaggactcccaggaccccgaggcggccgcggggcccggcggcgtggagctggtggacatggagacgctgtgcgcgccgccgccgcccgcgcccgccgcgcctcgacccggccccgcgcagcccgggccctgcctattcctcagcaaccccacgcgtgacaccatcacgccgctgtgggccgcgcccggccgcgccgcccgcccgggacgagcctgctccgccgcctgctccgaggaggaggacgaagaggacgacgaggaagaggaggatgccgaggacagtgcggggtcccccgggggcaggggcacgggcccctcggcgccgcgggacgcgtcgctggtgtacgacgcggtcaagtacacgctggtggtggatgagcacacgcagctggagctggtgagcctgcggcgctgtgctgggctgggccacgacagcgaagaggacagcggcggggaggccagcgaggaggaggcgggcgcggcgctgctaggcggcggtcaggtctcgggggacacctcgccggacagccctgacctcactttctccaagaagttcctcaatgtcttcgtcaacagcacatctcggtcctccagcaccgagtcctttggccttttctcctgtctggtcaacggcgaggagcgagagcagactcaccgggctgtgttcaggttcatcccgcggcatccagacgagctggagctggatgtggatgaccctgtgttggtggaggccgaggaggacgacttctggttccgtggcttcaacatgcgcacgggggagcgcggtgtgtttcctgccttctacgcccatgcggtgcccggccctgccaaggacctgctggggagtaagcggagcccctgctgggtggagcgctttgacgtgcagttcctgggctccgtggaggtgccctgccaccagggcaacggcatcctgtgtgcagccatgcagaagattgccactgcccggaaactgaccgtccacctgcgccctcctgcctcctgtgacctcgagatctctcttcggggggtcaagctgagtctgagcggaggagggcccgagttccagcgctgcagccatttcttccagatgaagaacatctccttctgcggctgccatccccgcaacagctgctatttcggcttcatcaccaaacaccccctgctgagccgcttcgcctgccacgtctttgtctcccaggagtccatgaggccggtggcgcagagtgtgggccgcgccttcctggagtactaccaagagcacctggcgtacgcctgccccacggaggacatctacctggagtagcctgcccaccgctctgtctcctggccgtctgctccaggcgcagctggggctgaggatgtctcaagaggccaccatggctttggcaaggactggattggggggacatgggaccttacgcttgtgggggtctgcgggctgggaactctcgtcctcggtccccagggcgcagctgttggggctgcgggggagtggagcccccgtgcccctgcttttcctcagatccgttctttctctgtgttgtcctcctccttcccttcccagtctcccttttctctctcctggtgtctctgcccctctctgtgcctgcaaaccttatcctctattcttcactttggggtcagaacttcgggggtgtggaggaggtgcggctctagggacaggtaatgtcggcttccaagtgatgccctcctgccactcccctgcgatttataagggaattttaatttttatagtgaatctcaagggatcatcccatccttgaccacagggacaagaggggccccctcgccccagccccaccccacatggagctcagggggaagcagggaggggttcccaaaagagccctgcggaggctaggagtggttcttgatgctcacctgaagcccctagacgctgctaggagggggggccctcctgggcccccaatacccctccgcttgccgctgctagcgcacccctgcagtccagcgtgcatccaccccacgcacgccccgtgctgtgttcctgggccctgcccatggcctcaataaactctctgcttggtgtga

SEQ ID NO: 324338 - DNA, 3380 bp, Artificial Sequence
  derived and/or modified sequence
ggagtccgggcgaggtgcgcggggcggacgccgcagggcgtgtcacgaggtgagcggggcgggccgagcgccggcgcggggcgcggcgaggctcccgcaccccccgccgcagtcgcgggcctctcccggagaagatggcggatcgcgcggagatgttttctctctccaccttccactcgctgtcgccgccgggctgcaggcctccccaggacataagcctggaagaatttgacgacgaagatctgtctgagatcactgatgactgtggcctgggcctcagctacgactcagaccactgtgagaaggacagcctctccctggggcgctcggagcagccgcaccccatctgctccttccaggatgacttccaggagtttgagatgatcgatgacaatgaagaggaggacgatgaggacgaggaagaggaggaggaggaggaggagggagatggggaaggccaggagggaggagaccctggctcagaggcacctgcccccgggccccttatcccctccccttccgtggaggagccccacaagcaccggcccaccaccctccgtctgaccacactgggggcccaggactccctaaacaacaacggaggctttgacctggtgcgtccggcctcctggcaggagacagcgctatgctcacccgccccggaggccctcagagagctcccgggccccctccctgccacggacaccgggcccggcggggcgcagtcgccagtgcgcccgggttgcgactgcgaagggaaccggcctgcggaaccccctgcgccaggggggacttcgccctcctcagatcccggcatcgaggctgacctgagaagccgctcgagcggcggccgcgggggacgtcgcagcagccaggagctgtcctcgcccggctccgactcggaggacgcgggcggcgccgcctggggcgcatgatctcgtccatctcggagacggagctggagctgagcagcgatggcggaagcagcagcagcggccgctcctcgcacctcaccaactccatcgaggaggcctcgtcgcccgcctcggagccggagcccccgcgcgaacccccgcgccgccccgccttcctgcccgtgggccccgacgacaccaacagcgagtacgagtcggggtcggagtcggagccggacctcagcgaggacgcggactcgccctggctgctcagcaacctggtgagccgcatgatctccgagggctcctcgcccatccgctgccccggccagtgcctgtctcctgcgccgcgcccgcccggggagcccgtgtcgccggccggcggggccgcccaggactcccaggaccccgaggcggccgcggggcccggcggcgtggagctggtggacatggagacgctgtgcgcgccgccgccgcccgcgcccgccgcgcctcgacccggccccgcgcagcccgggccctgcctattcctcagcaaccccacgcgtgacaccatcacgccgctgtgggccgcgcccggccgcgccgcccgcccgggacgagcctgctccgccgcctgctccgaggaggaggacgaagaggacgacgaggaagaggaggatgccgaggacagtgcggggtcccccgggggcaggggcacgggcccctcggcgccgcgggacgcgtcgctggtgtacgacgcggtcaagtacacgctggtggtggatgagcacacgcagctggagctggtgagcctgcggcgctgtgctgggctgggccacgacagcgaagaggacagcggcggggaggccagcgaggaggaggcgggcgcggcgctgctaggcggcggtcaggtctcgggggacacctcgccggacagccctgacctcactttctccaagaagttcctcaatgtcttcgtcaacagcacatctcggtcctccagcaccgagtcctttggccttttctcctgtctggtcaacggcgaggagcgagagcagactcaccgggctgtgttcaggttcatcccgcggcatccagacgagctggagctggatgtggatgaccctgtgttggtggaggccgaggaggacgacttctggttccgtggcttcaacatgcgcacgggggagcgcggtgtgtttcctgccttctacgcccatgcggtgcccggccctgccaaggacctgctggggagtaagcggagcccctgctgggtggagcgctttgacgtgcagttcctgggctccgtggaggtgccctgccaccagggcaacggcatcctgtgtgcagccatgcagaagattgccactgcccggaaactgaccgtccacctgcgccctcctgcctcctgtgacctcgagatctctcttcggggggtcaagctgagtctgagcggaggagggcccgagttccagcgctgcagccatttcttccagatgaagaacatctccttctgcggctgccatccccgcaacagctgctatttcggcttcatcaccaaacaccccctgctgagccgcttcgcctgccacgtctttgtctcccaggagtccatgaggccggtggcgcagagtgtgggccgcgccttcctggagtactaccaagagcacctggcgtacgcctgccccacggaggacatctacctggagtagcctgcccaccgctctgtctcctggccgtctgctccaggcgcagctggggctgaggatgtctcaagaggccaccatggctttggcaaggactggattggggggacatgggaccttacgcttgtgggggtctgcgggctgggaactctcgtcctcggtccccagggcgcagctgttggggctgcgggggagtggagcccccgtgcccctgcttttcctcagatccgttctttctctgtgttgtcctcctccttcccttcccagtctcccttttctctctcctggtgtctctgcccctctctgtgcctgcaaaccttatcctctattcttcactttggggtcagaacttcgggggtgtggaggaggtgcggctctagggacaggtaatgtcggcttccaagtgatgccctcctgccactcccctgcgatttataagggaattttaatttttatagtgaatctcaagggatcatcccatccttgaccacagggacaagaggggccccctcgccccagccccaccccacatggagctcagggggaagcagggaggggttcccaaaagagccctgcggaggctaggagtggttcttgatgctcacctgaagcccctagacgctgctaggagggggggccctcctgggcccccaatacccctccgcttgccgctgctagcgcacccctgcagtccagcgtgcatccaccccacgcacgccccgtgctgtgttcctgggccctgcccatggcctcaataaactctctgcttggtgtgaca

SEQ ID NO: 324339 - DNA, 2527 bp, Artificial Sequence
  derived and/or modified sequence
cgcggggcggacgccgcagggcgtgtcacgaggtgagcggggcgggccgagcgccggcgcggggcgcggcgaggctcccgcaccccccgccgcagtcgcgggcctctcccggagaagatggcggatcgcgcggagatgttttctctctccaccttccactcgctgtcgccgccgggctgcaggcctccccaggacataagcctggaagaatttgacgacgaagatctgtctgagatcactgatgactgtggcctgggcctcagctacgactcagaccactgtgagaaggacagcctctccctggggcgctcggagcagccgcaccccatctgctccttccaggatgacttccaggagtttgagatgatcgatgacaatgaagaggaggacgatgaggacgaggaagaggaggaggaggaggaggagggagatggggaaggccaggagggaggagaccctggctcagaggcacctgcccccgggccccttatcccctccccttccgtggaggagccccacaagcaccggcccaccaccctccgtctgaccacactgggggcccaggactccctaaacaacaacggaggctttgacctggtgcgtccggcctcctggcaggagacagcgctatgctcacccgccccggaggccctcagagagctcccgggccccctccctgccacggacaccgggcccggcggggcgcagtcgccagtgcgcccgggttgcgactgcgaagggaaccggcctgcggaaccccctgcgccaggggggacttcgccctcctcagatcccggcatcgaggctgacctgagaagccgctcgagcggcggccgcgggggacgtcgcagcagccaggagctgtcctcgcccggctccgactcggaggacgcgggcggccgcctggggcgcatgatctcgtccatctcggagacggagctggagctgagcagcgatggcggaagcagcagcagcggccgctcctcgcacctcactttctccaagaagttcctcaatgtcttcgtcaacagcacatctcggtcctccagcaccgagtcctttggccttttctcctgtctggtcaacggcgaggagcgagagcagactcaccgggctgtgttcaggttcatcccgcggcatccagacgagctggagctggatgtggatgaccctgtgttggtggaggccgaggaggacgacttctggttccgtggcttcaacatgcgcacgggggagcgcggtgtgtttcctgccttctacgcccatgcggtgcccggccctgccaaggacctgctggggagtaagcggagcccctgctgggtggagcgctttgacgtgcagttcctgggctccgtggaggtgccctgccaccagggcaacggcatcctgtgtgcagccatgcagaagattgccactgcccggaaactgaccgtccacctgcgccctcctgcctcctgtgacctcgagatctctcttcggggggtcaagctgagtctgagcggaggagggcccgagttccagcgctgcagccatttcttccagatgaagaacatctccttctgcggctgccatccccgcaacagctgctatttcggcttcatcaccaaacaccccctgctgagccgcttcgcctgccacgtctttgtctcccaggagtccatgaggccggtggcgcagagtgtgggccgcgccttcctggagtactaccaagagcacctggcgtacgcctgccccacggaggacatctacctggagtagcctgcccaccgctctgtctcctggccgtctgctccaggcgcagctggggctgaggatgtctcaagaggccaccatggctttggcaaggactggattggggggacatgggaccttacgcttgtgggggtctgcgggctgggaactctcgtcctcggtccccagggcgcagctgttggggctgcgggggagtggagcccccgtgcccctgcttttcctcagatccgttctttctctgtgttgtcctcctccttcccttcccagtctcccttttctctctcctggtgtctctgcccctctctgtgcctgcaaaccttatcctctattcttcactttggggtcagaacttcgggggtgtggaggaggtgcggctctagggacaggtaatgtcggcttccaagtgatgccctcctgccactcccctgcgatttataagggaattttaatttttatagtgaatctcaagggatcatcccatccttgaccacagggacaagaggggccccctcgccccagccccaccccacatggagctcagggggaagcagggaggggttcccaaaagagccctgcggaggctaggagtggttcttgatgctcacctgaagcccctagacgctgctaggagggggggccctcctgggcccccaatacccctccgcttgccgctgctagcgcacccctgcagtccagcgtgcatccaccccacgcacgccccgtgctgtgttcctgggccctgcccatggcctcaataaactctctgcttggtgtg

SEQ ID NO: 324340 - DNA, 1797 bp, Artificial Sequence
  derived and/or modified sequence
atgctgcccgacttccccagccccagcacctgggcccccggcctgttgctacccagtggccccgcactgctgtccccgtccgtactgcaagatagtctttccctcggacgcagtgaacaaccacacccaatttgctctttccaggacgatttccaggagtttgagatgatcgatgataacgaggaggaggatgatgaagatgaggaggaggaagaggaggaagaggagggcgatggcgagggacaagagggcggggatccaggctctgaagcacccgcacctggacccttaatcccttccccgagtgtggaggaacctcacaaacacagaccaactacacttcggctcaccaccttgggcgcccaagacagtcaagaccccgaggccgcagctggcccaggcggagttgaacttgtggacatggagacactgaaccccaccagagatactatcaccccgctgtgggcagcccctggccgagcagcaaggccgggacgtgcctgttcagccgcgtgctccgaggaagaagatgaagaggatgacgaagaggaggaagatgctgaagactctgcaggctcgcctggagggcgcggaacaggaccctctgccccacgtgatgcatctctggtctatgatgcggttaagtacaccctcgtggtagacgagcatactcaactggagctggtatctttgagacggtgcgcagggctggggcatgactccgaggaggacagtggaggagaagcctcagaagaggaggctggggccgccctgctgggtggagggcaggtgtcaggcgacaccagtcccgacagtcctgatttaactttttcgaagaagttcctgaacgtcttcgtcaattccacttctagaagctccagcaccgaatcgtttggtctgttctcttgtctggtgaacggggaagagcgggaacagacacatcgtgccgtgttccgcttcatcccgcggcatcctgatgaactagagctggatgtggatgaccccgttttggtcgaggcggaggaggacgatttctggttcagaggcttcaacatgaggaccggcgagagaggagtatttcccgctttttatgcacacgcagtcccaggcccggcgaaggacctcctcggatcaaaacgctccccttgttgggtggagcgtttcgacgtccagttcctcgggtccgttgaggttccttgtcaccaggggaacgggatcctgtgcgcagctatgcagaagattgcaactgccaggaaactgaccgtgcatctccggcctcctgcttcatgtgacttggagattagcttgcgaggagtgaagctgtcattgtcaggggggggccctgaatttcagaggtgttcacacttcttccagatgaaaaacatttctttctgtggttgccacccacggaacagttgcgaggccccccaaggggctgcattccaatgggaacgcggggtggaccgcaagcgagttctgcagacaagaggaaatgttcagcctcaccttggggcaggacagggcgcggccttgaaccgcgccacggaagggagctctactggcagcgagaaaggcgaatggacgccactcgtgattatggagttaactcagtccgtaaatagttgctatttcggttttatcactaaacaccccctcctgtctcggttcgcatgtcacgtgttcgtctcccaggagagcatgcgacctgttgcccaatctgttggccgagcctttctggagtattatcaagaacacctggcatatgcttgccctactgaggatatctacctagaatag

SEQ ID NO: 324341 - DNA, 1335 bp, Artificial Sequence
  derived and/or modified sequence
atggccgaccgggccgagatgttcagcctgagcaccttccacagcctcagcccccccggttgccgccccccccaggacatttcacttgaggagtttgacgatgaggacttgtcagaaataacggatgactgcggattagggctatcctacgactctgaccactgtgagaaagattcactgtcacttgggcgaagtgaacagccgcaccctatttgttcctttcaagatgattttcaggagtttgaaatgatcgacgacaatgaggaggaggaagacgaggaggatgatgaagaggaagaggatgcagaggattcagcgggcagccccggaggaagggggaccggcccctctgccccaagagatgcttccctcgtttacgatgctgtgaagtacaccttggttgtcgatgagcacactcagttggaactcgtgtctctccggaggtgcgctgggctcggtcacgacagtgaggaagattccgggggggaggcttccgaggaagaggctggggcagcgttgttgggagggggccaggtatccggggacacctcaccagattcacctgatctgactttttcaaagaagttcctaaatgtttttgtgaactcaacatcaagatctagttctacagagtcctttggcctgttctcctgcctcgtgaacggagaggagcgagaacagacacatcgagcagtctttaggtttatccccagacatcctgacgaactcgagctggatgtggatgaccctgtcctggtcgaagccgaagaggacgatttttggtttcggggcttcaacatgaggacaggagagagaggggtcttcccagctttctatgcccacgccgttccgggaccggctaaggatctgctcggaagcaaaaggagtccctgttgggtcgaacgcttcgatgtgcaattcttgggaagcgttgaggtaccttgtcaccagggcaatggtatcctttgtgcagctatgcaaaagatcgcaacggctcgcaagcttactgttcatctgcgccctcctgcaagttgcgacctggagatttccttacgcggcgtcaagctctccctgtctggcggtggtcctgaattccagcggtgttctcacttttttcagatgaagaacatttcattctgtggctgccacccccgaaactcgtgttactttggtttcatcaccaaacaccctctgttgtctagatttgcctgtcatgtgtttgtcagtcaggaatccatgagaccggtggcacaaagcgttggccgtgcgttcttggagtactaccaggagcacctggcctatgcctgcccgactgaggacatctacctggagtag

SEQ ID NO: 324342 - DNA, 1677 bp, Artificial Sequence
  derived and/or modified sequence
atgatcagcagcatcagcgagaccgagctggagctgagcagcgacggcgggagctcctcgtctggcagatcaagtcatcttactaattctatcgaggaggcgtcaagtcctgctagtgagccagagcctccacgtgaaccccctcgtcgccctgccttccttcctgtgggtccagatgatacaaattcggaatacgagagtggatctgagtctgagcctgatctgagcgaggacgctgactcgccatggcttctgtcaaatttagtgagcagaatgattagtgagggcagcagtccaattaggtgcccgggccagtgtctcagccctgctcctaggcccccaggggagcccgtttcgcctgcaggaggcgctgcccaagattcccaggatcccgaagccgctgctggccctgggggggtggagctggtggatatggagactctgtgcgccccaccaccacctgccccggctgctccaagacctgggccagctcagcccggcccctgcctattcttgtctaatcctaccagggatacgattacacccctatgggctgcaccgggtcgtgccgccagacctggcagagcttgtagcgcggcttgctcagaagaggaagatgaagaagatgatgaagaagaagaggacgctgaggattcggctggctctcctggaggacgcggaaccggcccttctgcacccagggacgcctctctcgtctatgacgccgtcaaatatacattggtggttgacgagcacacccagttggaactcgtcagtctcaggcgctgtgctgggctcggacacgacagcgaggaggactctggtggggaggcatccgaagaagaagctggcgccgcgctgttaggtggcggacaggtttctggagatacatcaccggacagtccagacttgactttttcaaagaagttcctgaacgtttttgtgaattccacttctcggtcatcatccacagagtctttcggattgttctcttgcctcgtcaatggagaggaacgcgagcagacacacagggctgtgttccggtttatcccgagacatccagatgaactggagttagatgtcgatgatcctgtgctggtcgaagccgaagaagatgacttttggtttcgaggattcaacatgaggactggcgaaagaggagtcttcccggcattttacgcacacgccgttccaggccccgccaaggacctgctcgggtcaaaacggtctccctgttgggtggagaggttcgacgtccagtttctggggagcgtggaggtgccctgccatcagggtaatggtattctgtgcgctgccatgcaaaaaattgcaacagcccgaaagctcaccgttcatctgcgccccccggcatcctgtgacctggaaatatccctccgcggagtgaaactatccctgtcaggtggtggccctgaatttcaaaggtgcagccatttttttcaaatgaagaatatcagtttttgtggctgccacccacgaaactcctgttactttggttttatcactaagcaccccctgctgagccggttcgcctgccacgtgttcgtgtcacaggaatccatgcggcccgtagctcaatccgttggaagggccttcttggaatattaccaggaacatctggcttatgcctgcccaacagaagacatttacctcgagtag

SEQ ID NO: 324343 - DNA, 1677 bp, Artificial Sequence
  derived and/or modified sequence
atgatcagcagcatcagcgagaccgagctggagctgagcagcgacggcggttcttcaagcagcggacgcagttctcatctgaccaatagtattgaggaggctagctcaccggcctccgagcctgaaccgccaagggagccacccagacgcccagcttttctccccgtgggccctgatgacaccaatagtgagtacgagtcagggagcgaatctgagcctgacctgagtgaagatgccgactcaccatggttattaagcaaccttgtaagcaggatgatcagcgaaggctcttcaccaatcagatgcccaggacagtgtttgagtcccgcccctcggccgcctggagagcctgtgagccctgcggggggtgcggcacaggatagtcaggatcccgaggccgccgctggccctggcggagtggagctagtggatatggagaccctttgcgctcctccgccccccgcgccagctgccccccgaccaggcccagctcaaccgggaccctgtctcttccttagcaatccgacaagggacacgatcaccccgctttgggccgccccgggcagggcagctaggcccggacgcgcttgctctgctgcttgctcagaagaggaggatgaagaagacgatgaggaggaagaagatgcagaggattcagcgggctcacctgggggaaggggaactggaccaagcgccccgagagatgcaagtctggtctacgacgcggttaagtacacacttgtggtcgacgagcatactcagttagagttagtgtctttacggcggtgtgccgggctgggacacgatagcgaggaagatagcggtggggaagcatccgaggaagaagcaggggccgccttactcggcggcggccaggtcagcggggatacatcacctgactctcctgaccttactttcagcaaaaagttcctgaacgtgttcgtgaactcgacatcgcggtcttctagtaccgagagttttggtttgttctcatgcctggtcaacggcgaggagcgtgaacaaacccaccgagctgtgttcaggttcatcccaagacatcccgatgagcttgaactagacgttgacgaccctgttctggttgaggcggaggaagacgatttctggttccgaggtttcaacatgagaacaggcgagagaggcgttttcccagctttctatgcacacgcagtccccgggccagccaaagatctccttgggtctaaacggagcccctgttgggtagaaagattcgatgttcaattcctcgggagcgtagaggtcccgtgccaccagggaaacgggatcctgtgcgctgccatgcagaaaattgcaactgcccgcaagcttacggtacatttgagaccacccgcaagctgtgacctggagatttccttacggggggtcaaactgtccctttctggcggcggacccgagtttcaaaggtgttcccactttttccagatgaaaaacatctccttttgcggatgccacccccggaattcttgctacttcggttttattactaagcaccccctcctaagccggttcgcttgccacgtctttgtcagccaggaaagtatgagacctgtggcacagtcggtcggacgcgctttcctcgaatactaccaggagcacctagcttatgcatgccccaccgaggacatctatctggagtag

SEQ ID NO: 324344 - DNA, 1641 bp, Artificial Sequence
  derived and/or modified sequence
atggccgaccgggccgagatgttcagcctgagcaccttccacagcctctccccacctggatgccgaccccctcaagacattagcttggaggagtttgatgacgaggacctctcagagattaccgatgactgcggactaggactgagttacgactctgatcattgcgagaaggactcgttgagcctcggtcgcagcgaacagccacaccctatctgttcattccaggatgacttccaggagttcgagatgatcgatgataatgaagaggaagatgacgaagacgaggaggaagaagaggaggaggaggaaggcgacggtgaaggccaggagggtggagatccaggaagtgaggctccagctcctggacctctgatccctagtcctagtgtagaggagccccacaaacaccgccctaccaccctgcgtctcactaccttgggggcccaggactccctaaacaacaatgggggatttgacttggtgagaccagcgtcttggcaagaaaccgctctctgttcgcctgcccccgaggctctgcgcgagctgcccggtcccctgcccgctactgatactggaccgggcggcgctcaatcacccgtgcggcccggctgtgactgcgaaggaaatagacccgcagagccccctgctccgggaggcacaagtccgtctagcgacccgggtattgaagctgatttacgaagtcgaagcagcgggggtagggggggtaggcgctctagccaggaactaagctcaccaggttcagatagcgaggatgcaggaggtcgcctcgggagaatgatctcttcaatctccgaaacagagctcgaattgtccagtgatgggggctcttcatcctcaggcagatcctcccacttgacttttagcaaaaagttcctcaatgtgttcgttaatagcacgtctagatcctcctccactgaatcttttgggttattctcctgtctggttaatggagaagagagggaacagacccatagggccgtctttcgatttatcccccggcatcctgacgagctcgagttagacgtcgacgatcccgtcctggtggaggcagaggaggatgacttttggttccgtggctttaacatgcgaacgggcgagcgcggggtctttcccgctttctacgctcacgccgtgcctggcccagccaaggacttgctcggctccaaaaggtcaccatgctgggtcgaaaggttcgatgtccagtttttggggtccgtggaagtcccatgtcaccagggcaatgggattctgtgcgcagctatgcagaagattgccactgctagaaaactgaccgtgcatctgcgtccaccagcctcttgcgacctggagatctcactgaggggcgtgaagctttccctcagcggaggaggtccggaatttcagagatgctcccacttttttcagatgaagaacatttccttctgtggttgtcacccacgcaactcctgctattttggcttcattactaaacacccactgctgagccgctttgcatgtcatgtcttcgtatcacaagagtcgatgcggccggttgctcagtccgtaggccgggcttttctcgaatattaccaggagcacctagcttacgcttgtccaacggaagatatctatctggagtag

SEQ ID NO: 324345 - DNA, 1797 bp, Artificial Sequence
  derived and/or modified sequence
atgttgcctgacttccctagtccatccacgtgggctcctggactactgctgccatcagggccagcactgctatccccaagtgtgttgcaagattcactgtctctcggccgatccgagcagccccacccgatatgtagcttccaggacgactttcaagagttcgagatgatagatgataatgaggaagaagatgacgaagatgaggaagaggaggaggaggaggaggagggtgacggggaaggtcaggaaggaggggatcccggtagcgaggctcctgcgcctggaccactgataccatctcccagtgttgaagagcctcataagcaccgaccgaccacactccggctgacaacactcggtgcccaggacagccaggatccagaagcagctgccggacctgggggagtggagctggtggatatggagactcttaatcctactagagacacaataactcccctgtgggccgctccaggtagggctgcaaggccagggagagcatgctccgcagcctgcagtgaggaggaggatgaggaagacgacgaggaagaagaagacgctgaggactccgccggtagcccagggggtagagggactggcccaagcgcgccaagggatgccagcctcgtctatgatgcagttaaatatacattggtagtggacgagcacacacagctggagctcgtttccctacgtaggtgcgcgggacttggacatgactcagaagaggattccggtggagaggcaagcgaggaggaagccggagcagcactcctcggcggaggacaggtgagcggagacactagtcccgactcaccagaccttacttttagcaagaaatttctgaacgtcttcgttaattctacgtcaaggtccagctccacagagtcatttggtctgtttagctgtttggtcaacggcgaagaaagagaacagacacaccgggctgtttttcgatttatacctaggcatccggacgaactagagctcgacgtggacgacccagtcctggtcgaggcagaagaggatgacttttggtttcggggtttcaacatgcggaccggcgagcggggtgtctttcccgctttttacgcccatgccgtgcctggccctgctaaagacttgttagggtcaaaaaggagcccctgctgggttgagagattcgatgttcaattccttgggagtgttgaggtgccgtgccatcagggcaacggcatcctctgcgccgcaatgcagaagatcgccaccgccagaaagcttacagtgcaccttagacctcctgcgagctgtgaccttgaaatatctctacggggtgttaagctgtctctgagtggcggagggccagaatttcagagatgctcccactttttccagatgaaaaacatcagcttttgtggatgtcaccccagaaacagctgcgaagcaccacagggggctgcctttcagtgggaacgcggtgttgacagaaaaagggtgctccagacgcgtggaaatgtgcaaccacacctgggcgctggccagggggcagctttgaatagagcaacggagggatcctctacaggctctgagaaaggagaatggacgcctctggttatcatggagttgacacaaagcgtgaattcctgttatttcggtttcatcaccaagcacccattgctgtctcgattcgcgtgccacgttttcgtgtcgcaggaaagtatgcggcctgtggcacagtcagtggggagggcctttctggagtattaccaggaacatctcgcttacgcatgcccaaccgaggatatctaccttgaatag

SEQ ID NO: 324346 - DNA, 1335 bp, Artificial Sequence
  derived and/or modified sequence
atggctgacagagctgagatgttttctctgagcacttttcattccctgagccctccaggttgtcggccaccacaggacataagcctggaggaattcgacgatgaggacctgtccgaaatcacagacgactgtggattaggcctcagctacgacagcgatcattgtgagaaagactccctgagcctgggtcgtagcgagcagcctcatccaatttgcagcttccaggacgatttccaggaatttgagatgatagacgacaatgaggaggaggaagatgaggaggatgacgaagaagaggaagatgcagaggactccgccggatctcctggcggacggggaaccggaccgagcgccccacgagacgctagcttggtttatgatgcagttaagtatacactcgttgtggacgaacatactcagctggaattggtcagccttcgtcgctgcgcaggactggggcacgacagtgaagaggacagcggaggggaggcctctgaggaggaggcgggtgctgcgctcctggggggaggccaagtgtccggcgataccagtccagactctcccgacctgaccttttccaaaaaatttttgaacgtcttcgtgaactccacaagtagaagctcttccaccgagagtttcggacttttcagctgtctcgtgaacggagaggaaagggaacagacccaccgggcagtgtttcggtttatcccaagacatcctgacgaattggagctggacgtagacgaccctgttctggttgaggccgaagaagatgatttttggttccgcggattcaatatgaggacaggggagcggggagtgttccccgcattctacgctcatgcggtgcctggccctgctaaggatcttttggggtcgaagaggagtccttgctgggtggagaggttcgatgtgcaattcctcggcagcgtagaagtgccctgtcaccagggtaacgggatactgtgtgccgctatgcagaaaatcgccaccgcccgtaaactgacggtccacttacgcccacctgcatcttgtgacctggagattagtttgaggggggttaagctgagtctgagtggcggtggaccagagtttcaacggtgctctcattttttccaaatgaagaatatctccttttgtgggtgtcacccacgaaacagctgttatttcggcttcattaccaaacacccactgctctcccgattcgcttgtcacgtgtttgtaagccaggagagtatgcgcccagtggcacagtccgtgggacgcgctttcctcgaatactaccaggagcacctggcctacgcctgtccaactgaagacatctatctggagtag

SEQ ID NO: 324347 - DNA, 1677 bp, Artificial Sequence
  derived and/or modified sequence
atgatatccagtatctcagaaacagaattggagctatctagcgacggaggctcctcctcctcaggcaggagcagccacctcaccaacagtatcgaggaagctagttcaccggctagtgaaccagaaccaccccgagaacctcctaggagaccagcatttctgcctgtgggtccagacgacacaaacagtgaatacgaaagtgggtctgagtcagaacccgacctttcagaagatgcagatagtccctggctcctctcaaacctagtgtcaagaatgatttctgagggtagcagcccaatccggtgtccaggacaatgcctgtccccagccccacgccctccgggtgagccagtgtctcccgcagggggtgcggctcaagattcccaggaccccgaagcagccgcaggacctggaggcgtcgagcttgtggacatggaaaccctgtgcgctcccccacctcctgcccctgcggctccacggcctggccctgcccaacctgggccatgtctgttcctctccaacccaacccgtgataccatcacaccattatgggccgctccaggccgtgccgcaaggcctggacgggcttgtagcgctgcatgtagcgaggaggaagatgaggaggatgacgaagaagaagaagatgcagaagactcagctggatcacccggaggtcgtgggacaggtccatcggcccctagggacgcctcactggtgtatgacgcagtaaaatacactctggtcgtcgatgagcacacccagctagaactggttagcttgcgtagatgtgctggcctcggacacgactcggaggaagatagcggtggcgaggctagcgaggaggaagcgggagcggctctcctgggagggggacaagtgagcggggatacttcccccgattcccctgatctcaccttctctaagaaattcctcaacgtcttcgtcaactcgacctcacgaagtagtagcacggagagcttcggactgttttcttgtctggtgaatggtgaagagagggaacagacccatcgcgctgtatttcggttcattccgaggcatccagatgagctcgagttggatgtggatgacccagttttagtggaggctgaggaagacgacttttggttccgcggattcaacatgagaacaggcgaacggggagtatttcctgcgttttacgcccatgccgtaccaggccctgccaaggacctgctggggtccaaacggtccccatgctgggtggagagatttgatgttcaatttcttggaagtgtggaggtgccctgccaccaggggaatggtattctctgtgccgctatgcagaaaatcgctactgcccgtaaactgaccgtccatctgagacctcccgcatcttgcgaccttgaaatcagtcttagaggcgtgaaattgtccctgtccggtggtggcccagaattccagaggtgctcacacttctttcagatgaaaaacatctctttctgtggctgccatcccaggaacagttgttatttcggctttattactaagcaccctctgctcagcagatttgcctgtcatgttttcgtcagccaagagtctatgcgcccagtggcgcagagtgtgggaagagcgttcctcgagtattatcaagaacatctggcctacgcgtgccctactgaagacatctacctcgaatag

SEQ ID NO: 324348 - DNA, 1677 bp, Artificial Sequence
  derived and/or modified sequence
atgataagcagcatcagcgagaccgaactggagttgagctccgacgggggatccagcagtagtggccgaagtagtcacctgacaaactctatcgaagaagcctccagccctgctagcgagcccgagccaccacgcgagccccctaggagaccagccttcctgcccgtcggccctgatgatacgaacagcgaatatgaatctggaagcgagagcgaacctgatctgagcgaagacgcggactctccatggctgctctctaatcttgtgagtagaatgataagtgagggaagcagcccaatcagatgccctggccaatgcctaagccctgctccccgtcccccaggtgagccagtgagccccgcaggcggagctgcacaggactcccaggaccccgaggcggcagcaggcccaggtggggtagagttggttgacatggagaccctctgtgcccctcccccaccagctcctgcagctcctcggcctggtccagcccaaccgggaccctgcttgttcctgtccaatcctactagagacactatcacccctttgtgggccgctccaggccgagcagccagacctgggagggcatgctccgcggcttgctcagaggaggaggacgaggaggacgatgaggaagaggaggacgccgaggattcagcaggaagccctggcggtcggggaactggacccagcgcccctagggacgcgtctttggtatacgatgcggtcaagtacactctggtagttgatgagcatacccagctggaacttgtgagcctgcggcgttgtgcagggctgggtcacgactccgaggaggattccggcggtgaggccagtgaagaggaagcaggggcagccctactggggggtggccaggtcagcggggacacctcccccgatagccccgatctgactttttccaagaaattcctcaacgtgttcgtcaacagcacctcacgttcttcctctactgagtccttcggtctgttctcctgtttggtgaatggggaggaacgcgagcagactcaccgggctgtctttcggtttattcctagacaccctgatgagctggagctggatgtcgacgacccagtcctggttgaggctgaggaagacgatttttggttcagaggcttcaatatgcgaaccggggagagaggggttttccccgcattctatgctcatgcagtacccggaccggcaaaggacctgctaggttctaagcgaagcccatgctgggtcgaacgattcgatgtccagtttctcggaagtgtggaagttccttgccaccaagggaatggaatcctctgcgcggctatgcagaaaatagcaactgcgagaaagttgactgtgcacctccgtcctcctgcatcttgcgacctggaaatctcgctgagaggtgtgaaattatccctctctgggggaggccctgaattccagaggtgctcccacttttttcaaatgaaaaatatatctttttgcggatgtcaccccagaaactcctgctatttcggcttcatcactaagcatccattgctctcaaggtttgcatgtcatgtgtttgtaagccaggagagtatgcggccagtagcccagtcagtcggtagggctttcctggagtattaccaggaacacctggcgtatgcttgcccaacagaagacatttacttggaatag

SEQ ID NO: 324349 - DNA, 1641 bp, Artificial Sequence
  derived and/or modified sequence
atggctgatagagctgaaatgttctcactgtcaaccttccattctctcagccctcccggttgtaggcctcctcaagatatatcactcgaggagttcgatgatgaagatctctctgagattaccgacgactgcggcctcggtctgagttacgactctgaccactgtgaaaaagacagcttgagcttaggcaggtcagaacaaccacaccctatctgcagcttccaggatgatttccaagaatttgagatgattgacgataacgaggaggaggatgatgaggacgaggaagaggaagaagaagaggaggagggcgatggagagggccaggaaggcggagaccctgggtcagaggccccagcaccagggcctctgatcccttcaccctccgtcgaggagccccacaaacatcgcccaacgaccctgcggttaacaactctcggtgcacaggatagtctgaacaacaacggagggttcgacttggtgcgccctgcctcttggcaagagacagctttgtgctcccctgctcctgaggctctacgagagctgcccggacctctaccagctacagataccgggccaggaggcgctcagagccccgtgagaccaggatgtgattgtgaaggaaatagacctgctgaacctccagctcctgggggaacttcaccgtcaagcgacccagggattgaggcggatctcaggagtcggtcgtctggagggcgagggggacggaggtcgagccaggagctatcctctccaggatccgactctgaagacgcagggggtaggctgggaagaatgatctcctcaatttccgagactgagctcgagctttcttcagacggcggttcctcttcaagtggccgatctagccatctcactttctctaaaaaattcttgaacgtgtttgtgaattccacctccaggtcatcaagtacggaatccttcggtcttttctcgtgcctggtcaacggagaagagcgggaacagacacatcgggctgtgttcaggttcatcccgaggcaccctgacgagctggagctggacgtggacgaccctgttctcgtagaggcagaggaagacgacttctggttccggggatttaatatgcgaactggcgaacgtggggtcttccctgcattttacgctcacgccgtacctggccctgccaaagacctgctgggatcaaaacgctctccgtgttgggttgagcgttttgacgtgcagtttcttggatccgtcgaagtaccttgccatcaggggaatgggatcctgtgtgccgcaatgcaaaaaatcgcgaccgcacggaagctgaccgtgcaccttcggcctcccgcatcttgcgacctggaaattagccttcgcggagtaaaactctctctgtccgggggtggacccgaattccagcgttgctcacacttcttccaaatgaaaaatattagcttttgcggctgtcatccgagaaactcgtgttattttggattcatcaccaagcatcccctgctttcaaggtttgcctgccatgtgtttgttagccaggaaagtatgagacccgtcgctcagagtgttggaagggcgtttttggagtactaccaggagcatctggcttacgcctgccccactgaggatatttacctggagtag

SEQ ID NO: 324350 - DNA, 1797 bp, Artificial Sequence
  derived and/or modified sequence
atgctccctgatttcccctcccctagtacctgggcccctggacttctactgccatccggaccagccttgctcagcccgtcagttctgcaagactctcttagcttaggtcgaagtgaacagcctcatccaatatgttcctttcaagatgatttccaagagtttgagatgatcgatgataatgaagaggaggatgatgaggatgaggaagaggaggaagaagaggaagaaggagatggagaagggcaagaaggtggtgatcccggaagtgaggcacccgctccgggccccctgattcctagcccttccgttgaagaaccacataagcacaggcccacaacccttaggctcaccacactcggagcacaagactcccaagaccctgaagcagcggctggtcccggtggcgtggagctcgtggatatggaaaccctgaatccgacccgggataccatcacccccctctgggccgcccctggacgcgccgcccggcccggaagagcttgtagtgccgcctgcagcgaggaagaagacgaagaggatgacgaggaggaggaagatgccgaagactcggccgggtctcccggcggtcgcggcacaggacctagcgcaccgcgcgacgcatctcttgtttatgacgcagtcaagtatactttggtagtcgacgagcacacacagttggagttggtctctctgagaagatgtgcaggcctgggacatgactccgaagaagatagtggcggggaagcctctgaagaggaggctggggcagctcttctgggcggtggacaggtttcaggcgatacgtccccagactccccagatctgacattttctaaaaagttcttaaatgtcttcgtaaacagcacgtctcggtcttcttctactgaaagctttggcctgttttcatgtctggtgaatggagaggagcgggaacagacccatcgagctgtgtttagattcattccacgccatccagacgagctcgagctggacgtcgatgatcctgtgcttgttgaagcagaggaggacgacttctggttccgcgggttcaacatgcggaccggagagcgaggtgtgttccccgccttctacgcccacgccgtgcctggaccagcaaaagacctcctggggtccaaacgaagtccgtgctgggtcgagcggttcgatgtccaattccttggtagcgtggaggtgccttgccaccagggcaacggcatcctgtgtgccgctatgcagaaaattgcgacagcacgcaaactgactgtgcaccttaggcccccagctagttgcgatctcgagatctctttacggggcgtgaagctgagcctgagcggaggggggcctgagtttcaaagatgctcccactttttccagatgaagaacatctcattttgtggttgccaccctcgcaacagttgcgaagcacctcagggagctgcttttcagtgggaacgaggcgtggacagaaagagggtgcttcagacacgaggtaatgttcagcctcacctaggcgctggccagggggcagccctgaatagagcaacggagggttccagcacaggaagcgagaagggtgaatggaccccacttgtaatcatggagctgacacagtcggttaattcatgttacttcggatttatcaccaaacacccactcctgagtagattcgcgtgccacgtgttcgtgtcacaggagagcatgcgtccagttgcccaatccgtgggtcgcgcttttttggaatactatcaggaacacctcgcttatgcatgtcccactgaggacatctacctggaatag

SEQ ID NO: 324351 - DNA, 1797 bp, Artificial Sequence
  derived and/or modified sequence
atgctccctgatttcccctcccctagtacctgggcccctggacttctactgccatccggaccagccttgctcagcccgtcagttctgcaagactctcttagcttaggtcgaagtgaacagcctcatccaatatgttcctttcaagatgatttccaagagtttgagatgatcgatgataatgaagaggaggatgatgaggatgaggaagaggaggaagaagaggaagaaggagatggagaagggcaagaaggtggtgatcccggaagtgaggcacccgctccgggccccctgattcctagcccaagcgtagaagagccacacaagcaccgcccgaccactctgcgccttaccacccttggtgctcaggacagccaagatcctgaggctgcggccgggcccggaggagtcgagcttgttgacatggagaccctgaacccaaccagagatactatcacccccctttgggcagcaccagggcgagcagctagacccggacgtgcgtgctctgccgcatgttccgaggaggaggacgaggaggacgatgaagaagaagaagacgccgaagattccgccggatcacctgggggcagaggcaccggccctagcgcaccgcgcgacgcatctcttgtttatgacgcagtcaagtatactttggtagtcgacgagcacacacagttggagttggtctctctgagaagatgtgcaggcctgggacatgactccgaagaagatagtggcggggaagcctctgaagaggaggctggggcagctcttctgggcggtggacaggtttcaggcgatacgtccccagactccccagatctgacattttctaaaaagttcttaaatgtcttcgtaaacagcacgtctcggtcttcttctactgaaagctttggcctgttctcttgcctagtaaatggagaggagagggagcagactcatagagccgtattcagattcattcccaggcatcccgacgagctcgaattggacgttgacgaccctgtgttagtcgaggctgaggaggatgacttttggtttcgaggatttaatatgagaacgggcgagaggggagtgttccccgcattctatgcgcacgccgtaccagggcctgccaaggacttactgggtagtaaacggagcccttgctgggtagaacgttttgatgtgcagttcctcgggtccgttgaagtcccgtgccatcagggtaatggaatcttatgtgcagccatgcagaagatagccaccgccaggaagctgaccgttcatctacgtccccccgcctcatgtgacttagagataagcttaagaggtgttaaactgtctttaagcggcggcggcccagagttccaaaggtgttcccatttcttccagatgaaaaacatatccttctgtggatgccatccgaggaattcctgcgaagcacctcaaggcgcagcctttcaatgggagcggggcgttgatagaaaacgggtccttcagactcgcggtaacgtacagccacacctcggcgctggacagggcgctgcactcaaccgcgccaccgaaggatcctccaccggatccgagaaaggcgaatggacaccgctcgtgatcatggagctcacccaatcagtgaatagttgttactttgggtttatcaccaaacatcctcttttgtcaagatttgcctgtcacgttttcgtgtctcaggaaagtatgagacctgtcgcacagtcagtcggtcgagcattcctcgagtattaccaagaacaccttgcatatgcctgtcccacggaggatatctatcttgaatag

SEQ ID NO: 324352 - DNA, 1797 bp, Artificial Sequence
  derived and/or modified sequence
atgctgcccgacttccccagccccagcacctgggcccccggcctgctgctgcccagcggccccgccctgctgagccccagcgtgctgcaggacagcctgagcctgggcagaagcgagcagccccaccccatctgcagcttccaggacgacttccaggagttcgagatgatcgacgacaacgaggaggaggacgacgaggacgaggaggaggaggaggaggaggaggagggcgacggcgagggccaggagggcggcgaccccggcagcgaggcccccgcccccggccccctgatccccagccccagcgtggaggagccccacaagcacagacccaccaccctgagactgaccaccctgggcgcccaggacagccaggaccccgaggccgccgccggccccggcggcgtggagctggtggacatggagaccctgaaccccaccagagacaccatcacccccctgtgggccgcccccggcagagccgccagacccggcagagcctgcagcgccgcctgcagcgaggaggaggacgaggaggacgacgaggaggaggaggacgccgaggacagcgccggcagccccggcggcagaggcaccggccccagcgcccccagagacgccagcctggtgtacgacgccgtgaagtacaccctggtggtggacgagcacacccagctggagctggtgagcctgagaagatgcgccggcctgggccacgacagcgaggaggacagcggcggcgaggccagcgaggaggaggccggcgccgccctgctgggcggcggccaggtgagcggcgacaccagccccgacagccccgacctgaccttcagcaagaagttcctgaacgtgttcgtgaacagcaccagcagaagcagcagcaccgagagcttcggcctgttcagctgcctggtgaacggcgaggagagagagcagacccacagagccgtgttcagattcatccccagacaccccgacgagctggagctggacgtggacgaccccgtgctggtggaggccgaggaggacgacttctggttcagaggcttcaacatgagaaccggcgagagaggcgtgttccccgccttctacgcccacgccgtgcccggccccgccaaggacctgctgggcagcaagagaagcccctgctgggtggagagattcgacgtgcagttcctgggcagcgtggaggtgccctgccaccagggcaacggcatcctgtgcgccgccatgcagaagatcgccaccgccagaaagctgaccgtgcacctgagaccccccgccagctgcgacctggagatcagcctgagaggcgtgaagctgagcctgagcggcggcggccccgagttccagagatgcagccacttcttccagatgaagaacatcagcttctgcggctgccaccccagaaacagctgcgaggccccccagggcgccgccttccagtgggagagaggcgtggacagaaagagagtgctgcagaccagaggcaacgtgcagccccacctgggcgccggccagggcgccgccctgaacagagccaccgagggcagcagcaccggcagcgagaagggcgagtggacccccctggtgatcatggagctgacccagagcgtgaacagctgctacttcggcttcatcaccaagcaccccctgctgagcagattcgcctgccacgtgttcgtgagccaggagagcatgagacccgtggcccagagcgtgggcagagccttcctggagtactaccaggagcacctggcctacgcctgccccaccgaggacatctacctggagtag

SEQ ID NO: 324353 - DNA, 1335 bp, Artificial Sequence
  derived and/or modified sequence
atggccgacagagccgagatgttcagcctgagcaccttccacagcctgagcccccccggctgcagacccccccaggacatcagcctggaggagttcgacgacgaggacctgagcgagatcaccgacgactgcggcctgggcctgagctacgacagcgaccactgcgagaaggacagcctgagcctgggcagaagcgagcagccccaccccatctgcagcttccaggacgacttccaggagttcgagatgatcgacgacaacgaggaggaggaggacgaggaggacgacgaggaggaggaggacgccgaggacagcgccggcagccccggcggcagaggcaccggccccagcgcccccagagacgccagcctggtgtacgacgccgtgaagtacaccctggtggtggacgagcacacccagctggagctggtgagcctgagaagatgcgccggcctgggccacgacagcgaggaggacagcggcggcgaggccagcgaggaggaggccggcgccgccctgctgggcggcggccaggtgagcggcgacaccagccccgacagccccgacctgaccttcagcaagaagttcctgaacgtgttcgtgaacagcaccagcagaagcagcagcaccgagagcttcggcctgttcagctgcctggtgaacggcgaggagagagagcagacccacagagccgtgttcagattcatccccagacaccccgacgagctggagctggacgtggacgaccccgtgctggtggaggccgaggaggacgacttctggttcagaggcttcaacatgagaaccggcgagagaggcgtgttccccgccttctacgcccacgccgtgcccggccccgccaaggacctgctgggcagcaagagaagcccctgctgggtggagagattcgacgtgcagttcctgggcagcgtggaggtgccctgccaccagggcaacggcatcctgtgcgccgccatgcagaagatcgccaccgccagaaagctgaccgtgcacctgagaccccccgccagctgcgacctggagatcagcctgagaggcgtgaagctgagcctgagcggcggcggccccgagttccagagatgcagccacttcttccagatgaagaacatcagcttctgcggctgccaccccagaaacagctgctacttcggcttcatcaccaagcaccccctgctgagcagattcgcctgccacgtgttcgtgagccaggagagcatgagacccgtggcccagagcgtgggcagagccttcctggagtactaccaggagcacctggcctacgcctgccccaccgaggacatctacctggagtag

SEQ ID NO: 324354 - DNA, 1677 bp, Artificial Sequence
  derived and/or modified sequence
atgatcagcagcatcagcgagaccgagctggagctgagcagcgacggcggcagcagcagcagcggcagaagcagccacctgaccaacagcatcgaggaggccagcagccccgccagcgagcccgagccccccagagagccccccagaagacccgccttcctgcccgtgggccccgacgacaccaacagcgagtacgagagcggcagcgagagcgagcccgacctgagcgaggacgccgacagcccctggctgctgagcaacctggtgagcagaatgatcagcgagggcagcagccccatcagatgccccggccagtgcctgagccccgcccccagaccccccggcgagcccgtgagccccgccggcggcgccgcccaggacagccaggaccccgaggccgccgccggccccggcggcgtggagctggtggacatggagaccctgtgcgccccccccccccccgcccccgccgcccccagacccggccccgcccagcccggcccctgcctgttcctgagcaaccccaccagagacaccatcacccccctgtgggccgcccccggcagagccgccagacccggcagagcctgcagcgccgcctgcagcgaggaggaggacgaggaggacgacgaggaggaggaggacgccgaggacagcgccggcagccccggcggcagaggcaccggccccagcgcccccagagacgccagcctggtgtacgacgccgtgaagtacaccctggtggtggacgagcacacccagctggagctggtgagcctgagaagatgcgccggcctgggccacgacagcgaggaggacagcggcggcgaggccagcgaggaggaggccggcgccgccctgctgggcggcggccaggtgagcggcgacaccagccccgacagccccgacctgaccttcagcaagaagttcctgaacgtgttcgtgaacagcaccagcagaagcagcagcaccgagagcttcggcctgttcagctgcctggtgaacggcgaggagagagagcagacccacagagccgtgttcagattcatccccagacaccccgacgagctggagctggacgtggacgaccccgtgctggtggaggccgaggaggacgacttctggttcagaggcttcaacatgagaaccggcgagagaggcgtgttccccgccttctacgcccacgccgtgcccggccccgccaaggacctgctgggcagcaagagaagcccctgctgggtggagagattcgacgtgcagttcctgggcagcgtggaggtgccctgccaccagggcaacggcatcctgtgcgccgccatgcagaagatcgccaccgccagaaagctgaccgtgcacctgagaccccccgccagctgcgacctggagatcagcctgagaggcgtgaagctgagcctgagcggcggcggccccgagttccagagatgcagccacttcttccagatgaagaacatcagcttctgcggctgccaccccagaaacagctgctacttcggcttcatcaccaagcaccccctgctgagcagattcgcctgccacgtgttcgtgagccaggagagcatgagacccgtggcccagagcgtgggcagagccttcctggagtactaccaggagcacctggcctacgcctgccccaccgaggacatctacctggagtag

SEQ ID NO: 324355 - DNA, 1641 bp, Artificial Sequence
  derived and/or modified sequence
atggccgacagagccgagatgttcagcctgagcaccttccacagcctgagcccccccggctgcagacccccccaggacatcagcctggaggagttcgacgacgaggacctgagcgagatcaccgacgactgcggcctgggcctgagctacgacagcgaccactgcgagaaggacagcctgagcctgggcagaagcgagcagccccaccccatctgcagcttccaggacgacttccaggagttcgagatgatcgacgacaacgaggaggaggacgacgaggacgaggaggaggaggaggaggaggaggagggcgacggcgagggccaggagggcggcgaccccggcagcgaggcccccgcccccggccccctgatccccagccccagcgtggaggagccccacaagcacagacccaccaccctgagactgaccaccctgggcgcccaggacagcctgaacaacaacggcggcttcgacctggtgagacccgccagctggcaggagaccgccctgtgcagccccgcccccgaggccctgagagagctgcccggccccctgcccgccaccgacaccggccccggcggcgcccagagccccgtgagacccggctgcgactgcgagggcaacagacccgccgagccccccgcccccggcggcaccagccccagcagcgaccccggcatcgaggccgacctgagaagcagaagcagcggcggcagaggcggcagaagaagcagccaggagctgagcagccccggcagcgacagcgaggacgccggcggcagactgggcagaatgatcagcagcatcagcgagaccgagctggagctgagcagcgacggcggcagcagcagcagcggcagaagcagccacctgaccttcagcaagaagttcctgaacgtgttcgtgaacagcaccagcagaagcagcagcaccgagagcttcggcctgttcagctgcctggtgaacggcgaggagagagagcagacccacagagccgtgttcagattcatccccagacaccccgacgagctggagctggacgtggacgaccccgtgctggtggaggccgaggaggacgacttctggttcagaggcttcaacatgagaaccggcgagagaggcgtgttccccgccttctacgcccacgccgtgcccggccccgccaaggacctgctgggcagcaagagaagcccctgctgggtggagagattcgacgtgcagttcctgggcagcgtggaggtgccctgccaccagggcaacggcatcctgtgcgccgccatgcagaagatcgccaccgccagaaagctgaccgtgcacctgagaccccccgccagctgcgacctggagatcagcctgagaggcgtgaagctgagcctgagcggcggcggccccgagttccagagatgcagccacttcttccagatgaagaacatcagcttctgcggctgccaccccagaaacagctgctacttcggcttcatcaccaagcaccccctgctgagcagattcgcctgccacgtgttcgtgagccaggagagcatgagacccgtggcccagagcgtgggcagagccttcctggagtactaccaggagcacctggcctacgcctgccccaccgaggacatctacctggagtag

SEQ ID NO: 324356 - DNA, 3500 bp, Artificial Sequence
  derived and/or modified sequence
ctcacccctctcactgttctgtccccagggctttgcctgcaggagccacaggaaccggaacatttttaacagcttctgccggccacgccccgtgtccatgtccaggtcagtcctggaggccctgacgtcctccactgccatgcagtgtgtcccctctgacggctgcgcgatgctcctgcgtgtacgcgcctccatcaccctgcatgagcgcctgcggggcctggaggcctgtgccatgagcctggacacccaggagacgcagtgtcagagcgtgtgggtggccagggcctcccaccggcagcagggggggcagcagctccaagtgcactttggctgctttgcggtgagcgtggcccagcacctctatgtcaccctgaggaccatccctcatttctgcggggtccagctggaccagaggcacctcgtggaagcggggaagctcagctactgggtggaccggaggcgcaaggcgattctggtgcaagtgcccagggcctccgggagccccgactactacctgcggctctgcctcaagcggttcacctgcgaggacgccggcgcccctgtgcgagtgaccgccaacagcgtctcccaggccgtcttcctgccctacagccaggagctgccgtgcctgtgcctggagggctggtctgcgacccctgacgcggtgcggatccagatctgcccctttgaaaacgacactgaggcactggaggtgctgtgggacacggtctactaccacccggagagccagacactgagctgggagcccgcctgccctgtgagtggccatgtgagcctgtgctggcgcccggggccgggggccggctgccgtaagctgcagcaatccagccagctggtgcatcgcagagtgcagtacccgctggtggacacccagccccagctctgcctgaagttctctaccagttgggggtcctgggtgcggtgccctttcgaacagcgtcgcttcccaaccccgcccacttccaggtgcacctgtgtcacaggaggaagtcacagctccctgcctgccaacgcacactccaggccagcccgctcccttcagcctcaggtgacctggcagccgcccctgcttttgccttcctagaccttcccagggaggaggcctgtgccccaggcatctgcatccagggctggaggaccgatgtacacttctccgtcccccagcagctctgcaacctccgctccagtgggtgcccatctctcaggggccgcaggaggccgaggactagacctaggcctcccacggcaggctgggcgtggcgtgcactgaacaggagactgggtgggggaaacggggagaccatccggccctgagtcaggtcaggcttctgcgccaaacccaggtctgtgcccagcactgccctccagccttgcatttccctccaccacacaccgctgggcctcccgcacgcccaccctggtctcactgtcactggccttgcctcctcctccctgggggtccaccttccctgatcagagctctggttccaaccgccagtgacttgggatgtccctttgcccaccagccactgaggcccaggctcccaggacccagggtacatcaggacaggactctgcccagtggacagaactaagcacatgtggcctgggtgtggtcaggagcgtggctctgccttggagtccaggaagggtcagagctggcactcctacctgcacccctccctgtgagcaaaagagcttgcctagcttcgggtggggtgaaccgcaacagccacagaggtgggaggggtgggagggggtggataggacagcctggcacccagggcctctggagaccctttccagggagcaccagtgggccaggcaggggtctctggaatgtctcctcagctcagctgagccacagccatttcagggcagcctgctgcccacaggacatgcccagggccgtggcagtacccgcagaccttcagctcccccttctcccagcaagactttttggccaagcctaggtccccctccctagcaaaggtcacctccagcagatcacagactaaaggggcaatggccacctgctggtcaggtgtccctggggctggcacctgccactgtggagtgcccatgctatgctgggcaagtccacggccccagggacaggcctggaggcagcaggaggaccgggcctggctcaggtggggggatctgggggtcatacacactcctcttggggccagggtgggctcctccttcacttgtctgctgagcctccctgcagatggaaggctgctgtccacagccactggcaccccaggactgggcagccccctccccttccctcacatgtctcagcctcgcacagtgggggcagggctgggaggtggtgtcccagccagtaccacccctacgtctctctccagctgcacccacccacatgggacggcagcctgaggccaggaatctcctcacgaacaagtaggtgccagggacacattgctggggggcaggaggccaaggcacagcctcggacagctgagccaggcccccctccgagagtgtggggtgttctcacctgactgtggggcctaggcacctgctggctgtcctggggctacagctccatggggccctcaggggctctgggtcacataaaagaccttcagccctgtcctgagtcccctgggaacagcaggagctgggtgggctaccccttccccggatggcccaggtgctggaccccagcctccctctcagacaattcatggtcatggccactgtccctggccctgaagacaaggccctggcagctgcctggagcttccccagtgctctggggtgcagggtgcaaccccacccttcctgtagctgatcaggcccgaggtggtcaaggatcaccccagtttctgcccagggcaccccacactggctggagtccacctctcctgtctgtgcatccttgggtgctgagcttcactggggcacccgccccactcggacccctccagagggtctcagcttccccagatcccagccccactcacccagcaacggtcagtcacttcctgtggtctcagaggccacctgcctgggggccacctgctgggatgtgcggttctcagacattccaagtggcacatccaggtcccagccaggggtgcccagcagtggcctgtgcagtgggccatggggtcggcccttgaagacttctcgtgtgggtcacgtaggctctccggcttccccgctgagccaccctctggagcctggacatcgtctcacctgagtgctgtgcaggaccacatgcccagcctgtcccagcggtggtcgcaccccatctgcagatgcactcccaccgcagtctgggcccaggctgccctcttccagctggccgtgggccgctgggccttcttttccctcctgcaacagaggctgctatgtcccatagactggagagggggctgcagagcgagtaagtccccgccactcagtaaacattggtccaggggtagctgttaaaatgg

SEQ ID NO: 324357 - DNA, 3668 bp, Artificial Sequence
  derived and/or modified sequence
actgcacagccagatgctggctgggcaagcactcgcgttcttgggcctgacctggggcactttccagagcctggccatcccccggattacagaatgtggcctctcctgttctcagttacacagaatataagttgctgatttcccaggtttcggatcgttctgtctcccccttctcggaatgtgagctcctggagagggctttgcctgcaggagccacaggaaccggaacatttttaacagcttctgccggccacgccccgtgtccatgtccaggtcagtcctggaggccctgacgtcctccactgccatgcagtgtgtcccctctgacggctgcgcgatgctcctgcgtgtacgcgcctccatcaccctgcatgagcgcctgcggggcctggaggcctgtgccatgagcctggacacccaggagacgcagtgtcagagcgtgtgggtggccagggcctcccaccggcagcagggggggcagcagctccaagtgcactttggctgctttgcggtgagcgtggcccagcacctctatgtcaccctgaggaccatccctcatttctgcggggtccagctggaccagaggcacctcgtggaagcggggaagctcagctactgggtggaccggaggcgcaaggcgattctggtgcaagtgcccagggcctccgggagccccgactactacctgcggctctgcctcaagcggttcacctgcgaggacgccggcgcccctgtgcgagtgaccgccaacagcgtctcccaggccgtcttcctgccctacagccaggagctgccgtgcctgtgcctggagggctggtctgcgacccctgacgcggtgcggatccagatctgcccctttgaaaacgacactgaggcactggaggtgctgtgggacacggtctactaccacccggagagccagacactgagctgggagcccgcctgccctgtgagtggccatgtgagcctgtgctggcgcccggggccgggggccggctgccgtaagctgcagcaatccagccagctggtgcatcgcagagtgcagtacccgctggtggacacccagccccagctctgcctgaagttctctaccagttgggggtcctgggtgcggtgccctttcgaacagcgtcgcttcccaaccccgcccacttccaggtgcacctgtgtcacaggaggaagtcacagctccctgcctgccaacgcacactccaggccagcccgctcccttcagcctcaggtgacctggcagccgcccctgcttttgccttcctagaccttcccagggaggaggcctgtgccccaggcatctgcatccagggctggaggaccgatgtacacttctccgtcccccagcagctctgcaacctccgctccagtgggtgcccatctctcaggggccgcaggaggccgaggactagacctaggcctcccacggcaggctgggcgtggcgtgcactgaacaggagactgggtgggggaaacggggagaccatccggccctgagtcaggtcaggcttctgcgccaaacccaggtctgtgcccagcactgccctccagccttgcatttccctccaccacacaccgctgggcctcccgcacgcccaccctggtctcactgtcactggccttgcctcctcctccctgggggtccaccttccctgatcagagctctggttccaaccgccagtgacttgggatgtccctttgcccaccagccactgaggcccaggctcccaggacccagggtacatcaggacaggactctgcccagtggacagaactaagcacatgtggcctgggtgtggtcaggagcgtggctctgccttggagtccaggaagggtcagagctggcactcctacctgcacccctccctgtgagcaaaagagcttgcctagcttcgggtggggtgaaccgcaacagccacagaggtgggaggggtgggagggggtggataggacagcctggcacccagggcctctggagaccctttccagggagcaccagtgggccaggcaggggtctctggaatgtctcctcagctcagctgagccacagccatttcagggcagcctgctgcccacaggacatgcccagggccgtggcagtacccgcagaccttcagctcccccttctcccagcaagactttttggccaagcctaggtccccctccctagcaaaggtcacctccagcagatcacagactaaaggggcaatggccacctgctggtcaggtgtccctggggctggcacctgccactgtggagtgcccatgctatgctgggcaagtccacggccccagggacaggcctggaggcagcaggaggaccgggcctggctcaggtggggggatctgggggtcatacacactcctcttggggccagggtgggctcctccttcacttgtctgctgagcctccctgcagatggaaggctgctgtccacagccactggcaccccaggactgggcagccccctccccttccctcacatgtctcagcctcgcacagtgggggcagggctgggaggtggtgtcccagccagtaccacccctacgtctctctccagctgcacccacccacatgggacggcagcctgaggccaggaatctcctcacgaacaagtaggtgccagggacacattgctggggggcaggaggccaaggcacagcctcggacagctgagccaggcccccctccgagagtgtggggtgttctcacctgactgtggggcctaggcacctgctggctgtcctggggctacagctccatggggccctcaggggctctgggtcacataaaagaccttcagccctgtcctgagtcccctgggaacagcaggagctgggtgggctaccccttccccggatggcccaggtgctggaccccagcctccctctcagacaattcatggtcatggccactgtccctggccctgaagacaaggccctggcagctgcctggagcttccccagtgctctggggtgcagggtgcaaccccacccttcctgtagctgatcaggcccgaggtggtcaaggatcaccccagtttctgcccagggcaccccacactggctggagtccacctctcctgtctgtgcatccttgggtgctgagcttcactggggcacccgccccactcggacccctccagagggtctcagcttccccagatcccagccccactcacccagcaacggtcagtcacttcctgtggtctcagaggccacctgcctgggggccacctgctgggatgtgcggttctcagacattccaagtggcacatccaggtcccagccaggggtgcccagcagtggcctgtgcagtgggccatggggtcggcccttgaagacttctcgtgtgggtcacgtaggctctccggcttccccgctgagccaccctctggagcctggacatcgtctcacctgagtgctgtgcaggaccacatgcccagcctgtcccagcggtggtcgcaccccatctgcagatgcactcccaccgcagtctgggcccaggctgccctcttccagctggccgtgggccgctgggccttcttttccctcctgcaacagaggctgctatgtcccatagactggagagggggctgcagagcgagtaagtccccgccactcagtaaacattggtccaggggtagctgttaaaatgg

SEQ ID NO: 324358 - DNA, 1272 bp, Artificial Sequence
  derived and/or modified sequence
atggggatgtacccgggagtactggttcccagtagtcggggcggcctacctttggaagaggttactgttgccgaagtactcgccgcaagaggctatttgacaggaatggccggaaaatggcatcttggcgttggccccgagggcgccttcttacccccccatcagggctttcacagattcttgggaattccttattcccacgaccagggaccatgccagaacctgacgtgctttccgcccgctactccatgtgatggcggttgtgatcagggcctggtccccattccactgctggccaatcttagcgtggaggcacagccaccttggctacctggcctggaggccagatacatggcctttgcgcatgatcttatggccgacgcgcagcggcaggacaggcccttctttctgtattacgcatcacatcacacccactaccctcagttttcaggtcagagctttgcagagaggtcgggccggggtccgtttggtgactctctgatggaactcgacgcggccgtgggaacactgatgaccgccattggtgacctggggttgttagaggaaacccttgtgatcttcactgctgataatggccccgaaacaatgaggatgtctcgtgggggctgcagtgggctgcttagatgtggaaagggtaccacttatgagggtggtgtgcgcgagcctgctttggccttctggcctgggcacattgcgccaggggtcacacatgagctggccagcagtctcgaccttctgcccactttggccgccctcgcaggcgcccccctacctaacgtcaccctagacggtttcgatctgtctcctctccttcttggaacaggcaagtcaccccgtcagtctcttttcttctatccttcgtatccggacgaggtgagaggggtcttcgccgtccggacaggcaagtataaagcacacttcttcacacagggaagcgctcacagcgatacaactgccgatccagcctgtcatgcctccagttctctgaccgcccacgagccaccgctcctgtacgacctgtccaaggaccctggagaaaactacaaccttcttggcggagttgctggtgcaacgcctgaagtgctgcaggcactgaaacagctgcaactgctgaaagcccagctcgacgcagcagtcacattcggtccatcccaggtggcaaggggagaggaccccgccctgcagatttgctgtcatcccggttgtacaccacgacctgcttgctgccactgtcccgatccacacgcctag

SEQ ID NO: 324359 - DNA, 1272 bp, Artificial Sequence
  derived and/or modified sequence
atgggcatgtacccaggagtgctggtgcccagcagccggggcggcctgcccctggaggaggtgacagtggccgaggtgctggccgcccggggctacctgaccggcatggccggcaagtggcacctgggcgtgggccctgagggcgccttcctgcccccccaccagggcttccaccgcttcctgggcatcccctacagccatgaccagggcccctgccagaacctgacctgcttccccccagccaccccctgtgatggcggctgtgaccagggcctggtgcccatccccctgctggccaacctgtctgtggaggcccagcccccctggctgcccggcctggaggcccgctacatggcctttgcccatgacctgatggctgatgcccagaggcaggaccggcccttcttcctgtactatgccagccaccacacccactacccccagttcagcggccagagctttgctgagaggagcggccggggcccctttggagacagcctgatggagctggatgctgctgtgggcaccctgatgacagccatcggggacctgggcctgctggaggagaccctggtgatcttcaccgctgacaatggacctgagaccatgaggatgagccggggcggctgcagcggcctgctgcgctgtgggaagggcaccacctatgagggcggcgtgcgggagcccgccctggccttctggccaggccacatcgcccctggggtgacccatgagctggccagcagcctggacctgctgcccaccctggccgccctggccggggcccccctgcccaacgtgaccctggatggctttgacctgagccccctgctgctgggcaccgggaagagcccccggcagagcctcttcttctaccccagctacccagatgaggtgcggggcgtgtttgctgtgaggacaggcaagtacaaggcccacttcttcacccagggcagcgcccacagcgacaccacagctgaccctgcctgccacgccagcagcagcctgacagcccacgagccccccctgctgtatgacctgagcaaggaccctggagagaactacaacctgctgggcggcgtggccggggccaccccagaggtgctgcaggccctgaagcagctgcagctgctgaaggcccagctggatgctgctgtgaccttcggccccagccaggtggcccggggagaagatcctgccctgcagatctgctgccaccctggctgcacccccaggcctgcctgctgccactgcccagacccccacgcctag

SEQ ID NO: 324360 - DNA, 1272 bp, Artificial Sequence
  derived and/or modified sequence
atgggcatgtaccccggcgtgctggtgcccagcagccggggcggcttgcccttagaagaggtgactgtagctgaagtgctggccgcgaggggctacctaacagggatggcaggcaagtggcatctgggagtcggacctgaaggtgcatttctgccccctcatcagggttttcatcgcttcctgggtataccctactcccatgatcagggcccctgccaaaatcttacttgttttcccccagcaactccatgcgatgggggctgcgatcagggactcgtgccaatccctctcctggctaacttgtcggtcgaggctcaaccaccttggctacccggccttgaggcaagatacatggccttcgcccatgacctgatggcggatgctcagagacaagacagacccttttttctgtactacgcatctcatcacacgcattatccccagttctctggacagtcatttgcagagcggtcagggcgtgggcccttcggggattctttgatggagctggacgcagccgtcggtacattaatgaccgccattggcgacttgggccttctggaagaaacactcgtaatatttacagcggacaacggacctgagacaatgagaatgtccaggggagggtgtagcggcttactgagatgcggcaagggaaccacctacgaaggaggtgtccgcgaaccagctctggccttctggcccgggcatatcgccccgggagtgacacatgaacttgcctctagtcttgatttgttgcctacgctggccgcgcttgctggggctcccctgccgaatgtgaccctcgacggcttcgacctcagtccgcttctgctgggaacaggaaagagtcctagacagagcttgtttttctacccttcttatcccgacgaggtgaggggcgtgtttgctgtccggactgggaagtacaaggcacatttttttacacagggtagcgcgcatagcgacacaaccgcagaccctgcctgtcacgctagcagctcactgaccgcccacgagccaccgctgctgtacgacttatcaaaggaccccggcgaaaattataaccttcttggaggagtggccggcgcaactcctgaagtgctccaagcacttaagcagctgcagcttctgaaagcgcagctggatgcagccgtaacgtttggacccagtcaggtggcccgcggtgaggatccagccctgcagatctgctgtcatcctggctgtacaccccggcccgcatgttgccactgtccagaccctcacgcctag

SEQ ID NO: 324361 - DNA, 1272 bp, Artificial Sequence
  derived and/or modified sequence
atgggcatgtacccgggagtcttagtaccctcaagcaggggaggacttccgctggaggaagtgaccgtagcggaggtgttggctgcccgtggatacttaacaggaatggctggcaagtggcacctgggagttggccctgagggagcttttctgcctccgcaccaaggttttcataggttcctggggatcccctatagccatgatcaaggaccctgtcagaatctgacctgctttccccctgcaactccctgtgatggcggatgcgaccaggggcttgttccgattcctctgctcgccaacctgtcagtggaagcacagcccccttggctaccgggattggaggcgaggtacatggccttcgcgcatgacctaatggcagacgcgcaacgtcaggatagacctttcttcctgtactacgcctcccaccacactcactaccctcagttcagtgggcagtcttttgccgaacggagtgggcgtggcccattcggcgatagcctcatggaattggatgctgccgttggtaccctcatgacagctatcggagatctgggacttttggaggaaacgttggttatctttaccgcagacaatggcccagagacaatgagaatgtcaaggggtgggtgctctggcctgctcagatgcgggaaagggactacttacgaaggtggagtacgtgaaccagcactggcgttttggcctggccacatcgcgcctggtgtgacacacgaactggcctctagtctcgatctactgcccactctggccgcactcgccggtgctcccctgcccaacgtcaccctagatggctttgatctcagccctttgctgctcggcaccggaaagagccccagacagtccctctttttctacccaagttacccagatgaagtgagaggagtgtttgccgtgcgaacaggcaagtacaaggcgcacttcttcacccaagggagcgcccacagtgacacaaccgctgaccccgcatgccacgcttcatcttctctgaccgctcatgagcccccattgctgtacgaccttagtaaagatcccggtgagaattataacttgctcggtggcgtagctggggctactcctgaggtgctgcaggcgttgaaacagctccagttgctgaaggcccagctagatgccgctgtcacgttcggtcccagccaagtcgctagaggggaggacccagctcttcagatttgttgtcatcccggatgtactccaaggcctgcttgttgtcattgcccagatccacacgcatag

SEQ ID NO: 324362 - DNA, 1272 bp, Artificial Sequence
  derived and/or modified sequence
atgggcatgtaccccggcgtgctggtgcccagcagcagaggcggcctgcccctggaggaggtgaccgtggccgaggtgctggccgccagaggctacctgaccggcatggccggcaagtggcacctgggcgtgggccccgagggcgccttcctgcccccccaccagggcttccacagattcctgggcatcccctacagccacgaccagggcccctgccagaacctgacctgcttcccccccgccaccccctgcgacggcggctgcgaccagggcctggtgcccatccccctgctggccaacctgagcgtggaggcccagcccccctggctgcccggcctggaggccagatacatggccttcgcccacgacctgatggccgacgcccagagacaggacagacccttcttcctgtactacgccagccaccacacccactacccccagttcagcggccagagcttcgccgagagaagcggcagaggccccttcggcgacagcctgatggagctggacgccgccgtgggcaccctgatgaccgccatcggcgacctgggcctgctggaggagaccctggtgatcttcaccgccgacaacggccccgagaccatgagaatgagcagaggcggctgcagcggcctgctgagatgcggcaagggcaccacctacgagggcggcgtgagagagcccgccctggccttctggcccggccacatcgcccccggcgtgacccacgagctggccagcagcctggacctgctgcccaccctggccgccctggccggcgcccccctgcccaacgtgaccctggacggcttcgacctgagccccctgctgctgggcaccggcaagagccccagacagagcctgttcttctaccccagctaccccgacgaggtgagaggcgtgttcgccgtgagaaccggcaagtacaaggcccacttcttcacccagggcagcgcccacagcgacaccaccgccgaccccgcctgccacgccagcagcagcctgaccgcccacgagccccccctgctgtacgacctgagcaaggaccccggcgagaactacaacctgctgggcggcgtggccggcgccacccccgaggtgctgcaggccctgaagcagctgcagctgctgaaggcccagctggacgccgccgtgaccttcggccccagccaggtggccagaggcgaggaccccgccctgcagatctgctgccaccccggctgcacccccagacccgcctgctgccactgccccgacccccacgcctag

SEQ ID NO: 324363 - protein, 231 aa, Artificial Sequence
  derived and/or modified sequence
MKVTVGPDPSLVYRPDVDPEVAKDKASFRNYTSGPLLDRVFTTYKLMHTHQTVDFVRSKHAQFGGFSYKKMTVMEAVDLLDGLVDESDPDVDFPNSFHAFQTAEGIRKAHPDKVPNLPCPSPSQTGSTSSGSCTTWGRSWPCSGSPSGLSSATPSPSDAVRRPPWFSATPPSRTTLTSRILDTAQSSGCISPTVGSTGSSCPGAMMQVRPLHQVPGPAGRGQAAALLPGAH

SEQ ID NO: 324364 - DNA, 696 bp, Artificial Sequence
  derived and/or modified sequence
atgaaggtgaccgtgggccccgaccccagcctggtgtacagacccgacgtggaccccgaggtggccaaggacaaggccagcttcagaaactacaccagcggccccctgctggacagagtgttcaccacctacaagctgatgcacacccaccagaccgtggacttcgtgagaagcaagcacgcccagttcggcggcttcagctacaagaagatgaccgtgatggaggccgtggacctgctggacggcctggtggacgagagcgaccccgacgtggacttccccaacagcttccacgccttccagaccgccgagggcatcagaaaggcccaccccgacaaggtgcccaacctgccctgccccagccccagccagaccggcagcaccagcagcggcagctgcaccacctggggcagaagctggccctgcagcggcagccccagcggcctgagcagcgccacccccagccccagcgacgccgtgagaagacccccctggttcagcgccaccccccccagcagaaccaccctgaccagcagaatcctggacaccgcccagagcagcggctgcatcagccccaccgtgggcagcaccggcagcagctgccccggcgccatgatgcaggtgagacccctgcaccaggtgcccggccccgccggcagaggccaggccgccgccctgctgcccggcgcccactag

SEQ ID NO: 324365 - DNA, 696 bp, Artificial Sequence
  derived and/or modified sequence
atgaaagtgaccgtgggtccagatccgtccctggtgtatcgacccgatgttgatcctgaagtggccaaggataaggctagtttccgtaattacaccagtggcccgctgctggacagggttttcactacttataaactcatgcatacccatcagaccgtagactttgttcggtcgaagcatgcacagtttggcggcttctcctacaagaaaatgaccgttatggaagccgtggacctgctggacggactggtcgacgaaagcgaccccgatgtggatttcccaaactcattccacgccttccaaacagccgagggaatccggaaggcacacccggataaggttcccaatcttccgtgtccatctccaagccagactgggagcacatcaagcgggtcttgcactacctggggacgctcctggccatgcagcggaagcccctctggactctcttctgccaccccctctccaagtgatgcagtgaggcgccctccgtggttttccgccacacccccgtcccgcacaacactgacctccagaattctggacaccgcgcagtccagcgggtgtatctcaccaacagtgggttccactggcagctcttgccccggagctatgatgcaagtgcgaccactccatcaagtaccggggcctgccggtcggggtcaagcagcagccctgcttccgggcgcacattag

SEQ ID NO: 324366 - DNA, 696 bp, Artificial Sequence
  derived and/or modified sequence
atgaaggtgacagtgggccctgaccccagcctggtgtacagaccagatgtggaccctgaggtggccaaggacaaggccagcttcaggaactacaccagcggccccctgctggacagagtcttcaccacctacaagctgatgcacacccaccagacagtggactttgtgcgcagcaagcacgcccagtttggaggcttctcctacaagaagatgacagtgatggaggccgtggacctgctggatggcctggtggatgaaagtgaccctgatgtggacttccccaacagcttccacgccttccagacagctgagggcatcaggaaggcccacccagacaaggtgcccaacctgccctgccccagccccagccagacaggcagcaccagcagcggcagctgcaccacctggggccgctcctggccctgcagcggcagccccagcggcctgagcagcgccacccccagccccagtgatgctgtgagaagaccaccctggttcagcgccaccccacccagcaggaccaccctgaccagccgcatcctggacacagcccagagcagcggctgcatcagccccaccgtgggcagcacaggcagcagctgccctggggccatgatgcaggtgcggcccctgcaccaggtgcccggccctgctggccggggccaggccgccgccctgctgcccggggcccactag

SEQ ID NO: 324367 - DNA, 696 bp, Artificial Sequence
  derived and/or modified sequence
atgaaggtgaccgtgggccccgaccccagcctggtgtaccggcccgatgtggatcccgaggtggcgaaagacaaggccagttttcggaactatacaagcggcccactgctggatagagtcttcaccacctacaaactcatgcatacccatcagacagttgacttcgtccggagtaaacacgctcagttcggcggattctcctacaaaaagatgaccgttatggaagccgtcgacctacttgacggcctcgtcgatgaaagtgatccggatgtcgactttccaaattcgtttcacgcttttcagaccgctgagggcattcgaaaggctcacccagacaaggtgccaaacttgccctgtccctctcctagtcagacagggtcaactagctctggtagttgtaccacttggggccggtcttggccttgctccggctctcctagcggcctatctagtgctactccatctccatccgatgcagtgcgcagacccccatggtttagcgcaaccccaccatccagaaccactcttacttcaaggatcctggataccgcacaatcaagtggctgcatcagccccaccgtcggctccacaggttccagctgcccaggcgctatgatgcaggtccgtcctctgcaccaggtcccaggtcctgccggacgtggacaggccgctgctctgcttccaggtgctcattag

SEQ ID NO: 324368 - DNA, 696 bp, Artificial Sequence
  derived and/or modified sequence
atgaaggtgactgtgggcccagacccatctttggtgtaccgacctgacgtcgaccccgaggtggcaaaagataaggcgtcatttaggaactacacatctggacccctgctcgaccgggtcttcaccacatataagctaatgcacactcaccagacggtggacttcgtgcgctcaaaacacgctcagttcgggggtttcagctacaaaaaaatgaccgttatggaagcggtggacctgctcgacgggctcgtcgatgaaagcgaccccgatgtagatttcccaaattcgttccatgccttccagaccgcagagggtatccgaaaggcgcaccccgataaagtgcccaacttgccctgcccgtcccccagccagactggatcgacttcttctgggtcctgcacaacctgggggagaagctggccatgcagcggatccccatctgggctctctagcgcgaccccttcgccctctgacgctgtgagacggccaccctggttcagcgcaactccccctagtcgtaccacactcacatctaggattttagacactgctcagtcatctggatgcatctcccctaccgttggttccaccgggtcttcttgcccgggagccatgatgcaggtaaggcctctacaccaagtccccggtccagctggacgcggacaggctgcagcactgctccctggggcacactag

SEQ ID NO: 324369 - DNA, 642 bp, Artificial Sequence
  derived and/or modified sequence
atgggcgccgacctgaacaacatcgtgaagtgccaggccctgagcgacgagcacgtgcagttcctggtgtaccagctgctgagaggcctgaagtacatccacagcgccggcatcatccacagagacctgaagcccagcaacgtggccgtgaacgaggactgcgagctgagaatcctggacttcggcctggccagacaggccgacgaggagatgaccggctacgtggccaccagatggtacagagcccccgagatcatgctgaactggatgcactacaaccagaccggcgccggcggcagaccctggggcgacgagggccagggccccagactggccctggactggctgtgcatgcccggcctgagaggccaggccagaagccccagaatgtgggacccccacagcaaggtggccctgcagagacccctggagcacgacggctgctggccccccctggccgtgcagctgtggaccagcccctgcctgggcggcctgggcatggccgaggagggcgtgtgccccagctggggcctggacgtgaccgtgggcctgctggaggagggcagaggcgtgggcaccctgatggaggtgcccagccccagccacagcggctacctggtgagaggcctgcaccacggctag

SEQ ID NO: 324370 - DNA, 642 bp, Artificial Sequence
  derived and/or modified sequence
atgggggccgacctcaacaacattgttaagtgccaagccctgtcagacgagcatgtccagttcctcgtttaccaactgctgagaggattgaagtacatccattcggcaggaattatccacagagatctgaagccatccaatgtggcagtgaacgaggattgcgaactccgtatcctggatttcggtctggcgcgccaagcagacgaggaaatgacaggctatgtggccacccggtggtatagggccccggagatcatgcttaattggatgcactacaatcaaaccggcgccggcggcaggccgtggggggatgaagggcaaggcccccgattagctctggattggctttgcatgcctgggctgagaggccaggctcgatctccgcgaatgtgggatccccactccaaagtagcactgcagcgccccctagagcacgacgggtgttggccgcctttagcggttcagctttggacaagtccttgtctgggtgggctcgggatggcagaggagggagtgtgtccttcatgggggttagacgtgactgtcggccttctggaggagggtagaggagtgggaaccctaatggaagtgcctagcccttctcatagcggctacctggttagaggcttacaccatggttag

SEQ ID NO: 324371 - DNA, 642 bp, Artificial Sequence
  derived and/or modified sequence
atgggcgctgacctgaacaacatcgtgaagtgccaggccctgagtgatgagcacgtgcagttcctggtgtaccagctgctgcggggcctgaagtacatccacagcgctggcatcatccaccgggacctgaagcccagcaatgtggccgtgaatgaagactgtgagctgcgcatcctggactttggcctggcccggcaggctgatgaggagatgacaggctacgtggccacccgctggtaccgggcccctgagatcatgctgaactggatgcactacaaccagacaggagctgggggccggccctggggagatgagggccagggcccccggctggccctggactggctgtgcatgcctggcctgcggggccaggcccggagccccaggatgtgggacccccacagcaaggtggccctgcagaggcccctggagcatgatggctgctggccacccctggccgtgcagctgtggaccagcccctgcctgggcggcctgggcatggccgaggagggcgtgtgccccagctggggcctggatgtgacagtgggcctgctggaggagggccggggcgtgggcaccctgatggaggtgcccagccccagccacagcggctacctggtgcggggcctgcaccacggctag

SEQ ID NO: 324372 - DNA, 642 bp, Artificial Sequence
  derived and/or modified sequence
atgggcgccgacctgaacaacatcgtgaagtgccaggccctgagcgatgagcacgttcagttcctcgtatatcaattactcaggggactgaagtacatccattctgctggcattattcatcgcgacttaaaaccttcaaatgtagcggtcaacgaggattgtgagctcaggatcctggatttcggcctcgctcggcaggccgatgaagaaatgaccggctacgttgccacccggtggtatcgagcccccgagattatgctcaattggatgcactacaaccagaccggcgctgggggccggccatggggtgatgagggacaggggcccagactggctcttgattggctttgtatgccgggcctgcggggccaggcgcggagcccccgcatgtgggatcctcacagcaaagtagccctgcagcgtcctctggagcatgacggctgctggccacctttggcagtgcagctctggactagcccctgtcttggcgggcttgggatggcagaagagggagtctgtccatcatggggcctcgatgtgaccgtcggcctgctggaggagggccgcggagttggaacactcatggaggtgcccagtccctcacactctggataccttgtcagaggactgcatcatggctag

SEQ ID NO: 324373 - DNA, 642 bp, Artificial Sequence
  derived and/or modified sequence
atgggcgcagatctcaacaacatagtcaagtgccaggcactatcagatgagcacgtgcagttcctggtgtatcagctcctgaggggactgaagtacattcactcagctggtattattcaccgcgacctcaaaccatccaatgtcgctgttaatgaagattgcgaacttcgcatccttgattttggtctggcacgccaggcggacgaagagatgaccggctacgttgctacaagatggtaccgcgctccggagattatgctcaattggatgcactataaccagacaggcgcagggggtagaccctggggggatgaaggacagggtccaagattggctctggattggctgtgcatgccgggactccgcggacaggccaggtcccccaggatgtgggatccgcacagtaaagtcgccctgcagaggcccctggaacacgacggatgctggcccccattagcggttcaactgtggactagtccttgtctagggggattaggtatggcagaagaaggagtgtgcccatcctggggcctggacgtaacagttggactgctggaggaggggaggggggtgggcaccctgatggaggtacctagcccctcgcattctggctacctggtgagagggctgcatcatggctag

SEQ ID NO: 324374 - DNA, 84 bp, Artificial Sequence
  derived and/or modified sequence
atgagccctgccctgaccttcccccggcgctggattgctgagggcctggtggagaacctgaaccccccaggagcagatgcctag

SEQ ID NO: 324375 - DNA, 2329 bp, Artificial Sequence
  derived and/or modified sequence
cgtccgttgagggcccgcgccgcatggaggccggctgaggagcgccgctgcctcgcctcggtacgccgcgcggcgcggacggcgcgctccccacaggtgcaggaagccgccgcccagccatggacggggaggagcagcagccaccgcacgaggccaacgtggaacctgttgtgccgtcagaggcttcagagccggtgcccagggtgctttctggagacccccagaacctgtccgacgtggacgccttcaacctgctcctggagatgaagctgaagcggcggcgtcagcggcccaacctgccgcgcactgtgacccagttggtggctgaggacgggagcagggtgtacgtggtggggacagcccacttcagcgacgacagcaagagggacgttgtgaagaccatccgggaggtgcagcctgacgtggtggtcgtggagctctgccaatatcgtgtgtccatgctgaagatggacgagagcacgctgctgcgggaggcccaggagctcagcctggagaagctgcagcaggccgtgaggcagaacgggctcatgtcggggctgatgcagatgctgctgctgaaggtgtctgcacacatcaccgagcagctgggcatggccccaggtggcgagttcagggaggccttcaaggaggccagcaaggtgcctttctgcaagttccacctgggtgaccgacccatccccgtcaccttcaagagggccatcgcagcgctctccttctggcagaaggtcaggctggcttggggcctgtgcttcctgtcagaccccatcagcaaggatgacgtggaacgctgcaagcagaaggacctactggagcagatgatggccgagatgattggcgagttcccagacctgcaccgcaccatcgtctcggagcgcgacgtctacctaacctacatgctgcgccaggccgcgcggcgcctcgagctgcctcgggcctctgacgccgagcccaggaagtgcgtcccctccgtggtcgtgggcgtcgtgggcatgggccacgtgcctggcatcgagaagaactggagcaccgacctcaacatccaggagatcatgaccgtgcccccgccgtccgtctccggcagagtgtctcggttggccgtgaaggccgccttcttcggcctgctgggctacagcctgtactggatgggccgccgcaccgcgagcctggtcctgtcgctgcccgccgcgcagtactgcctgcagagggtgaccgaggcccggcacaagtaggagactgctccccgcccgctcgggcccctgaggagccagtgcccccgcggcacttctgggtgccaggtgcatcctagcccgcccgaggcccctgccaccccccatgggggtctgggcccggcctcgcctgccctcctgggccagtcacccctcccccagcccacccaaataaaggattatttaactgtctgagctcaggcctcccggcagcccctcccctcccacactgcaggggccgttccccagcttctggacaagacacccagctccgagggggcaggggcttataggaggggccgaggcgtgcgctgccctctcagccctggtggcaggcgggggacaatggccactgtccctacctcactgtgccttcctgtgctccggccacaggagcgtcggcccaggggcggctcctgggggctccagggcaggcgagactgggaaaggcccagccctggagctccagccgaccccaccgtgcccctggcatcctggccctggccgccacctccctggcaccgtctgcctgcagggattctgtgtttttggcttttttaatgtcttaaaatcttttactcaggtaattttaatttcagagagaaaaactgaagtaaatgtcaaaaaacaccagccttaaatccaaagggagagaattcgtgttcttgggtctgtcccgagtgggctcgcgtgcagccaaacatcagctctgggtccaggcgtggcctcagctgggagcctgtgtcctgagcccccggagcgaaggggtgcctggggcatcttggccctctctgggcagacaatgtgtgcacctatgtggaaggccaaggacatgggctgtggccaggcctgtcccgctcaggccccctgcccggcggccgtctgtgtgcggggcctccctcctggctgtccaggacacagcccgtgcagccccagcctggacccaggccatctctggttgtgtctgtgccgactcggtgttgaatcaaatcaggtgtgcgtcaggagccggctgtgtccttcctgccacactcggggattcattccttagaaactgaaataaattctaattttggaaactc

SEQ ID NO: 324376 - DNA, 2272 bp, Artificial Sequence
  derived and/or modified sequence
cccgtccgttgagggcccgcgccgcatggaggccggctgaggagcgccgctgcctcgcctcggctccccacaggtgcaggaagccgccgcccagccatggacggggaggagcagcagccaccgcacgaggccaacgtggaacctgttgtgccgtcagaggcttcagagccggtgcccagggtgctttctggagacccccagaacctgtccgacgtggacgccttcaacctgctcctggagatgaagctgaagcggcggcgtcagcggcccaacctgccgcgcactgtgacccagttggtggctgaggacgggagcagggtgtacgtggtggggacagcccacttcagcgacgacagcaagagggacgttgtgaagaccatccgggaggtgcagcctgacgtggtggtcgtggagctctgccaatatcgtgtgtccatgctgaagatggacgagagcacgctgctgcgggaggcccaggagctcagcctggagaagctgcagcaggccgtgaggcagaacgggctcatgtcggggctgatgcagatgctgctgctgaaggtgtctgcacacatcaccgagcagctgggcatggccccaggtggcgagttcagggaggccttcaaggaggccagcaaggtgcctttctgcaagttccacctgggtgaccgacccatccccgtcaccttcaagagggccatcgcagcgctctccttctggcagaaggtcaggctggcttggggcctgtgcttcctgtcagaccccatcagcaaggatgacgtggaacgctgcaagcagaaggacctactggagcagatgatggccgagatgattggcgagttcccagacctgcaccgcaccatcgtctcggagcgcgacgtctacctaacctacatgctgcgccaggccgcgcggcgcctcgagctgcctcgggcctctgacgccgagcccaggaagtgcgtcccctccgtggtcgtgggcgtcgtgggcatgggccacgtgcctggcatcgagaagaactggagcaccgacctcaacatccaggagatcatgaccgtgcccccgccgtccgtctccggcagagtgtctcggttggccgtgaaggccgccttcttcggcctgctgggctacagcctgtactggatgggccgccgcaccgcgagcctggtcctgtcgctgcccgccgcgcagtactgcctgcagagggtgaccgaggcccggcacaagtaggagactgctccccgcccgctcgggcccctgaggagccagtgcccccgcggcacttctgggtgccaggtgcatcctagcccgcccgaggcccctgccaccccccatgggggtctgggcccggcctcgcctgccctcctgggccagtcacccctcccccagcccacccaaataaaggattatttaactgtctgagctcaggcctcccggcagcccctcccctcccacactgcaggggccgttccccagcttctggacaagacacccagctccgagggggcaggggcttataggaggggccgaggcgtgcgctgccctctcagccctggtggcaggcgggggacaatggccactgtccctacctcactgtgccttcctgtgctccggccacaggagcgtcggcccaggggcggctcctgggggctccagggcaggcgagactgggaaaggcccagccctggagctccagccgaccccaccgtgcccctggcatcctggccctggccgccacctccctggcaccgtctgcctgcagggattctgtgtttttggcttttttaatgtcttaaaatcttttactcaggtaattttaatttcagagagaaaaactgaagtaaatgtcaaaaaacaccagccttaaatccaaagggagagaattcgtgttcttgggtctgtcccgagtgggctcgcgtgcagccaaacatcagctctgggtccaggcgtggcctcagctgggagcctgtgtcctgagcccccggagcgaaggggtgcctggggcatcttggccctctctgggcagacaatgtgtgcacctatgtggaaggccaaggacatgggctgtggccaggcctgtcccgctcaggccccctgcccggcggccgtctgtgtgcggggcctccctcctggctgtccaggacacagcccgtgcagccccagcctggacccaggccatctctggttgtgtctgtgccgactcggtgttgaatcaaatcaggtgtgcgtcaggagccggctgtgtccttcctgccacactcggggattcattcct

SEQ ID NO: 324377 - DNA, 2172 bp, Artificial Sequence
  derived and/or modified sequence
ccggtgtgcctcggcagccttgcgctgctctaatggtccggacttccgtgtgctccccacaggtgcaggaagccgccgcccagccatggacggggaggagcagcagccaccgcacgaggccaacgtggaacctgttgtgccgtcagaggcttcagagccggtgcccagggtgctttctggagacccccagaacctgtccgacgtggacgccttcaacctgctcctggagatgaagctgaagcggcggcgtcagcggcccaacctgccgcgcactgtgacccagttggtggctgaggacgggagcagggtgtacgtggtggggacagcccacttcagcgacgacagcaagagggacgttgtgaagaccatccgggaggtgcagcctgacgtggtggtcgtggagctctgccaatatcgtgtgtccatgctgaagatggacgagagcacgctgctgcgggaggcccaggagctcagcctggagaagctgcagcaggccgtgaggcagaacgggctcatgtcggggctgatgcagatgctgctgctgaaggtgtctgcacacatcaccgagcagctgggcatggccccaggtggcgagttcagggaggccttcaaggaggccagcaaggtgcctttctgcaagttccacctgggtgaccgacccatccccgtcaccttcaagagggccatcgcagcgctctccttctggcagaaggtcaggctggcttggggcctgtgcttcctgtcagaccccatcagcaaggatgacgtggaacgctgcaagcagaaggacctactggagcagatgatggccgagatgattggcgagttcccagacctgcaccgcaccatcgtctcggagcgcgacgtctacctaacctacatgctgcgccaggccgcgcggcgcctcgagctgcctcgggcctctgacgccgagcccaggaagtgcgtcccctccgtggtcgtgggcgtcgtgggcatgggccacgtgcctggcatcgagaagaactggagcaccgacctcaacatccaggagatcatgaccgtgcccccgccgtccgtctccggcagagtgtctcggttggccgtgaaggccgccttcttcggcctgctgggctacagcctgtactggatgggccgccgcaccgcgagcctggtcctgtcgctgcccgccgcgcagtactgcctgcagagggtgaccgaggcccggcacaagtaggagactgctccccgcccgctcgggcccctgaggagccagtgcccccgcggcacttctgggtgccaggtgcatcctagcccgcccgaggcccctgccaccccccatgggggtctgggcccggcctcgcctgccctcctgggccagtcacccctcccccagcccacccaaataaaggattatttaactgtctgagctcaggcctcccggcagcccctcccctcccacactgcaggggccgttccccagcttctggacaagacacccagctccgagggggcaggggcttataggaggggccgaggcgtgcgctgccctctcagccctggtggcaggcgggggacaatggccactgtccctacctcactgtgccttcctgtgctccggccacaggagcgtcggcccaggggcggctcctgggggctccagggcaggcgagactgggaaaggcccagccctggagctccagccgaccccaccgtgcccctggcatcctggccctggccgccacctccctggcaccgtctgcctgcagggattctgtgtttttggcttttttaatgtcttaaaatcttttactcaggtaattttaatttcagagagaaaaactgaagtaaatgtcaaaaaacaccagccttaaatccaaagggagagaattcgtgttcttgggtctgtcccgagtgggctcgcgtgcagccaaacatcagctctgggtccaggcgtggcctcagctgggagcctgtgtcctgagcccccggagcgaaggggtgcctggggcatcttggccctctctgggcagacaatgtgtgcacctatgtggaaggccaaggacatgggctgtggccaggcctgtcccgctcaggccccctgcccggcggccgtctgtgtgcggggcctccctcctggctgtccaggacacagcccgtgcagccccagcctggacccaggccatctctggt

SEQ ID NO: 324378 - protein, 966 aa, Artificial Sequence
  derived and/or modified sequence
MFWKFDLNTTSHVDKLLDKEHVTLQELMDEDDILQECKAQNQKLLDFLCRQQCMEELVSLITQDPPLDMEEKVRFKYPNTACELLTCDVPQISDRLGGDESLLSLLYDFLDHEPPLNPLLASFFSKTIGNLIARKTEQVITFLKKKDKFISLVLKHIGTSALMDLLLRLVSCVEPAGLRQDVLHWLNEEKVIQRLVELIHPSQDEDRQSNASQTLCDIVRLGRDQGSQLQEALEPDPLLTALESQDCVEQLLKNMFDGDRTESCLVSGTQVLLTLLETRRVGTEGLVDSFSQGLERSYAVSSSVLHGIEPRLKDFHQLLLNPPKKKAILTTIGVLEEPLGNARLHGARLMAALLHTNTPSINQELCRLNTMDLLLDLFFKYTWNNFLHFQVELCIAAILSHAAREERTEASGSESRVEPPHENGNRSLETPQPAASLPDNTMVTHLFQKCCLVQRILEAWEANDHTQAAGGMRRGNMGHLTRIANAVVQNLERGPVQTHISEVIRGLPADCRGRWESFVEETLTETNRRNTVDLVSTHHLHSSSEDEDIEGAFPNELSLQQAFSDYQIQQMTANFVDQFGFNDEEFADQDDNINAPFDRIAEINFNIDADEDSPSAALFEACCSDRIQPFDDDEDEDIWEDSDTRCAARVMARPRFGAPHASESCSKNGPERGGQDGKASLEAHRDAPGAGAPPAPGKKEAPPVEGDSEGAMWTAVFDEPANSTPTAPGVVRDVGSSVWAAGTSAPEEKGWAKFTDFQPFCCSESGPRCSSPVDTECSHAEGSRSQGPEKASQASYFAVSPASPCAWNVCVTRKAPLLASDSSSSGGSHSEDGDQKAASAMDAVSRGPGREAPPLPTVARTEEAVGRVGCADSRLLSPACPAPKEVTAAPAVAVPPEATVAITTALSKAGPAIPTPAVSSALAVAVPLGPIMAVTAAPAMVATLGTVTKDGKTDAPPEGAALNGPV

SEQ ID NO: 324379 - DNA, 3415 bp, Artificial Sequence
  derived and/or modified sequence
atatactccaagaaaaaaaccacaaatgtttttctgttttgcctgaatacatgatttaaacaagagatttccacagaagggcgctttcatggaactatatgatcatatgggcaacattctgttgcagtctaccttctgtctgacggatatgccatcctgaaaaaggaaagaagctgaacttcaagttcctttcatttagccttgggcttccaccttctctgtggctagaaacaggaccgtccagaagtcacctgtaactgccctatcttgcaagttctgattttggcaaaaaaaaaaaaaaaaagccttgacaaggttggattcacttctttccctggattgtgtgtcatccaactctgcggccgtcacgatgttctggaagtttgacttgaacaccacgtcccatgttgacaagctgctggacaaggagcatgtgacgctgcaggagttaatggatgaagatgacatcttgcaggagtgtaaggctcagaaccagaagctgctggacttcctgtgcaggcagcagtgcatggaggagctggtgagcctcatcacacaggatccgcccctggacatggaggagaaggtccgcttcaaatatccaaacacagcctgtgagcttctgacttgtgatgtgccgcagatcagcgaccgcctcggtggggacgagagcctgctgagcctcctgtacgacttcttggaccatgagccgcctctcaatcctctgctcgccagttttttcagcaagaccattggcaatctcattgcaagaaaaaccgaacaggtgattacgtttttgaagaagaaggacaagttcatcagcctggtgttgaagcacatcggcacctcagcgcttatggacctgctgctgcgcctggtcagctgtgtggagccagccgggctccggcaggacgtcctgcactggctgaatgaagagaaggtcatccagaggcttgtggagttgatccacccgagccaggatgaagataggcagtcaaatgcttctcagactctctgtgacatagttaggctgggcagagaccagggcagtcagctgcaagaggctctggagccagacccgctcctcacagcgctggagtcgcaggactgtgtggagcagcttctgaagaacatgtttgatggagaccggacggagagctgcctcgtcagtgggactcaggtgttactcaccttgctggaaaccaggcgggttgggacagagggcttggtggactccttttctcagggactggaaaggtcatacgctgtcagcagcagcgtactacacggcatcgagcctcggctgaaggacttccaccagctcctgctcaacccgcccaagaagaaagcgatcctgaccaccattggtgtgctggaggagcccctggggaatgcccgtctgcatggcgcccgcctcatggcagcactgctgcacacaaacacacccagcatcaaccaggagctctgccggctcaacacgatggacttactgctggacttgttctttaagtacacctggaataactttttgcacttccaagtggaactatgcatagccgctattctctcccacgctgcccgtgaggagaggacagaagccagcggatccgagagcagggtggagcctccgcatgagaacgggaaccggagcctggagactccccagccggccgccagcctccctgacaacacaatggtgacccacctgttccagaagtgctgcctggtgcagaggatcctggaggcctgggaagccaacgaccacacgcaggcagcgggtggcatgagacgtgggaacatgggccacctcacacggatcgccaacgcggtggtgcagaacctggagcggggccctgtgcagacgcacatcagcgaggtcatccgagggctccctgcggactgccgtggccgctgggagagcttcgtggaggagacgctgacggagacgaaccgcaggaacactgtggacctggtgagcactcaccaccttcactcctcaagtgaggacgaggacattgagggtgctttccctaacgagctgtcccttcagcaggccttctctgactaccagatccagcagatgacagccaacttcgtggatcagtttggcttcaatgatgaggagtttgccgaccaggacgacaacatcaatgccccgtttgacaggatcgcagagatcaacttcaacatcgacgctgacgaggacagtcccagcgcagctctgtttgaggcctgctgcagtgaccgcatccagccctttgatgatgatgaggacgaggacatctgggaggacagtgacactcgctgtgctgcccgggtgatggccagacccaggtttggagccccccatgcttcagagagttgctcaaagaatggcccagagcgtggaggccaggatgggaaggcgagcttggaagcacacagagatgcacctggggcaggtgccccaccggcccccgggaagaaggaagcgccccctgtggagggtgactcagaaggcgccatgtggacggcagtgtttgatgagccagcgaactcaacgcccacagccccaggagtggtgagggacgtgggttccagtgtgtgggcagctggcacctcagctccagaggagaaaggctgggccaagttcactgacttccaacctttctgctgctccgagtcagggcccaggtgcagctctccggtggacacagaatgcagccatgctgagggcagccggagccaaggccctgagaaagcctcacaggcctcctactttgcagtcagcccggcttctccatgtgcctggaacgtgtgtgtcaccaggaaggcccccctgctggcctctgacagtagctcctctgggggctcccacagcgaggatggcgaccagaaggcagcgagtgccatggatgcggtgagcaggggtcccggccgggaggcccccccgctgcccacagtggccaggacagaggaggctgtcggcagggtcgggtgtgctgacagccggctgttaagccctgcctgccccgcgccaaaggaagtgactgctgccccagccgtggctgtgccccccgaggctactgtggccatcaccacagcactgagcaaggctggccccgccatacccaccccagcagtctcttctgcactggccgtggcggtccccctagggcccatcatggcagtcacagcagccccagccatggtggccaccctggggacagtgacaaaggacgggaagacagatgccccgccagaaggagctgccttaaatggcccagtgtgatgctgctgccgcccggccacggcccaccctggtcaggctgcctccttaatcgagaaaactacctggtgatgcaatcttttttttttttaatttaatttaattttaaaataaatgctgcattggtaaagctggcagttgaaacca

SEQ ID NO: 324380 - protein, 933 aa, Artificial Sequence
  derived and/or modified sequence
MFWKFDLNTTSHVDKLLDKEHVTLQELMDEDDILQECKAQNQKLLDFLCRQQCMEELVSLITQDPPLDMEEKVRFKYPNTACELLTCDVPQISDRLGGDESLLSLLYDFLDHEPPLNPLLASFFSKTIGNLIARKTEQVITFLKKKDKFISLVLKHIGTSALMDLLLRLVSCVEPAGLRQDVLHWLNEEKVIQRLVELIHPSQDEDRQSNASQTLCDIVRLGRDQGSQLQEALEPDPLLTALESRQDCVEQLLKNMFDGDRTESCLVSGTQVLLTLLETRRVGTEGLVDSFSQGLERSYAVSSSVLHGIEPRLKDFHQLLLNPPKKKAILTTIGVLEEPLGNARLHGARLMAALLHTNTPSINQELCRLNTMDLLLDLFFKYTWNNFLHFQVELCIAAILSHAAREERTEASGSESRVEPPHENGNRSLETPQPAASLPDNTMVTHLFQKCCLVQRILEAWEANDHTQAAGGMRRGNMGHLTRIANAVVQNLERGPVQTHISEVIRGLPADCRGRWESFVEETLTETNRRNTVDLAFSDYQIQQMTANFVDQFGFNDEEFADQDDNINAPFDRIAEINFNIDADEDSPSAALFEACCSDRIQPFDDDEDEDIWEDSDTRCAARVMARPRFGAPHASESCSKNGPERGGQDGKASLEAHRDAPGAGAPPAPGKKEAPPVEGDSEGAMWTAVFDEPANSTPTAPGVVRDVGSSVWAAGTSAPEEKGWAKFTDFQPFCCSESGPRCSSPVDTECSHAEGSRSQGPEKAFSPASPCAWNVCVTRKAPLLASDSSSSGGSHSEDGDQKAASAMDAVSRGPGREAPPLPTVARTEEAVGRVGCADSRLLSPACPAPKEVTAAPAVAVPPEATVAITTALSKAGPAIPTPAVSSALAVAVPLGPIMAVTAAPAMVATLGTVTKDGKTDAPPEGAALNGPV

SEQ ID NO: 324381 - DNA, 3304 bp, Artificial Sequence
  derived and/or modified sequence
cgccgccgccattttggagcgatcggagtgccgcccgcggccccgagtcggtctcgagccgccggccggccgtgccggtgtccgtaggcgctgcgccctcggccgggcccatgtgtgtgcggcccgcccgaggccgcccgggctttgcctccaccagcgccctggcctccgctcgggcctccacacgggcctccgaagagctgccgcgacgcccggcccgcagggcaggtaaagagattataaatcttccactgaatgaaaaaaattttcttaaagctgcatatactccaagaaaaaaaccacaaatgtttttctgttttgcctgaatacatgatttaaacaagagatttccacagaagctctgcggccgtcacgatgttctggaagtttgacttgaacaccacgtcccatgttgacaagctgctggacaaggagcatgtgacgctgcaggagttaatggatgaagatgacatcttgcaggagtgtaaggctcagaaccagaagctgctggacttcctgtgcaggcagcagtgcatggaggagctggtgagcctcatcacacaggatccgcccctggacatggaggagaaggtccgcttcaaatatccaaacacagcctgtgagcttctgacttgtgatgtgccgcagatcagcgaccgcctcggtggggacgagagcctgctgagcctcctgtacgacttcttggaccatgagccgcctctcaatcctctgctcgccagttttttcagcaagaccattggcaatctcattgcaagaaaaaccgaacaggtgattacgtttttgaagaagaaggacaagttcatcagcctggtgttgaagcacatcggcacctcagcgcttatggacctgctgctgcgcctggtcagctgtgtggagccagccgggctccggcaggacgtcctgcactggctgaatgaagagaaggtcatccagaggcttgtggagttgatccacccgagccaggatgaagataggcagtcaaatgcttctcagactctctgtgacatagttaggctgggcagagaccagggcagtcagctgcaagaggctctggagccagacccgctcctcacagcgctggagtccaggcaggactgtgtggagcagcttctgaagaacatgtttgatggagaccggacggagagctgcctcgtcagtgggactcaggtgttactcaccttgctggaaaccaggcgggttgggacagagggcttggtggactccttttctcagggactggaaaggtcatacgctgtcagcagcagcgtactacacggcatcgagcctcggctgaaggacttccaccagctcctgctcaacccgcccaagaagaaagcgatcctgaccaccattggtgtgctggaggagcccctggggaatgcccgtctgcatggcgcccgcctcatggcagcactgctgcacacaaacacacccagcatcaaccaggagctctgccggctcaacacgatggacttactgctggacttgttctttaagtacacctggaataactttttgcacttccaagtggaactatgcatagccgctattctctcccacgctgcccgtgaggagaggacagaagccagcggatccgagagcagggtggagcctccgcatgagaacgggaaccggagcctggagactccccagccggccgccagcctccctgacaacacaatggtgacccacctgttccagaagtgctgcctggtgcagaggatcctggaggcctgggaagccaacgaccacacgcaggcagcgggtggcatgagacgtgggaacatgggccacctcacacggatcgccaacgcggtggtgcagaacctggagcggggccctgtgcagacgcacatcagcgaggtcatccgagggctccctgcggactgccgtggccgctgggagagcttcgtggaggagacgctgacggagacgaaccgcaggaacactgtggacctggccttctctgactaccagatccagcagatgacagccaacttcgtggatcagtttggcttcaatgatgaggagtttgccgaccaggacgacaacatcaatgccccgtttgacaggatcgcagagatcaacttcaacatcgacgctgacgaggacagtcccagcgcagctctgtttgaggcctgctgcagtgaccgcatccagccctttgatgatgatgaggacgaggacatctgggaggacagtgacactcgctgtgctgcccgggtgatggccagacccaggtttggagccccccatgcttcagagagttgctcaaagaatggcccagagcgtggaggccaggatgggaaggcgagcttggaagcacacagagatgcacctggggcaggtgccccaccggcccccgggaagaaggaagcgccccctgtggagggtgactcagaaggcgccatgtggacggcagtgtttgatgagccagcgaactcaacgcccacagccccaggagtggtgagggacgtgggttccagtgtgtgggcagctggcacctcagctccagaggagaaaggctgggccaagttcactgacttccaacctttctgctgctccgagtcagggcccaggtgcagctctccggtggacacagaatgcagccatgctgagggcagccggagccaaggccctgagaaagccttcagcccggcttctccatgtgcctggaacgtgtgtgtcaccaggaaggcccccctgctggcctctgacagtagctcctctgggggctcccacagcgaggatggcgaccagaaggcagcgagtgccatggatgcggtgagcaggggtcccggccgggaggcccccccgctgcccacagtggccaggacagaggaggctgtcggcagggtcgggtgtgctgacagccggctgttaagccctgcctgccccgcgccaaaggaagtgactgctgccccagccgtggctgtgccccccgaggctactgtggccatcaccacagcactgagcaaggctggccccgccatacccaccccagcagtctcttctgcactggccgtggcggtccccctagggcccatcatggcagtcacagcagccccagccatggtggccaccctggggacagtgacaaaggacgggaagacagatgccccgccagaaggagctgccttaaatggcccagtgtgatgctgctgccgcccggccacggcccaccctggtcaggctgcctccttaatcgagaaaactacctggtgatgcaatcttttttttttttaatttaatttaattttaaaataaatgctgcattggtaaa

SEQ ID NO: 324382 - protein, 932 aa, Artificial Sequence
  derived and/or modified sequence
MFWKFDLNTTSHVDKLLDKEHVTLQELMDEDDILQECKAQNQKLLDFLCRQQCMEELVSLITQDPPLDMEEKVRFKYPNTACELLTCDVPQISDRLGGDESLLSLLYDFLDHEPPLNPLLASFFSKTIGNLIARKTEQVITFLKKKDKFISLVLKHIGTSALMDLLLRLVSCVEPAGLRQDVLHWLNEEKVIQRLVELIHPSQDEDRQSNASQTLCDIVRLGRDQGSQLQEALEPDPLLTALESQDCVEQLLKNMFDGDRTESCLVSGTQVLLTLLETRRVGTEGLVDSFSQGLERSYAVSSSVLHGIEPRLKDFHQLLLNPPKKKAILTTIGVLEEPLGNARLHGARLMAALLHTNTPSINQELCRLNTMDLLLDLFFKYTWNNFLHFQVELCIAAILSHAAREERTEASGSESRVEPPHENGNRSLETPQPAASLPDNTMVTHLFQKCCLVQRILEAWEANDHTQAAGGMRRGNMGHLTRIANAVVQNLERGPVQTHISEVIRGLPADCRGRWESFVEETLTETNRRNTVDLAFSDYQIQQMTANFVDQFGFNDEEFADQDDNINAPFDRIAEINFNIDADEDSPSAALFEACCSDRIQPFDDDEDEDIWEDSDTRCAARVMARPRFGAPHASESCSKNGPERGGQDGKASLEAHRDAPGAGAPPAPGKKEAPPVEGDSEGAMWTAVFDEPANSTPTAPGVVRDVGSSVWAAGTSAPEEKGWAKFTDFQPFCCSESGPRCSSPVDTECSHAEGSRSQGPEKAFSPASPCAWNVCVTRKAPLLASDSSSSGGSHSEDGDQKAASAMDAVSRGPGREAPPLPTVARTEEAVGRVGCADSRLLSPACPAPKEVTAAPAVAVPPEATVAITTALSKAGPAIPTPAVSSALAVAVPLGPIMAVTAAPAMVATLGTVTKDGKTDAPPEGAALNGPV

SEQ ID NO: 324383 - DNA, 3293 bp, Artificial Sequence
  derived and/or modified sequence
ccattttggagcgatcggagtgccgcccgcggccccgagtcggtctcgagccgccggccggccgtgccggtgtccgtaggcgctgcgccctcggccgggcccatgtgtgtgcggcccgcccgaggccgcccgggctttgcctccaccagcgccctggcctccgctcgggcctccacacgggcctccgaagagctgccgcgacgcccggcccgcagggcaggtaaagagattataaatcttccactgaatgaaaaaaattttcttaaagctgcatatactccaagaaaaaaaccacaaatgtttttctgttttgcctgaatacatgatttaaacaagagatttccacagaagctctgcggccgtcacgatgttctggaagtttgacttgaacaccacgtcccatgttgacaagctgctggacaaggagcatgtgacgctgcaggagttaatggatgaagatgacatcttgcaggagtgtaaggctcagaaccagaagctgctggacttcctgtgcaggcagcagtgcatggaggagctggtgagcctcatcacacaggatccgcccctggacatggaggagaaggtccgcttcaaatatccaaacacagcctgtgagcttctgacttgtgatgtgccgcagatcagcgaccgcctcggtggggacgagagcctgctgagcctcctgtacgacttcttggaccatgagccgcctctcaatcctctgctcgccagttttttcagcaagaccattggcaatctcattgcaagaaaaaccgaacaggtgattacgtttttgaagaagaaggacaagttcatcagcctggtgttgaagcacatcggcacctcagcgcttatggacctgctgctgcgcctggtcagctgtgtggagccagccgggctccggcaggacgtcctgcactggctgaatgaagagaaggtcatccagaggcttgtggagttgatccacccgagccaggatgaagataggcagtcaaatgcttctcagactctctgtgacatagttaggctgggcagagaccagggcagtcagctgcaagaggctctggagccagacccgctcctcacagcgctggagtcgcaggactgtgtggagcagcttctgaagaacatgtttgatggagaccggacggagagctgcctcgtcagtgggactcaggtgttactcaccttgctggaaaccaggcgggttgggacagagggcttggtggactccttttctcagggactggaaaggtcatacgctgtcagcagcagcgtactacacggcatcgagcctcggctgaaggacttccaccagctcctgctcaacccgcccaagaagaaagcgatcctgaccaccattggtgtgctggaggagcccctggggaatgcccgtctgcatggcgcccgcctcatggcagcactgctgcacacaaacacacccagcatcaaccaggagctctgccggctcaacacgatggacttactgctggacttgttctttaagtacacctggaataactttttgcacttccaagtggaactatgcatagccgctattctctcccacgctgcccgtgaggagaggacagaagccagcggatccgagagcagggtggagcctccgcatgagaacgggaaccggagcctggagactccccagccggccgccagcctccctgacaacacaatggtgacccacctgttccagaagtgctgcctggtgcagaggatcctggaggcctgggaagccaacgaccacacgcaggcagcgggtggcatgagacgtgggaacatgggccacctcacacggatcgccaacgcggtggtgcagaacctggagcggggccctgtgcagacgcacatcagcgaggtcatccgagggctccctgcggactgccgtggccgctgggagagcttcgtggaggagacgctgacggagacgaaccgcaggaacactgtggacctggccttctctgactaccagatccagcagatgacagccaacttcgtggatcagtttggcttcaatgatgaggagtttgccgaccaggacgacaacatcaatgccccgtttgacaggatcgcagagatcaacttcaacatcgacgctgacgaggacagtcccagcgcagctctgtttgaggcctgctgcagtgaccgcatccagccctttgatgatgatgaggacgaggacatctgggaggacagtgacactcgctgtgctgcccgggtgatggccagacccaggtttggagccccccatgcttcagagagttgctcaaagaatggcccagagcgtggaggccaggatgggaaggcgagcttggaagcacacagagatgcacctggggcaggtgccccaccggcccccgggaagaaggaagcgccccctgtggagggtgactcagaaggcgccatgtggacggcagtgtttgatgagccagcgaactcaacgcccacagccccaggagtggtgagggacgtgggttccagtgtgtgggcagctggcacctcagctccagaggagaaaggctgggccaagttcactgacttccaacctttctgctgctccgagtcagggcccaggtgcagctctccggtggacacagaatgcagccatgctgagggcagccggagccaaggccctgagaaagccttcagcccggcttctccatgtgcctggaacgtgtgtgtcaccaggaaggcccccctgctggcctctgacagtagctcctctgggggctcccacagcgaggatggcgaccagaaggcagcgagtgccatggatgcggtgagcaggggtcccggccgggaggcccccccgctgcccacagtggccaggacagaggaggctgtcggcagggtcgggtgtgctgacagccggctgttaagccctgcctgccccgcgccaaaggaagtgactgctgccccagccgtggctgtgccccccgaggctactgtggccatcaccacagcactgagcaaggctggccccgccatacccaccccagcagtctcttctgcactggccgtggcggtccccctagggcccatcatggcagtcacagcagccccagccatggtggccaccctggggacagtgacaaaggacgggaagacagatgccccgccagaaggagctgccttaaatggcccagtgtgatgctgctgccgcccggccacggcccaccctggtcaggctgcctccttaatcgagaaaactacctggtgatgcaatcttttttttttttaatttaatttaattttaaaataaatgctgcattggtaaa

SEQ ID NO: 324384 - protein, 834 aa, Artificial Sequence
  derived and/or modified sequence
MRLLDGKQTSRYSENACEKKIFSIYGHYPVVRAALRRKGWVEKKFHFLPKVIPDVEDEGARVNDDTCAKVKENQEMALEKTDNIHDVMSRLVKNEMPYLLWTIKRDIIDYHSLTYDQMLNHYAKTASFTTKIGLCVNMRSLPWYVPANPDSFFPRCYSLCTESEQQEFLEDFRRTMASSILKWVVSHQSCSRSSRSKPRDQREEAGSSDLSSRQDAENAEAKLRGLPGQLVDIACKVCQAYLGQLEHEDIDTSADAVEDLTEAEWEDLTQQYYSLVQVPLGSSIVLCIFKIQKVMMSFEPPTARDRQCQALLNRITSVNPQTDIDGLRNIWIIKPAAKSRGRGESPDIVCMDRVEEILELAAADHPLSRDNKWVVQKYIETPLLICDTKFDIRQWFLVTDWNPLTIWFYKESYLRFSTQRFSLDKLDSAIHLCNNAVQKYLKNDVGRSPLLPAHNMWTSTRFQEYLQRQGRGAVWGSVIYPSMKKAIAHAMKVAQDHVEPRKNSFELYGADFVLGRDFRPWLIEINSSPTMHPSTPVTAQLCAQVQEDTIKVAVDRSCDIGNFELLWRQPVVEPPPFSGSDLCVAGVSVRRARRQVLPVCNLKASASLLDAQPLKARGPSAMPDPAQGPPSPALQRDLGLKEEKGLPLALLAPLRGAAESGGAAQPTRTKAAGKVELPACPCRHVDSQAPNTGVPVAQPAKSWDPNQLNAHPLEPVLRGLKTAEGALRPPPGGKGEGTVCSRLPHHGHHVAACQTTGTTWDGGPGVCFLRQLLASELPMGPGLPRDPRAPPCLVCRGLLPPAGPCKRCRSFCAAVLQGASFVRLGGRSCSPRTP

SEQ ID NO: 324385 - protein, 850 aa, Artificial Sequence
  derived and/or modified sequence
MEPERKGLSLASSSDGDGREENKLKQGISQDLASSSRLDRYKIARQLTEKAIKEKKIFSIYGHYPVVRAALRRKGWVEKKFHFLPKVIPDVEDEGARVNDDTCAKVKENQEMALEKTDNIHDVMSRLVKNEMPYLLWTIKRDIIDYHSLTYDQMLNHYAKTASFTTKIGLCVNMRSLPWYVPANPDSFFPRCYSLCTESEQQEFLEDFRRTMASSILKWVVSHQSCSRSSRSKPRDQREEAGSSDLSSRQDAENAEAKLRGLPGQLVDIACKVCQAYLGQLEHEDIDTSADAVEDLTEAEWEDLTQQYYSLVHGDAFISNSRNYFSQCQALLNRITSVNPQTDIDGLRNIWIIKPAAKSRGRDIVCMDRVEEILELAAADHPLSRDNKWVVQKYIETPLLICDTKFDIRQWFLVTDWNPLTIWFYKESYLRFSTQRFSLDKLDSAIHLCNNAVQKYLKNDVGRSPLLPAHNMWTSTRFQEYLQRQGRGAVWGSVIYPSMKKAIAHAMKVAQDHVEPRKNSFELYGADFVLGRDFRPWLIEINSSPTMHPSTPVTAQLCAQVQEDTIKVAVDRSCDIGNFELLWRQPVVEPPPFSGSDLCVAGVSVRRARRQVLPVCNLKASASLLDAQPLKARGPSAMPDPAQGPPSPALQRDLGLKEEKGLPLALLAPLRGAAESGGAAQPTRTKAAGKVELPACPCRHVDSQAPNTGVPVAQPAKSWDPNQLNAHPLEPVLRGLKTAEGALRPPPGGKGEGTVCSRLPHHGHHVAACQTTGTTWDGGPGVCFLRQLLASELPMGPGLPRDPRAPPCLVCRGLLPPAGPCKRCRSFCAAVLQGASFVRLGGRSCSPRTP

SEQ ID NO: 324386 - protein, 814 aa, Artificial Sequence
  derived and/or modified sequence
MRLLDGKQTSRYSENACEKKIFSIYGHYPVVRAALRRKGWVEKKFHFLPKVIPDVEDEGARVNDDTCAKVKENQEMALEKTDNIHDVMSRLVKNEMPYLLWTIKRDIIDYHSLTYDQMLNHYAKTASFTTKIGLCVNMRSLPWYVPANPDSFFPRCYSLCTESEQQEFLEDFRRTMASSILKWVVSHQSCSRSSRSKPRDQREEAGSSDLSSRQDAENAEAKLRGLPGQLVDIACKVCQAYLGQLEHEDIDTSADAVEDLTEAEWEDLTQQYYSLVHGDAFISNSRNYFSQCQALLNRITSVNPQTDIDGLRNIWIIKPAAKSRGRDIVCMDRVEEILELAAADHPLSRDNKWVVQKYIETPLLICDTKFDIRQWFLVTDWNPLTIWFYKESYLRFSTQRFSLDKLDSAIHLCNNAVQKYLKNDVGRSPLLPAHNMWTSTRFQEYLQRQGRGAVWGSVIYPSMKKAIAHAMKVAQDHVEPRKNSFELYGADFVLGRDFRPWLIEINSSPTMHPSTPVTAQLCAQVQEDTIKVAVDRSCDIGNFELLWRQPVVEPPPFSGSDLCVAGVSVRRARRQVLPVCNLKASASLLDAQPLKARGPSAMPDPAQGPPSPALQRDLGLKEEKGLPLALLAPLRGAAESGGAAQPTRTKAAGKVELPACPCRHVDSQAPNTGVPVAQPAKSWDPNQLNAHPLEPVLRGLKTAEGALRPPPGGKGEGTVCSRLPHHGHHVAACQTTGTTWDGGPGVCFLRQLLASELPMGPGLPRDPRAPPCLVCRGLLPPAGPCKRCRSFCAAVLQGASFVRLGGRSCSPRTP

SEQ ID NO: 324387 - DNA, 2553 bp, Artificial Sequence
  derived and/or modified sequence
atggagcccgagagaaagggcctgagcctggccagcagcagcgacggcgacggcagagaggagaacaagctgaagcagggcatcagccaggacctggccagcagcagcagactggacagatacaagatcgccagacagctgaccgagaaggccatcaaggagaagaagatcttcagcatctacggccactaccccgtggtgagagccgccctgagaagaaagggctgggtggagaagaagttccacttcctgcccaaggtgatccccgacgtggaggacgagggcgccagagtgaacgacgacacctgcgccaaggtgaaggagaaccaggagatggccctggagaagaccgacaacatccacgacgtgatgagcagactggtgaagaacgagatgccctacctgctgtggaccatcaagagagacatcatcgactaccacagcctgacctacgaccagatgctgaaccactacgccaagaccgccagcttcaccaccaagatcggcctgtgcgtgaacatgagaagcctgccctggtacgtgcccgccaaccccgacagcttcttccccagatgctacagcctgtgcaccgagagcgagcagcaggagttcctggaggacttcagaagaaccatggccagcagcatcctgaagtgggtggtgagccaccagagctgcagcagaagcagcagaagcaagcccagagaccagagagaggaggccggcagcagcgacctgagcagcagacaggacgccgagaacgccgaggccaagctgagaggcctgcccggccagctggtggacatcgcctgcaaggtgtgccaggcctacctgggccagctggagcacgaggacatcgacaccagcgccgacgccgtggaggacctgaccgaggccgagtgggaggacctgacccagcagtactacagcctggtgcacggcgacgccttcatcagcaacagcagaaactacttcagccagtgccaggccctgctgaacagaatcaccagcgtgaacccccagaccgacatcgacggcctgagaaacatctggatcatcaagcccgccgccaagagcagaggcagagacatcgtgtgcatggacagagtggaggagatcctggagctggccgccgccgaccaccccctgagcagagacaacaagtgggtggtgcagaagtacatcgagacccccctgctgatctgcgacaccaagttcgacatcagacagtggttcctggtgaccgactggaaccccctgaccatctggttctacaaggagagctacctgagattcagcacccagagattcagcctggacaagctggacagcgccatccacctgtgcaacaacgccgtgcagaagtacctgaagaacgacgtgggcagaagccccctgctgcccgcccacaacatgtggaccagcaccagattccaggagtacctgcagagacagggcagaggcgccgtgtggggcagcgtgatctaccccagcatgaagaaggccatcgcccacgccatgaaggtggcccaggaccacgtggagcccagaaagaacagcttcgagctgtacggcgccgacttcgtgctgggcagagacttcagaccctggctgatcgagatcaacagcagccccaccatgcaccccagcacccccgtgaccgcccagctgtgcgcccaggtgcaggaggacaccatcaaggtggccgtggacagaagctgcgacatcggcaacttcgagctgctgtggagacagcccgtggtggagcccccccccttcagcggcagcgacctgtgcgtggccggcgtgagcgtgagaagagccagaagacaggtgctgcccgtgtgcaacctgaaggccagcgccagcctgctggacgcccagcccctgaaggccagaggccccagcgccatgcccgaccccgcccagggcccccccagccccgccctgcagagagacctgggcctgaaggaggagaagggcctgcccctggccctgctggcccccctgagaggcgccgccgagagcggcggcgccgcccagcccaccagaaccaaggccgccggcaaggtggagctgcccgcctgcccctgcagacacgtggacagccaggcccccaacaccggcgtgcccgtggcccagcccgccaagagctgggaccccaaccagctgaacgcccaccccctggagcccgtgctgagaggcctgaagaccgccgagggcgccctgagacccccccccggcggcaagggcgagggcaccgtgtgcagcagactgccccaccacggccaccacgtggccgcctgccagaccaccggcaccacctgggacggcggccccggcgtgtgcttcctgagacagctgctggccagcgagctgcccatgggccccggcctgcccagagaccccagagcccccccctgcctggtgtgcagaggcctgctgccccccgccggcccctgcaagagatgcagaagcttctgcgccgccgtgctgcagggcgccagcttcgtgagactgggcggcagaagctgcagccccagaaccccctag

SEQ ID NO: 324388 - DNA, 2445 bp, Artificial Sequence
  derived and/or modified sequence
atgagactgctggacggcaagcagaccagcagatacagcgagaacgcctgcgagaagaagatcttcagcatctacggccactaccccgtggtgagagccgccctgagaagaaagggctgggtggagaagaagttccacttcctgcccaaggtgatccccgacgtggaggacgagggcgccagagtgaacgacgacacctgcgccaaggtgaaggagaaccaggagatggccctggagaagaccgacaacatccacgacgtgatgagcagactggtgaagaacgagatgccctacctgctgtggaccatcaagagagacatcatcgactaccacagcctgacctacgaccagatgctgaaccactacgccaagaccgccagcttcaccaccaagatcggcctgtgcgtgaacatgagaagcctgccctggtacgtgcccgccaaccccgacagcttcttccccagatgctacagcctgtgcaccgagagcgagcagcaggagttcctggaggacttcagaagaaccatggccagcagcatcctgaagtgggtggtgagccaccagagctgcagcagaagcagcagaagcaagcccagagaccagagagaggaggccggcagcagcgacctgagcagcagacaggacgccgagaacgccgaggccaagctgagaggcctgcccggccagctggtggacatcgcctgcaaggtgtgccaggcctacctgggccagctggagcacgaggacatcgacaccagcgccgacgccgtggaggacctgaccgaggccgagtgggaggacctgacccagcagtactacagcctggtgcacggcgacgccttcatcagcaacagcagaaactacttcagccagtgccaggccctgctgaacagaatcaccagcgtgaacccccagaccgacatcgacggcctgagaaacatctggatcatcaagcccgccgccaagagcagaggcagagacatcgtgtgcatggacagagtggaggagatcctggagctggccgccgccgaccaccccctgagcagagacaacaagtgggtggtgcagaagtacatcgagacccccctgctgatctgcgacaccaagttcgacatcagacagtggttcctggtgaccgactggaaccccctgaccatctggttctacaaggagagctacctgagattcagcacccagagattcagcctggacaagctggacagcgccatccacctgtgcaacaacgccgtgcagaagtacctgaagaacgacgtgggcagaagccccctgctgcccgcccacaacatgtggaccagcaccagattccaggagtacctgcagagacagggcagaggcgccgtgtggggcagcgtgatctaccccagcatgaagaaggccatcgcccacgccatgaaggtggcccaggaccacgtggagcccagaaagaacagcttcgagctgtacggcgccgacttcgtgctgggcagagacttcagaccctggctgatcgagatcaacagcagccccaccatgcaccccagcacccccgtgaccgcccagctgtgcgcccaggtgcaggaggacaccatcaaggtggccgtggacagaagctgcgacatcggcaacttcgagctgctgtggagacagcccgtggtggagcccccccccttcagcggcagcgacctgtgcgtggccggcgtgagcgtgagaagagccagaagacaggtgctgcccgtgtgcaacctgaaggccagcgccagcctgctggacgcccagcccctgaaggccagaggccccagcgccatgcccgaccccgcccagggcccccccagccccgccctgcagagagacctgggcctgaaggaggagaagggcctgcccctggccctgctggcccccctgagaggcgccgccgagagcggcggcgccgcccagcccaccagaaccaaggccgccggcaaggtggagctgcccgcctgcccctgcagacacgtggacagccaggcccccaacaccggcgtgcccgtggcccagcccgccaagagctgggaccccaaccagctgaacgcccaccccctggagcccgtgctgagaggcctgaagaccgccgagggcgccctgagacccccccccggcggcaagggcgagggcaccgtgtgcagcagactgccccaccacggccaccacgtggccgcctgccagaccaccggcaccacctgggacggcggccccggcgtgtgcttcctgagacagctgctggccagcgagctgcccatgggccccggcctgcccagagaccccagagcccccccctgcctggtgtgcagaggcctgctgccccccgccggcccctgcaagagatgcagaagcttctgcgccgccgtgctgcagggcgccagcttcgtgagactgggcggcagaagctgcagccccagaaccccctag

SEQ ID NO: 324389 - DNA, 2505 bp, Artificial Sequence
  derived and/or modified sequence
atgagactactcgatggcaaacagaccagtcgttattcggagaacgcctgcgaaaagaagatcttctcaatttacggccactatcctgtcgtgagagctgctctgcgacgcaaaggatgggtggaaaaaaagtttcacttcctgcctaaagtgatacccgatgtggaagatgaaggtgctcgggtaaacgatgatacgtgtgccaaggtcaaagagaaccaggaaatggcactcgagaagacggacaatatccacgacgtgatgagccgccttgtaaagaacgagatgccatatctcctgtggacaatcaagagagacatcatcgactaccatagcctaacctacgaccagatgctgaatcactacgctaagactgcctctttcaccacaaagataggactctgcgtgaacatgaggtcactcccttggtacgttcccgcaaacccagattcattcttccctagatgttatagcctttgcaccgagtcagaacagcaggagtttcttgaggacttccgcaggactatggcttccagcatactgaagtgggtggtgagtcatcagtcatgctcaagatcttcacgcagtaaaccccgcgaccaaagggaagaggccggcagttccgatctatcatcgcgacaggacgccgagaacgcagaagctaaactcaggggactacccgggcagctagttgacattgcctgcaaagtttgccaggcttatctgggccagctggaacacgaggacatcgacaccagcgccgatgccgtggaggatcttactgaagctgaatgggaggacctcacccagcagtactattctttggtacaggtccctctgggctcatccatcgtactgtgcatctttaagattcagaaggtgatgatgtcctttgagccgcccacagccagggatcgacagtgtcaagccctgcttaaccgtattactagcgtaaatcctcagacagacattgatggattacggaatatatggatcattaaacccgcagctaagagcagaggcaggggggagagtcctgatatcgtgtgtatggatcgcgtggaggaaatccttgagctggcagccgcagaccatccactgtcacgggacaacaagtgggtggtgcagaaatatattgagacacctctgctaatctgtgatacaaagttcgacatcagacagtggtttcttgtgacagattggaatcccctcacaatttggttttataaggaaagctatttgcggttttcgactcaaagattttccctggacaaactggatagcgcaatccacctttgcaacaatgctgtgcagaaatacctaaagaacgacgtgggacgaagccctttactccccgctcataacatgtggacatccacacgctttcaagaatacctccaaagacagggtaggggcgctgtgtgggggagtgttatctacccaagcatgaagaaggccatcgcacatgctatgaaagttgcccaggaccacgtcgaaccgaggaaaaattcatttgaactgtacggggctgacttcgtgctgggccgagacttcaggccttggctgatcgaaataaactcctcacccaccatgcacccttccacccctgttactgcacagctctgcgcacaggtccaggaggacaccatcaaggtagccgtagaccggagttgtgatatagggaatttcgaactgctttggagacagccagtggtggagccaccccccttttccggatccgatttgtgcgtcgcaggggtatctgtacgtcgtgcccggagacaagtgctcccagtctgtaacctgaaggcaagcgcctccctcctagacgcgcagccgttaaaagcccgcggaccaagtgcaatgcccgatcccgcccagggtcccccgtcccctgcacttcagcgcgatctggggctcaaggaagagaaggggctaccactggcactgctggcacctctgcgaggcgctgcagaaagcggtggggcagcccagcctactcgtacaaaggcggccgggaaagtggaactcccagcgtgtccctgcagacacgtggacagtcaggcccccaatacgggcgttcccgtggctcagcccgcgaagagctgggaccctaatcagctgaatgcgcacccgttagagccagtgctacgcggactgaagaccgctgagggcgcactccggcctccgccgggggggaagggtgagggtactgtgtgtagtaggctgcctcatcatggccatcacgtggctgcttgtcagacaactgggacaacatgggatgggggccccggcgtatgcttcctcagacagcttctggcttcggagctacctatgggtccagggctgccacgtgatccccgcgcgccaccctgtctcgtatgtcgcggtctgctcccccccgcggggccttgtaaacgctgcaggtctttttgcgcggctgtgctgcagggggcctccttcgtacgtctcggaggccggagctgctcacccaggaccccttag

SEQ ID NO: 324390 - DNA, 2553 bp, Artificial Sequence
  derived and/or modified sequence
atggagccagaacggaagggtctgtctctggctagctcctctgacggggacggccgggaggagaacaagttgaaacagggcatctctcaagacctggcctccagttctaggctggataggtacaagatagccagacagcttacagagaaggctattaaggaaaagaaaatcttttccatctacggtcattacccagtcgtgcgggctgccctaaggaggaaggggtgggtcgagaagaaattccactttctgcccaaggtgatcccagacgtggaggacgagggcgccagggtcaatgacgacacatgcgctaaagtcaaagaaaaccaggagatggcattggaaaagacagacaacatacacgacgtaatgtcccgactggtaaagaatgagatgccatatctgctgtggaccatcaagcgcgacatcattgactatcattctctaacctatgaccaaatgctcaaccactacgccaagaccgccagtttcaccacgaaaattggcctgtgcgtaaatatgcgatcccttccgtggtacgtacctgccaaccctgactcctttttccccaggtgttattccctatgtactgaatccgaacagcaggaattcctggaggatttcagacgaacaatggctagttctattcttaagtgggtggtatcccaccagtcctgctccagaagctcaagatcgaagcctcgtgaccagagggaagaagccggctcttccgatctcagttcaagacaggatgccgagaacgccgaggccaagctacgcggccttccgggccaactggtcgatattgcttgcaaggtgtgtcaagcttatctcggtcagttagagcatgaggatatagataccagcgcagacgccgtcgaagacctaaccgaggctgagtgggaggaccttacgcaacagtattactcactggtgcacggggacgcctttataagcaattcccgcaattatttcagccagtgccaggccttgctgaaccgcatcacatcagtcaatcctcagactgatatcgacgggctcaggaacatctggattatcaaacctgccgcaaagtcacgaggaagagacattgtgtgtatggatagggttgaggaaattctcgagctggcagccgccgatcatccactgtcccgggacaacaaatgggtggttcagaagtacatagagacacctctcctcatctgtgatacaaagttcgacattcggcaatggttcctcgtaaccgactggaaccccttgaccatttggttctataaggaatcttacctgagattttctactcaaagattctctttagacaaacttgacagcgccatccacttatgcaataacgcagtccaaaaatacttgaagaatgatgttgggcggtcccctttactgcccgctcataatatgtggacctccacaagattccaggaatatctccagaggcaaggccgaggtgccgtatggggatccgttatctacccctctatgaaaaaggctatcgcacatgctatgaaggtagcacaggatcacgtggagcctcgtaaaaacagctttgaattgtacggcgcggactttgtgctaggaagagacttcagaccgtggctgatagaaatcaattccagcccgaccatgcatccgtctacaccagtcacagcgcagctgtgtgcccaggtgcaggaagatactattaaggtggccgtcgatagaagctgcgacatcggcaacttcgaacttctctggaggcagcccgtggtcgagcctccgcctttcagcggtagcgatctgtgcgtagccggcgtctccgtgaggcgagctcgacggcaggtgctgccggtctgcaaccttaaggccagcgctagcttactcgacgcacagccactgaaggcgcggggacctagcgccatgcctgaccctgcacagggcccacccagccctgccctacaaagggatctcggactcaaagaggaaaagggcctgcctctggcgctcctcgcacccctgagaggagccgccgagagcggcggggctgctcagcctacccggacgaaagccgccggcaaggtcgagctcccagcatgtccctgtaggcacgttgactctcaggccccgaataccggagtgccagtagctcagcctgctaaaagctgggaccctaatcagcttaatgcccaccctctggagcccgttctgcgggggctgaagactgccgagggcgccctgagaccacctccggggggaaaaggggaaggtacagtatgcagccgactgccgcaccacgggcaccacgtcgccgcatgccaaactacggggactacctgggatgggggccctggcgtctgttttctgcgccaactcctggcatctgagctccccatggggccgggattgccacgagaccctagggcccctccctgtctggtctgtcggggtctgctgccccctgctggtccttgcaaacgctgccggtctttctgcgcagctgttctccagggagcctcatttgtgcgtctaggaggcagaagctgttcaccaaggacaccttag

SEQ ID NO: 324391 - DNA, 2445 bp, Artificial Sequence
  derived and/or modified sequence
atgcggttgttggacggaaaacaaaccagccgctactcagagaatgcctgcgagaaaaagatattctctatctacggccactatccagtcgtgagagcggccctccgcagaaagggctgggttgaaaagaaatttcacttcctccccaaggtaatcccagatgtggaagacgaaggcgctcgtgtgaatgacgacacctgcgcaaaggtgaaggagaatcaggagatggcacttgagaaaaccgacaatattcacgatgtcatgtcacgactcgttaagaatgagatgccatatctgctgtggaccatcaagagagacataatcgattaccactctctgacatacgaccaaatgctcaaccattatgcgaaaacagccagctttaccaccaaaattggtctgtgtgtaaatatgagatcccttccatggtacgtgcccgctaacccagatagcttcttcccacgatgctattctctctgcactgagtccgaacaacaggaattcctcgaagacttccgtagaaccatggcgagctcaattcttaaatgggtggtctctcaccaaagctgtagtcgctcttcgaggtctaagcctcgagatcagcgcgaggaagccgggagctccgatctttcctccaggcaggatgcagagaatgccgaggcaaaactgcgcggactccccggccagcttgtcgacattgcctgcaaagtgtgtcaagcctatttaggccagctcgagcacgaagacattgatacttctgccgatgccgtcgaagacttaacggaagccgaatgggaggatctaactcagcagtattacagccttgtgcacggagacgccttcatttcaaatagtcgtaattattttagccaatgccaagctttattgaaccgtattacatctgtgaatccacagacagatatcgatggacttcgcaacatctggatcattaaacccgcagccaaatcacgaggccgcgatattgtgtgcatggaccgagtggaggagatcctcgaactcgctgctgcagaccatcctctgtctcgggataacaaatgggttgtccagaagtacattgaaactccattattaatatgcgacaccaagttcgacatccgccagtggttcttagttaccgactggaaccccctcactatttggttctataaagagtcatacctccggttcagcacccaacgcttttcgctagataaattagactcggccatccacctgtgcaacaacgccgttcagaagtatctgaagaacgatgtgggtaggagccccctactgcccgcacataacatgtggacatcaactaggttccaagagtacctgcaacggcaaggcaggggtgcagtctggggaagtgtgatttatcctagtatgaagaaggccattgctcatgcgatgaaggtagctcaggaccacgtcgagccacgcaaaaactcctttgaattgtatggtgcagacttcgtgcttggtcgtgacttcaggccatggctgattgaaatcaactctagcccgactatgcatcctagcactcctgtgactgcacagttatgtgctcaggtccaggaggatacaatcaaggttgctgtggatcgatcctgtgacatcggcaacttcgagcttctgtggcgccaaccggtggtagagccaccccctttttcaggctctgatctgtgcgttgctggcgttagcgttcgccgcgcccgccggcaggtactgccggtctgcaatctgaaggcaagtgccagtctgctggacgcgcagccattgaaagcaagaggacctagtgccatgcctgatcccgcacagggccctcccagcccggccctccagcgggacctcggtctcaaagaggagaagggactgccccttgccctgctggctccccttcgaggcgcagctgaaagcggcggcgccgcccagccgacaaggaccaaggccgccggcaaggtagaattaccagcctgtccatgccgccacgtcgatagccaagctcccaatactggagttcctgtggcacagcccgccaaaagctgggacccaaatcagctcaatgcccacccactggagccagtgctgcgaggactgaagactgcagagggggctcttcgaccacccccaggggggaaaggcgaaggtacagtgtgttcccggcttcctcaccatggccatcacgttgccgcatgccaaaccaccggcactacttgggatggcggaccaggcgtttgcttcttgagacagcttctcgcttcggaactacccatgggcccgggtctgcctagggatcccagagcccctccttgtctggtgtgcagaggccttcttccccctgcaggcccctgtaagcgctgccggtccttctgtgccgcagtcctgcagggggcctcattcgtccgactggggggcagatcttgcagccccagaactccttag

SEQ ID NO: 324392 - DNA, 2505 bp, Artificial Sequence
  derived and/or modified sequence
atgaggctgctggatggcaagcagaccagccgctacagtgaaaatgcctgtgagaagaagatcttcagcatctacggccactaccctgtggtgcgggccgccctgcggaggaagggctgggtggagaagaagttccacttcctgcccaaggtgatcccagatgtggaggatgaaggagcccgggtgaatgatgacacctgtgccaaggtgaaggagaaccaggagatggccctggagaagacagacaacatccatgatgtgatgagccggctggtgaagaatgagatgccctacctgctgtggaccatcaagagggacatcatcgactaccacagcctgacctatgaccagatgctgaaccactacgccaagacagccagcttcaccaccaagattggcctgtgtgtgaacatgaggagcctgccctggtacgtgcctgccaacccagacagcttcttcccccgctgctacagcctgtgcacagaaagtgagcagcaggagttcctggaggacttccggaggaccatggccagcagcatcctgaagtgggtggtgagccaccagagctgcagccgcagcagccgcagcaagccccgggaccagcgggaggaggccggcagcagtgacctgagcagccggcaggatgctgaaaatgctgaggccaagctgcggggcctgcccggccagctggtggacatcgcctgcaaggtgtgccaggcctacctgggccagctggagcacgaggacatcgacaccagcgcagatgctgtggaggacctgacagaagctgagtgggaggacctgacccagcagtactacagcctggtgcaggtgcccctgggcagcagcatcgtgctgtgcatcttcaagatccagaaggtgatgatgagctttgagcccccaacagcccgggaccggcagtgccaggccctgctgaaccgcatcacctctgtgaacccccagacagacattgatggcctgaggaacatctggatcatcaagccagctgccaagagccggggccgcggggagagcccagacatcgtgtgcatggacagagtggaggagatcctggagctggccgctgctgaccaccccctgagccgggacaacaagtgggtggtgcagaagtacatcgagacccccctgctgatctgtgacaccaagtttgacatccggcagtggttcctggtgacagactggaaccccctgaccatctggttctacaaggagagctacctgcgcttcagcacccagcgcttcagcctggacaagctggacagcgccatccacctgtgcaacaatgctgtgcagaagtacctgaagaatgatgtgggccgcagccccctgctgcctgcccacaacatgtggaccagcacccgcttccaggagtacctgcagaggcagggcagaggagctgtgtggggcagcgtcatctaccccagcatgaagaaggccatcgcccacgccatgaaggtggcccaggaccacgtggagcccaggaagaacagctttgagctgtatggagctgactttgtgctgggccgggacttccggccctggctgattgagatcaacagcagccccaccatgcaccccagcacccctgtgacagcccagctgtgtgcccaggtgcaggaggacaccatcaaggtggccgtggacaggagctgtgacatcggcaactttgagctgctgtggaggcagcctgtggtggagcccccacccttcagcggcagtgacctgtgtgtggccggcgtgtctgtgcggcgggcccggcggcaggtgctgcctgtgtgcaacctgaaggccagcgccagcctgctggatgcccagcccctgaaggcccggggccccagcgccatgccagaccctgcccagggcccccccagccctgccctgcagagggacctgggcctgaaggaggagaagggcctgcccctggccctgctggcccccctgcggggagctgctgagagcggcggggccgcccagcccaccaggaccaaggccgccggcaaggtggagctgcctgcctgcccctgccgccacgtggacagccaggcccccaacacaggagtgcctgtggcccagcctgccaagtcctgggaccccaaccagctgaatgcccaccccctggagcctgtgctgcggggcctgaagacagctgagggcgccctgcggcccccacctgggggcaagggggagggcaccgtgtgcagccggctgccccaccacggccaccacgtggccgcctgccagaccaccggcaccacctgggatggcggccctggggtgtgcttcctgcggcagctgctggccagcgagctgcccatgggccctggcctgccccgggacccccgggccccaccctgcctggtgtgccggggcctgctgcccccagctggcccctgcaagcgctgccgctccttctgtgccgctgtgctgcagggcgccagctttgtgcggctgggcggccgcagctgcagccccaggaccccctag

SEQ ID NO: 324393 - DNA, 2553 bp, Artificial Sequence
  derived and/or modified sequence
atggagcctgagaggaagggcctgagcctggccagcagcagtgatggagatggccgggaggagaacaagctgaagcagggcatcagccaggacctggccagcagcagccggctggaccgctacaagatcgcccggcagctgacagagaaggccatcaaggagaagaagatcttcagcatctacggccactaccctgtggtgcgggccgccctgcggaggaagggctgggtggagaagaagttccacttcctgcccaaggtgatcccagatgtggaggatgaaggagcccgggtgaatgatgacacctgtgccaaggtgaaggagaaccaggagatggccctggagaagacagacaacatccatgatgtgatgagccggctggtgaagaatgagatgccctacctgctgtggaccatcaagagggacatcatcgactaccacagcctgacctatgaccagatgctgaaccactacgccaagacagccagcttcaccaccaagattggcctgtgtgtgaacatgaggagcctgccctggtacgtgcctgccaacccagacagcttcttcccccgctgctacagcctgtgcacagaaagtgagcagcaggagttcctggaggacttccggaggaccatggccagcagcatcctgaagtgggtggtgagccaccagagctgcagccgcagcagccgcagcaagccccgggaccagcgggaggaggccggcagcagtgacctgagcagccggcaggatgctgaaaatgctgaggccaagctgcggggcctgcccggccagctggtggacatcgcctgcaaggtgtgccaggcctacctgggccagctggagcacgaggacatcgacaccagcgcagatgctgtggaggacctgacagaagctgagtgggaggacctgacccagcagtactacagcctggtgcatggagatgccttcatcagcaacagcaggaactacttcagccagtgccaggccctgctgaaccgcatcacctctgtgaacccccagacagacattgatggcctgaggaacatctggatcatcaagccagctgccaagagccggggccgggacatcgtgtgcatggacagagtggaggagatcctggagctggccgctgctgaccaccccctgagccgggacaacaagtgggtggtgcagaagtacatcgagacccccctgctgatctgtgacaccaagtttgacatccggcagtggttcctggtgacagactggaaccccctgaccatctggttctacaaggagagctacctgcgcttcagcacccagcgcttcagcctggacaagctggacagcgccatccacctgtgcaacaatgctgtgcagaagtacctgaagaatgatgtgggccgcagccccctgctgcctgcccacaacatgtggaccagcacccgcttccaggagtacctgcagaggcagggcagaggagctgtgtggggcagcgtcatctaccccagcatgaagaaggccatcgcccacgccatgaaggtggcccaggaccacgtggagcccaggaagaacagctttgagctgtatggagctgactttgtgctgggccgggacttccggccctggctgattgagatcaacagcagccccaccatgcaccccagcacccctgtgacagcccagctgtgtgcccaggtgcaggaggacaccatcaaggtggccgtggacaggagctgtgacatcggcaactttgagctgctgtggaggcagcctgtggtggagcccccacccttcagcggcagtgacctgtgtgtggccggcgtgtctgtgcggcgggcccggcggcaggtgctgcctgtgtgcaacctgaaggccagcgccagcctgctggatgcccagcccctgaaggcccggggccccagcgccatgccagaccctgcccagggcccccccagccctgccctgcagagggacctgggcctgaaggaggagaagggcctgcccctggccctgctggcccccctgcggggagctgctgagagcggcggggccgcccagcccaccaggaccaaggccgccggcaaggtggagctgcctgcctgcccctgccgccacgtggacagccaggcccccaacacaggagtgcctgtggcccagcctgccaagtcctgggaccccaaccagctgaatgcccaccccctggagcctgtgctgcggggcctgaagacagctgagggcgccctgcggcccccacctgggggcaagggggagggcaccgtgtgcagccggctgccccaccacggccaccacgtggccgcctgccagaccaccggcaccacctgggatggcggccctggggtgtgcttcctgcggcagctgctggccagcgagctgcccatgggccctggcctgccccgggacccccgggccccaccctgcctggtgtgccggggcctgctgcccccagctggcccctgcaagcgctgccgctccttctgtgccgctgtgctgcagggcgccagctttgtgcggctgggcggccgcagctgcagccccaggaccccctag

SEQ ID NO: 324394 - DNA, 2445 bp, Artificial Sequence
  derived and/or modified sequence
atgaggctgctggatggcaagcagaccagccgctacagtgaaaatgcctgtgagaagaagatcttcagcatctacggccactaccctgtggtgcgggccgccctgcggaggaagggctgggtggagaagaagttccacttcctgcccaaggtgatcccagatgtggaggatgaaggagcccgggtgaatgatgacacctgtgccaaggtgaaggagaaccaggagatggccctggagaagacagacaacatccatgatgtgatgagccggctggtgaagaatgagatgccctacctgctgtggaccatcaagagggacatcatcgactaccacagcctgacctatgaccagatgctgaaccactacgccaagacagccagcttcaccaccaagattggcctgtgtgtgaacatgaggagcctgccctggtacgtgcctgccaacccagacagcttcttcccccgctgctacagcctgtgcacagaaagtgagcagcaggagttcctggaggacttccggaggaccatggccagcagcatcctgaagtgggtggtgagccaccagagctgcagccgcagcagccgcagcaagccccgggaccagcgggaggaggccggcagcagtgacctgagcagccggcaggatgctgaaaatgctgaggccaagctgcggggcctgcccggccagctggtggacatcgcctgcaaggtgtgccaggcctacctgggccagctggagcacgaggacatcgacaccagcgcagatgctgtggaggacctgacagaagctgagtgggaggacctgacccagcagtactacagcctggtgcatggagatgccttcatcagcaacagcaggaactacttcagccagtgccaggccctgctgaaccgcatcacctctgtgaacccccagacagacattgatggcctgaggaacatctggatcatcaagccagctgccaagagccggggccgggacatcgtgtgcatggacagagtggaggagatcctggagctggccgctgctgaccaccccctgagccgggacaacaagtgggtggtgcagaagtacatcgagacccccctgctgatctgtgacaccaagtttgacatccggcagtggttcctggtgacagactggaaccccctgaccatctggttctacaaggagagctacctgcgcttcagcacccagcgcttcagcctggacaagctggacagcgccatccacctgtgcaacaatgctgtgcagaagtacctgaagaatgatgtgggccgcagccccctgctgcctgcccacaacatgtggaccagcacccgcttccaggagtacctgcagaggcagggcagaggagctgtgtggggcagcgtcatctaccccagcatgaagaaggccatcgcccacgccatgaaggtggcccaggaccacgtggagcccaggaagaacagctttgagctgtatggagctgactttgtgctgggccgggacttccggccctggctgattgagatcaacagcagccccaccatgcaccccagcacccctgtgacagcccagctgtgtgcccaggtgcaggaggacaccatcaaggtggccgtggacaggagctgtgacatcggcaactttgagctgctgtggaggcagcctgtggtggagcccccacccttcagcggcagtgacctgtgtgtggccggcgtgtctgtgcggcgggcccggcggcaggtgctgcctgtgtgcaacctgaaggccagcgccagcctgctggatgcccagcccctgaaggcccggggccccagcgccatgccagaccctgcccagggcccccccagccctgccctgcagagggacctgggcctgaaggaggagaagggcctgcccctggccctgctggcccccctgcggggagctgctgagagcggcggggccgcccagcccaccaggaccaaggccgccggcaaggtggagctgcctgcctgcccctgccgccacgtggacagccaggcccccaacacaggagtgcctgtggcccagcctgccaagtcctgggaccccaaccagctgaatgcccaccccctggagcctgtgctgcggggcctgaagacagctgagggcgccctgcggcccccacctgggggcaagggggagggcaccgtgtgcagccggctgccccaccacggccaccacgtggccgcctgccagaccaccggcaccacctgggatggcggccctggggtgtgcttcctgcggcagctgctggccagcgagctgcccatgggccctggcctgccccgggacccccgggccccaccctgcctggtgtgccggggcctgctgcccccagctggcccctgcaagcgctgccgctccttctgtgccgctgtgctgcagggcgccagctttgtgcggctgggcggccgcagctgcagccccaggaccccctag

SEQ ID NO: 324395 - DNA, 2505 bp, Artificial Sequence
  derived and/or modified sequence
atgcggctgctggacggcaagcagaccagccggtacagcgagaacgcctgtgaaaaaaagattttttctatatatggccattaccccgtagtccgagcagctctgcgacgtaaagggtgggtagaaaaaaagtttcacttcctgcccaaggtgatcccggacgtggaggatgagggcgcaagagttaacgatgacacctgtgcaaaagtaaaagagaaccaggagatggccctggaaaagactgacaacattcacgacgtcatgagtcgcctggtgaagaatgaaatgccatacttgttatggaccataaaaagagatatcatcgattatcacagcctgacatacgatcaaatgcttaaccactatgccaagacagctagttttactaccaagattgggctgtgtgtaaatatgcggtccctgccttggtacgtccccgccaaccccgattcattctttcccaggtgttactctttgtgcaccgagagtgagcagcaagaatttctcgaagacttcaggcgaacaatggccagctccatccttaagtgggtcgtgtcgcaccagtcctgcagtagaagctccagaagtaagccacgtgatcaacgggaggaagctggatcttcagatctctctagtaggcaagatgcagaaaatgctgaagccaaactgcgcggcctccctggccagctggtcgatatcgcatgtaaagtctgtcaagcttaccttggtcaactagaacatgaagatatcgacacttcagcagacgcagtcgaggatctgaccgaggcagagtgggaggacttaactcagcagtactattctctcgtgcaggtgccactagggtccagtattgtgctgtgcatttttaagattcagaaggtgatgatgtcgttcgaacctccaaccgcccgcgatcgccagtgtcaggcactgctgaatcggattacctctgtgaatccccaaacagacatcgacggactcagaaacatctggatcataaaaccagcagcaaagagccgggggagaggtgagagcccagatattgtatgcatggatcgagtagaagagatcctcgaactcgcggcagctgaccacccccttagtcgggacaataaatgggttgtacaaaaatacatcgagacacccctgctgatctgcgacaccaagttcgacattaggcaatggtttctcgtgaccgactggaatcccctgactatatggttttacaaggagagttacctcaggttctctacccagaggttttcccttgacaaactcgacagtgctattcacctttgcaataacgctgtgcaaaaatatctcaagaacgatgtgggacgaagtcctctcctccccgcccacaacatgtggacttcaactcggttccaggagtacctgcagagacagggacgtggagccgtctgggggagtgtgatctatcccagcatgaagaaagctattgcacatgccatgaaggttgcacaagaccatgtggagccgagaaaaaactccttcgagctgtacggggctgatttcgtgctcggccgtgactttcgcccatggctgatcgaaataaactctagtcccactatgcaccctagtacccccgtcacagcccagctgtgcgcacaggtacaggaagataccattaaggtggctgtagacagatcatgcgacatcggtaacttcgagttgttatggcgacagcctgttgtggagccacctccgttcagtggatccgatctgtgcgtagcaggagtctccgttaggagagccaggcggcaggtgctgccagtgtgcaatctaaaggcctcggcttccttgttagatgctcagcctctgaaggcgagggggcctagtgccatgcccgatcccgcccaaggtccaccaagccctgcactgcaaagggatttaggcttgaaggaagagaagggcctccccctggctctgctggctccacttaggggagctgccgagagcggtggcgcagcccagcccaccagaacaaaagcagccggcaaggttgaattgccggcatgtccctgtcgccatgtagacagccaagcccccaatactggtgtgccagttgctcagcccgctaagtcatgggaccccaaccagttgaatgctcaccctctggagcccgtgctccgtggattgaaaaccgccgagggcgctctccgacctcctcccggagggaaaggtgaggggacagtttgtagcaggctgccccatcacggtcaccacgtagccgcgtgccagactaccggaaccacctgggacggaggaccaggcgtatgtttcctgagacagctcttggcgagcgaactacctatgggccctggactgcctagggacccccgtgccccaccttgtctagtgtgtcgcgggctgcttccccccgccgggccatgcaagcgatgtcgttctttctgcgctgccgtgctgcaaggagcctcattcgtgcggctcggcggtcgtagctgttctcctaggactccttag

SEQ ID NO: 324396 - DNA, 2553 bp, Artificial Sequence
  derived and/or modified sequence
atggagcccgagcggaagggcctgagcctggccagcagcagcgacggagatggtcgagaagagaacaagttgaaacagggaatttcacaggacctggcatctagctcaagactggatcgatataagatcgctcgtcagctgactgaaaaggctattaaagagaagaaaatattctctatttacgggcattatcccgtagtcagggctgctctgcgccgaaaggggtgggtggagaaaaagttccatttcctccctaaggtgatccccgatgtggaggatgaaggcgcccgcgtcaatgacgacacatgtgccaaggtcaaagagaaccaggagatggctttagagaagacagacaatatacatgacgtgatgagtcgcctcgtgaagaatgaaatgccatatctactttggacgattaaacgcgatatcatcgattatcattcacttacatatgaccagatgctcaaccattatgcaaagacggcctcatttaccaccaagatcggactgtgcgtgaacatgcgcagtttgccctggtatgtgccagccaacccagattctttttttccacgttgctattcactctgtactgagagtgagcagcaggagttcctcgaagactttcgaaggacaatggcctcatccatactgaagtgggtcgtgtctcaccagtcttgctctaggagctcccgcagcaagccgcgcgatcagcgggaggaagcaggatcgagtgatttaagttctagacaggatgccgagaacgccgaagctaaactgcggggactgccaggccagctcgtggacatcgcttgtaaggtttgccaggcatacttgggtcagctggagcacgaggatatcgacaccagcgctgatgcagtggaggatttgaccgaagcagaatgggaggaccttactcagcagtattacagcctcgtacatggcgatgccttcatctccaattcccgaaactacttcagtcagtgtcaagcactgctgaacagaattacctccgtcaacccccagacagatattgacggcctgaggaatatttggatcatcaagcccgccgctaagtccaggggcagagacatcgtttgcatggacagggttgaggagatcttagaattggcggctgcagaccatcccctgtccagagataataagtgggtagtgcaaaagtatattgagacacccctgctgatctgcgatacgaagttcgacatccgacagtggttcctggtcaccgactggaacccacttactatctggttttataaagagagctatctgagattcagcacacagcggttcagcctggacaagttagattcggccatccacctttgcaacaatgcagttcagaaatacctgaagaatgatgttggcaggagcccattgttacccgcccacaatatgtggacttccacacgattccaagaataccttcagcgccaaggtcgcggcgccgtctgggggtctgttatttatccctcaatgaaaaaggctatcgcccacgccatgaaggtggcacaagaccatgtggagccacggaagaactcgtttgaattgtacggggccgatttcgttctgggtagggatttccggccttggctgattgagattaatagctctccaacaatgcacccatcaacacctgttacggcccagttatgcgcccaggttcaagaggatacgatcaaagtggcagtggacaggtcttgtgatatcggcaatttcgaacttctatggcggcaacccgttgtggaacccccaccattttcaggctccgatctttgtgttgccggggtttccgtcagacgggccaggcgccaggtgctgccagtgtgcaacctcaaggcttcagcctccctactggatgctcagcctctgaaggccagaggtccatccgctatgccggatcccgctcagggacctccaagccccgctctgcagcgtgacctcggcttgaaagaagagaaggggcttccactcgcgctcctcgcgccccttagaggcgcagcagagagtgggggcgctgctcagccaacacgcacaaaggctgccggaaaagtcgaactcccggcttgcccgtgccgccatgtggatagccaggcccccaacacgggcgtacccgtcgcccagcccgccaaaagctgggacccgaaccaattaaatgcacaccctctggagccggtgctgcgggggctgaaaacagcggagggcgccctgcggccgcctccaggtggaaaaggggaaggaacagtgtgctcacggctccctcatcatggacatcatgtggcagcctgtcagacgaccggtacaacctgggatggtggcccaggagtttgttttcttcgccagctcctggcaagtgagctccccatggggcccgggctcccaagagatcccagggctcctccatgtctggtttgtcgcggactattgccccccgctggcccttgcaagcgatgccggtccttttgcgccgccgtgttacagggcgccagctttgtcagactgggggggcggtcctgtagccctaggactccttag

SEQ ID NO: 324397 - DNA, 2445 bp, Artificial Sequence
  derived and/or modified sequence
atgcggctgctggacggcaagcagaccagccggtacagcgagaacgcctgtgaaaaaaagattttctcaatttatggacattaccccgtggtacgcgctgcactgaggaggaagggttgggttgagaagaaattccattttctcccaaaggtcatcccagatgttgaggatgaaggcgctagagttaacgatgatacgtgcgccaaagtgaaagagaaccaggaaatggcgcttgagaagaccgacaacatacacgatgttatgtcacgcctcgtgaaaaatgagatgccatatctgctatggaccataaaaagggatatcatagattatcactcactcacctatgaccagatgctgaaccactatgccaaaactgccagcttcaccaccaagatcgggctgtgtgtgaacatgagatctctgccctggtacgtgcccgcgaatccagattcattcttcccccggtgctactccctctgtacagaatctgaacaacaggagttcctggaagatttccggcgaacaatggctagcagtattctgaagtgggtcgtttcccatcagtcatgttcacgcagctctcgttccaaaccccgtgaccagagggaagaggcggggagctctgacttgagctcccgtcaggacgcggaaaatgccgaagcgaagttgagggggttacctggacagctggtggacattgcttgtaaggtctgtcaggcataccttggccagctggaacacgaggatatcgacactagtgcagatgctgtcgaggacttgaccgaagccgagtgggaagatctcacccagcaatactacagcctggtgcacggagacgcattcataagcaatagccgaaattacttttcccagtgccaggcactactgaaccgtatcacctccgtcaacccccagacggatattgatggcctgagaaacatctggataattaagcccgcagccaagtctagaggacgcgatattgtgtgtatggacagggtggaggaaatactggaattggccgcagctgatcacccactaagcagagacaataaatgggtagtccaaaagtacattgaaactccactgttaatctgcgacactaaattcgacatcaggcagtggttcctagtaaccgactggaacccattaactatctggttctacaaagaaagctacttacgattctctacgcaacgcttttctctcgacaaacttgactccgccatccacctgtgcaataacgcggttcagaagtacttgaaaaatgacgtggggcggagccccctgcttccagcccacaacatgtggacatccacgaggtttcaggagtatctgcagcggcagggccggggagccgtctggggttctgtgatttatccctcaatgaagaaggccatcgcacatgcgatgaaagtggcacaagaccacgtcgagccacgtaagaacagcttcgaactttatggagccgacttcgttctcggccgcgatttcaggccatggttgatcgagattaacagctcacctacaatgcacccttccaccccagttacagcccagctgtgcgcccaggttcaggaggacactattaaggtcgcggtcgaccgatcatgtgacattggcaatttcgaattgctgtggcgtcagcccgttgtggaaccccctcccttctccgggtctgatctatgcgttgcgggggtttccgtacggagagctcgtcgccaggtccttcccgtctgtaatttaaaagcctccgcttccctcttagatgcccagccgttaaaggcccgggggccctccgcaatgcccgatccagcccaaggtccaccctcacccgcactgcaacgcgacttgggactcaaggaagagaaggggctgccactggccctgctggcaccacttaggggggccgctgagagtggaggagctgcccaaccaactaggaccaaggccgcagggaaagtcgagctccctgcatgtccttgcagacatgtggattcccaggcaccaaatactggtgtccccgtggctcagcccgcaaaatcctgggaccctaaccaactaaacgcccaccccctggagccagtactccgaggccttaaaaccgccgaaggcgccctccggcctccaccgggaggcaaaggagaaggaactgtctgtagccgactgcctcatcacggccatcacgttgccgcctgccagaccaccgggactacctgggatggcggcccgggcgtgtgtttcctccgccagttgctggcatccgaacttccgatgggtcccggacttccacgggacccgcgagctcccccatgtctggtgtgccggggtcttctgcctccggctggcccctgcaagaggtgcagatctttttgcgccgcagtcctccaaggtgcttcatttgtccgactcggtgggcgatcatgcagccctcgcacaccatag

SEQ ID NO: 324398 - DNA, 2505 bp, Artificial Sequence
  derived and/or modified sequence
atgaggctcctcgacggcaagcagacaagccgctacagtgagaacgcatgtgagaagaagatctttagcatctacggtcactaccctgtagtccgagccgcactccggaggaaggggtgggtggagaagaaatttcacttcctccctaaagtgatacccgatgtagaagacgaaggcgcaagagttaacgatgatacctgcgcgaaggttaaggagaaccaggagatggcactcgagaaaaccgacaatatacacgacgtgatgtctcgtcttgtaaagaatgagatgccctatctgttgtggactattaaacgggatatcattgattatcacagtctgacatatgatcaaatgttaaaccattacgccaagactgccagtttcacaactaaaataggtctctgcgtcaatatgaggagcctgccctggtacgtgccggctaatccggattcatttttcccaaggtgctactccctttgtacagagagcgaacagcaggagttcctggaggattttcggagaacgatggccagttcaatactgaagtgggtggtgagccatcaatcctgttccagatcatcccggtctaaaccgagggatcagcgagaggaggccggttcaagcgacctctcatccagacaggacgccgaaaacgccgaagcaaagcttcgcggactccctggccagcttgttgatatcgcatgtaaggtttgccaagcttacctgggtcagctggagcacgaggacatagacacatccgccgacgctgttgaagaccttaccgaggcggagtgggaagatctcacccagcaatactacagcctggtccaagttcccctcggaagctcaatcgtgctgtgtatctttaaaatccagaaggttatgatgtctttcgaaccaccaacagcacgtgataggcagtgtcaggccctcttaaaccgcatcacttcagtgaatccccagacagacattgatgggctacggaacatttggatcatcaaacctgccgctaagtctcgaggcaggggtgagtccccagacatagtgtgcatggatagagtggaagaaattctcgaattagcggcagctgatcaccccctcagtagggacaacaagtgggtggtgcagaagtatatagagacacccttgctgatctgcgatacgaagttcgatatccgccagtggttcctggtgacggattggaatccattgaccatctggttctataaggagtcatatctgaggttctccacccagcgcttctctctcgacaagctggactccgcaatccacctgtgtaacaacgcagtccagaaatatctgaagaacgacgttgggaggtcgccactattgcccgctcataatatgtggacctccacaaggttccaggagtatctgcagaggcaggggcgtggggcagtgtggggctccgttatctacccgtcaatgaaaaaggcaattgctcacgcaatgaaagtcgcccaagatcatgtggaacctagaaagaacagcttcgagctgtacggtgcggactttgttctgggtcgcgacttcagaccttggctgattgagatcaacagctcccccacaatgcatccttctacacccgtcactgctcagctgtgtgctcaagtccaggaggatacaatcaaagtggcagtagaccggtcgtgtgacataggaaatttcgagttgttgtggaggcaacctgtcgtcgagccacctccctttagtggttctgatctctgtgtggcaggagtttcggtgcggcgtgcacggagacaagtgctgccggtatgcaacctcaaggcttccgcttcccttctggatgctcagcctcttaaagcccgaggccctagcgcaatgcctgacccagcacagggtccacccagcccagcgctgcagcgagatctgggcctaaaagaggaaaaggggctgcctctggctctactggccccacttcgaggcgctgccgagagtgggggagccgctcaaccaactaggactaaagcagcagggaaagtagagttgcctgcatgtccttgtagacatgtagattcccaggctccaaatactggcgtcccagtcgctcaaccagctaaaagctgggatcccaatcaactaaatgcccaccccctggagcccgtcctacggggtctgaagacggctgaaggcgctcttcgccctcctccaggcggaaaaggagagggtaccgtgtgttccaggcttccccaccacgggcaccacgtggccgcatgtcagactacgggcaccacctgggacggagggccaggggtctgcttcctcagacagctcctggcatccgagctgcctatggggccaggcctgcccagagaccctcgtgcacccccttgccttgtgtgtagaggacttctgcctcccgcaggaccgtgcaaaaggtgccggtccttttgtgcagcagtgctgcagggtgcctcttttgtgcgtctgggcggacggtcttgctcaccacgcacaccatag

SEQ ID NO: 324399 - DNA, 2553 bp, Artificial Sequence
  derived and/or modified sequence
atggagcccgaaaggaaggggttatccctggcgagttcatctgatggagatggaagagaagagaacaagctgaaacaggggataagccaggatctcgcttcatcttcccgtctggatcgctacaaaatagctaggcagttaactgaaaaggctatcaaggaaaagaaaattttctccatctacggccattaccctgtcgtgcgcgcagccctgcgtaggaaaggctgggtggagaaaaagttccacttcctgcctaaagtgatccctgacgttgaggacgaaggcgctcgagtgaacgatgatacatgcgctaaagtaaaagaaaaccaagaaatggctctcgagaagacagacaacatccacgacgtgatgagcagactagtaaaaaacgagatgccatatctactgtggactatcaagcgcgatataattgactaccacagtctgacatacgaccaaatgctgaaccattacgctaaaaccgcctcttttaccacgaaaattggattgtgtgttaacatgaggtccctgccctggtatgtcccagctaatcccgatagcttcttccctagatgttactcactgtgtaccgaatctgagcagcaggaattcctggaggactttcgcagaacaatggcatcctcaattctgaaatgggtagtgagccatcagagctgctcgcgatcctctagatcaaaaccaagggatcagcgtgaagaggccggatcctcggacctctccagcaggcaagacgctgagaatgcggaggcaaaattgaggggcttgcccggacagctggtggacatagcgtgcaaggtgtgtcaggcctatctgggacagctggaacacgaggacattgacacctcagccgacgcagtggaagatctgacagaagccgaatgggaggacttaacccaacaatactactcccttgtccatggagacgcgtttatttctaacagtaggaactatttttctcaatgtcaagctctgctgaaccggatcacctctgtcaatccccaaacagatattgatggcctcaggaacatatggatcatcaagcccgctgccaaatctcgtggcagagacatcgtttgtatggaccgcgttgaagaaatccttgagctggcagcggctgatcaccctctcagccgagataataaatgggtcgtccagaagtacatcgaaaccccactgttaatatgtgacaccaaatttgatataagacagtggtttcttgtcaccgattggaaccccctgaccatttggttctataaggagagttacctgcggttttctacccaacgtttctctctcgacaagctggactcagcaatccatctttgcaataatgccgtacagaaatatctcaaaaatgatgtcggacgctccccactcctgccagcacacaacatgtggaccagcacaaggttccaagagtatctccagagacaggggagaggtgccgtgtggggcagcgtaatctacccttccatgaaaaaggcaatcgcacacgcaatgaaggtagcccaagaccacgtcgagccaaggaaaaattctttcgaactgtatggcgctgacttcgtgctgggcagggattttaggccttggttgattgaaatcaattcatcacctacaatgcacccaagtaccccagtcactgcccaactttgtgctcaggtacaagaggacaccatcaaagtggccgtggaccggtcctgcgatatcgggaactttgagctattgtggagacaacctgttgtggagccacctcctttttcaggtagcgacctctgtgtggcaggcgtctctgtccgccgagcccgtcgacaggtgttgcccgtctgtaatctgaaagcatccgcatccctgttggatgcccagcctctgaaagcgaggggcccaagcgccatgcctgaccctgcgcaggggcctccaagccccgcactgcaacgagacctggggctgaaagaagagaagggcctacccctcgcacttctggcacctcttcggggagccgcagagagcggaggagcggcacagcccaccagaacaaaagctgcgggaaaagtagaattgccagcctgtccttgtaggcacgtcgactcccaggcccctaacaccggggtacccgtggcacaacctgcaaaatcatgggatccaaaccaacttaacgcacatccactggaacccgtgcttaggggcctaaagacagcggaaggcgctctgcgaccacccccaggaggaaaaggagaggggactgtctgcagtcgccttcctcaccatggccatcatgtggctgcctgtcagactaccgggactacctgggacggcggtccgggagtatgcttcttgcgccagctgctggcatcggaactgccaatgggccctggcctacctagggaccctcgcgcacccccatgtctagtgtgtaggggcctgcttccccctgccggaccttgcaagcggtgccgatccttttgcgccgcagtgctccagggcgcatcattcgttcgtctagggggacgatcttgtagcccgagaacaccttag

SEQ ID NO: 324400 - DNA, 2445 bp, Artificial Sequence
  derived and/or modified sequence
atgagactgctggatggcaagcagacgagccgctacagcgagaatgcttgcgagaagaaaatcttcagcatatacggacattacccggttgtcagggctgccctgcggagaaaaggttgggtggaaaagaagttccattttctcccaaaggtgattcccgacgtggaggacgaaggcgcacgggtcaacgacgatacatgtgccaaagtaaaggagaatcaggaaatggccctcgaaaagactgataatatacatgacgtgatgagcaggcttgtgaaaaatgagatgccctacctcctgtggacaatcaagcgcgatatcatcgactatcactccttgacctacgatcagatgttaaatcactacgccaagactgcctcttttaccaccaagatcgggctctgtgttaacatgcggagccttccttggtacgtccctgccaaccccgattccttctttcccagatgctatagcctgtgtacagaatctgaacaacaggagttcctggaggacttccgtaggacgatggcctcatctatcctgaaatgggttgtgtctcatcagtcatgttctcgatcctctcgtagcaaaccacgagaccagcgcgaagaagcaggctcgtcagatttaagctctaggcaggatgctgaaaacgcggaagcgaaactgaggggtttacccggacagctggtagacatagcttgcaaggtgtgtcaggcgtatctagggcagctggagcatgaggacattgatacatcagccgacgcagtggaagaccttacggaggccgaatgggaggacctaacacaacagtactacagcttggtgcacggcgacgctttcatcagtaatagtcgcaactatttttcacaatgccaagctctcctaaaccggattacaagcgtgaatcctcaaaccgatattgacggtctgcggaatatttggatcatcaagcccgcagcgaagagccgtggacgggacatagtgtgtatggatcgggtagaagagatcctggaactggcagctgcggatcacccactctcaagagataacaagtgggtcgttcagaagtatattgagactccactcctcatttgcgatactaagttcgatatccgtcaatggtttctggtgacagactggaaccccctaacaatctggttctacaaggagtcctacttgcgcttcagtacgcagcgtttcagcctggataagctggacagcgccatacacctctgtaacaacgccgttcaaaaatatctcaaaaatgatgtcggcaggtccccgttgctcccggctcacaatatgtggacgtctactcggttccaggagtacctgcaacggcagggacgcggagccgtgtgggggtccgtcatctatccctctatgaaaaaggctatagcccatgcaatgaaggtggcgcaggaccatgttgagccaaggaagaattcctttgaactgtatggagcagactttgtgctaggaagagacttcagaccatggctcattgagatcaatagcagtccaacaatgcatccttccactcctgtcacggctcagctctgtgcccaggttcaggaggacaccataaaggtggcggtggacaggtcctgcgacatcggaaatttcgaattattatggagacagccagttgtggagcctccacccttcagcgggtccgatttgtgcgtggctggggtttccgtgaggcgagcacgcagacaggttcttccggtatgcaacctcaaagcatcagctagcctactcgatgcccaacccctgaaagcacggggaccctccgcaatgcccgatcccgctcagggacctccatcccctgctttacaaagagatcttgggttgaaagaggaaaagggactcccactcgcactgctggcacccttgagaggagccgcagaatctggcggagctgcccagccaacaagaactaaagctgctggcaaggtggaactgccagcctgtccatgccgccatgtcgactctcaagctcccaataccggtgttcctgttgcccagcccgctaaaagctgggatcctaatcagcttaatgcccatccgctggaacctgtcttacgcggactcaaaactgcggagggagccctgcgaccccctcccggagggaagggagagggaaccgtgtgctcgaggctgccccatcacgggcaccacgttgctgcctgccagacgacaggcaccacctgggatggagggccaggcgtgtgtttcctccgccaactcttggcatctgaactacccatgggacctgggttaccaagggatccaagggcgcctccatgtctcgtttgccgcggtttgctacctcccgcaggcccttgcaagcgctgtcgaagtttttgcgctgcagttttgcagggggcttctttcgttaggttgggtggacggagttgctcaccacggacgccctag

SEQ ID NO: 324401 - DNA, 2549 bp, Artificial Sequence
  derived and/or modified sequence
atggaaccagagaggaaggggctatcgttggcttcttcttcagatggagacgggagagaagaaaataaattaaaacaaggaatttcccaagacttggcttcttcctccagattagacagatacaaaatagcaaggcagttaacagaaaaagcaatcaaggagaagaagattttctctatctacggacactacccggtggtccgggccgctctgcgaaggaagggctgggtagagaagaagttccactttttgcccaaggtcattccggatgtcgaggatgaaggcgcccgggtcaatgatgatacatgtgccaaagtcaaagaaaatcaagaaatggctttggagaaaacagacaacatccacgacgtgatgtctaggttggtaaaaaatgagatgccgtacctcctctggaccatcaagagggacatcattgactatcacagcctgacctacgaccagatgctgaaccactacgcaaagacagcctccttcaccaccaagatcgggctgtgcgtgaacatgcggagcctgccctggtacgtcccggccaaccccgactccttcttcccacgctgctacagcctctgcaccgagagtgagcagcaggagttcctggaagacttccggcgcaccatggcatccagcatcctcaagtgggtggtcagccaccagagctgcagcaggagcagcagaagcaagcccagggaccagagggaggaggccgggagcagcgacctgagcagcaggcaagatgctgaaaatgctgaggcaaagctcaggggcctcccggggcagcttgtggacatcgcgtgcaaggtgtgccaggcctacctggggcagctggagcatgaggacatcgacacgtcagcagatgccgtggaggacctcactgaggccgagtgggaggacctgacccagcagtactactccctcgttcatggcgatgctttcatctccaattcaagaaattacttttcgcagtgccaggctctgctgaatagaatcacgtctgtgaaccctcagacggacattgacgggctccggaacatctggattataaagcccgcggccaagtcccggggccgagacatagtgtgcatggaccgtgtggaggagatcctggagctggcagctgcagaccaccctctttccagggacaacaagtgggtggtccagaagtacatcgagacgccgctgctcatctgtgacaccaagttcgacatcagacagtggttcctcgtcacggactggaaccccctgaccatctggttctacaaggagagttacttgcggttctcaactcagcgcttctccctggacaagctggacagcgccatccacctgtgcaacaacgccgtccagaagtacctgaagaatgatgtgggccgcagccccctgctgcccgcacacaacatgtggaccagcaccaggttccaggagtacctgcagcgccagggccgtggcgccgtgtggggcagcgtcatctacccgtccatgaagaaggccatcgcccacgccatgaaggtggcccaggaccacgtggagcctcgcaagaacagctttgagctctacggggctgacttcgtccttgggagggacttcaggccctggctgatcgagatcaattccagccccaccatgcacccgtccacgccggtcacggcccagctgtgtgcacaggtgcaggaggacaccatcaaggtggccgtggaccgcagctgtgacatcggcaacttcgagctcctgtggaggcagccggtggttgagccgcccccattcagcgggtccgacctctgcgtggcgggcgtcagtgtgaggagagccaggaggcaggtgctgcccgtctgcaacctcaaggcctcggcctcgctgttggacgcgcagccgctgaaggcacggggcccctcggccatgccagaccctgcccagggacccccatcaccagctctccagcgggacttgggactgaaggaagagaaggggctccccctggccttgctggcacccttaaggggggcagccgagagcggtggagccgcacagcccacccgcaccaaagctgctgggaaggtggagctcccggcctgcccctgtcgccacgtggacagtcaggccccaaacaccggtgtccccgtagcccagcccgccaaaagctgggatccaaaccagctaaatgcgcacccgctggagcctgtgctgcggggcctgaagacagcagagggcgcgctgcgtccgccgcccggaggaaaaggagagggcacggtctgcagccgcctgccacaccacgggcaccacgtggccgcctgccagaccacgggcaccacgtgggatggtgggcctggggtgtgcttcctccggcagctcctggcatcagaactgcccatgggccctgggctgccgagggacccccgagcgccgccctgcctcgtgtgccgcgggctgctgccacccgccgggccctgcaagcgctgccgctcgttctgcgccgcggtcctgcagggcgcgtccttcgtgcggctcggcgggcggagctgcagcccgcggacccc

SEQ ID NO: 324402 - DNA, 2445 bp, Artificial Sequence
  derived and/or modified sequence
atgaggctcctggatgggaaacagacttccaggtactcagagaatgcctgcgagaagaagattttctctatctacggacactacccggtggtccgggccgctctgcgaaggaagggctgggtagagaagaagttccactttttgcccaaggtcattccggatgtcgaggatgaaggcgcccgggtcaatgatgatacatgtgccaaagtcaaagaaaatcaagaaatggctttggagaaaacagacaacatccacgacgtgatgtctaggttggtaaaaaatgagatgccgtacctcctctggaccatcaagagggacatcattgactatcacagcctgacctacgaccagatgctgaaccactacgcaaagacagcctccttcaccaccaagatcgggctgtgcgtgaacatgcggagcctgccctggtacgtcccggccaaccccgactccttcttcccacgctgctacagcctctgcaccgagagtgagcagcaggagttcctggaagacttccggcgcaccatggcatccagcatcctcaagtgggtggtcagccaccagagctgcagcaggagcagcagaagcaagcccagggaccagagggaggaggccgggagcagcgacctgagcagcaggcaagatgctgaaaatgctgaggcaaagctcaggggcctcccggggcagcttgtggacatcgcgtgcaaggtgtgccaggcctacctggggcagctggagcatgaggacatcgacacgtcagcagatgccgtggaggacctcactgaggccgagtgggaggacctgacccagcagtactactccctcgttcatggcgatgctttcatctccaattcaagaaattacttttcgcagtgccaggctctgctgaatagaatcacgtctgtgaaccctcagacggacattgacgggctccggaacatctggattataaagcccgcggccaagtcccggggccgagacatagtgtgcatggaccgtgtggaggagatcctggagctggcagctgcagaccaccctctttccagggacaacaagtgggtggtccagaagtacatcgagacgccgctgctcatctgtgacaccaagttcgacatcagacagtggttcctcgtcacggactggaaccccctgaccatctggttctacaaggagagttacttgcggttctcaactcagcgcttctccctggacaagctggacagcgccatccacctgtgcaacaacgccgtccagaagtacctgaagaatgatgtgggccgcagccccctgctgcccgcacacaacatgtggaccagcaccaggttccaggagtacctgcagcgccagggccgtggcgccgtgtggggcagcgtcatctacccgtccatgaagaaggccatcgcccacgccatgaaggtggcccaggaccacgtggagcctcgcaagaacagctttgagctctacggggctgacttcgtccttgggagggacttcaggccctggctgatcgagatcaattccagccccaccatgcacccgtccacgccggtcacggcccagctgtgtgcacaggtgcaggaggacaccatcaaggtggccgtggaccgcagctgtgacatcggcaacttcgagctcctgtggaggcagccggtggttgagccgcccccattcagcgggtccgacctctgcgtggcgggcgtcagtgtgaggagagccaggaggcaggtgctgcccgtctgcaacctcaaggcctcggcctcgctgttggacgcgcagccgctgaaggcacggggcccctcggccatgccagaccctgcccagggacccccatcaccagctctccagcgggacttgggactgaaggaagagaaggggctccccctggccttgctggcacccttaaggggggcagccgagagcggtggagccgcacagcccacccgcaccaaagctgctgggaaggtggagctcccggcctgcccctgtcgccacgtggacagtcaggccccaaacaccggtgtccccgtagcccagcccgccaaaagctgggatccaaaccagctaaatgcgcacccgctggagcctgtgctgcggggcctgaagacagcagagggcgcgctgcgtccgccgcccggaggaaaaggagagggcacggtctgcagccgcctgccacaccacgggcaccacgtggccgcctgccagaccacgggcaccacgtgggatggtgggcctggggtgtgcttcctccggcagctcctggcatcagaactgcccatgggccctgggctgccgagggacccccgagcgccgccctgcctcgtgtgccgcgggctgctgccacccgccgggccctgcaagcgctgccgctcgttctgcgccgcggtcctgcagggcgcgtccttcgtgcggctcggcgggcggagctgcagcccgcggaccccgtga

SEQ ID NO: 324403 - DNA, 2505 bp, Artificial Sequence
  derived and/or modified sequence
atgaggctcctggatgggaaacagacttccaggtactcagagaatgcctgcgagaagaagattttctctatctacggacactacccggtggtccgggccgctctgcgaaggaagggctgggtagagaagaagttccactttttgcccaaggtcattccggatgtcgaggatgaaggcgcccgggtcaatgatgatacatgtgccaaagtcaaagaaaatcaagaaatggctttggagaaaacagacaacatccacgacgtgatgtctaggttggtaaaaaatgagatgccgtacctcctctggaccatcaagagggacatcattgactatcacagcctgacctacgaccagatgctgaaccactacgcaaagacagcctccttcaccaccaagatcgggctgtgcgtgaacatgcggagcctgccctggtacgtcccggccaaccccgactccttcttcccacgctgctacagcctctgcaccgagagtgagcagcaggagttcctggaagacttccggcgcaccatggcatccagcatcctcaagtgggtggtcagccaccagagctgcagcaggagcagcagaagcaagcccagggaccagagggaggaggccgggagcagcgacctgagcagcaggcaagatgctgaaaatgctgaggcaaagctcaggggcctcccggggcagcttgtggacatcgcgtgcaaggtgtgccaggcctacctggggcagctggagcatgaggacatcgacacgtcagcagatgccgtggaggacctcactgaggccgagtgggaggacctgacccagcagtactactccctcgttcaggtgcctttggggagtagcattgtcttgtgcatcttcaaaatccagaaggttatgatgtcatttgagccccccacagcccgagacaggcagtgccaggctctgctgaatagaatcacgtctgtgaaccctcagacggacattgacgggctccggaacatctggattataaagcccgcggccaagtcccggggccgaggtgagtcccctgacatagtgtgcatggaccgtgtggaggagatcctggagctggcagctgcagaccaccctctttccagggacaacaagtgggtggtccagaagtacatcgagacgccgctgctcatctgtgacaccaagttcgacatcagacagtggttcctcgtcacggactggaaccccctgaccatctggttctacaaggagagttacttgcggttctcaactcagcgcttctccctggacaagctggacagcgccatccacctgtgcaacaacgccgtccagaagtacctgaagaatgatgtgggccgcagccccctgctgcccgcacacaacatgtggaccagcaccaggttccaggagtacctgcagcgccagggccgtggcgccgtgtggggcagcgtcatctacccgtccatgaagaaggccatcgcccacgccatgaaggtggcccaggaccacgtggagcctcgcaagaacagctttgagctctacggggctgacttcgtccttgggagggacttcaggccctggctgatcgagatcaattccagccccaccatgcacccgtccacgccggtcacggcccagctgtgtgcacaggtgcaggaggacaccatcaaggtggccgtggaccgcagctgtgacatcggcaacttcgagctcctgtggaggcagccggtggttgagccgcccccattcagcgggtccgacctctgcgtggcgggcgtcagtgtgaggagagccaggaggcaggtgctgcccgtctgcaacctcaaggcctcggcctcgctgttggacgcgcagccgctgaaggcacggggcccctcggccatgccagaccctgcccagggacccccatcaccagctctccagcgggacttgggactgaaggaagagaaggggctccccctggccttgctggcacccttaaggggggcagccgagagcggtggagccgcacagcccacccgcaccaaagctgctgggaaggtggagctcccggcctgcccctgtcgccacgtggacagtcaggccccaaacaccggtgtccccgtagcccagcccgccaaaagctgggatccaaaccagctaaatgcgcacccgctggagcctgtgctgcggggcctgaagacagcagagggcgcgctgcgtccgccgcccggaggaaaaggagagggcacggtctgcagccgcctgccacaccacgggcaccacgtggccgcctgccagaccacgggcaccacgtgggatggtgggcctggggtgtgcttcctccggcagctcctggcatcagaactgcccatgggccctgggctgccgagggacccccgagcgccgccctgcctcgtgtgccgcgggctgctgccacccgccgggccctgcaagcgctgccgctcgttctgcgccgcggtcctgcagggcgcgtccttcgtgcggctcggcgggcggagctgcagcccgcggaccccgtga

SEQ ID NO: 324404 - DNA, 2505 bp, Artificial Sequence
  derived and/or modified sequence
atgagactgctggacggcaagcagaccagcagatacagcgagaacgcctgcgagaagaagatcttcagcatctacggccactaccccgtggtgagagccgccctgagaagaaagggctgggtggagaagaagttccacttcctgcccaaggtgatccccgacgtggaggacgagggcgccagagtgaacgacgacacctgcgccaaggtgaaggagaaccaggagatggccctggagaagaccgacaacatccacgacgtgatgagcagactggtgaagaacgagatgccctacctgctgtggaccatcaagagagacatcatcgactaccacagcctgacctacgaccagatgctgaaccactacgccaagaccgccagcttcaccaccaagatcggcctgtgcgtgaacatgagaagcctgccctggtacgtgcccgccaaccccgacagcttcttccccagatgctacagcctgtgcaccgagagcgagcagcaggagttcctggaggacttcagaagaaccatggccagcagcatcctgaagtgggtggtgagccaccagagctgcagcagaagcagcagaagcaagcccagagaccagagagaggaggccggcagcagcgacctgagcagcagacaggacgccgagaacgccgaggccaagctgagaggcctgcccggccagctggtggacatcgcctgcaaggtgtgccaggcctacctgggccagctggagcacgaggacatcgacaccagcgccgacgccgtggaggacctgaccgaggccgagtgggaggacctgacccagcagtactacagcctggtgcaggtgcccctgggcagcagcatcgtgctgtgcatcttcaagatccagaaggtgatgatgagcttcgagccccccaccgccagagacagacagtgccaggccctgctgaacagaatcaccagcgtgaacccccagaccgacatcgacggcctgagaaacatctggatcatcaagcccgccgccaagagcagaggcagaggcgagagccccgacatcgtgtgcatggacagagtggaggagatcctggagctggccgccgccgaccaccccctgagcagagacaacaagtgggtggtgcagaagtacatcgagacccccctgctgatctgcgacaccaagttcgacatcagacagtggttcctggtgaccgactggaaccccctgaccatctggttctacaaggagagctacctgagattcagcacccagagattcagcctggacaagctggacagcgccatccacctgtgcaacaacgccgtgcagaagtacctgaagaacgacgtgggcagaagccccctgctgcccgcccacaacatgtggaccagcaccagattccaggagtacctgcagagacagggcagaggcgccgtgtggggcagcgtgatctaccccagcatgaagaaggccatcgcccacgccatgaaggtggcccaggaccacgtggagcccagaaagaacagcttcgagctgtacggcgccgacttcgtgctgggcagagacttcagaccctggctgatcgagatcaacagcagccccaccatgcaccccagcacccccgtgaccgcccagctgtgcgcccaggtgcaggaggacaccatcaaggtggccgtggacagaagctgcgacatcggcaacttcgagctgctgtggagacagcccgtggtggagcccccccccttcagcggcagcgacctgtgcgtggccggcgtgagcgtgagaagagccagaagacaggtgctgcccgtgtgcaacctgaaggccagcgccagcctgctggacgcccagcccctgaaggccagaggccccagcgccatgcccgaccccgcccagggcccccccagccccgccctgcagagagacctgggcctgaaggaggagaagggcctgcccctggccctgctggcccccctgagaggcgccgccgagagcggcggcgccgcccagcccaccagaaccaaggccgccggcaaggtggagctgcccgcctgcccctgcagacacgtggacagccaggcccccaacaccggcgtgcccgtggcccagcccgccaagagctgggaccccaaccagctgaacgcccaccccctggagcccgtgctgagaggcctgaagaccgccgagggcgccctgagacccccccccggcggcaagggcgagggcaccgtgtgcagcagactgccccaccacggccaccacgtggccgcctgccagaccaccggcaccacctgggacggcggccccggcgtgtgcttcctgagacagctgctggccagcgagctgcccatgggccccggcctgcccagagaccccagagcccccccctgcctggtgtgcagaggcctgctgccccccgccggcccctgcaagagatgcagaagcttctgcgccgccgtgctgcagggcgccagcttcgtgagactgggcggcagaagctgcagccccagaaccccctag

SEQ ID NO: 324405 - protein, 3408 aa, Artificial Sequence
  derived and/or modified sequence
  misc_feature (1)..(1): Xaa can be any naturally occurring amino acid
XSLPSGCEFGQADMQKLVPKDEKADGEQDGAAGSMDASTQGLLEGIGLDGDTLAPMETDEPTASDSKGKSKITPAMAARIKQIKPLLSASSRLGRALAELFGLLVKLCVGSPVRQRRSHHAASTTTAPTPAARSTASALTKLLTKGLSWQPPPYTPTPRFRLTFFICSVGFTSPMLFDERKYPYHLMLQKFLCSGGHNALFETFNWALSMGGKVPVSEGLEHSDLPDGTGEFLDAWLMLVEKMVNPTTVLESPHSLPAKLPGGVQNFPQFSALRFLVVTQKAAFTCIKNLWNRKPLKVYGGRMAESMLAILCHILRGEPVIRERLSKEKEGSRGEEDTGQEEGGSRREPQVNQQQLQQLMDMGFTREHAMEALLNTSTMEQATEYLLTHPPPIMGGVVRDLSMSEEDQMMRAIAMSLGQDIPMDQRAESPEEVACRKEEEERKAREKQEEEEAKCLEKFQDADPLEQDELHTFTDTMLPGCFHLLDELPDTVYRVCDLIMTAIKRNGADYRDMILKQVVNQVWEAADVLIKAALPLTTSDTKTVSEWISQMATLPQASNLATRILLLTLLFEELKLPCAWVVESSGILNVLIKLLEVVQPCLQAAKEQKEVQTPKWITPVLLLIDFYEKTAISSKRRAQMTKYLQSNSNNWRWFDDRSGRWCSYSASNNSTIDSAWKSGETSVRFTAGRRRYTVQFTTMVQVNEETGNRRPVMLTLLRVPRLNKNSKNSNGQELEKTLEESKEMDIKRKENKGNDTPLALESTNTEKETSLEETKIGEILIQGLTEDMVTVLIRACVSMLGVPVDPDTLHATLRLCLRLTRDHKYAMMFAELKSTRMILNLTQSSGFNGFTPLVTLLLRHIIEDPCTLRHTMEKVVRSAATSGAGSTTSGVVSGSLGSREINYILRVLGPAACRNPDIFTEVANCCIRIALPAPRGSGTASDDEFENLRIKGPNAVQLVKTTPLKPSPLPVIPDTIKEVIYDMLNALAAYHAPEEADKSDPKPGVMTQEVGQLLQDMGDDVYQQYRSLTRQSSDFDTQSGFSINSQVFAADGASTETSASGTSQGEASTPEESRDGKKDKEGDRASEEGKQKGKGSKPLMPTSTILRLLAELVRSYVGIATLIANYSYTVGQSELIKEDCSVLAFVLDHLLPHTQNAEDKDTPALARLFLASLAAAGSGTDAQVALVNEVKAALGRALAMAESTEKHARLQAVMCIISTIMESCPSTSSFYSSATAKTQHNGMNNIIRLFLKKGLVNDLARVPHSLDLSSPNMANTVNAALKPLETLSRIVNQPSSLFGSKSASSKNKSEQDAQGASQDSSSNQQDPGEPGEAEVQEEDHDVTQTEVADGDIMDGEAETDSVVIAGQPEVLSSQEMQVENELEDLIDELLERDGGSGNSTIIVSRSGEDESQEDVLMDEAPSNLSQASTLQANREDSMNILDPEDEEEHTQEEDSSGSNEDEDDSQDEEEEEEEDEEDDQEDDEGEEGDEDDDDDGSEMELDEDYPDMNASPLVRFERFDREDDLIIEFDNMFSSATDIPPSPGNIPTTHPLMVRHADHSSLTLGSGSSTTRLTQGIGRSQRTLRQLTANTGHTIHVHYPGNRQPNPPLILQRLLGPSAAADILQLSSSLPLQSRGRARLLVGNDDVHIIARSDDELLDDFFHDQSTATSQAGTLSSIPTALTRWTEECKVLDAESMHDCVSVVKVSIVNHLEFLRDEELEERREKRRKQLAEEETKITDKGKEDKENRDQSAQCTASKSNDSTEQNLSDGTPMPDSYPTTPSSTDAATSESKETLGTLQSSQQQPTLPTPPALGEVPQELQSPAGEGGSSTQLLMPVEPEELGPTRPSGEAETTQMELSPAPTITSLSPERAEDSDALTAVSSQLEGSPMDTSSLASCTLEEAVGDTSAAGSSEQPRAGSSTPGDAPPAVAEVQGRSDGSGESAQPPEDSSPPASSESSSTRDSAVAISGADSRGILEEPLPSTSSEEEDPLAGISLPEGVDPSFLAALPDDIRREVLQNQLGIRPPTRTAPSTNSSAPAVVGNPGVTEVSPEFLAALPPAIQEEVLAQQRAEQQRRELAQNASSDTPMDPVTFIQTLPSDLRRSVLEDMEDSVLAVMPPDIAAEAQALRREQEARQRQLMHERLFGHSSTSALSAILRSPAFTSRLSGNRGVQYTRLAVQRGGTFQMGGSSSHNRPSGSNVDTLLRLRGRLLLDHEALSCLLVLLFVDEPKLNTSRLHRVLRNLCYHAQTRHWVIRSLLSILQRSSESELCIETPKLTTSEEKGKKSSKSCGSSSHENRPLDLLHKMESKSSNQLSWLSVSMDAALGCRTNIFQIQRSGGRKHTEKHASGGSTVHIHPQAAPVVCRHVLDTLIQLAKVFPSHFTQQRTKETNCESDRERGNKACSPCSSQSSSSGICTDFWDLLVKLDNMNVSRKGKNSVKSVPVSAGGEGETSPYSLEASPLGQLMNMLSHPVIRRSSLLTEKLLRLLSLISIALPENKVSEAQANSGSGASSTTTATSTTSTTTTTAASTTPTPPTAPTPVTSAPALVAATAISTIVVAASTTVTTPTTATTTVSISPTTKGSKSPAKVSDGGSSSTDFKMVSSGLTENQLQLSVEVLTSHSCSEEGLEDAANVLLQLSRGDSGTRDTVLKLLLNGARHLGYTLCKQIGTLLAELREYNLEQQRRAQCETLSPDGLPEEQPQTTKLKGKMQSRFDMAENVVIVASQKRPLGGRELQLPSMSMLTSKTSTQKFFLRVLQVIIQLRDDTRRANKKAKQTGRLGSSGLGSASSIQAAVRQLEAEADAIIQMVREGQRARRQQQAATSESSQSEASVRREESPMDVDQPSPSAQDTQSIASDGTPQGEKEKEERPPELPLLSEQLSLDELWDMLGECLKELEESHDQHAVLVLQPAVEAFFLVHATERESKPPVRDTRESQLAHIKDEPPPLSPAPLTPATPSSLDPFFSREPSSMHISSSLPPDTQKFLRFAETHRTVLNQILRQSTTHLADGPFAVLVDYIRVLDFDVKRKYFRQELERLDEGLRKEDMAVHVRRDHVFEDSYRELHRKSPEEMKNRLYIVFEGEEGQDAGGLLREWYMIISREMFNPMYALFRTSPGDRVTYTINPSSHCNPNHLSYFKFVGRIVAKAVYDNRLLECYFTRSFYKHILGKSVRYTDMESEDYHFYQGLVYLLENDVSTLGYDLTFSTEVQEFGVCEVRDLKPNGANILVTEENKKEYVHLVCQMRMTGAIRKQLAAFLEGFYEIIPKRLISIFTEQELELLISGLPTIDIDDLKSNTEYHKYQSNSIQIQWFWRALRSFDQADRAKFLQFVTGTSKVPLQGFAALEGMNGIQKFQIHRDDRSTDRLPSAHTCFNQLDLPAYESFEKLRHMLLLAIQECSEGFGLA

SEQ ID NO: 324406 - DNA, 771 bp, Artificial Sequence
  derived and/or modified sequence
atggatccttacccacaccagtttgccacagccctcttttctttcctgtatcacctggccagttatgatgcaggaggagaagccctcgtgtcgtgcggcatgatggaggccttgctgaaagttatcaaatttctgggagatgagcaggaccaaattacatttgtaacccgcgcagtgagagtggtggacctgatcaccaatctggacatggccgctttccagtcccatagtggtctgtccatctttatataccgcctggaacatgaagtggatttgtgtagaaaggagtgccccttcgtgattaagccgaagatccagagaccaaacacaacccaggagggtgaggagatggaaacagatatggatgtggcagatgttgcaatggagtccagtccaggaagtagtatctcaatggagcaccgtctggacgtggaacttcgcgcctcggggagttctagttccactaatatcagtagtgggccatcccccggtccaagccctggcactgggccaggcccggggcccggacctggaccaggaccgggccccggccctggcccaggccctgggcccggcccgggaccgggaccggggccaggtcccagaccgggtgtgcagtgcatcccccaaagagctgcgctcctgaagtctatgctaaatttcctcaagaaggcgatccaggacccagctttctctgacggaatccgccacgtaatggacggcagcctccccaccagcctaaaacacattatctctaatgctgaatattag

SEQ ID NO: 324407 - DNA, 687 bp, Artificial Sequence
  derived and/or modified sequence
tgagtgagctgtggcatgatggaggccctgctgaaggtgatcaaattcctcggtgatgaacaggaccagattacattcgtgacgcgggccgttcgggtggttgacctgattaccaacctcgatatggccgcttttcagtctcattcagggttgtctatattcatctatagactcgagcatgaagtggacttatgtcggaaagaatgccccttcgtgattaaacccaagatccagagaccgaacacaacgcaggagggagaggagatggaaacagacatggatgttgcggacgtcgccatggagagtagtccagggtcttccatttccatggaacatagactggacgtggagctgagagcttctggatcctccagttcaacaaacattagttcaggtcccagcccaggcccatccccagggaccgggccaggcccaggccccggacctggcccgggccccgggcccgggcctggccccggccctggacccgggccgggtccaggcccaggaccgggcccccgacctggcgttcagtgcataccacaacgggctgcgctcttgaaaagcatgctcaacttcttgaagaaggctatccaagaccctgctttcagtgacggtatccgacacgtcatggacggctcccttccaaccagcctgaagcatattatctctaatgctgagtactag

SEQ ID NO: 324408 - DNA, 651 bp, Artificial Sequence
  derived and/or modified sequence
atgaaggtggacagaacaaaactgaagaagacgcccaccgaggctccggctgactgccgtgccctgattgacaagctgaaagtctgcaacgacgagcagctgctcttggaactgcagcaaatcaagacgtggaatattggcaaatgtgagctatatcattgggtggatctgctggataggtttgatgggatcttggcggatgccggccaaaccgtggagaacatgagctggatgctggtttgcgaccgtcccgaaagagagcagttgaagatgctgctgcttgccgtgttgaatttcactgcactcttgatcgagtactctttttctcgccacctgtattcatccatcgagcacctcaccacattactggcctcaagtgacatgcaggtcgtcctggctgtgttgaatttgttgtatgtttttagcaaaaggagtaactatatcacacgccttggctccgacaagagaacaccacttctgacccggctacaacatttggcggagagctggggcggaaaggagaacggctttggcctcgcagagtgttgccgcgacctgcacatgatgaaatatcctccatcagccactactctgcacttcgaattttacgcggacccaggtgctgaagtgaaaattgaaaaacggaaatag

SEQ ID NO: 324409 - DNA, 282 bp, Artificial Sequence
  derived and/or modified sequence
atgaaggtggaccgtaccaaactgaaaaaaactcctaccgaggctcccgcggactgcagagctctgatagacaagctcaaggtgtgcaatgacgaacagctccttcttgaattacagcagattaagacttggaacatagggaaatgtgaactgtaccattgggtggatctcctggaccgattcgatgggatactggccgatgctggccagaccgtggagaatatgtcgtggatgctggtctgcgatagacccgaacgcgaacagctgaaaatgctgctgtag

SEQ ID NO: 324410 - DNA, 682 bp, Artificial Sequence
  derived and/or modified sequence
ggtctcctgtggaatgatggaagccttattgaaggtcataaagtttcttggcgatgaacaggaccagataacatttgtcaccagagccgtcagagtggttgaccttatcaccaacctggatatggcagcttttcaatcccatagtggactttctatcttcatttatagacttgagcatgaagtagatttgtgccgaaaagaatgtccgtttgtgatcaagccaaagatccagagacccaatactacacaagaaggagaggaaatggaaactgatatggatgttgcagatgtggctatggaaagcagtccaggctcatccatctctatggagcacaggctggatgttgaattaagggcatcaggttccagcagcagcactaacatctcttctggccccagccctggtcccagtcccggcaccggccccggccccggccccggccccggccccggccctggccccggccccggccccggtcctggtcccggccctggccccggccctggccctggcccccgtcctggagtccagtgtattccacaacgagcagcacttctgaaatccatgttgaatttcctcaagaaggccatccaagaccctgctttctcagatggcatacgacatgtgatggatggttctctgcctacctccctgaaacacatcatcagcaatgcagaatac

SEQ ID NO: 324411 - DNA, 1053 bp, Artificial Sequence
  derived and/or modified sequence
gaggctttcgactgagggctagcgaggggagcacggctggagcagggctggagcagggctggagcagggctggagcagggctgaagcagggccgcggaccccgcacgctcctgcgggccccgcggagccattgcggccgaggcctcggcaggcgccagcggagagctagccgcatcttcgggggcagcccggcagctgccggcggcgcggcgagagagcggctgacagaggggatgcgaggtcctccagcagcctgacctgagtgggttagtgatccagagaaaccagcaggccaacttggtcaggaaggttcgggaagctgttggagcagtgtggggaatttcccaccaggatgagtatgattggctgtgattttagatcgtaaagctgaaaattgaaatcatgaaagtagacaggactaaactgaagaagacacctactgaggctcctgcagactgcagagccttaatagacaaactcaaagtttgtaatgatgagcaacttctcttggaactgcagcagatcaaaacatggaacattggaaagtgcgagttatatcactgggtggacctgttggaccgcttcgatggaatactggcagatgctggacagacagtggagaatatgtcatggatgctcgtatgtgataggccagaaagagagcaactgaaaatgcttctcttggctgtgttgaacttcacagccttgctcattgagtacagcttttcccggcatctgtacagttccatagagcatttgacaactttattggcttcctctgatatgcaagtggtgctggcagtcctcaatctcctatatgtatttagcaaaagatcaaactacatcactcgtctgggatctgacaagaggaccccgctgctaactcggctacaacatttggcagagagctggggtggaaaggagaatggctttggacttgcagaatgttgcagagacttgcatatgatgaaatatccacccagtgcaactacactacactttgaattctatgcagatcctggggccgaggtcaaaattgagaaaaggaagtag

SEQ ID NO: 324412 - DNA, 771 bp, Artificial Sequence
  derived and/or modified sequence
atggacccctacccccaccagtttgccacagccctcttctccttcctgtaccacctggccagctatgatgctggaggagaggccctggtgtcctgtggcatgatggaggccctgctgaaggtgatcaagttcctgggagatgagcaggaccagatcacctttgtgaccagggctgtgcgggtggtggacctgatcaccaacctggacatggccgccttccagagccacagcggcctgagcatcttcatctaccgcctggagcacgaggtggacctgtgcaggaaggagtgcccctttgtgatcaagcccaagatccagaggcccaacaccacccaggagggggaggagatggagacagacatggatgtggctgatgtggccatggagagcagccctggcagcagcatctccatggagcaccggctggatgtggagctgcgggccagcggcagcagcagcagcaccaacatcagcagcggccccagccctggccccagccctggcactggacctggccctggccctggccctggccctggccctggccctggccctggccctggccctggccctggccctggccctggccctggccctggccccaggcctggggtgcagtgcatcccccagagagctgccctgctgaagtccatgctgaacttcctgaagaaggccatccaggaccctgccttcagtgatggcatcagacatgtgatggatggcagcctgcccaccagcctgaagcacatcatcagcaatgctgagtactag

SEQ ID NO: 324413 - DNA, 687 bp, Artificial Sequence
  derived and/or modified sequence
tgagtgtcctgtggcatgatggaggccctgctgaaggtgatcaagttcctgggagatgagcaggaccagatcacctttgtgaccagggctgtgcgggtggtggacctgatcaccaacctggacatggccgccttccagagccacagcggcctgagcatcttcatctaccgcctggagcacgaggtggacctgtgcaggaaggagtgcccctttgtgatcaagcccaagatccagaggcccaacaccacccaggagggggaggagatggagacagacatggatgtggctgatgtggccatggagagcagccctggcagcagcatctccatggagcaccggctggatgtggagctgcgggccagcggcagcagcagcagcaccaacatcagcagcggccccagccctggccccagccctggcactggacctggccctggccctggccctggccctggccctggccctggccctggccctggccctggccctggccctggccctggccctggccctggccccaggcctggggtgcagtgcatcccccagagagctgccctgctgaagtccatgctgaacttcctgaagaaggccatccaggaccctgccttcagtgatggcatcagacatgtgatggatggcagcctgcccaccagcctgaagcacatcatcagcaatgctgagtactag

SEQ ID NO: 324414 - DNA, 651 bp, Artificial Sequence
  derived and/or modified sequence
atgaaggtggacaggaccaagctgaagaagacccccacagaggccccagctgactgccgggccctgattgacaagctgaaggtgtgcaatgatgagcagctgctgctggagctgcagcagatcaagacctggaacatcggcaaatgtgagctgtaccactgggtggacctgctggacagatttgatggcatcctggctgatgctggccagacagtggagaacatgtcctggatgctggtgtgtgacaggcctgagcgggagcagctgaagatgctgctgctggccgtgctgaacttcaccgccctgctgattgagtacagcttcagccgccacctgtacagcagcattgagcacctgaccaccctgctggccagcagtgacatgcaggtggtgctggccgtgctgaacctgctgtatgtgttcagcaagaggagcaactacatcacccggctgggcagtgacaagaggacccccctgctgacccggctgcagcacctggccgagagctggggcggcaaggaaaatggatttggcctggccgagtgctgccgggacctgcacatgatgaagtacccacccagcgccaccaccctgcactttgagttctacgccgaccccggggctgaggtgaagattgagaagaggaagtag

SEQ ID NO: 324415 - DNA, 282 bp, Artificial Sequence
  derived and/or modified sequence
atgaaggtggacaggaccaagctgaagaagacccccacagaggccccagctgactgccgggccctgattgacaagctgaaggtgtgcaatgatgagcagctgctgctggagctgcagcagatcaagacctggaacatcggcaaatgtgagctgtaccactgggtggacctgctggacagatttgatggcatcctggctgatgctggccagacagtggagaacatgtcctggatgctggtgtgtgacaggcctgagcgggagcagctgaagatgctgctgtag

SEQ ID NO: 324416 - DNA, 771 bp, Artificial Sequence
  derived and/or modified sequence
atggacccctacccccaccagttcgccaccgccctgttcagcttcttgtatcatctggcctcttacgacgctgggggggaggcccttgtgagctgcggaatgatggaagctctgctcaaggttattaaatttctcggcgacgagcaggatcagattacttttgtgacccgagccgttcgggtggttgatctgattacaaatctggacatggctgcttttcaaagccactccggactcagcatttttatctatagacttgagcacgaagtggatttgtgtcgaaaagagtgtccttttgtgattaagcctaagattcagcgccctaataccacccaggaaggcgaggagatggagacagacatggacgtggccgatgtagccatggagtccagccctggcagttcaattagcatggaacatcgacttgatgtggagctgagggcaagtggctcaagtagttctacaaacatctcatctgggccatctcctggtccctctccaggcaccgggcccggcccaggacccggaccaggccccgggcctggtcctggcccaggccccggacccggaccaggccctggtcccggtccaggacccgggcctagaccgggagttcaatgcatcccgcagcgggcggcactgctgaagagcatgttgaacttcctcaaaaaggccatccaggaccccgcttttagtgacggcatccgtcatgttatggatggcagtctacccactagccttaagcacatcatcagtaatgctgagtactag

SEQ ID NO: 324417 - DNA, 687 bp, Artificial Sequence
  derived and/or modified sequence
tgagtgagctgcggcatgatggaggccctgctgaaggtgatcaagttcctgggagacgagcaggatcagattacgttcgtgacacgcgccgtaagagtcgtggacctgatcaccaacttggatatggctgcttttcagagccactccgggctatctattttcatttaccgcctggagcatgaggtcgacctgtgccgcaaggagtgcccatttgtcatcaagcccaagatacagcgacctaacaccacgcaggagggtgaagaaatggagactgacatggacgtagccgacgtggctatggagagctcccccggatcatccataagcatggagcaccgactggacgtcgagcttcgggcaagtggctcatcatcttcgacgaacatatctagcggcccgagtcctggaccaagcccaggcacaggacctggacctggccccggacccgggcccggcccggggcctggaccaggacctggccccgggccaggaccaggtcctgggccaggcccaggacccaggccaggcgttcagtgcatccctcaaagggcagccctgcttaaaagcatgctgaattttctgaagaaggctatccaagatcccgccttctcagacgggataagacatgtgatggatgggtccctcccaacctccctcaagcatatcatttcaaacgcagagtactag

SEQ ID NO: 324418 - DNA, 651 bp, Artificial Sequence
  derived and/or modified sequence
atgaaggtggaccggaccaagctgaagaagacccccaccgaggcccctgctgattgtcgggccctgattgataaactgaaagtgtgcaacgatgagcaacttcttctagaattgcagcagatcaagacctggaacattggaaagtgtgagctctaccactgggtggatctgctggacagatttgatgggattctggccgacgccgggcagaccgttgaaaatatgagctggatgctcgtttgcgaccgacccgagcgcgagcagctgaaaatgctcctgctcgctgtcctgaacttcaccgccctgctcattgaatactcattttctcgacatttatacagcagcatcgaacacctaaccaccctccttgcctcctcagacatgcaagtggtgcttgccgtactgaacttgctgtatgtgttctccaagagatctaattatattacccgtctgggctcagacaagcgaaccccactgctgacccgtctccagcacctggccgaatcgtggggaggaaaggagaacggtttcggcctcgctgagtgctgccgcgacctccatatgatgaaatacccccctagcgccacaacactgcattttgaattttatgcagatcctggggcagaggtgaagattgagaagagaaagtag

SEQ ID NO: 324419 - DNA, 282 bp, Artificial Sequence
  derived and/or modified sequence
atgaaggtggaccggaccaagctgaagaagacccccaccgaggcccctgcagactgccgcgctctgattgataaacttaaagtctgtaacgatgagcagctgctcttagaactgcagcagatcaagacatggaatatcggcaagtgcgaactgtatcattgggtagacctgctggaccggtttgatggtattctggcagatgctgggcagaccgtggagaatatgagctggatgctcgtgtgtgaccgacccgagcgggaacagctgaagatgcttctctag

SEQ ID NO: 324420 - DNA, 771 bp, Artificial Sequence
  derived and/or modified sequence
atggatccttaccctcaccagttcgctacagctctcttttcttttctatatcacctggccagttacgatgcaggtggcgaggcacttgtctcatgcggcatgatggaagccctactcaaggttatcaagtttctgggggacgagcaggaccagatcaccttcgttactcgcgctgtacgggtggtcgacttgatcactaacttggatatggccgcttttcaatcccactctggcctgagcatatttatctaccgcctagagcacgaggtcgacctttgcaggaaagagtgtcctttcgtgataaagcctaaaatccagcgaccgaatacaacacaggagggcgaggagatggagacggacatggacgtggcagacgtcgccatggaatcgtcacccggatctagcatctccatggaacaccggttagatgtggaactaagagccagcggatcttcgtcatcaaccaacatcagttctggcccttcgcccggaccatcacctggtaccggccctggtccaggccctggacctgggcctggacccggacccggacctggccctggtccaggacccggtcctggtccaggccctggtcccggtccaagaccgggagtgcagtgtatccctcagcgggcagcactcctgaagtcaatgctgaacttcctcaaaaaggcaatacaggatccagcctttagtgacgggataagacatgtgatggacggtagcttaccaacatctctgaaacacatcatctcaaacgctgagtactag

SEQ ID NO: 324421 - DNA, 687 bp, Artificial Sequence
  derived and/or modified sequence
tgagttagttgcgggatgatggaggccctactgaaagttattaagttcctgggggatgagcaagatcagatcacctttgtgactagggccgtcagagttgtagatctcatcacaaatctcgatatggccgctttccagtcacactctggcctttcaatttttatctacagactcgagcacgaagtcgacctctgtcggaaggaatgcccctttgttatcaaaccaaaaattcagcgccctaatactacacaggagggagaggagatggagactgacatggacgtggcagacgtggctatggaaagcagtcctggcagctcaatctccatggaacaccgccttgatgttgagctgagggcatcagggagttctagctcaaccaatatcagctccggcccatccccaggaccctctcctggcacgggacccggtccgggaccaggaccgggtcccggtccgggacctggccctggtccaggccctgggccaggtccaggcccaggcccagggcctggaccccgtcctggagtgcaatgtattcctcagcgggctgccctccttaaaagcatgcttaacttccttaagaaggccatccaggatcccgctttttccgacggcatcagacatgtcatggacggcagtctccccacttctctgaaacatatcattagtaacgccgagtattag

SEQ ID NO: 324422 - DNA, 651 bp, Artificial Sequence
  derived and/or modified sequence
atgaaagtggatcgcacgaagctgaaaaagactccaaccgaggcaccagccgattgccgggcactcatagataaactaaaggtgtgcaacgacgagcagctgctgcttgagctgcagcaaatcaaaacatggaacataggaaagtgtgaactctaccactgggtcgacctgctggataggtttgatggcatcctcgcggatgcagggcaaactgtggagaacatgtcctggatgctggtctgcgacaggccagagcgggaacagctgaagatgttactgctggccgtgttgaacttcaccgccctacttattgaatactctttctccagacacctgtactctagcatcgagcacttgaccacgctgttagcgagtagcgatatgcaggtagtgcttgccgtgcttaacctactgtacgtcttttctaaacgatccaactacataacacggctcggcagtgacaaaaggacacccctgctgaccaggctgcagcatctcgccgagtcctgggggggaaaagaaaacggctttggcctcgctgaatgctgccgcgatctccacatgatgaaatacccaccttcagctacaaccttgcatttcgagttctacgccgatcctggcgcagaagttaaaatcgagaaacgcaaatag

SEQ ID NO: 324423 - DNA, 282 bp, Artificial Sequence
  derived and/or modified sequence
atgaaagtcgaccgcaccaagctcaaaaaaacaccaaccgaagccccagccgactgccgggctttgatcgataaactgaaggtctgcaatgacgaacagttgcttctcgaactgcagcagattaagacctggaacatcggaaagtgcgaactgtatcattgggtagatttacttgatcggtttgacggaatcctggccgatgctggccagaccgtcgagaatatgagctggatgctggtttgcgatcggccagaaagagagcagctgaagatgttgttatag

SEQ ID NO: 324424 - DNA, 771 bp, Artificial Sequence
  derived and/or modified sequence
atggacccctacccccaccagttcgccaccgccctgttcagcttcctgtaccacctggccagctacgacgccggcggcgaggccctggtgagctgcggcatgatggaggccctgctgaaggtgatcaagttcctgggcgacgagcaggaccagatcaccttcgtgaccagagccgtgagagtggtggacctgatcaccaacctggacatggccgccttccagagccacagcggcctgagcatcttcatctacagactggagcacgaggtggacctgtgcagaaaggagtgccccttcgtgatcaagcccaagatccagagacccaacaccacccaggagggcgaggagatggagaccgacatggacgtggccgacgtggccatggagagcagccccggcagcagcatcagcatggagcacagactggacgtggagctgagagccagcggcagcagcagcagcaccaacatcagcagcggccccagccccggccccagccccggcaccggccccggccccggccccggccccggccccggccccggccccggccccggccccggccccggccccggccccggccccggccccggccccggccccagacccggcgtgcagtgcatcccccagagagccgccctgctgaagagcatgctgaacttcctgaagaaggccatccaggaccccgccttcagcgacggcatcagacacgtgatggacggcagcctgcccaccagcctgaagcacatcatcagcaacgccgagtactag

SEQ ID NO: 324425 - DNA, 687 bp, Artificial Sequence
  derived and/or modified sequence
tgagtgagctgcggcatgatggaggccctgctgaaggtgatcaagttcctgggcgacgagcaggaccagatcaccttcgtgaccagagccgtgagagtggtggacctgatcaccaacctggacatggccgccttccagagccacagcggcctgagcatcttcatctacagactggagcacgaggtggacctgtgcagaaaggagtgccccttcgtgatcaagcccaagatccagagacccaacaccacccaggagggcgaggagatggagaccgacatggacgtggccgacgtggccatggagagcagccccggcagcagcatcagcatggagcacagactggacgtggagctgagagccagcggcagcagcagcagcaccaacatcagcagcggccccagccccggccccagccccggcaccggccccggccccggccccggccccggccccggccccggccccggccccggccccggccccggccccggccccggccccggccccggccccggccccagacccggcgtgcagtgcatcccccagagagccgccctgctgaagagcatgctgaacttcctgaagaaggccatccaggaccccgccttcagcgacggcatcagacacgtgatggacggcagcctgcccaccagcctgaagcacatcatcagcaacgccgagtactag

SEQ ID NO: 324426 - DNA, 651 bp, Artificial Sequence
  derived and/or modified sequence
atgaaggtggacagaaccaagctgaagaagacccccaccgaggcccccgccgactgcagagccctgatcgacaagctgaaggtgtgcaacgacgagcagctgctgctggagctgcagcagatcaagacctggaacatcggcaagtgcgagctgtaccactgggtggacctgctggacagattcgacggcatcctggccgacgccggccagaccgtggagaacatgagctggatgctggtgtgcgacagacccgagagagagcagctgaagatgctgctgctggccgtgctgaacttcaccgccctgctgatcgagtacagcttcagcagacacctgtacagcagcatcgagcacctgaccaccctgctggccagcagcgacatgcaggtggtgctggccgtgctgaacctgctgtacgtgttcagcaagagaagcaactacatcaccagactgggcagcgacaagagaacccccctgctgaccagactgcagcacctggccgagagctggggcggcaaggagaacggcttcggcctggccgagtgctgcagagacctgcacatgatgaagtacccccccagcgccaccaccctgcacttcgagttctacgccgaccccggcgccgaggtgaagatcgagaagagaaagtag

SEQ ID NO: 324427 - DNA, 282 bp, Artificial Sequence
  derived and/or modified sequence
atgaaggtggacagaaccaagctgaagaagacccccaccgaggcccccgccgactgcagagccctgatcgacaagctgaaggtgtgcaacgacgagcagctgctgctggagctgcagcagatcaagacctggaacatcggcaagtgcgagctgtaccactgggtggacctgctggacagattcgacggcatcctggccgacgccggccagaccgtggagaacatgagctggatgctggtgtgcgacagacccgagagagagcagctgaagatgctgctgtag

SEQ ID NO: 324428 - protein, 228 aa, Artificial Sequence
  derived and/or modified sequence
  misc_feature (1)..(1): Xaa can be any naturally occurring amino acid
XVSCGMMEALLKVIKFLGDEQDQITFVTRAVRVVDLITNLDMAAFQSHSGLSIFIYRLEHEVDLCRKECPFVIKPKIQRPNTTQEGEEMETDMDVADVAMESSPGSSISMEHRLDVELRASGSSSSTNISSGPSPGPSPGTGPGPGPGPGPGPGPGPGPGPGPGPGPGPGPGPRPGVQCIPQRAALLKSMLNFLKKAIQDPAFSDGIRHVMDGSLPTSLKHIISNAEY

SEQ ID NO: 324429 - protein, 1197 aa, Artificial Sequence
  derived and/or modified sequence
  misc_feature (1)..(1): Xaa can be any naturally occurring amino acid
XPSGSNVDTLLRLRGRLLLDHEALSCLLVLLFVDEPKLNTSRLHRVLRNLCYHAQTRHWVIRSLLSILQRSSESELCIETPKLTTSEEKGKKSSKSCGSSSHENRPLDLLHKMESKSSNQLSWLSVSMDAALGCRTNIFQIQRSGGRKHTEKHASGGSTVHIHPQAAPVVCRHVLDTLIQLAKVFPSHFTQQRTKETNCESDRERGNKACSPCSSQSSSSGICTDFWDLLVKLDNMNVSRKGKNSVKSVPVSAGGEGETSPYSLEASPLGQLMNMLSHPVIRRSSLLTEKLLRLLSLISIALPENKVSEAQANSGSGASSTTTATSTTSTTTTTAASTTPTPPTAPTPVTSAPALVAATAISTIVVAASTTVTTPTTATTTVSISPTTKGSKSPAKVSDGGSSSTDFKMVSSGLTENQLQLSVEVLTSHSCSEEGLEDAANVLLQLSRGDSGTRDTVLKLLLNGARHLGYTLCKQIGTLLAELREYNLEQQRRAQCETLSPDGLPEEQPQTTKLKGKMQSRFDMAENVVIVASQKRPLGGRELQLPSMSMLTSKTSTQKFFLRVLQVIIQLRDDTRRANKKAKQTGRLGSSGLGSASSIQAAVRQLEAEADAIIQMSESSQSEASVRREESPMDVDQPSPSAQDTQSIASDGTPQGEKEKEERPPELPLLSEQLSLDELWDMLGECLKELEESHDQHAVLVLQPAVEAFFLVHATERESKPPVRDTRESQLAHIKDEPPPLSPAPLTPATPSSLDPFFSREPSSMHISSSLPPDTQKFLRFAETHRTVLNQILRQSTTHLADGPFAVLVDYIRVLDFDVKRKYFRQELERLDEGLRKEDMAVHVRRDHVFEDSYRELHRKSPEEMKNRLYIVFEGEEGQDAGGLLREWYMIISREMFNPMYALFRTSPGDRVTYTINPSSHCNPNHLSYFKFVGRIVAKAVYDNRLLECYFTRSFYKHILGKSVRYTDMESEDYHFYQGLVYLLENDVSTLGYDLTFSTEVQEFGVCEVRDLKPNGANILVTEENKKEYVHLVCQMRMTGAIRKQLAAFLEGFYEIIPKRLISIFTEQELELLISGLPTIDIDDLKSNTEYHKYQSNSIQIQWFWRALRSFDQADRAKFLQFVTGTSKVPLQGFAALEGMNGIQKFQIHRDDRSTDRLPSAHTCFNQLDLPAYESFEKLRHMLLLAIQECSEGFGLA

SEQ ID NO: 324430 - DNA, 3594 bp, Artificial Sequence
  derived and/or modified sequence
taaccatccgggagtaatgtggacactctgctacgcctgagaggtaggttgctactggaccacgaggccctctcatgtttgctggtattactatttgtggacgaaccaaagctgaacacgtcacggctccatagggtgcttcggaacctgtgttaccacgctcagacccggcactgggtgattcggtccctactgtcaattctgcagcgcagtagtgaatccgaactttgcattgaaacaccgaagctgaccacctctgaagaaaaggggaagaaaagcagcaagtcctgtggatcctccagtcacgaaaatagaccacttgacctgttacacaagatggagagcaaaagtagcaaccagctcagctggttatccgtatccatggatgctgcccttggatgccggactaacatctttcaaatacaacgctctgggggccgtaagcatacagagaaacacgcatcaggggggagcacagttcacatccacccgcaggctgctcccgtcgtttgccgccatgtcctggacaccctgattcagctggccaaggtctttccaagccacttcactcaacaacgcaccaaagaaactaactgcgaatccgaccgtgaacgagggaacaaagcttgctccccctgttcctctcagagctcctcttccggaatctgcactgacttctgggatctgctggtcaagcttgacaatatgaacgtcagtcgaaagggcaagaacagcgtgaaaagcgtccctgtgtctgcggggggggagggggagacgagcccatattctctcgaggcctctcccctgggccagttaatgaacatgctgtctcatcccgtcattcgtcggagttctcttctcactgagaagctgctccgactgttatctctgatctccattgccctgcctgaaaacaaagtctctgaagcgcaagctaatagcggctctggggcaagcagcacaacaacggcgacttccaccaccagcacaaccacaactaccgccgcttccacaacccccactccacctacagctccaacccccgtgacttccgctcctgcgctcgtcgcagctacggcaatctctacaattgtggtcgctgcttcaactacggtcaccacgccaacaaccgcaaccacaactgtgagcatcagcccaactactaagggctcgaagtctccggcaaaggtgtccgatggcgggtcctcctcaactgatttcaaaatggtgtcctcagggttgactgagaatcaacttcagctgtctgtcgaggtgcttaccagccacagctgctctgaagaagggctggaggacgccgccaacgtgctgttgcagctcagccgaggggactccgggactcgggatacggtgttgaagctgctcctgaacggagctagacacctgggctatactctctgcaagcagattggaaccctgctagccgaattgcgagaatataacctggaacagcagcggagggcacagtgtgagactctgagccctgatggcctgccagaggagcagcctcagactacaaagctgaaaggaaaaatgcagagcagatttgacatggctgagaatgtggtaattgttgcttcccaaaagcggcccctggggggcagagagctgcagctcccaagcatgtcaatgcttacgtctaagacatccactcagaagttcttcctgagggtactgcaggtgatcatccagctcagagatgacacaaggcgagccaacaaaaaggcaaagcaaacagggagactgggttcttctggcctgggttctgctagctcaattcaggcagctgtcaggcagctggaggccgaagcagatgccatcatacaaatgtccgagtcgagccaatccgaagctagtgtaaggcgcgaggagagccctatggatgtggaccaaccctcgccctccgcccaggacacgcagtccatagcaagtgacggaacacctcaaggcgagaaggaaaaagaggaaagaccacccgagctcccgctgctgtcagagcagctttctcttgatgagctgtgggatatgctgggagagtgcctgaaagaattggaggagtcccatgaccagcatgctgtcctcgtcctccagcctgccgttgaggcttttttcctcgtccacgctacagaacgcgagagcaagccgcctgtgcgagataccagggaatcacagctagcccatataaaagacgagccaccccccctgtctccagctcccctgacccctgctaccccgtccagtctggaccccttcttctcccgggagccgtcgagtatgcacatatctagctctctgcctcccgacacacagaagtttctacgatttgccgagactcacaggacagtgctgaaccagatcctgagacagtccactacacacctggccgacggacctttcgccgttctcgttgactatatccgcgttctggacttcgatgtgaagaggaagtattttcgccaagagctagagcggctggacgaagggctccgcaaagaggacatggccgtccatgtgcggcgtgaccacgtcttcgaggatagctaccgagagctccatagaaaatcacccgaggaaatgaagaatcggctctacatcgtgttcgaaggggaggaggggcaggatgccgggggccttttgcgagagtggtatatgataatatcacgagagatgtttaacccaatgtatgccttgttccggacatctccaggcgaccgcgtgacctacaccatcaacccgagttctcactgtaatccaaatcatctgtcttatttcaagtttgtagggaggatcgtggcaaaagctgtatacgataacaggctgctggaatgttactttacacggagtttttacaagcacatactgggcaaatccgtccggtatactgacatggagagcgaagattaccatttttaccaaggcctggtctatttgttggagaatgacgtctccacactcggctatgatttgacattcagtactgaggtgcaggagttcggcgtgtgtgaagtgagagatcttaaacctaatggcgcaaacatccttgtgaccgaagaaaataaaaaagagtatgtgcacctggtgtgccagatgcggatgaccggggcaatccggaagcaactggcggcatttctggaggggttctatgaaatcatcccaaagcgtctaataagtatctttacagaacaggaactagaactcctgatctccggtctgccaacgattgacatcgacgaccttaagtccaacacagagtaccacaagtatcagagtaactcaattcaaatccagtggttttggagggccctgaggagcttcgaccaggcagatcgggcaaagtttctccagtttgtgaccggcacttctaaggtcccactgcagggcttcgcagcattggagggcatgaacggaatccagaagtttcagatccatcgcgatgaccgctctacggacaggctgccaagtgcacacacctgcttcaatcagttggatctccctgcctatgagtcttttgaaaaattgcgacatatgctgcttctggcaattcaggagtgctccgagggcttcggtctggcctag

SEQ ID NO: 324431 - DNA, 4805 bp, Artificial Sequence
  derived and/or modified sequence
gccttctggcagtaatgtagatactctcctccgcctccgaggacggctccttctggaccacgaagccctttcttgtctcttggtcctactttttgtggatgagccaaagctcaatactagccgtctacaccgagtactgagaaatctctgctaccatgcccagacccgccactgggtcatccgcagtctgctctccatcttgcagcgcagcagtgagagtgagctatgcattgaaacacccaaactcactacaagtgaggaaaagggcaaaaagtcgagcaagagctgtgggtcaagtagccatgagaaccgtcccctggacctgctacacaagatggagtcaaagagctccaaccagctttcctggctctcagtatccatggatgcagccctaggctgcaggactaatatatttcagatccagcgttcaggggggcgtaaacataccgagaagcatgcaagcggtggctccaccgtccacatccatccccaagctgctcctgttgtctgcagacacgttttggatacactcattcaattggccaaggtatttcccagccacttcacacagcagcggaccaaagaaacaaactgtgagagtgatcgggaaaggggcaataaggcctgtagcccatgctcctcacagtcctccagcagtggcatttgcacagacttctgggacttattggtaaaactggacaacatgaatgtcagccggaaaggcaagaactccgtgaagtcagtgccagtgagcgctggcggtgagggggaaacctctccatacagcctcgaggcctctccactggggcagctcatgaacatgttgtcacacccagtcatccgccggagctctctcttaactgagaaactcctcagactcctttctctcatctcaattgctctcccagaaaacaaggtgtcagaagcacaggctaattctggcagcggtgcttcctccaccaccactgccacctcaaccacatctaccaccaccaccactgccgcctccaccacgcccacaccccctactgcacccacccctgtcacttctgctccagccctggttgctgccacggctatttccaccattgtcgtagctgcttcgaccacagtgactacccccacgactgctaccactactgtttcaatttctcccactactaagggcagcaaatctccagcgaaggtgagtgatgggggcagcagcagtacagactttaagatggtgtcctctggcctcactgaaaaccagctacagctctctgtagaggtgttgacatcccactcttgttctgaggaaggcttagaggatgcagccaacgtactactgcagctctcccggggggactctgggacccgggacactgttctcaagctgctactgaatggagcccgccatctgggttataccctttgtaaacaaataggtaccctgctggccgagctgcgggaatacaacctcgagcagcagcggcgagcccaatgtgaaaccctctctcctgatggcctgcctgaggagcagccacagaccaccaagctgaagggcaaaatgcagagcaggtttgacatggctgagaatgtggtaattgtggcatctcagaagcgacctttgggtggccgggagctccagctgccttctatgtccatgttgacatccaagacatctacccagaagttcttcttgagggtactacaggtcatcatccagctccgggacgacacgcgccgggctaacaagaaagccaagcagacaggcaggctaggttcctccggtttaggctcagctagcagcatccaggcagctgttcggcagctggaggctgaggctgatgccattatacaaatgtcggagtctagccagtcagaggcgtctgtccggagggaggaatcacccatggatgtggaccagccatctcccagtgctcaagatactcaatccattgcctccgatggaaccccacagggggagaaggaaaaggaagaaagaccacctgagttacccctgctcagcgagcagctgagtttggacgagctgtgggacatgcttggggagtgtctaaaggaactagaggaatcccatgaccagcatgcggtgctagtgctacagcctgctgtcgaggccttctttctggtccatgccacagagcgggagagcaagcctcctgtccgagacacccgtgagagccagctggcacacatcaaggacgagcctcctccactctcccctgcccccttaaccccagccacgccttcctcccttgacccattcttctcccgggagccctcatctatgcacatctcctcaagcctgccccctgacacacagaagttccttcgctttgcagagactcaccgcactgtgttaaaccagatcctacggcagtccacgacccaccttgctgatgggccttttgctgtcctggtagactacattcgtgtcctcgactttgatgtcaagcgcaaatatttccgccaagagctggagcgtttagatgaggggctccggaaagaagacatggctgtgcatgtccgtcgtgaccatgtgtttgaagactcctatcgtgagctgcatcgcaaatcccccgaagaaatgaagaatcgattgtatatagtatttgaaggagaagaagggcaggatgctggtgggctcctgcgggagtggtatatgatcatctctcgagagatgtttaaccctatgtatgccttgttccgtacctcacctggtgatcgagtcacctacaccatcaatccatcttcccactgcaaccccaaccacctcagctacttcaagtttgtcggacgcattgtggccaaagctgtatatgacaaccgtcttctggagtgctactttactcgatccttttacaaacacatcttgggcaagtcagtcagatatacagatatggagagtgaagattaccacttctaccaaggtctggtttatctgctggaaaatgatgtctccacactaggctatgacctcaccttcagcactgaggtccaagagtttggagtttgtgaagttcgtgacctcaaacccaatggggccaacatcttggtaacagaggagaataagaaggagtatgtacacctggtatgccagatgagaatgacaggagccatccgcaagcagttggcggctttcttagaaggcttctatgagatcattccaaagcgcctcatttccatcttcactgagcaggagttagagctgcttatatcaggactgcccaccattgacatcgatgatctgaaatccaacactgaataccacaagtaccagtccaactctattcagatccagtggttctggagagcattgcgttctttcgatcaagctgaccgtgccaagttcctccagtttgtcacgggtacttccaaggtacccctgcaaggctttgctgccctcgaaggcatgaatggcattcagaagtttcagatccatcgagatgacaggtccacagatcgcctgccttcagctcacacatgttttaatcagctggatctgcctgcctatgagagctttgagaagctccgccacatgctactgttggctatccaggagtgctctgaaggctttgggctggcctaataaggccctgcccaactccgtggggttttttttaccattgttggacctggggaggggggagttaaaaaaagaaccagaaagaaattgtcaaaaaccaataaatgaaatccaccaactcaccgtgtgtgtcccagctgccccatcttccccagcgcatacctgttcctcttctcattctctccccgccgcctgtttcctcaccttctctcccctttccatgccgtccatgatccccaccccatgtgttttaaaaaggcagtagcctttgcagggacctgtctgtcccaactgtttgaacagtgtgctcctcagattctgtgttcagaaggatttgctgcattgagacttgaaacctttggataggggaaaaaattatatatatatatatttttttgttctgtttgcatttcttaatttgtgcttggaatgtgttgatgtgcacagctaatgattcaatgcgagacaagattggcgtctgtgttgtggaggtttcaaataaagagcactcttcataactcacttttcacaatggagtttttttcaaacttaaaaaaaaaaacaaaaaactcttaagcacatgctaggcatctggagaaaagatggattctccaggaaaccatccctgccctacccgcttgcccacctgcctccaccactggtgcaacttcctccttcagagtcagtttctgcagtcaggagagatgagcagttcaccaggaattgggggtgggggcatctgttttttttttttagaatgggagctgcacttggggatggtgatggtgttagagattgcagcccaggacaaagcatcaccttgctcaaggggaacaaactgcagcaggttgtacaaaacattcagagagctcacttgacccaaccgagggttttacttggtgagcctttctagtagtcttgagtctggggctcagttttagatttttatttcattaatgtttgtttatttctaataaattttaataagcgagtaatttaactaggtcgccagaagaccattatttttgtttgtctatttttgttgtcgtcactccctctctcgtcatctgtctgccagtctgttcacagatcaccttgtagtcccttgtggtttttactccatccagtgcttaaagctgatctaaggacttcgatggttccagccttcaaagaaaaaataatttaataaaaatttagttagaaaaaataaccccaa

SEQ ID NO: 324432 - DNA, 3594 bp, Artificial Sequence
  derived and/or modified sequence
tgaccatctggcagcaatgtggacaccctgctgcggctgcggggccgcctgctgctggaccacgaggccctgagctgcctgctggtgctgctgtttgtggatgagcccaagctgaacaccagccggctgcaccgggtgctgaggaacctgtgctaccacgcccagaccaggcactgggtgatccgcagcctgctgagcatcctgcagaggagcagcgagagcgagctgtgcatcgagacccccaagctgaccaccagcgaggagaagggcaagaagagcagcaagagctgtggcagcagcagccatgaaaatcggcccctggacctgctgcacaagatggagagcaagagcagcaaccagctgtcctggctgtctgtgtccatggatgctgccctgggctgcaggaccaacatcttccagatccagaggtctgggggcaggaagcacacagagaagcacgccagcggcggcagcacagtgcacatccacccccaggccgcccctgtggtgtgcagacatgtgctggacaccctcatccagctggccaaggtgttccccagccacttcacccagcagaggaccaaggagaccaactgtgagagtgaccgggagcggggcaacaaggcctgcagcccctgcagcagccagagcagcagcagcggcatctgcacagacttctgggacctgctggtgaagctggacaacatgaatgtgtccaggaagggcaagaacagcgtgaagtctgtgcctgtgtctgctggaggagagggggagaccagcccctacagcctggaggccagccccctgggccagctgatgaacatgctgagccaccctgtgatccgccgcagcagcctgctgacagagaagctgctgcggctgctgagcctcatcagcatcgccctgcctgagaacaaggtgtctgaggcccaggccaacagcggcagcggggccagcagcaccaccacagccaccagcaccaccagcaccaccaccaccacagctgccagcaccacccccaccccacccacagcccccacccctgtgaccagcgccccagccctggtggccgccacagccatcagcaccatcgtggtggccgccagcaccaccgtgaccacccccaccacagccaccaccaccgtgtccatcagccccaccaccaagggcagcaagagccctgccaaggtgtctgatggcggcagcagcagcacagacttcaagatggtgagcagcggcctgacagagaaccagctgcagctgtctgtggaggtgctgaccagccacagctgcagcgaggagggcctggaggatgctgccaacgtgctgctgcagctgagcagaggagacagcggcacccgggacacagtgctgaagctgctgctgaatggagcccggcacctgggctacaccctgtgcaagcagatcggcaccctgctggccgagctgcgggagtacaacctggagcagcagaggcgggcccagtgtgagaccctgagcccagatggcctgcctgaggagcagccccagaccaccaagctgaagggcaagatgcagagcagatttgacatggccgagaatgtggtgattgtggccagccagaagaggcccctgggcggccgggagctgcagctgcccagcatgtccatgctgaccagcaagaccagcacccagaagttcttcctgcgggtgctgcaggtgatcatccagctgagagatgacacccggcgggccaacaagaaggccaagcagacaggccgcctgggcagcagcggcctgggcagcgccagcagcatccaggccgctgtgcggcagctggaggccgaggctgatgccatcatccagatgtctgagagcagccagagcgaggcctctgtgagaagagaggagagccccatggatgtggaccagcccagccccagcgcccaggacacccagagcatcgccagtgatggcaccccccagggcgagaaggagaaggaggagcggcccccagagctgcccctgctgtctgagcagctgagcctggatgagctgtgggacatgctgggagaatgtctgaaggagctggaggagagccatgaccagcacgctgtgctggtgctgcagcctgctgtggaggccttcttcctggtgcacgccacagagcgggagagcaagccccctgtgcgggacacccgggagagccagctggcccacatcaaggatgagcccccacccctgagccctgcccccctgaccccagccacccccagcagcctggaccccttcttcagccgggagcccagctccatgcacatcagcagcagcctgcccccagacacccagaagttcctgcgctttgctgagacccacaggacagtgctgaaccagatcctgcggcagagcaccacccacctggctgatggcccctttgctgtgctggtggactacatccgggtgctggactttgatgtgaagaggaagtacttccggcaggagctggagcggctggatgagggcctgaggaaggaggacatggctgtgcacgtgagaagagaccacgtgtttgaagattcctaccgggagctgcacaggaagagccctgaggagatgaagaacagactctacatcgtgtttgaaggagaggagggccaggatgctgggggcctgctgcgggagtggtacatgatcatcagccgggagatgttcaaccccatgtatgccctcttccgcaccagccctggggacagagtgacctacaccatcaaccccagcagccactgcaaccccaaccacctgagctacttcaagtttgtgggccgcatcgtggccaaggctgtgtatgacaaccggctgctggagtgctacttcaccaggagcttctacaagcacatcctgggcaagtctgtgcgctacacagacatggagagcgaggactaccacttctaccagggcctggtgtacctgctggagaatgatgtgtccaccctgggctatgacctgaccttcagcacagaggtgcaggagtttggagtgtgtgaggtgcgggacctgaagcccaatggagccaacatcctggtgacagaggagaacaagaaggagtatgtgcacctggtgtgccagatgaggatgactggagccatcaggaagcagctggccgccttcctggagggcttctatgagatcatccccaagaggctcatcagcatcttcacagagcaggagctggagctgctgatcagcggcctgcccaccatcgacattgatgacctgaagagcaacacagagtaccacaagtaccagagcaacagcatccagatccagtggttctggagggccctgcggagctttgaccaggccgaccgggccaagttcctgcagtttgtgacaggcaccagcaaggtgcccctgcagggctttgctgccctggagggcatgaatggcatccagaagttccagatccacagagatgacaggagcacagaccggctgcccagcgcccacacctgcttcaaccagctggacctgcctgcctatgagagctttgagaagctgcggcacatgctgctgctggccatccaggagtgcagcgagggcttcggcctggcctag

SEQ ID NO: 324433 - DNA, 3594 bp, Artificial Sequence
  derived and/or modified sequence
tgacccagcggcagcaacgtggacaccctgctgcggctgcggggccgcctcctacttgaccatgaagcccttagttgcttgcttgtcctcctgtttgtcgatgaaccgaagttgaacacctcaaggctccaccgcgtactgaggaatctttgctaccatgctcagaccaggcattgggttatccggtctctcctctcgatacttcagcggagtagtgagagcgagctgtgtatcgagactcccaagctaacgactagtgaagaaaagggaaagaaatcgtcaaaaagttgtggctcatcaagtcacgaaaatcggccactggacctgctgcacaagatggagtccaagtcctcgaaccagttgagctggttgtccgtgtcaatggacgccgcgctgggttgtcgaaccaacatctttcagattcagcgtagcggaggccgaaagcacacagagaaacacgcctcagggggaagcacggtccacatacaccctcaagccgctccggtggtctgccgccatgtcctggacactctcatacagctcgccaaagtttttccatcgcactttactcaacagagaaccaaggagaccaactgtgagagtgatagagaacggggcaacaaggcctgtagcccctgctcttctcagtcatcctcatcaggaatttgcaccgacttctgggacctcctcgtgaagctcgataatatgaacgtttcccggaaagggaaaaacagcgttaaatcagtgcctgtttcagccggcggcgaaggtgaaactagcccatattccctggaggcatcacccctgggccagttgatgaacatgctttcgcacccagtgatccggagatcctctctgctaactgaaaagttacttagactgcttagtctcatcagtattgcgttgcccgagaacaaggtgtccgaggcccaagccaactctggcagcggggccagttccaccacaacggcaacttcgactacatcgactacgactactacagctgctagcactacccccacacctcccaccgcccccactccggtaacctccgccccagccctggtcgccgcaaccgcaatctctactatcgtggtagctgcttccaccaccgtgactactccaacaaccgcaacaaccaccgtgagcatatcccctactactaagggctccaaatcacccgcaaaggttagcgatggcggatcttcaagtacagacttcaagatggtgtcctctggcctgactgagaaccagcttcagctgtcggtggaagtgttgaccagccacagctgctccgaagaggggctggaagatgcagctaacgtcctgctgcagttatccagaggagatagcggcactcgggacaccgtgctgaagctgctgctcaatggcgcgcgccatctcgggtatacactatgtaaacaaataggcacattgctggctgagctgagggaatacaacctagagcagcaaagaagagcccagtgcgagactctgtctccagacgggttgccagaggaacagccccagacaactaaactcaaaggaaagatgcaatcccgctttgatatggccgagaacgtcgtgattgtcgccagccagaaacgccctctcggtggtagagagctccagctgccaagcatgtccatgctgacttccaaaacctctacccagaagttcttcctacgtgttcttcaggttattatacagctgcgagacgacacaagacgtgccaacaagaaggcaaagcagaccggtcgcctagggtcctccggcctgggatcagcctccagtatccaagcagccgtacgtcagctggaagcagaagccgacgcgatcatacagatgtctgaatcctctcagtctgaggcatctgtcaggagggaagaaagccctatggacgtggatcaacccagtcctagcgcacaggacacccagtctatcgcctcagatggtactccccagggcgaaaaggagaaggaggaacgccccccagaactccctctcctgtctgaacagctgtccttggacgagctgtgggatatgctaggtgagtgtctaaaggaattagaggaatcccacgatcaacacgccgtgctggttttgcagccggctgtggaagccttctttctggttcacgccaccgaacgcgaatccaagccacctgttagggacacccgagagtcccagctggcccacatcaaagatgagccccctcccttgagtcccgcacccctaacaccagcaaccccctcaagccttgatccctttttttcgagagagcccagctccatgcatatcagttcttctttgccccctgacacccagaagttcctgagatttgccgaaactcatcgcaccgttctcaatcagattctccggcagtctacaacacacctcgccgacgggcccttcgccgtgcttgtggactacataagggttttagatttcgatgttaaaagaaaatatttccgccaggaacttgaaaggctggacgaaggcctgaggaaagaggatatggccgtccatgtgcggcgcgatcacgttttcgaagacagttaccgcgagctccacaggaaatcccctgaagaaatgaagaaccgtctatatatcgtttttgagggtgaggagggacaggatgcggggggcttgttgagggagtggtatatgattattagtagggaaatgttcaaccccatgtacgctctctttcgaacaagccccggtgatcgggtaacctataccatcaatccgtcgagccactgtaatcctaatcacctctcctattttaaattcgtcggccgcatcgtggccaaagccgtgtatgacaacaggctgctggaatgctattttacccgctcgttctacaagcacattctgggcaagtctgtcaggtacaccgacatggaatcagaggactatcatttctaccaggggctggtgtatcttctagagaacgacgtcagcacattgggttatgatcttacttttagtactgaagttcaagagttcggggtgtgcgaagtccgtgacctgaaacccaacggagcaaatatcttggtaactgaggagaacaaaaaagagtacgtgcacctagtgtgccagatgagaatgactggcgcaattaggaagcagctggctgcttttctcgagggcttttacgagataatacccaaaagattaatctctatctttacagagcaggagctggagctgctgatctctgggctgcctacaatcgacatcgatgaccttaaatcgaacaccgagtaccacaaataccaaagcaacagcatacagattcagtggttttggagggctctgcgatcctttgatcaagccgaccgagctaagttcctgcagtttgtcaccggcaccagcaaagtcccgcttcagggttttgccgctttggaagggatgaatggaatccagaaattccaaattcatagggatgatcgcagcacggaccggctgccctccgcacatacctgcttcaaccaattggatttaccagcttatgagtcctttgagaaactcagacatatgttgcttcttgccatccaagaatgtagcgaggggttcggactggcttag

SEQ ID NO: 324434 - DNA, 3594 bp, Artificial Sequence
  derived and/or modified sequence
taacctagcggatcgaatgttgacacactcttaaggctgcgcggacgtctgttgctggaccatgaggcactctcttgccttctggtgttattatttgttgacgaaccgaagctgaacacttctcgactgcacagggtccttcggaatttgtgctatcacgcgcaaacccggcactgggtgatccgtagtttgctgtctatactgcagaggtcctctgaaagcgagctgtgtattgagactccaaaactgacaacctccgaggagaaaggcaagaagagctctaagtcttgcgggtcgtcttcccacgagaacagaccgttggatctcttacacaagatggagtccaagtcatctaaccagctgtcgtggctgtcagtgagcatggacgctgcgctgggatgccgcaccaacatttttcagattcagcgatccggcggaagaaaacataccgaaaagcacgcctcaggcggaagcaccgtccatattcacccccaggcggctcccgtggtgtgcagacacgtgcttgataccctgatccagctggcaaaggtgttcccctcacactttacacaacagagaacaaaagagaccaattgtgaatccgatagggaaagaggaaacaaggcctgttccccatgttcttcacaaagttcctccagcgggatttgtactgacttttgggaccttctggtaaagcttgacaatatgaacgtgtctaggaagggcaaaaactccgtgaagtccgtccccgtatcggcaggcggagaaggggagacatccccttactcactcgaagcatctccacttggccagcttatgaatatgttatcccatcctgtgatcagacggagttctttgctgaccgaaaagttattacgccttttaagcctgatctcgatcgctctgccagaaaataaggtttcagaggcccaggccaattccggcagtggggctagcagtacaacaacagccacgtccaccaccagtacaactaccaccacagctgcctcaacgacaccaacaccgcctacggccccaactcctgtgacctcagcacccgctctggtggccgcaacagctataagtaccatagtagttgctgcttctactacagttaccacccctactaccgcaacgaccaccgtgagcatctcccctaccaccaaaggcagtaaatcccccgctaaggtgtctgatggaggctctagcagcaccgacttcaaaatggtgtcttctgggctgactgagaaccagctgcaactgtccgtggaggtgctgacgagccactcctgttccgaggaagggctggaggacgctgccaacgtcctgttacagttgagccgcggtgactccggaacccgcgataccgtgctgaagttactgctcaacggagctcgccacctcgggtataccctttgcaaacagattggcacactactcgcagaactcagggaatacaatctggagcagcagcgacgagcccagtgtgaaaccttgtctcctgacgggctccccgaggaacagcctcagaccaccaagttgaaagggaagatgcagtctagatttgacatggccgagaatgtagttatagttgcttcccagaaacgtccattaggaggcagggagttgcagttaccgtcaatgtcaatgttgacttctaaaacaagcactcagaagttctttctccgtgtattgcaagtaattatccagctgagggatgatacccggagagcaaataaaaaggctaagcagacgggccgtctcggaagttctggcctagggtctgcctcgagcattcaggccgctgttcggcagctggaagctgaagctgatgcaatcatacagatgagcgagtccagccagagcgaggcctccgtgaggagagaggagtcccctatggatgttgatcagcctagcccgtcagcccaggacacacagagtatcgcatcagatggcacgccccagggagagaaggagaaagaggaacgtccaccggaactgcccctgctgtctgagcagctctccttggatgagctgtgggatatgctgggggaatgtctgaaagagctagaagaatcccacgaccaacacgccgttctcgttcttcaacccgcagtcgaggctttttttttggtccacgccactgaaagggagtcaaagcctccagttcgagacacacgcgagtctcagcttgcacacataaaggatgaaccccctcccctttcaccagcccctctcacacccgctacaccctccagcctggacccatttttcagtagggagccatcttccatgcacatttcctcttcactgcccccagatacacagaaattcctccggttcgccgagacccatcggactgtgctgaaccagatattacgccagagtacaactcaccttgcagacggacccttcgccgttcttgtcgactacattcgagtcttggacttcgatgtgaaacgcaaatattttcgccaggagctggagaggctggacgaaggcttgcgcaaggaagatatggccgtacacgtaagaagggatcacgtgtttgaagactcttatcgagaactccatcgcaagtctccggaagaaatgaaaaatcggctgtatattgtcttcgaaggcgaagaaggacaagacgcgggaggactgctgagagagtggtatatgatcattagcagagagatgtttaatcctatgtacgcactgttcaggacttcccctggagacagagtcacctacactatcaacccttcatcacactgcaaccctaaccatctgagctacttcaagttcgtcggtagaatcgtggccaaagctgtctacgacaatcgcttacttgaatgttactttacccgtagtttttacaagcacattctgggaaagtccgtgcgttataccgatatggagagcgaagactatcacttctatcaggggctcgtatatctcctggagaatgatgtcagcaccttaggctatgacctgactttctccaccgaggtgcaggagttcggagtctgtgaagtcagggacttaaaacccaatggcgctaacatcctcgttactgaagagaacaaaaaagaatacgtgcatctggtatgccaaatgaggatgaccggcgctatccgaaagcagctggctgcctttctcgagggcttttacgagatcattcccaaacggttgatctcgatctttacagagcaagaactggagctgctcatctcgggcttacccaccatcgatattgacgaccttaagagcaataccgagtaccacaaataccagtccaacagtatacaaatccagtggttttggagagccttgagatcttttgaccaggccgatcgcgctaagttcctgcaatttgttactggaaccagtaaggtccctttgcaagggttcgctgcgctcgaagggatgaacggtatccagaagttccagatccatagagatgatagatcaactgaccgcctgcctagcgcccacacatgcttcaaccagttggacttgcccgcttacgaatcttttgaaaaactgagacacatgctgctgttggccatccaggaatgtagcgagggtttcgggctcgcttag

SEQ ID NO: 324435 - DNA, 3594 bp, Artificial Sequence
  derived and/or modified sequence
tgacccagcggcagcaacgtggacaccctgctgagactgagaggcagactgctgctggaccacgaggccctgagctgcctgctggtgctgctgttcgtggacgagcccaagctgaacaccagcagactgcacagagtgctgagaaacctgtgctaccacgcccagaccagacactgggtgatcagaagcctgctgagcatcctgcagagaagcagcgagagcgagctgtgcatcgagacccccaagctgaccaccagcgaggagaagggcaagaagagcagcaagagctgcggcagcagcagccacgagaacagacccctggacctgctgcacaagatggagagcaagagcagcaaccagctgagctggctgagcgtgagcatggacgccgccctgggctgcagaaccaacatcttccagatccagagaagcggcggcagaaagcacaccgagaagcacgccagcggcggcagcaccgtgcacatccacccccaggccgcccccgtggtgtgcagacacgtgctggacaccctgatccagctggccaaggtgttccccagccacttcacccagcagagaaccaaggagaccaactgcgagagcgacagagagagaggcaacaaggcctgcagcccctgcagcagccagagcagcagcagcggcatctgcaccgacttctgggacctgctggtgaagctggacaacatgaacgtgagcagaaagggcaagaacagcgtgaagagcgtgcccgtgagcgccggcggcgagggcgagaccagcccctacagcctggaggccagccccctgggccagctgatgaacatgctgagccaccccgtgatcagaagaagcagcctgctgaccgagaagctgctgagactgctgagcctgatcagcatcgccctgcccgagaacaaggtgagcgaggcccaggccaacagcggcagcggcgccagcagcaccaccaccgccaccagcaccaccagcaccaccaccaccaccgccgccagcaccacccccaccccccccaccgcccccacccccgtgaccagcgcccccgccctggtggccgccaccgccatcagcaccatcgtggtggccgccagcaccaccgtgaccacccccaccaccgccaccaccaccgtgagcatcagccccaccaccaagggcagcaagagccccgccaaggtgagcgacggcggcagcagcagcaccgacttcaagatggtgagcagcggcctgaccgagaaccagctgcagctgagcgtggaggtgctgaccagccacagctgcagcgaggagggcctggaggacgccgccaacgtgctgctgcagctgagcagaggcgacagcggcaccagagacaccgtgctgaagctgctgctgaacggcgccagacacctgggctacaccctgtgcaagcagatcggcaccctgctggccgagctgagagagtacaacctggagcagcagagaagagcccagtgcgagaccctgagccccgacggcctgcccgaggagcagccccagaccaccaagctgaagggcaagatgcagagcagattcgacatggccgagaacgtggtgatcgtggccagccagaagagacccctgggcggcagagagctgcagctgcccagcatgagcatgctgaccagcaagaccagcacccagaagttcttcctgagagtgctgcaggtgatcatccagctgagagacgacaccagaagagccaacaagaaggccaagcagaccggcagactgggcagcagcggcctgggcagcgccagcagcatccaggccgccgtgagacagctggaggccgaggccgacgccatcatccagatgagcgagagcagccagagcgaggccagcgtgagaagagaggagagccccatggacgtggaccagcccagccccagcgcccaggacacccagagcatcgccagcgacggcaccccccagggcgagaaggagaaggaggagagaccccccgagctgcccctgctgagcgagcagctgagcctggacgagctgtgggacatgctgggcgagtgcctgaaggagctggaggagagccacgaccagcacgccgtgctggtgctgcagcccgccgtggaggccttcttcctggtgcacgccaccgagagagagagcaagccccccgtgagagacaccagagagagccagctggcccacatcaaggacgagcccccccccctgagccccgcccccctgacccccgccacccccagcagcctggaccccttcttcagcagagagcccagcagcatgcacatcagcagcagcctgccccccgacacccagaagttcctgagattcgccgagacccacagaaccgtgctgaaccagatcctgagacagagcaccacccacctggccgacggccccttcgccgtgctggtggactacatcagagtgctggacttcgacgtgaagagaaagtacttcagacaggagctggagagactggacgagggcctgagaaaggaggacatggccgtgcacgtgagaagagaccacgtgttcgaggacagctacagagagctgcacagaaagagccccgaggagatgaagaacagactgtacatcgtgttcgagggcgaggagggccaggacgccggcggcctgctgagagagtggtacatgatcatcagcagagagatgttcaaccccatgtacgccctgttcagaaccagccccggcgacagagtgacctacaccatcaaccccagcagccactgcaaccccaaccacctgagctacttcaagttcgtgggcagaatcgtggccaaggccgtgtacgacaacagactgctggagtgctacttcaccagaagcttctacaagcacatcctgggcaagagcgtgagatacaccgacatggagagcgaggactaccacttctaccagggcctggtgtacctgctggagaacgacgtgagcaccctgggctacgacctgaccttcagcaccgaggtgcaggagttcggcgtgtgcgaggtgagagacctgaagcccaacggcgccaacatcctggtgaccgaggagaacaagaaggagtacgtgcacctggtgtgccagatgagaatgaccggcgccatcagaaagcagctggccgccttcctggagggcttctacgagatcatccccaagagactgatcagcatcttcaccgagcaggagctggagctgctgatcagcggcctgcccaccatcgacatcgacgacctgaagagcaacaccgagtaccacaagtaccagagcaacagcatccagatccagtggttctggagagccctgagaagcttcgaccaggccgacagagccaagttcctgcagttcgtgaccggcaccagcaaggtgcccctgcagggcttcgccgccctggagggcatgaacggcatccagaagttccagatccacagagacgacagaagcaccgacagactgcccagcgcccacacctgcttcaaccagctggacctgcccgcctacgagagcttcgagaagctgagacacatgctgctgctggccatccaggagtgcagcgagggcttcggcctggcctag

SEQ ID NO: 324436 - protein, 93 aa, Artificial Sequence
  derived and/or modified sequence
MKVDRTKLKKTPTEAPADCRALIDKLKVCNDEQLLLELQQIKTWNIGKCELYHWVDLLDRFDGILADAGQTVENMSWMLVCDRPEREQLKMLL

SEQ ID NO: 324437 - protein, 256 aa, Artificial Sequence
  derived and/or modified sequence
MDPYPHQFATALFSFLYHLASYDAGGEALVSCGMMEALLKVIKFLGDEQDQITFVTRAVRVVDLITNLDMAAFQSHSGLSIFIYRLEHEVDLCRKECPFVIKPKIQRPNTTQEGEEMETDMDVADVAMESSPGSSISMEHRLDVELRASGSSSSTNISSGPSPGPSPGTGPGPGPGPGPGPGPGPGPGPGPGPGPGPGPGPRPGVQCIPQRAALLKSMLNFLKKAIQDPAFSDGIRHVMDGSLPTSLKHIISNAEY

SEQ ID NO: 324438 - protein, 216 aa, Artificial Sequence
  derived and/or modified sequence
MKVDRTKLKKTPTEAPADCRALIDKLKVCNDEQLLLELQQIKTWNIGKCELYHWVDLLDRFDGILADAGQTVENMSWMLVCDRPEREQLKMLLLAVLNFTALLIEYSFSRHLYSSIEHLTTLLASSDMQVVLAVLNLLYVFSKRSNYITRLGSDKRTPLLTRLQHLAESWGGKENGFGLAECCRDLHMMKYPPSATTLHFEFYADPGAEVKIEKRK

SEQ ID NO: 324439 - DNA, 10227 bp, Artificial Sequence
  derived and/or modified sequence
tgaagcctcccaagcggctgtgagttcggacaggcagacatgcagaaactcgtaccaaaggatgaaaaagccgatggagagcaggacggtgccgccggcagtatggacgcttctacccagggactgcttgagggtataggcttagatggagacactctagcgccaatggaaactgatgaacccacagcctctgatagcaaggggaagtctaaaataactcccgctatggctgccaggattaagcagatcaaacctctgctgtctgcgtcctccaggctcgggagagcattggccgagctgttcgggctgctggtcaagctgtgtgtgggatcacccgtgcgccagcggaggtctcatcacgcggcaagtacaacaaccgctcctacccctgctgcccgctccaccgcaagtgcgctgaccaagctgcttaccaaaggattaagttggcagcctcctccgtatacacctactccccgcttccggctgacattttttatctgttcagtgggctttaccagccccatgttatttgacgagcgtaagtacccttaccatctcatgctgcaaaagtttctttgctctggtgggcataacgccctgtttgaaactttcaattgggccctgagtatggggggcaaagttccagtatccgagggcttagaacattcagaccttccggacggcactggcgagtttctcgacgcatggctgatgttagttgagaaaatggtgaacccaacgacggtgctcgagagccctcacagcctgcccgccaagctgccgggcggtgtgcagaatttcccccagttttcagctctccgattcttggtggtgactcagaaggcagcgtttacatgcataaaaaatctgtggaacagaaagccacttaaggtgtatggcggaagaatggccgagtcaatgctcgccatattatgtcacatcctcaggggggaaccggtgataagagaaagactatctaaggagaaggaaggatcgcgaggagaggaggacactggacaagaagaaggtggatcacgccgggagccgcaagtgaaccagcaacagctccaacagctcatggacatggggtttactcgagagcacgccatggaagctcttcttaacacctccaccatggagcaagccacagagtatctgctgacacatccaccacctatcatgggaggcgtcgtgagagatttgtctatgtctgaagaagaccagatgatgcgggcaatcgcaatgagcctcggtcaagatataccaatggatcagagggcagagtcccccgaagaagtcgcatgtagaaaggaagaagaagagcgtaaggccagggagaagcaggaggaggaagaagcgaagtgcctggagaaattccaagacgccgacccgctggagcaggacgaattgcatacctttacagatacgatgctgcctgggtgctttcatctgttagatgaattaccggataccgtgtatcgagtgtgtgatctcatcatgactgctattaagcggaatggggcagattatcgagatatgattcttaaacaggtggtgaaccaggtgtgggaagctgccgatgtcctcattaaggctgctctccccttgaccacttcagacaccaaaacagtttctgaatggatctctcagatggcaaccctgccccaggcctctaatttagcaacccgaattcttctgctgaccctgttgttcgaagaactcaaacttccctgcgcttgggtggtcgaatcttctggcattctgaacgtactaatcaaactgctcgaggtagtgcagccatgtctccaagctgccaaggagcagaaggaggtgcaaactcctaaatggattactccagtgttactgctgatcgatttttacgaaaagaccgctatcagctccaaacgacgagcccagatgactaagtacctgcagtctaattcaaataactggaggtggttcgatgacagatctggacgctggtgcagctattctgcatctaataactcaacaattgattctgcctggaagtccggagagacctccgtgcgtttcacagccggccgtcgccgctacactgttcagtttacaacaatggtccaggtcaacgaagaaactggaaaccggcgaccagtgatgctgactttgctgcgtgtccctcgcctgaataagaattcaaaaaacagtaatgggcaggagctggagaaaaccctagaggagtcaaaagagatggatattaagagaaaagagaataaagggaacgatactccccttgcgctggaatcaacaaatactgagaaggagacttccctcgaggagaccaaaatcggggagatactgattcagggacttacagaggacatggtgactgtgctcatccgcgcatgcgtttccatgctaggggtcccggttgatcctgacacactccacgctactctgcgcctgtgtctccgactgactcgtgaccacaagtacgccatgatgtttgctgagctgaaaagtacacgcatgattctgaatttaacccagagcagcggctttaatggctttacacccttggtgacattactcttaagacacatcatcgaggatccatgcactctgcgccacacaatggagaaagtggtgcgatccgcggcgacatcgggggcgggaagtacaacttcgggcgtggtttccggaagcctcggcagtagagaaataaattatatcttgagggtgctgggacctgctgcttgtcggaaccccgacatattcactgaggtggcaaattgctgtattcggattgccctgcccgctccaagaggcagcggtacagcctctgatgacgagttcgagaatttaagaattaagggtcccaacgctgtgcagctagttaaaacaacacctctgaagccatcaccgttgcccgtcatcccagacaccatcaaagaggtcatatacgacatgcttaatgcattggcagcctaccacgcccctgaagaggctgataagtctgatcccaaacccggggtgatgacccaagaggtgggccagctcctgcaggatatgggcgatgacgtttatcagcagtaccgaagcctgacacgacagtcgtctgatttcgatacacaaagtggttttagcattaattcccaggtgtttgctgccgatggagcatctacagagacaagtgcttctggtacatcacaaggagaagctagcaccccagaggaaagccgagatgggaaaaaagacaaagaaggggacagggcttccgaggagggcaagcaaaaaggcaagggaagcaagcctctgatgccaacctccactattctgcggttactggcagaactggtgagatcttacgtcgggattgctactttgattgccaactacagttacacagtgggtcaaagcgagctgatcaaggaggactgttccgtgctagcgttcgtccttgaccatctgcttccacatacacagaacgccgaggataaggatactccagcccttgccaggctcttccttgcatctttagccgcagcaggatctggaacagacgcacaggtagccctggtgaacgaggtgaaggccgctctgggcagagcactggccatggctgaaagcactgagaaacatgcaaggttgcaagccgtgatgtgtataatcagcactataatggaaagttgcccctctaccagcagtttttacagcagcgctaccgccaagacacaacacaacgggatgaacaacatcatcagactgtttctgaagaaaggcctagtaaacgatctggctcgagtcccccattcccttgacctctcctctcccaatatggccaatactgttaacgccgccctcaagcctctggaaactctgtcccgcattgtcaatcaacctagcagtcttttcgggagtaaaagcgcctctagcaaaaacaagtccgagcaggacgctcagggagcaagccaggacagctccagcaaccagcaggacccgggtgagccgggcgaggccgaggtgcaggaggaggaccatgacgtgacccagacagaggtggcagacggcgacattatggacggggaagccgaaacagattcagtcgtcattgctggccagcccgaagtgctgagcagccaggagatgcaagttgagaatgagctggaggatttgatcgacgagctgttggaaagagatggtgggagcgggaatagtacaatcattgtttcccggagcggggaggacgaatcacaggaggatgtgctgatggatgaagctccttccaacctttcccaggcatccactctgcaggcaaatcgcgaagacagtatgaatatcttagaccctgaagacgaagaagagcacactcaggaagaggactcctctggaagcaacgaggatgaggatgacagccaggacgaagaagaggaagaggaggaagacgaagaggatgatcaggaagacgacgaaggcgaggagggcgacgaagatgacgacgatgacggatccgagatggagctggatgaagattatcccgacatgaacgcctctccgctcgttagattcgaacgatttgatcgggaggacgacttaattattgaatttgacaacatgttctcctccgccaccgacatcccaccctcccccggcaacatcccaacaactcatcctctcatggtgcggcatgctgaccattcttcgttgaccttgggaagcggcagctccaccaccaggctgactcagggaattggccgaagccagcgaacactgcggcagctgacggctaacactggacatacaattcatgtccattatcctggtaaccgccaaccaaacccccctctgattctgcaacgactcctcgggccgagtgctgctgcagacatcctccaactgtccagtagtctgcccttgcagtccaggggccgggctcggctgctcgttggcaacgatgatgttcacattattgcaagatccgatgacgagctcttggatgacttttttcatgaccaatcgacggcaacatcgcaggcgggaaccctgagtagtatacccaccgcattgacaagatggacagaggagtgcaaggtcctcgacgcggagagtatgcatgattgcgtttctgtggtcaaagtcagtattgtcaaccacctcgaattcctgagggatgaggagctcgaagagcgtagggagaaacgccgtaaacagttggccgaggaggaaacaaaaatcactgataaaggcaaggaggacaaagaaaacagagaccagagcgctcaatgcaccgcgtcgaaatctaacgactctaccgagcagaatctatcagatggaacacccatgcctgacagctaccccactaccccttcatctacagatgccgccacttcagagtcgaaagagacccttggaacactgcagtctagccagcaacagcctaccctccctacaccccccgctcttggtgaagttccacaagaacttcagagccctgcaggcgaaggcggtagcagcacccagctcctgatgccagttgaacctgaagaactggggccaacacggccaagtggtgaggcggaaacaacccagatggaactctcacctgctcctaccattaccagtctcagccccgagcgagcagaagattccgatgcattaactgccgtctcttctcagcttgagggctcccccatggatacatcatctctcgcttcctgtacactggaagaagccgttggtgacacgagcgccgccggatcgagcgaacagcccagggcaggatcttcaacccccggtgatgcgccccctgctgtcgcagaagtccagggtaggagtgacggttccggggagtcagcccagccacccgaagatagcagcccgccagcctcctccgagtcatccagcacacgcgattctgccgttgccatttcaggggcagatagcagaggcatactcgaggaaccactgccctcaacatcttcggaggaagaggatcctttggctggtatttcccttcctgaaggagtggatcccagttttctcgcagctttgcccgacgatattcgccgtgaggtgctccagaaccagctagggattcgaccacctaccaggactgcaccatctacaaatagctctgcccctgctgtcgtggggaatccaggagtgactgaggtcagccccgagttcttggcagcactgccccccgctatccaggaggaggtattggcccagcaacgggccgagcaacagaggagggagctcgctcagaacgcaagcagcgatacgccaatggatcccgtaacttttatccagactctgcccagtgacctgaggagatctgtcctggaggacatggaggatagcgtccttgccgtgatgccgccagatatcgctgctgaggcacaagccctacgaagagagcaggaagcacgccagcgacagctgatgcacgagcggttatttgggcactcatccacaagtgcactgtccgcaatattgcgttcacctgccttcacgagcaggctgtccgggaatcgcggcgtccagtacactcggctcgcagtgcagaggggaggtacctttcaaatgggcgggtcttcatctcacaatcgcccgagtggatcaaatgttgatactcttttacggctgagaggacggctgctcctcgaccatgaggccctgagttgccttctggtcctgctgttcgttgacgagcctaagctgaatacaagtaggcttcatagagttttgaggaacttgtgttatcacgcccagacaagacattgggtgatacgatcacttctgagtattctgcagcgcagttccgagtccgagctttgtattgaaacccccaagctgacaacttcagaagagaagggcaagaagtccagcaagagctgtggatccagctctcacgagaatagaccccttgacctgttgcataaaatggagagtaagtctagtaaccagctgtcgtggttatctgtgagtatggacgctgccctcggctgtaggaccaacatctttcagatacagcgctccggaggtagaaagcatacagagaagcatgcatcaggcggttccacggtgcacattcaccctcaggcagcgcccgtggtgtgccggcatgtgctcgatacgttaatacagctggctaaggtgttcccctctcacttcactcagcagagaactaaggaaacgaattgcgagagcgacagagagagaggcaacaaagcctgctcgccttgcagcagtcagtctagttcaagcgggatttgtactgacttttgggatctattggtgaagctggataatatgaatgttagtcggaaggggaagaacagcgttaaaagtgtcccggtgagtgctggtggcgaaggcgaaacttctccatacagccttgaagcctccccgttaggacagttaatgaacatgctgtctcatccggtcatcagacggtcctctcttttgaccgagaaactcctgcggctgctgtcactgatcagcattgcccttcctgaaaataaggtatctgaggctcaggccaattctggcagcggcgcctccagtaccactactgccacctctacaacaagcactacgacaacaacagcagccagcacgacccctaccccccctacggccccaaccccagtaactagcgccccagcactggtcgcagcgacagctatatctaccattgtggtggcagcttctacaaccgtcacaacaccaacgactgctactacaactgtgagcatttccccaaccaccaagggcagcaaatccccggccaaggtctctgacggcggctcctcatccactgatttcaagatggtgagcagtggtctcaccgagaatcagttgcagctgtcggttgaagtattgacgagccacagttgtagcgaggaaggcctggaggacgccgcaaacgtcctcctccagctgagccgcggggatagtgggacccgggatacagtgctgaaactcctgttaaacggagcccgccacctgggctacacactctgcaaacaaatcggtacgctgctagccgagctgcgcgagtacaatctcgagcagcagcgaagagctcagtgcgaaactctcagcccggacggcttacctgaggaacagccccaaaccacaaagctgaagggaaagatgcagtcccgtttcgacatggcagagaacgtggtaatcgtggcctcccaaaaacgccctctgggtggccgggagctccagttgccatccatgagcatgctgacatcaaagacctctacacagaagttttttttgcgggtgttacaggtaattatccagctacgcgacgacactagaagagccaataaaaaggctaagcagactggacggctaggcagttctggacttggcagcgcctcaagtatccaggccgctgtgagacagttagaggctgaggcagatgcaattattcaaatggtgagggagggacagagagcgcgacgacagcagcaggccgcaacttctgagagttctcagagcgaagccagtgtgcgccgggaagaatccccgatggacgtcgaccaaccatccccatcagctcaggatacgcaaagcatcgcgtcagatggaacaccccagggagaaaaagagaaagaagagagaccgcctgagctgcccttgctcagtgagcagctttcgcttgacgaactttgggacatgctcggtgaatgtttgaaggagctggaagagagccacgaccagcatgctgttctcgtcttacagcccgctgtggaggcatttttcctggttcatgcaacagagagagaaagcaaaccacctgtgcgcgataccagagagtcacagctcgcccacattaaagatgaaccaccgcctctgtcccccgccccactgacacccgccaccccctccagtcttgatccttttttctcacgagagcccagttccatgcacataagtagcagtctgcctcctgatactcagaagttcctgcgcttcgccgaaacccacagaactgtattaaaccagatcttgaggcagagcactacacacttggctgacggcccatttgccgtcttggtggactacataagggttttggacttcgacgttaagaggaagtactttaggcaggagctcgagcggttagatgaagggttacgcaaagaagatatggctgtgcacgttagacgggatcatgtctttgaagactcctaccgggaactgcataggaagtctccagaagaaatgaagaacagactgtacatagtgttcgaaggcgaggagggccaggatgccggcgggttgttgagggaatggtatatgattatttctcgcgagatgttcaaccccatgtatgcactttttcgcacaagtccaggcgatagagtcacttacaccattaacccctccagccattgtaatccaaaccacctatcttattttaagttcgtgggaagaatcgtggccaaagcagtgtacgacaaccgccttctagagtgctatttcaccaggtcattctacaagcatatcctcggtaaatccgtacgttacaccgacatggagagtgaagattaccacttctaccaggggcttgtttatctactggagaacgatgtatccaccctggggtatgatctaaccttctccactgaagtccaggagttcggcgtgtgcgaggtcagggatctcaaaccaaatggcgccaacatcctagtgactgaggaaaataagaaggagtatgttcacctggtgtgtcagatgaggatgactggcgccatccgcaagcaattggccgctttcttggaaggcttctacgaaatcataccaaagaggctcatatctatcttcactgagcaggagttagaactgctgatctccggcctgcctacaatagacatcgacgacctcaagtctaatactgagtaccacaagtatcagagcaacagcatccaaatacagtggttctggagagcgttgcggtctttcgaccaggccgatcgcgcaaagtttttgcagttcgtgaccgggacctccaaagtgcccctccagggctttgccgcccttgagggaatgaatggcatccaaaaattccagattcatcgggacgataggtccacagaccgactgccgagcgcccatacatgcttcaatcagctggatctaccagcttatgagtctttcgaaaaacttcggcacatgctcctattggccattcaggagtgttccgaggggttcggcctggcttag

SEQ ID NO: 324440 - DNA, 4382 bp, Artificial Sequence
  derived and/or modified sequence
caattgtccacttggagagaactcccaaactcagcagtattattgactgtactggaactgcctcctaccatggatttttgccagtgcttgtaaggaactgtatccaggccatgattgatccttccatggatccataccctcaccagtttgccactgctctcttctcttttttataccatctggccagctacgatgctggtggtgaagccttggtctcctgtggaatgatggaagccttattgaaggtcataaagtttcttggcgatgaacaggaccagataacatttgtcaccagagccgtcagagtggttgaccttatcaccaacctggatatggcagcttttcaatcccatagtggactttctatcttcatttatagacttgagcatgaagtagatttgtgccgaaaagaatgtccgtttgtgatcaagccaaagatccagagacccaatactacacaagaaggagaggaaatggaaactgatatggatgttgcagatgtggctatggaaagcagtccaggctcatccatctctatggagcacaggctggatgttgaattaagggcatcaggttccagcagcagcactaacatctcttctggccccagccctggtcccagtcccggcaccggccccggccccggccccggccccggccccggccctggccccggccccggccccggtcctggtcccggccctggccccggccctggccctggcccccgtcctggagtccagtgtattccacaacgagcagcacttctgaaatccatgttgaatttcctcaagaaggccatccaagaccctgctttctcagatggcatacgacatgtgatggatggttctctgcctacctccctgaaacacatcatcagcaatgcagaatactatggcccatcactcttcctcctagctactgaagtggtgactgtgtttgtatttcaagaaccatcactgctctcctcactccaggacaatggattgacagatgtcatgctgcatgcactgcttatcaaagatgttcctgctacccgtgaagtccttggctccctcccaaatgtattcagtgcactctgtttgaatgcccgaggtcttcagtcttttgttcagtgtcagccttttgaacgcctcttcaaagttcttctgtctccagattacctcccagccatgcggaggaggagaagttctgatccccttggggatactgcatccaacctggggagtgctgtcgatgagctcatgagacatcagcccacccttaaaacagatgcaacgactgccatcatcaagttacttgaagaaatctgtaatcttggaagggaccccaaatacatctgtcagaagccatcaatccagaaggcagatggcactgccactgctcctcccccaaggtctaatcatgccgcagaagaagcctctagtgaggatgaggaggaagaggaagtacaggccatgcagagctttaattctacccagcaaaatgaaactgagcctaatcagcaggttgttggtacagaggaacgtattcctattcccctcatggattacatccttaatgtgatgaaatttgtggaatctattctgagcaacaatacaacagatgaccactgccaggaatttgtgaatcagaaaggactgttgcctttggttaccattttgggtcttcccaatctgcccattgactttcccacatctgctgcctgtcaggctgttgcaggtgtctgcaaatccatattgacactgtcacatgaacccaaagtccttcaagagggtctccttcagttggactccatcctctcctccctggagcccttacaccgccccattgaatcccctgggggctcagtgttgttgcgagaactggcttgcgcaggcaatgttgctgatgctaccctctcagcccaggccacacctctgctgcatgcactcactgctgcccatgcctacatcatgatgtttgttcatacttgcagagttggacagagtgaaattcgttccatctccgtaaaccagtggggctctcaattgggtctgagtgttttgagcaagctgagccagttatactgttccctggtgtgggaaagcactgtcctcctctctctgtgtaccccaaacagcctaccatctgggtgtgaatttggccaggcagatatgcagaaactggttccaaaggatgagaaggcaggtacgacccagggcggaaaaagatcagatggggaacaggatggagcagctggaagtatggatgcttctacccagggcttattagaaggcattgggctagatggtgacacattggctcccatggagacagatgaacctactgcttcagactctaagggcaaatctaaaatcacaccagcaatggctgccagaattaagcaaatcaagcctttgttatcagcttcctccagattaggccgagcacttgctgagctatttggacttcttgttaaactttgtgtgggatctcctgtccgccagagaaggagccatcatgctgccagcaccactacagcaccgacacctgccgcgcgatcaacagcctcagctctcactaagctcttgactaaggggttatcttggcagcccccaccatatacacctactccccgattcaggctgacattcttcatctgttcagttggtttcacatccccaatgctgtttgatgagaggaagtatccctaccacctcatgctgcaaaaatttctctgctccggaggccacaatgctctttttgaaactttcaactgggctctgtccatgggaggtaaagttcctgtttctgagggattggaacactcagacttgcctgatggcacaggagaattcctagatgcctggcttatgctggtggagaagatggtgaatcccaccacggtgcttgaatctccacattcgctgcctgccaaattgcctggaggtgtccagaactttccccagttcagtgcactgcgcttccttgtggtaactcagaaagcagcctttacttgcatcaaaaacttatggaaccggaaacccctgaaggtatatggtggacgaatggctgaatcgatgctggccattctatgccacatcctccgaggagaacctgtgattcgagagagactaagcaaggagaaggaggggtctcgaggagaagaggatacagggcaagaggaaggtggctcccgccgggaacctcaagtcaaccagcaacaactgcaacagctcatggacatgggcttcacaagggaacatgcaatggaggcactgttgaacaccagcaccatggagcaggccacagagtaccttttaacccaccctcctccaatcatgggaggagttgttcgggatctcagcatgtctgaagaggaccagatgatgagagcaattgctatgtctctgggacaggatattccaatggatcaaagggcagagtcacctgaggaagttgcttgccggaaggaggaagaggaacggaaagctcgggaaaagcaggaggaggaagaggctaaatgtctagagaagttccaggatgctgacccgttggaacaagatgagctccacactttcacagatactatgttgccaggctgcttccaccttcttgatgagctgccagacacagtataccgtgtgtgtgacctgatcatgacagcaatcaaacgtaatggagcagattatcgtgacatgattctgaagcaagtagtcaatcaggtgtgggaagctgctgatgtattgatcaaagctgctcttcccctgacaacaagtgacacaaaaaccgtgtcagagtggataagtcagatggccacactgccccaggcctccaatttggctactagaatcttgcttttaacgctactttttgaggagttgaagctaccttgtgcttgggtggttgaatcaagtggcatccttaatgtcctaatcaaactcttggaagtggttcagccctgcctccaggcagccaaggagcagaaggaagtccagaccccaaagtggatcacaccagtgttgctcctgattgatttctatgaaaagacagccatctcctcaaaaaggagagcccagatgactaagtacctgcaatccaacagcaacaactggcgctggtttgatgatcgctctgggcgttggtgtagttacagtgcaagcaacaatagcactattgattctgcctggaaatctggagagacaagcgtgcgattcactgcaggccgaagaagatacacggtccaattcactacaatggtgcaggttaatgaggaaacagggaaccgacgccctgtgatgctgactctcctcagggtacctcggctgaataaaaattcaaaaaacagcaatggacaggaactagagaagacgctggaagaaagcaaagaaatggatatc

SEQ ID NO: 324441 - DNA, 11438 bp, Artificial Sequence
  derived and/or modified sequence
cagcctaccatctgggtgtgaatttggccaggcagatatgcagaaactggttccaaaggatgagaaggcagatggggaacaggatggagcagctggaagtatggatgcttctacccagggcttattagaaggcattgggctagatggtgacacattggctcccatggagacagatgaacctactgcttcagactctaagggcaaatctaaaatcacaccagcaatggctgccagaattaagcaaatcaagcctttgttatcagcttcctccagattaggccgagcacttgctgagctatttggacttcttgttaaactttgtgtgggatctcctgtccgccagagaaggagccatcatgctgccagcaccactacagcaccgacacctgccgcgcgatcaacagcctcagctctcactaagctcttgactaaggggttatcttggcagcccccaccatatacacctactccccgattcaggctgacattcttcatctgttcagttggtttcacatccccaatgctgtttgatgagaggaagtatccctaccacctcatgctgcaaaaatttctctgctccggaggccacaatgctctttttgaaactttcaactgggctctgtccatgggaggtaaagttcctgtttctgagggattggaacactcagacttgcctgatggcacaggagaattcctagatgcctggcttatgctggtggagaagatggtgaatcccaccacggtgcttgaatctccacattcgctgcctgccaaattgcctggaggtgtccagaactttccccagttcagtgcactgcgcttccttgtggtaactcagaaagcagcctttacttgcatcaaaaacttatggaaccggaaacccctgaaggtatatggtggacgaatggctgaatcgatgctggccattctatgccacatcctccgaggagaacctgtgattcgagagagactaagcaaggagaaggaggggtctcgaggagaagaggatacagggcaagaggaaggtggctcccgccgggaacctcaagtcaaccagcaacaactgcaacagctcatggacatgggcttcacaagggaacatgcaatggaggcactgttgaacaccagcaccatggagcaggccacagagtaccttttaacccaccctcctccaatcatgggaggagttgttcgggatctcagcatgtctgaagaggaccagatgatgagagcaattgctatgtctctgggacaggatattccaatggatcaaagggcagagtcacctgaggaagttgcttgccggaaggaggaagaggaacggaaagctcgggaaaagcaggaggaggaagaggctaaatgtctagagaagttccaggatgctgacccgttggaacaagatgagctccacactttcacagatactatgttgccaggctgcttccaccttcttgatgagctgccagacacagtataccgtgtgtgtgacctgatcatgacagcaatcaaacgtaatggagcagattatcgtgacatgattctgaagcaagtagtcaatcaggtgtgggaagctgctgatgtattgatcaaagctgctcttcccctgacaacaagtgacacaaaaaccgtgtcagagtggataagtcagatggccacactgccccaggcctccaatttggctactagaatcttgcttttaacgctactttttgaggagttgaagctaccttgtgcttgggtggttgaatcaagtggcatccttaatgtcctaatcaaactcttggaagtggttcagccctgcctccaggcagccaaggagcagaaggaagtccagaccccaaagtggatcacaccagtgttgctcctgattgatttctatgaaaagacagccatctcctcaaaaaggagagcccagatgactaagtacctgcaatccaacagcaacaactggcgctggtttgatgatcgctctgggcgttggtgtagttacagtgcaagcaacaatagcactattgattctgcctggaaatctggagagacaagcgtgcgattcactgcaggccgaagaagatacacggtccaattcactacaatggtgcaggttaatgaggaaacagggaaccgacgccctgtgatgctgactctcctcagggtacctcggctgaataaaaattcaaaaaacagcaatggacaggaactagagaagacgctggaagaaagcaaagaaatggatatcaaacgtaaagaaaataaaggcaatgatacccctttggccctagagagtacaaacactgaaaaggagacaagcctggaggaaacaaaaatcggggagatcctgatccagggcttgacagaagatatggtgactgttttaatccgggcctgcgtgagcatgctgggagtccctgtggacccagatactttgcatgccacccttcgtctctgtctgaggctcacccgggaccacaaatatgccatgatgtttgcagaactgaagagtacccgcatgatcttgaatttgacccagagctcaggcttcaatgggtttactcccctggtcacccttctcttaagacacatcattgaggacccctgtacccttcgtcataccatggaaaaggttgttcgctcagcagctacaagtggagctggtagcactacctctggtgttgtgtctggcagcctcggctctcgggagatcaactacatccttcgtgtccttgggccagccgcatgccgcaatccagacatattcacagaagtggccaactgctgtatccgcatcgcccttcctgcccctcgaggctcaggaactgcttcagatgatgaatttgagaatcttagaattaaaggccctaatgctgtacagctggtgaagaccacccctttgaagccctcacctctgcctgtcatccctgatactatcaaggaagtgatctatgatatgctgaatgctctggctgcataccatgctccagaggaagcagataaatctgatcctaaacctggggttatgacccaagaggttggccagctcctgcaagacatgggtgatgatgtataccagcagtaccggtcacttacgcgtcagagcagtgactttgatacgcagtcaggtttttccattaatagtcaggtctttgctgcagatggtgcctccactgagacttccgcatctgggacctcccaaggagaggcttcaactccagaggagtctcgagatgggaagaaagataaagaaggggaccgggcctctgaggaaggcaaacagaaaggcaagggcagcaaacctttaatgcctacctccactatccttcgtcttctggcagagttggtgaggtcctatgttggtattgctaccctgattgccaactacagctacactgtgggccagtctgaactgatcaaagaggactgcagtgtgctagcttttgttctggaccacctgctcccacatacccagaatgcagaagacaaggacacccctgccttggcccgcctgttcctcgcaagcctggctgctgcagggagtggcacagatgcccaggtggccctagtgaatgaagtaaaagcagcccttggacgggcactggctatggctgagagtacagagaaacatgccaggcttcaggcagtgatgtgtatcatcagtactatcatggagtcctgcccctccacctccagcttctacagcagtgccacagcgaagacccagcacaatggcatgaacaacatcattcggcttttcctgaagaagggactggttaatgacctggccagagtacctcacagcttagacctgtccagtcccaacatggccaacacagtcaatgctgctctgaagcctttggaaacactttcccggattgtgaaccagcccagtagcctttttggcagcaagagtgcttctagcaagaacaagtctgagcaggatgcccaaggagcctctcaagattccagtagcaaccagcaggacccaggcgagcctggggaagcagaagtgcaggaggaggatcatgatgtcactcagacagaggtggcagatggggatatcatggatggggaggctgaaaccgactcagtggtgattgctgggcagcctgaggtgctcagttcacaagagatgcaggttgagaatgagctggaggacctgatagatgagttgcttgagagggatggcggatctgggaacagtacaattatagtgagcagaagtggagaggatgaatcacaagaggacgtgctgatggatgaagctccttccaacctcagccaagcttccaccttgcaggccaaccgagaagattccatgaatatcctggaccctgaggatgaggaggagcacactcaggaagaggacagcagtggcagtaacgaggatgaggatgatagtcaggatgaagaggaggaggaggaggaagatgaggaagatgatcaggaggatgatgaaggtgaagagggagatgaagacgatgacgacgatggctctgagatggaattggatgaggattatcctgatatgaacgcttctcccttggtccgatttgagcgctttgaccgggaggatgatctcatcattgagtttgacaacatgttctccagtgctacagacatccccccatccccaggaaatatccctaccacccatccactgatggtgcgccatgcagaccacagttctctgacactgggcagtggctcttcaacaactcgtctcacccagggcatcgggcgcagtcagaggaccctaaggcagctgacggccaatactggccacaccattcatgttcactaccctgggaatcgccagcccaaccctcctcttatactgcagaggttgcttggtccctcagctgctgctgacatccttcagctgagcagcagccttcccctacaaagccggggtcgggcccgcctcctggtaggcaacgatgacgtccacatcatcgcccgttctgatgatgagctgctggatgactttttccatgatcagagcacagctaccagccaagcaggaaccctgtccagcatccccacagccctgacccgctggacagaagaatgcaaagttctcgatgctgagagcatgcatgactgtgtttcagtggttaaagtgtccattgtcaatcacctggaattcctgagggatgaggagctggaagaaaggcgagagaagcgcaggaaacaactggctgaggaagaaacaaagataactgataaaggcaaagaagataaggagaacagggatcagagtgcacagtgtactgcatctaagtcaaatgactccactgaacagaatctctcagatgggacgcctatgcctgacagctacccaacaaccccatcttcaactgatgcagctacatctgagtccaaggagacccttggcactctgcaatcctcacaacagcaaccaacactcccaaccccaccagctttgggagaggttcctcaggagctgcagtctccagctggagaagggggcagctctacacagctattgatgcctgtagagccagaggaattgggtcccacaaggccaagtggggaagcagaaacaactcagatggagttatccccagctcccactataacctcactttccccagagagagctgaggattctgatgcactgacggctgtcagcagtcagctagaaggctctcctatggatacaagcagcctggcttcctgtaccttagaggaggctgtgggtgacacttcagcagctggcagttctgagcagcccagagcaggcagctccactcctggggatgccccaccagctgtggcggaagtgcaaggcaggagtgatgggtcaggggaatctgcccagccacctgaggacagctccccacctgcatcctctgagagctcttccaccagagattctgccgtggccatttctggagcagattcccgaggaatcctagaagagccgttgccttcaacaagcagtgaagaagaagatccccttgcgggtatcagtctccctgaaggtgtggacccctcttttctggctgccctgcctgatgacatccgtcgggaagttctacagaaccagctaggcattcgtccaccaacccggactgccccctccacaaatagctcagcgcctgcagtggtggggaatcctggtgtgactgaagtgagccctgagtttctggctgccctgcctccagccattcaggaggaagtactggcacagcagagagctgagcagcagcgacgagaactagcacagaatgccagctcagacacccctatggaccctgtgaccttcatccagactctgccctcagacctgcgccgtagtgtcctagaggatatggaggacagtgtgttagctgtgatgccacctgacattgcagctgaggctcaagccctgagacgagagcaagaagcccggcagcgacagctcatgcatgagcgtctgtttgggcacagtagcacctccgcactctctgctattctccgaagcccggctttcaccagtcgcttaagtggcaaccgtggggtccagtatactcgccttgctgtgcagagaggtggcaccttccagatggggggtagcagcagccataacaggccttctggcagtaatgtagatactctcctccgcctccgaggacggctccttctggaccacgaagccctttcttgtctcttggtcctactttttgtggatgagccaaagctcaatactagccgtctacaccgagtactgagaaatctctgctaccatgcccagacccgccactgggtcatccgcagtctgctctccatcttgcagcgcagcagtgagagtgagctatgcattgaaacacccaaactcactacaagtgaggaaaagggcaaaaagtcgagcaagagctgtgggtcaagtagccatgagaaccgtcccctggacctgctacacaagatggagtcaaagagctccaaccagctttcctggctctcagtatccatggatgcagccctaggctgcaggactaatatatttcagatccagcgttcaggggggcgtaaacataccgagaagcatgcaagcggtggctccaccgtccacatccatccccaagctgctcctgttgtctgcagacacgttttggatacactcattcaattggccaaggtatttcccagccacttcacacagcagcggaccaaagaaacaaactgtgagagtgatcgggaaaggggcaataaggcctgtagcccatgctcctcacagtcctccagcagtggcatttgcacagacttctgggacttattggtaaaactggacaacatgaatgtcagccggaaaggcaagaactccgtgaagtcagtgccagtgagcgctggcggtgagggggaaacctctccatacagcctcgaggcctctccactggggcagctcatgaacatgttgtcacacccagtcatccgccggagctctctcttaactgagaaactcctcagactcctttctctcatctcaattgctctcccagaaaacaaggtgtcagaagcacaggctaattctggcagcggtgcttcctccaccaccactgccacctcaaccacatctaccaccaccaccactgccgcctccaccacgcccacaccccctactgcacccacccctgtcacttctgctccagccctggttgctgccacggctatttccaccattgtcgtagctgcttcgaccacagtgactacccccacgactgctaccactactgtttcaatttctcccactactaagggcagcaaatctccagcgaaggtgagtgatgggggcagcagcagtacagactttaagatggtgtcctctggcctcactgaaaaccagctacagctctctgtagaggtgttgacatcccactcttgttctgaggaaggcttagaggatgcagccaacgtactactgcagctctcccggggggactctgggacccgggacactgttctcaagctgctactgaatggagcccgccatctgggttataccctttgtaaacaaataggtaccctgctggccgagctgcgggaatacaacctcgagcagcagcggcgagcccaatgtgaaaccctctctcctgatggcctgcctgaggagcagccacagaccaccaagctgaagggcaaaatgcagagcaggtttgacatggctgagaatgtggtaattgtggcatctcagaagcgacctttgggtggccgggagctccagctgccttctatgtccatgttgacatccaagacatctacccagaagttcttcttgagggtactacaggtcatcatccagctccgggacgacacgcgccgggctaacaagaaagccaagcagacaggcaggctaggttcctccggtttaggctcagctagcagcatccaggcagctgttcggcagctggaggctgaggctgatgccattatacaaatggtacgtgagggtcaaagggcgcggagacagcaacaagcagcaacgtcggagtctagccagtcagaggcgtctgtccggagggaggaatcacccatggatgtggaccagccatctcccagtgctcaagatactcaatccattgcctccgatggaaccccacagggggagaaggaaaaggaagaaagaccacctgagttacccctgctcagcgagcagctgagtttggacgagctgtgggacatgcttggggagtgtctaaaggaactagaggaatcccatgaccagcatgcggtgctagtgctacagcctgctgtcgaggccttctttctggtccatgccacagagcgggagagcaagcctcctgtccgagacacccgtgagagccagctggcacacatcaaggacgagcctcctccactctcccctgcccccttaaccccagccacgccttcctcccttgacccattcttctcccgggagccctcatctatgcacatctcctcaagcctgccccctgacacacagaagttccttcgctttgcagagactcaccgcactgtgttaaaccagatcctacggcagtccacgacccaccttgctgatgggccttttgctgtcctggtagactacattcgtgtcctcgactttgatgtcaagcgcaaatatttccgccaagagctggagcgtttagatgaggggctccggaaagaagacatggctgtgcatgtccgtcgtgaccatgtgtttgaagactcctatcgtgagctgcatcgcaaatcccccgaagaaatgaagaatcgattgtatatagtatttgaaggagaagaagggcaggatgctggtgggctcctgcgggagtggtatatgatcatctctcgagagatgtttaaccctatgtatgccttgttccgtacctcacctggtgatcgagtcacctacaccatcaatccatcttcccactgcaaccccaaccacctcagctacttcaagtttgtcggacgcattgtggccaaagctgtatatgacaaccgtcttctggagtgctactttactcgatccttttacaaacacatcttgggcaagtcagtcagatatacagatatggagagtgaagattaccacttctaccaaggtctggtttatctgctggaaaatgatgtctccacactaggctatgacctcaccttcagcactgaggtccaagagtttggagtttgtgaagttcgtgacctcaaacccaatggggccaacatcttggtaacagaggagaataagaaggagtatgtacacctggtatgccagatgagaatgacaggagccatccgcaagcagttggcggctttcttagaaggcttctatgagatcattccaaagcgcctcatttccatcttcactgagcaggagttagagctgcttatatcaggactgcccaccattgacatcgatgatctgaaatccaacactgaataccacaagtaccagtccaactctattcagatccagtggttctggagagcattgcgttctttcgatcaagctgaccgtgccaagttcctccagtttgtcacgggtacttccaaggtacccctgcaaggctttgctgccctcgaaggcatgaatggcattcagaagtttcagatccatcgagatgacaggtccacagatcgcctgccttcagctcacacatgttttaatcagctggatctgcctgcctatgagagctttgagaagctccgccacatgctactgttggctatccaggagtgctctgaaggctttgggctggcctaataaggccctgcccaactccgtggggttttttttaccattgttggacctggggaggggggagttaaaaaaagaaccagaaagaaattgtcaaaaaccaataaatgaaatccaccaactcaccgtgtgtgtcccagctgccccatcttccccagcgcatacctgttcctcttctcattctctccccgccgcctgtttcctcaccttctctcccctttccatgccgtccatgatccccaccccatgtgttttaaaaaggcagtagcctttgcagggacctgtctgtcccaactgtttgaacagtgtgctcctcagattctgtgttcagaaggatttgctgcattgagacttgaaacctttggataggggaaaaaattatatatatatatatttttttgttctgtttgcatttcttaatttgtgcttggaatgtgttgatgtgcacagctaatgattcaatgcgagacaagattggcgtctgtgttgtggaggtttcaaataaagagcactcttcataactcacttttcacaatggagtttttttcaaacttaaaaaaaaaaacaaaaaactcttaagcacatgctaggcatctggagaaaagatggattctccaggaaaccatccctgccctacccgcttgcccacctgcctccaccactggtgcaacttcctccttcagagtcagtttctgcagtcaggagagatgagcagttcaccaggaattgggggtgggggcatctgttttttttttttagaatgggagctgcacttggggatggtgatggtgttagagattgcagcccaggacaaagcatcaccttgctcaaggggaacaaactgcagcaggttgtacaaaacattcagagagctcacttgacccaaccgagggttttacttggtgagcctttctagtagtcttgagtctggggctcagttttagatttttatttcattaatgtttgtttatttctaataaattttaataagcgagtaatttaactaggtcgccagaagaccattatttttgtttgtctatttttgttgtcgtcactccctctctcgtcatctgtctgccagtctgttcacagatcaccttgtagtcccttgtggtttttactccatccagtgcttaaagctgatctaaggacttcgatggttccagccttcaaagaaaaaataatttaataaaaatttagttagaaaaaataaccccaa

SEQ ID NO: 324442 - DNA, 872 bp, Artificial Sequence
  derived and/or modified sequence
tccgcccctcactgcttcgttaggttgtgcgtcatttgcttttcgcttcgcgtagggtgaagctgtagctacttcggctttggtgggagggaggaggggtctggaaagggctgggctcaggcttttcccgtccggtagaggttctcgcgggatcgcgcggaggcggcggtggctcggttactgactgcagtagccgcggaggcggcggcaaggtcttcggctcgtgccgttctaagccggagaattctcgcgggagcagggttacgtcctcgtgggattcgttggcggtggctgaggtagatctctgagaagagaggaaggagtgacaataccaaataaaaactttgtctaaggttcaatggcaaagttcaacctgagttgccaggatgtttatcgtttgtctcccaatatggccaaaaagcatgtatgaaggtcctccagcagcctgacctgagtgggttagtgatccagagaaaccagcaggccaacttggtcaggaaggttcgggaagctgttggagcagtgtggggaatttcccaccaggatgagtatgattggctgtgattttagatcgtaaagctgaaaattgaaatcatgaaagtagacaggactaaactgaagaagacacctactgaggctcctgcagactgcagagccttaatagacaaactcaaagtttgtaatgatgagcaacttctcttggaactgcagcagatcaaaacatggaacattggaaagtgcgagttatatcactgggtggacctgttggaccgcttcgatggaatactggcagatgctggacagacagtggagaatatgtcatggatgctcgtatgtgataggccagaaagagagcaactgaaaatgcttct

SEQ ID NO: 324443 - DNA, 10227 bp, Artificial Sequence
  derived and/or modified sequence
tgaagcctgcccagcggctgtgaatttggccaggccgacatgcagaagctggtgcccaaggatgagaaggcagatggagagcaggatggagctgctggctccatggatgccagcacccagggcctgctggagggcatcggcctggatggagacaccctggcccccatggagacagatgagcccacagccagtgacagcaagggcaagagcaagatcaccccagccatggccgcccgcatcaagcagatcaagcccctgctgagcgccagcagccggctgggccgggccctggccgagctgtttggcctgctggtgaagctgtgtgtgggcagccctgtgcggcagaggaggagccaccacgccgccagcaccaccacagcccccaccccagctgcccggagcacagccagcgccctgaccaagctgctgaccaagggcctgtcctggcagcccccaccctacacccccaccccccgcttccggctgaccttcttcatctgcagcgtgggcttcaccagccccatgctgtttgatgagaggaagtacccctaccacctgatgctgcagaagttcctgtgcagcggcggccacaatgccctgtttgagaccttcaactgggccctgtccatgggcggcaaggtgcctgtgtctgagggcctggagcacagcgacctgcctgatggcactggagagttcctggatgcctggctgatgctggtggagaagatggtgaaccccaccaccgtgctggagagcccccacagcctgcctgccaagctgcctggaggagtgcagaacttcccccagttcagcgccctgcgcttcctggtggtgacccagaaggccgccttcacctgcatcaagaacctgtggaacaggaagcccctgaaggtgtatggaggccgcatggccgagagcatgctggccatcctgtgccacatcctgcggggggagcctgtgatccgggagcggctgagcaaggagaaggagggcagcagaggagaggaggacaccggccaggaggagggcggcagccggcgggagccccaggtgaaccagcagcagctgcagcagctgatggacatgggcttcacccgggagcacgccatggaggccctgctgaacaccagcaccatggagcaggccacagagtacctgctgacccaccccccacccatcatgggcggcgtggtgcgggacctgtccatgtctgaggaggaccagatgatgagggccatcgccatgagcctgggccaggacatccccatggaccagagagctgagagccctgaggaggtggcctgcaggaaggaggaggaggagaggaaggcccgggagaagcaggaggaggaggaggccaagtgcctggagaagttccaggatgctgaccccctggagcaggatgagctgcacaccttcacagacaccatgctgcccggctgcttccacctgctggatgagctgcctgacacagtgtacagagtgtgtgacctgatcatgacagccatcaagagaaatggagctgactacagagacatgatcctgaagcaggtggtgaaccaggtgtgggaggccgcagatgtgctgatcaaggccgccctgcccctgaccaccagtgacaccaagacagtgtctgagtggatcagccagatggccaccctgccccaggccagcaacctggccacccgcatcctgctgctgaccctgctgtttgaggagctgaagctgccctgtgcctgggtggtggagagcagcggcatcctgaatgtgctgatcaagctgctggaggtggtgcagccctgcctgcaggccgccaaggagcagaaggaggtgcagacccccaagtggatcacccctgtgctgctgctgattgacttctatgagaagacagccatcagcagcaagaggcgggcccagatgaccaagtacctgcagagcaacagcaacaactggcgctggtttgatgacaggagcggccgctggtgcagctacagcgccagcaacaacagcaccatcgacagcgcctggaagagcggggagacctctgtgcgcttcaccgctggaagaagacgctacacagtgcagttcaccaccatggtgcaggtgaatgaggagaccggcaacagaagacctgtgatgctgaccctgctgcgggtgccccggctgaacaagaacagcaagaacagcaatggccaggagctggagaagaccctggaggagagcaaggagatggacatcaagaggaaggagaacaagggaaatgacacccccctggccctggagagcaccaacacagagaaggagaccagcctggaggagaccaagatcggggagatcctgatccagggcctgacagaggacatggtgacagtgctgatccgggcctgtgtgtccatgctgggcgtgcctgtggaccctgacaccctgcacgccaccctgcggctgtgcctgcggctgacccgggaccacaagtatgccatgatgtttgctgagctgaagagcaccaggatgatcctgaacctgacccagagcagcggcttcaacggcttcacccccctggtgaccctgctgctgcggcacatcatcgaggacccctgcaccctgcggcacaccatggagaaggtggtgcgctctgctgccaccagcggggccggcagcaccaccagcggcgtggtgtctggcagcctgggcagccgggagatcaactacatcctgcgggtgctgggccctgctgcctgcaggaacccagacatcttcacagaggtggccaactgctgcatcagaattgccctgcctgccccccggggcagcggcacagccagtgatgatgaatttgagaacctgcgcatcaagggccccaatgctgtgcagctggtgaagaccacccccctgaagcccagccccctgcccgtcatcccagacaccatcaaggaggtgatctatgacatgctgaatgccctggccgcctaccacgcccctgaggaggccgacaagagtgaccccaagccaggagtgatgacccaggaggtgggccagctgctgcaggacatgggagatgatgtgtaccagcagtaccgcagcctgacccggcagagcagtgactttgacacccagagcggcttcagcatcaacagccaggtgtttgctgctgatggagccagcacagagaccagcgccagcggcaccagccagggcgaggccagcaccccagaggagagcagagatggcaagaaggacaaggagggggaccgggccagcgaggagggcaagcagaagggcaagggcagcaagcccctgatgcccaccagcaccatcctgcggctgctggccgagctggtgcgctcctatgtgggcatcgccaccctgattgccaactacagctacacagtgggccagagcgagctgatcaaggaggactgcagcgtgctggcctttgtgctggaccacctgctgccccacacccagaatgctgaggacaaggacaccccagccctggcccggctcttcctggccagcctggccgccgccggcagcggcacagatgcccaggtggccctggtgaatgaggtgaaggccgccctgggccgggccctggccatggccgagagcacagagaagcacgcccggctgcaggccgtgatgtgcatcatcagcaccatcatggagagctgccccagcaccagcagcttctacagcagcgccacagccaagacccagcacaacggcatgaacaacatcatccgcctcttcctgaagaagggcctggtgaatgacctggcccgggtgccccacagcctggacctgagcagccccaacatggccaacacagtgaatgctgccctgaagcccctggagaccctgagccgcatcgtgaaccagcccagcagcctgtttggcagcaagagcgccagcagcaagaacaagtctgagcaggatgcccagggcgccagccaggacagcagcagcaaccagcaggaccctggagagcccggggaggccgaggtgcaggaggaggaccatgatgtgacccagacagaggtggctgatggagacatcatggatggagaggccgagacagattctgtggtgattgctggccagcctgaggtgctgagcagccaggagatgcaggtggagaatgagctggaggacctgattgatgagctgctggagagagatggcggcagcggcaacagcaccatcatcgtgagccgcagcggggaggatgagagccaggaggatgtgctgatggatgaggcccccagcaacctgagccaggccagcaccctgcaggccaacagagaagattccatgaacatcctggaccctgaagatgaggaggagcacacccaggaggaggacagcagcggcagcaatgaagatgaagatgacagccaggatgaggaggaggaggaggaggaggatgaagaagatgaccaggaggatgatgaaggagaggagggagatgaagatgatgatgatgatggcagcgagatggagctggatgaggactacccagacatgaatgccagccccctggtgcgctttgaaagatttgaccgggaggatgacctgatcattgaatttgacaacatgttcagcagcgccacagacatcccccccagccctggcaacatccccaccacccaccccctgatggtgagacatgctgaccacagcagcctgaccctgggcagcggcagcagcaccacccggctgacccagggcatcggccgcagccagaggaccctgcggcagctgacagccaacacaggccacaccatccacgtgcactacccaggcaaccggcagcccaaccccccactcatcctgcagaggctgctgggccccagcgctgctgctgacatcctgcagctgagcagcagcctgcccctgcagagccggggccgggcccggctgctggtgggcaatgatgatgtgcacatcatcgcccggagtgatgatgagctgctggatgacttcttccatgaccagagcacagccaccagccaggccggcaccctgagcagcatccccacagccctgacccgctggacagaggagtgcaaggtgctggatgctgagagcatgcatgactgtgtgtctgtggtgaaggtgtccatcgtgaaccacctggagttcctgagagatgaggagctggaggagcggcgggagaagaggaggaagcagctggccgaggaggagaccaagatcacagacaagggcaaggaggacaaggaaaatagagaccagagcgcccagtgcacagccagcaagagcaatgacagcacagagcagaacctgagtgatggcacccccatgccagacagctaccccaccacccccagcagcacagatgctgccaccagcgagagcaaggagaccctgggcaccctgcagagcagccagcagcagcccaccctgcccaccccaccagccctgggggaggtgccccaggagctgcagagccctgctggggagggcggcagcagcacccagctgctgatgcctgtggagcctgaggagctgggccccacccggcccagcggggaggccgagaccacccagatggagctgagccctgcccccaccatcaccagcctgagccctgagagagctgaggacagtgatgccctgacagctgtgagcagccagctggagggcagccccatggacaccagcagcctggccagctgcaccctggaggaggccgtgggggacaccagcgctgctggcagcagcgagcagcccagggctggcagcagcaccccaggagatgcccccccagctgtggccgaggtgcagggccgcagtgatggcagcggggagagcgcccagcccccagaggacagcagccccccagccagcagcgagagcagcagcacccgggacagcgctgtggccatcagcggggctgacagccggggcatcctggaggagcccctgcccagcaccagcagcgaggaggaggaccccctggccggcatcagcctgcctgagggcgtggaccccagcttcctggccgccctgcctgatgacatcagaagagaggtgctgcagaaccagctgggcatccggccccccaccaggacagcccccagcaccaacagcagcgccccagctgtggtgggcaaccctggggtgacagaggtgtccccagagttcctggccgccctgcccccagccatccaggaggaggtgctggcccagcagagagctgagcagcagaggcgggagctggcccagaatgccagcagtgacacccccatggaccctgtgaccttcatccagaccctgcccagcgacctgcggcgctctgtgctggaggacatggaggacagcgtgctggccgtgatgcccccagacattgctgctgaggcccaggccctgcggcgggagcaggaggcccggcagaggcagctgatgcatgagcggctgtttggccacagcagcaccagcgccctgagcgccatcctgcggagccctgccttcaccagccggctgagcggcaacagaggagtgcagtacacccggctggccgtgcagaggggcggcaccttccagatgggcggcagcagcagccacaaccggcccagcggcagcaatgtggacaccctgctgcggctgcggggccgcctgctgctggaccacgaggccctgagctgcctgctggtgctgctgtttgtggatgagcccaagctgaacaccagccggctgcaccgggtgctgaggaacctgtgctaccacgcccagaccaggcactgggtgatccgcagcctgctgagcatcctgcagaggagcagcgagagcgagctgtgcatcgagacccccaagctgaccaccagcgaggagaagggcaagaagagcagcaagagctgtggcagcagcagccatgaaaatcggcccctggacctgctgcacaagatggagagcaagagcagcaaccagctgtcctggctgtctgtgtccatggatgctgccctgggctgcaggaccaacatcttccagatccagaggtctgggggcaggaagcacacagagaagcacgccagcggcggcagcacagtgcacatccacccccaggccgcccctgtggtgtgcagacatgtgctggacaccctcatccagctggccaaggtgttccccagccacttcacccagcagaggaccaaggagaccaactgtgagagtgaccgggagcggggcaacaaggcctgcagcccctgcagcagccagagcagcagcagcggcatctgcacagacttctgggacctgctggtgaagctggacaacatgaatgtgtccaggaagggcaagaacagcgtgaagtctgtgcctgtgtctgctggaggagagggggagaccagcccctacagcctggaggccagccccctgggccagctgatgaacatgctgagccaccctgtgatccgccgcagcagcctgctgacagagaagctgctgcggctgctgagcctcatcagcatcgccctgcctgagaacaaggtgtctgaggcccaggccaacagcggcagcggggccagcagcaccaccacagccaccagcaccaccagcaccaccaccaccacagctgccagcaccacccccaccccacccacagcccccacccctgtgaccagcgccccagccctggtggccgccacagccatcagcaccatcgtggtggccgccagcaccaccgtgaccacccccaccacagccaccaccaccgtgtccatcagccccaccaccaagggcagcaagagccctgccaaggtgtctgatggcggcagcagcagcacagacttcaagatggtgagcagcggcctgacagagaaccagctgcagctgtctgtggaggtgctgaccagccacagctgcagcgaggagggcctggaggatgctgccaacgtgctgctgcagctgagcagaggagacagcggcacccgggacacagtgctgaagctgctgctgaatggagcccggcacctgggctacaccctgtgcaagcagatcggcaccctgctggccgagctgcgggagtacaacctggagcagcagaggcgggcccagtgtgagaccctgagcccagatggcctgcctgaggagcagccccagaccaccaagctgaagggcaagatgcagagcagatttgacatggccgagaatgtggtgattgtggccagccagaagaggcccctgggcggccgggagctgcagctgcccagcatgtccatgctgaccagcaagaccagcacccagaagttcttcctgcgggtgctgcaggtgatcatccagctgagagatgacacccggcgggccaacaagaaggccaagcagacaggccgcctgggcagcagcggcctgggcagcgccagcagcatccaggccgctgtgcggcagctggaggccgaggctgatgccatcatccagatggtgcgggagggccagagggcccggcggcagcagcaggccgccaccagcgagagcagccagagcgaggcctctgtgcggcgggaggagagccccatggatgtggaccagcccagccccagcgcccaggacacccagagcatcgccagtgatggcaccccccagggcgagaaggagaaggaggagaggcctcctgagctgcccctgctgtctgagcagctgagcctggatgagctgtgggacatgctgggggagtgcctgaaggagctggaggagagccatgaccagcacgctgtgctggtgctgcagcctgctgtggaggccttcttcctggtgcacgccacagagcgggagagcaagccccctgtgcgggacacccgggagagccagctggcccacatcaaggatgagcccccacccctgagccctgcccccctgaccccagccacccccagcagcctggaccccttcttcagccgggagcccagctccatgcacatcagcagcagcctgcccccagacacccagaagttcctgcgctttgctgagacccacaggacagtgctgaaccagatcctgcggcagagcaccacccacctggctgatggcccctttgctgtgctggtggactacatccgggtgctggactttgatgtgaagaggaagtacttccggcaggagctggagcggctggatgagggcctgaggaaagaagacatggctgtgcacgtgcggcgggaccacgtgtttgaggacagctaccgggagctgcacaggaagagccctgaggagatgaagaaccggctgtacatcgtgtttgaaggagaggagggccaggatgctgggggcctgctgcgggagtggtacatgatcatcagccgggagatgttcaaccccatgtatgccctcttccgcaccagccctggggacagagtgacctacaccatcaaccccagcagccactgcaaccccaaccacctgagctacttcaagtttgtgggcagaattgtggccaaggctgtgtatgacaaccggctgctggagtgctacttcaccaggagcttctacaagcacatcctgggcaagtctgtgcgctacacagacatggagagcgaggactaccacttctaccagggcctggtgtacctgctggagaatgatgtgtccaccctgggctatgacctgaccttcagcacagaggtgcaggagtttggagtgtgtgaggtgcgggacctgaagcccaacggggccaacatcctggtgacagaggagaacaagaaggagtatgtgcacctggtgtgccagatgaggatgaccggggccatcaggaagcagctggccgccttcctggagggcttctatgagatcatccccaagaggctcatcagcatcttcacagagcaggagctggagctgctgatcagcggcctgcccaccattgatattgatgacctgaagagcaacacagagtaccacaagtaccagagcaacagcatccagatccagtggttctggagggccctgcggagctttgaccaggccgaccgggccaagttcctgcagtttgtgacaggcaccagcaaggtgcccctgcagggctttgctgccctggagggcatgaatggcatccagaagttccagatccacagagatgacaggagcacagaccggctgcccagcgcccacacctgcttcaaccagctggacctgcctgcctatgagagctttgagaagctgcggcacatgctgctgctggccatccaggagtgcagcgagggcttcggcctggcctag

SEQ ID NO: 324444 - DNA, 10227 bp, Artificial Sequence
  derived and/or modified sequence
tgaagcctgcccagcggctgcgagttcggccaggccgacatgcagaagcttgtgcctaaagatgaaaaagctgatggagaacaagacggcgccgcaggatctatggatgcaagcacccaggggcttctcgagggaattggcctggatggggacacactggcacccatggaaactgacgaacccaccgcaagtgatagtaagggcaagagcaaaattacacccgcgatggcagcacgaatcaaacagataaagcccctactctcggcaagcagcagactcggtcgggcgcttgcagagctcttcggcctcttggtaaagctgtgcgttggaagtccagtccgtcagcgcagaagccatcacgccgcctctaccacgacggccccaactccagccgctcgctctaccgccagcgcactcacaaagctactcaccaaagggctgagttggcaaccccctccttatacacctactccacggtttcgcctgacatttttcatttgtagcgtgggcttcacatctcccatgctcttcgacgagaggaaatacccataccacctcatgcttcaaaaattcctgtgctctgggggccataatgcactgttcgagaccttcaattgggctctgtctatgggaggcaaggtacccgtctcagagggccttgaacactctgacctccccgatggaacaggcgaattcctcgatgcctggctcatgttagttgagaagatggtcaatcctaccactgtgctcgagtccccccatagccttcccgccaagcttcccggaggagtacagaatttcccgcaattttctgccctgagatttctagtggtgacccagaaagccgcttttacatgtattaaaaatttatggaatcgcaagccacttaaggtgtatggcggccgaatggcagaatcaatgttggccattctgtgtcacatcttgaggggtgagcccgttataagggagaggctctccaaagagaaggaagggtctcgaggagaagaagacacaggacaggaggaaggaggctctcgccgcgagccccaggtgaatcagcagcagttacagcaattgatggacatgggtttcaccagagaacatgcgatggaggccttgctgaatacctcaactatggagcaggcaacggaataccttctcactcacccacctcccatcatgggcggtgttgtccgtgatttgtcgatgagtgaagaggaccagatgatgcgggctatagcaatgtcattggggcaggacattcccatggaccagcgggctgagtcaccagaggaggtcgcttgtcggaaggaggaagaagagagaaaggctcgggaaaaacaggaggaagaggaagccaaatgtcttgaaaaattccaagacgccgaccctctggagcaggatgagctgcacaccttcacggatactatgttacccgggtgttttcatctcctggacgagctccccgataccgtgtacagagtgtgcgatttgataatgaccgcaatcaaaagaaatggcgctgattaccgggacatgattctgaaacaggtagtgaaccaggtttgggaggcggcagatgtgttaatcaaggccgcactccctctcaccactagtgataccaaaacagttagtgagtggatctcccagatggccaccttgccacaggccagcaacctggcaacgaggatcctcctattaaccctgctgttcgaggagctgaagctgccctgcgcttgggtggtagaatcaagcggtatcctgaacgtcttaattaagttgttagaagtcgtgcagccttgtttacaagccgccaaggagcagaaggaggtccaaacacccaagtggataacgcccgtgctgctgctgattgatttttacgagaagacagcaatctcctccaagcgacgggctcaaatgaccaagtacctgcaatccaatagcaacaattggagatggttcgacgacaggtccgggaggtggtgctcatacagtgcttctaacaactctaccatagacagcgcttggaaaagcggcgagacaagtgtgaggttcactgctggtaggcggagatatactgttcaatttacaacaatggtgcaggtcaacgaagagaccggcaatcgcagacccgtgatgctcactctcctgcgggtacctaggcttaacaagaactccaaaaattcaaacggtcaggagcttgaaaagacacttgaagagtcaaaagaaatggatattaagagaaaggaaaataaagggaacgataccccattggcgttagaaagcacaaatacggagaaagagacctcacttgaagagacgaagattggagaaatcctgatacaggggcttacggaggatatggtcaccgtcctgatccgggcgtgtgtgtctatgctcggcgtgcctgtggaccccgacaccttgcacgccacattgcgcctgtgtctgaggttaactcgagatcacaaatacgccatgatgttcgccgaattgaagtcaacaaggatgattttgaacttgacacagagctccggttttaatggtttcacgcccctcgtcaccctcctgctgcgccacatcattgaggatccttgcaccctgagacacacaatggagaaagtggtgcgaagcgctgccacatctggcgccggcagcacaaccagcggagtggtgagtgggagcttgggcagtcgggaaatcaattacattctgcgagtgctgggccctgccgcttgtcgcaaccctgacatattcaccgaagtggcgaactgttgtattagaatcgctcttcctgccccgagggggtccgggaccgccagcgacgatgagtttgagaacttacggatcaaaggacccaatgccgtccaactcgtcaaaacaacccctctaaaacccagtcccctgcccgtcatacctgacaccattaaggaggtgatctatgatatgctgaacgctctggccgcgtatcacgccccagaggaggcagataagtcagatcccaagcctggggttatgactcaagaggtcgggcaacttctccaggacatgggagacgatgtctaccagcagtatagaagcctgacccggcaatcatcagacttcgatacccagtctgggttctctattaattcccaagtttttgccgcagacggggcctcgacagagacatctgcatctggcaccagccagggcgaagcaagcactcctgaagaatcgcgggacgggaaaaaagataaggagggcgacagagcctcagaggaagggaaacaaaagggaaaaggcagcaaacccctgatgccaacatcaacaatccttaggctactggcggagctggtgcgaagttacgttggaatcgctaccctgattgcaaattatagctacacagtaggacagtccgaactcattaaggaagactgctccgtgctggcctttgtgctggaccacctgttgccccacacacagaacgctgaggataaagacacgcccgcactggccaggctgtttctcgcaagcttggccgcggccggaagcggcactgacgcccaggtggcacttgtaaatgaagtgaaggctgcactgggccgagctctcgcaatggctgaatccaccgaaaagcacgctcgcctgcaagctgttatgtgcattatatcgacaatcatggagtcatgtcctagtacctcgtctttctattctagtgccactgcgaagactcaacataatggtatgaataacatcatcagactgttcctcaagaagggccttgtgaatgaccttgcccgcgtgccccactcacttgatttgagcagtccgaacatggccaacaccgtgaatgccgcattgaaaccgctggaaacactgagtcgtatcgtcaatcaaccctcatctctgtttggctcaaaatccgcatcatccaaaaacaagagtgagcaggacgctcaaggggccagccaggacagtagtagtaatcagcaggatcctggcgaaccaggggaagccgaggtgcaggaagaggaccacgatgttacacaaaccgaagtcgcagatggtgacattatggacggcgaagcagaaacagatagcgtcgttattgctggtcaacctgaggtgttatctagccaagagatgcaggtggagaacgaacttgaggatcttatcgacgaactcttggaaagagatggaggtagtggaaattccacaatcattgtgtctcgctcaggtgaggatgagtcccaggaggatgtgctgatggacgaggccccctctaatctgagccaagcctccaccttgcaggcaaaccgcgaagactccatgaatatactcgaccccgaggacgaggaggaacacacacaggaggaagacagcagcggatcaaacgaggacgaggacgattctcaggatgaggaggaagaggaagaagaagacgaagaggacgaccaagaggacgatgaaggggaggaaggcgatgaagatgatgacgatgatggctcggagatggagttagatgaagattatcccgacatgaacgcaagccctctcgttcgcttcgagagatttgaccgagaggacgacctgatcatcgaatttgacaatatgttttcttctgccaccgatattcctcccagtcctggcaacatcccaaccactcatccactgatggtccggcatgccgatcacagctctctgacactgggcagcgggtcctccacaactcggctgacccagggtattggccggagtcagaggacgttgaggcaactgacggccaacacagggcacactattcatgtgcactatccagggaatcgacagcccaacccgcccctgatcctccagaggctcctgggcccatcagcagccgctgacatactgcagctgtcaagctccctcccactgcagtcaagaggaagagcccgcctgctggtcggtaatgatgatgtgcacattattgcacgatccgacgatgaactcctcgatgatttcttccatgaccaatctaccgctacatcccaggccggaacattgtctagtattcccacagcactgactcgttggaccgaagaatgcaaagtgctggatgccgagagcatgcatgactgcgtgagtgtggtcaaagtctcaattgtgaaccatctggagtttctgagggatgaggagttggaggagagaagggagaagcgcagaaaacagctagcggaggaagagacgaagatcacggataagggaaaggaagataaagaaaatcgcgatcagtcagcccagtgtaccgcctccaagtccaatgatagtaccgagcagaacctgagcgatggcacacccatgcccgattcctatcccaccacccctagtagtaccgatgcagcaacaagcgagtcaaaggagactcttggcactctccagagtagccagcagcagcccactctcccaaccccccccgcgctgggagaagtaccacaagagctacagtcgccagcgggcgaaggtgggagcagtacccagctcctgatgcctgtcgagccagaggaactcggaccgaccaggccaagcggagaggctgagacaacccaaatggagctgagtcccgcacccacgatcaccagcctgtctcccgaacgagctgaggactcagatgctttgacagctgtgagttcccagctcgaggggagcccaatggacacatcttctcttgccagctgtaccctggaggaggctgtgggtgacacatcagccgccgggtcatctgaacagccccgagccggatcttccacccccggcgacgcccctcctgccgttgctgaggttcagggaagatctgatggctcaggagaatcagctcagcctccagaggactcgagcccaccggcaagttccgagagctcaagcacccgggattctgctgtggccatttccggtgccgattcaaggggaattcttgaggagccactcccaagtacatccagcgaggaagaggatcccttagccggaatttcactgccagagggcgttgacccatccttcctggcagctctgcccgacgatatccggagggaagttctgcagaatcaactggggattaggcctcctactagaaccgcgccatccacaaattcctccgcacccgccgtggttggaaatccaggggtcacagaggtcagcccagaatttctcgccgctctgccacccgcaatccaagaggaggtgctcgcccagcaaagggcagaacaacaacggagggaactggcacagaatgcaagtagcgacacacccatggatccagtcaccttcattcagaccctgccgagcgaccttcgccgaagcgtgctcgaggatatggaggatagcgtcttagcagtgatgcctcccgatatcgccgccgaagcccaggcactgaggagggagcaagaggcgcggcagaggcagttaatgcacgagaggctcttcgggcattcatctactagtgccttgtctgccatacttagatccccggcgtttaccagcaggttgtcaggcaacagaggggtgcaatatacccggctcgccgtacagcggggaggcactttccaaatgggcggatcaagcagccacaaccgacccagcgggtctaatgtcgacacattgctgcgactccggggcagactcctacttgaccacgaagcattatcttgccttcttgtgctgctattcgttgacgagcccaagctaaatacaagccgattacaccgagtcctgcggaatctatgctaccatgctcagactaggcactgggtgatacggagcctactgtcaatcctgcagcgttcgagcgagtctgagctgtgtatcgagacccccaaactgaccactagtgaggagaagggaaagaagtcaagcaagtcttgcgggtctagctctcatgaaaatagaccgctcgacttgctgcataagatggaaagcaaatcctctaaccagttgagctggttatccgtgagtatggatgctgccctgggttgtcgcacaaatatatttcagatccagcggtccgggggaaggaaacacactgaaaagcacgcatcagggggatcaacagttcacattcatccgcaggcagctcctgtggtctgcaggcacgttctagatacattgatccagcttgccaaagtgtttccaagccattttacccagcagcggacaaaagaaactaactgcgagtccgacagggaaagggggaataaagcctgtagcccatgctcttctcagtcaagctcatcagggatttgtacagatttctgggacctcctggtcaaactggataatatgaacgtgagcaggaagggaaagaatagcgtgaagagtgtgcccgttagcgcggggggtgagggggaaacatcgccgtacagcctcgaggcctcacctctgggacagttaatgaatatgttgagtcacccagtgattcgacgctccagcctgctgactgagaagttgttgagactactgagcctgatttctatcgcattacccgaaaataaagtctctgaggcccaggcaaactcaggatctggcgcatcgagtaccaccaccgccacctcgacaactagtactacaaccactactgcagcatcaactacaccaaccccgccaacagcccctactccagtgacatccgcccctgctttggtggcggctacagcaatcagtactatcgttgtggccgcatcaaccacggtgactacccccactaccgcaacgacaacggtgtctatctcccctactacgaagggttccaaatctcccgctaaggtgtccgacggaggttcctcatctactgactttaagatggttagctccggtctgaccgagaatcagctgcagctcagcgtcgaggtcctgacgagccactcatgttccgaggaaggcctcgaggacgcggccaacgtactcctgcagcttagcaggggagacagcggcacccgagatacagtccttaagctgctactgaatggcgctagacatctggggtacacgctttgcaagcaaatcggcacactgcttgccgagctgagagaatacaatctcgagcagcagaggcgtgcacaatgtgagacactcagtcctgatggcctgccagaggagcagcctcagacgacaaagctgaagggaaagatgcagtcaagatttgatatggcagagaacgtggtgattgttgccagccaaaagagacccctcggtggacgggagctgcagctgccttccatgtccatgttgacatcaaaaaccagcacacagaagttcttcctcagagttctgcaggtgattatacagctgagggacgatacccgaagggccaacaagaaggccaaacaaaccggacgcctcggctctagcgggctcggcagtgccagctccatccaggccgccgtgcggcagctggaagcagaggccgacgccattatccagatggtgcgtgaaggccaaagagctcggcgacaacagcaggcagctaccagcgagtcttctcagtccgaggccagcgtcagaagggaagagtctccgatggatgtggatcagcctagcccgagtgcccaagacactcagtccatcgccagcgacgggactccccagggtgagaaggagaaagaggagcgccctcctgaactacccctcttgtctgagcagctgtcactagacgaattatgggacatgttgggagagtgtctcaaagagctggaagagtcacacgaccaacatgctgtgctggtccttcagcctgcagtggaagcgttttttctcgtccacgccaccgaacgggagtctaaaccacctgtgcgggacaccagagaatcccagttggcgcatattaaagacgagccacccccactcagccctgccccactcacccctgcaactccttcgagcctcgatccgttctttagcagggaaccaagctcaatgcacattagctccagtctcccacccgacacccagaaatttctgcgattcgcagagacacataggaccgtgttaaaccagattcttcgccaatctacaactcatcttgcagatggcccttttgccgttctggtcgattacatcagggtgctggatttcgacgtgaagagaaagtactttagacaggaactggagaggctcgatgagggcttacggaaagaggacatggctgtacacgtgagacgggaccatgtattcgaagactcatatagagagctgcacagaaaatcccccgaagagatgaagaaccgcctgtacatagtgtttgaaggggaggaggggcaggacgccggggggctgctcagggagtggtacatgatcatctcccgagagatgtttaaccctatgtacgcgctctttcggacctcccccggcgatcgtgtaacttataccatcaaccccagtagccactgtaatcctaaccatctgtcctacttcaagtttgttggtcgcattgtagccaaagcggtttatgataatagattgctggaatgctactttacccggtcattctacaaacacattctaggaaagtccgtccgctatactgatatggaatccgaagactaccatttttaccagggcctggtgtacctactagagaatgatgtcagcaccctcggctacgacttgacatttagcaccgaggtgcaggaatttggagtttgtgaggtccgtgaccttaagccaaatggagccaatattctcgtgacagaggagaacaagaaagagtatgtgcatttagtgtgtcagatgcgcatgaccggggcgatccgcaaacaactggccgcgttcttggaagggttttacgagattattcccaagcgactgattagcatcttcacagagcaggagttagaacttttgatctctggtttgcccaccatcgatatcgacgatcttaagtcaaataccgagtatcacaaataccagtcaaatagcattcagatccaatggttctggagagcccttaggagtttcgaccaggcagatcgggctaagttccttcagttcgtcacaggaacctccaaagtgcctttacaaggtttcgctgcgttagaaggaatgaacggtatacagaagttccagatccatcgagacgatcgctccactgatcggttaccaagcgcacatacatgttttaatcagcttgatctgccggcatatgaatctttcgaaaagttacgtcatatgttgctgctcgccattcaagaatgcagcgaggggttcgggctggcctag

SEQ ID NO: 324445 - DNA, 10226 bp, Artificial Sequence
  derived and/or modified sequence
taatcccttccgtccggatgtgagttcggacaggctgatatgcagaaattggtaccgaaagacgaaaaagcagacggtgaacaagacggggctgccggttcaatggacgcatctacacaaggcttgctcgaggggatcggcctcgatggagacacactggccccaatggaaacggacgagccaacagcctccgactcgaaggggaaatccaaaatcactcccgcaatggccgctaggatcaagcagatcaaacccctcctaagcgccagttctagactgggtcgagcactcgccgaactttttggcctgctggttaagctgtgtgtcggatcacccgtgcgccaacggcgttctcaccatgctgcttcgacgaccactgcccctacgcccgctgcccgaagtacagctagcgctctcacaaaactgctgaccaaggggctgtcttggcagcctcccccttacaccccgactccccgtttcagattaaccttcttcatctgtagcgtaggctttaccagtccaatgctcttcgatgaacggaagtacccgtatcacctgatgctgcagaagttcctgtgcagcggtggccataatgcacttttcgaaacttttaattgggccttgagcatgggcggaaaagtcccagtgtcagaggggctcgagcactctgatttacccgacggcaccggcgaattcttagatgcttggctcatgctggtcgaaaaaatggttaacccaacaactgtactggaaagccctcactcactgcccgctaaactccctggcggtgtccaaaatttccctcagttttcagcactgagattcctggtggtaacacagaaagcagccttcacttgcataaagaatctctggaacaggaagccactcaaggtgtacggagggcgaatggcagaatccatgctcgctatcctttgccatattttaagaggggagcctgtaatccgagagaggctgtctaaagaaaaagaaggatccaggggggaagaagacacaggtcaggaagaaggaggttcgcggagagagccccaggttaatcagcagcagctccagcagttaatggacatggggtttacacgtgagcatgctatggaggctcttctcaacacatctactatggagcaggcgacagaatacctgctgacgcaccctccgccaatcatgggcggagttgttagggatctaagtatgagtgaggaagaccagatgatgcgggctattgctatgtccttgggtcaggatatccctatggatcagagagccgaatcacctgaggaagtagcatgccgaaaggaggaagaggaaagaaaggctcgcgagaagcaggaagaggaggaggctaaatgcctggaaaagtttcaggatgccgatcccttggaacaggacgagctgcatacttttaccgacaccatgctccctggatgtttccatctgcttgacgaactcccagacaccgtgtatcgtgtttgcgaccttatcatgaccgctatcaagcgaaacggcgctgattatagagatatgatcctgaaacaagttgttaaccaagtgtgggaagctgctgatgttttgatcaaagccgctctgccactgactacttccgataccaagacggtgagtgagtggattagtcagatggccaccttgcctcaggcctccaatctggcaactagaatcctcctacttaccctcttattcgaggagttgaagttaccctgcgcttgggtggtcgagtcttcagggattttgaatgtcctgataaaactcctggaagtggtgcaaccctgcctgcaggctgccaaggaacagaaagaggtgcaaacaccaaagtggatcacacctgtgctgctactgattgatttctacgaaaaaactgccatctcgtctaagcggagggcccagatgacaaagtacctgcagtccaacagcaacaactggcggtggttcgacgacaggagtggtcggtggtgttcttattcggcttcaaacaactccacaattgacagcgcctggaagtctggagaaacgtccgtcaggttcacagccggtcgcagacgatataccgtacagtttacgacaatggttcaggtaaatgaagagaccggcaacagaaggcccgtgatgctcaccctgttgagagtgcctcgactgaacaaaaattcaaaaaactctaacggacaggagctggaaaaaaccctcgaggagtccaaggaaatggacatcaagaggaaagagaataagggtaatgatactcccctggcgctggaatccaccaacaccgaaaaagaaacaagcttagaagaaactaaaatcggggagatcttgatacaggggttaaccgaggacatggttactgtcctgattcgggcttgcgtcagtatgttaggcgttcctgtggatcctgatactctgcatgcaaccctccggctctgcctgcgactgacgagagaccacaaatacgctatgatgtttgccgagctcaaatctacccggatgatcctgaacttaacacagtcttccggattcaatgggtttacccctctagtgactctgctgcttaggcacataatagaggacccatgtaccctgagacatacaatggagaaagtcgtccgttccgccgctacatccggcgcaggcagtacgacgagcggcgtggtgtctggcagtctcggatcccgagagatcaactatatcctgcgcgtgctgggtcctgctgcttgtagaaaccccgatatttttacagaagtggccaactgctgtatacggattgcattaccagcccctagagggtctggtaccgcgtcagacgacgaattcgaaaacttgaggatcaaggggccaaatgccgtgcaattagttaaaactacaccccttaaaccctcaccattgccggtaatccctgatactattaaggaggtgatctatgatatgctgaatgccctggctgcctaccacgccccagaggaggcagacaagagcgatcccaagcccggagtgatgacgcaggaagtcggccagctgctccaggacatgggcgatgatgtctaccagcaatatcggtctctgactcgccagagtagcgactttgacacacaaagtgggttctcaatcaattcccaggtgttcgctgctgatggcgcaagtaccgagacctcggcctcgggaactagtcagggcgaggctagcacaccagaagaatccagggacgggaagaaggacaaggagggtgatagggcctccgaagaggggaagcaaaaaggcaaagggtctaagcccttgatgcctaccagtacgatcctgaggttactggcagagctggtgagatcatatgtgggcatcgctacgctgatagccaattacagctacacggtcgggcagtccgaactgattaaagaggactgctctgtactcgcatttgtcttagatcacctcctgcctcacacccaaaatgccgaggacaaggacacgcctgccctggctcggttgttccttgcttcactggcagcggctggctccggcaccgacgcacaagttgccctggtcaacgaagtaaaggccgcattaggtcgggcactggcaatggctgagtctaccgaaaaacatgcacgtctccaggccgtgatgtgcattattagcacgattatggagagttgcccgagcacctcatccttttattcctccgcaaccgcgaagacccagcacaacggcatgaacaatatcatcaggctgtttctgaagaaggggttggtcaatgatttagcgagagtcccccattcgctggacctgtcctcccccaacatggccaacaccgtcaatgccgcactaaagccactggaaaccctgtcaaggattgttaatcagccttccagcctcttcggctcaaagtccgcctccagcaagaacaaaagtgaacaggatgcccagggagcaagtcaggacagcagttctaatcagcaagatccaggagaaccaggagaagccgaggtacaggaggaggaccacgatgtcactcagacagaagtagccgacggcgacattatggatggagaggctgaaaccgatagcgtggtgatcgccggacagccggaggtcttgagttcccaggaaatgcaagtagaaaacgagctggaggatctgattgacgaactcctggagcgcgacggcggatctggaaactccactatcattgtgagcaggagtggagaagacgagtctcaggaggatgtgctgatggatgaggctccatcaaatctcagccaggcctctaccctgcaggccaatagagaagattctatgaatattctcgatcctgaggacgaggaagaacacactcaagaggaggattcctctggctcgaacgaggacgaggacgattcacaagatgaagaagaggaggaggaagaagacgaggaggacgatcaagaggacgacgagggggaagaaggcgacgaggacgatgacgatgatggatctgagatggaattagacgaggactatcccgacatgaatgccagcccgctggtgcgttttgaacgctttgaccgcgaggatgacctaattattgagtttgacaatatgttttcatccgcgacagacatacctccaagcccagggaatattcctacaacacacccgctaatggtgaggcacgctgaccattcatccctgacgctgggctccgggtcgtccacaacacgcctcacccaaggcatcggcaggtctcagcggacactgagacagcttactgctaatacaggtcataccatacacgtgcattatccaggaaaccgtcaacctaatcctcccctgattcttcagaggctcctcggaccatcagccgctgcagacatcttgcagcttagcagttctctaccgctccagtccaggggcagagccaggctcctggtcgggaatgacgacgttcacataatagcgagaagtgacgatgagctactggacgacttcttccatgaccaaagcacagctactagccaggctggtaccctcagcagcattccaacagccctgacacggtggacggaggaatgtaaagtgcttgacgcagaatctatgcacgactgcgtgtcagtcgtcaaagtttccatcgtgaatcacttggagttccttcgggatgaagaactcgaggagagacgagagaagaggaggaaacagctcgcggaagaagagacaaaaatcacagataaagggaaggaagataaagagaaccgagaccagagcgcccagtgtacagcctcaaaatcaaacgacagcaccgagcagaacctcagtgacgggacccctatgccggattcatatcctacgacacctagttctaccgacgccgctacatcagagtcaaaggaaacgcttgggaccctccagtccagtcagcagcagcctacgctgccaacccccccagcgctgggggaagtgcctcaggagctgcagtcccctgccggagaagggggatcgagtacccagctgctaatgcctgtggagccagaggagttgggtcctacccggccttcaggcgaggccgagaccactcaaatggaactttccccagcaccgactataacctctctgtcccctgagagggcggaggattctgacgccttgactgcggtgtcctcccagctggaggggtcaccaatggacacctcttcactcgcctcttgcactctcgaggaggctgtgggggatacctctgctgccggaagcagcgaacaaccccgtgcaggatcctctacgcccggagacgccccacccgcagtggccgaagtacagggtcggtcggatggaagtggagaaagtgcgcagcctccagaagactcaagcccacccgctagctccgaaagttcttctacgagggattcagccgtcgccatttccggggcagacagccgcggtatccttgaggaacccttgccgtcaacatcctcagaggaggaggacccgctggctggaatctccctaccagagggagtggatccttcctttctcgcagccctccctgatgatatcagacgcgaagtcctgcagaaccagctcggtatcaggcctccaacaaggaccgccccttccacaaactcttccgccccagcagtcgtaggaaacccaggcgtcacagaggtctcccccgagtttcttgcagccttgcccccagctatccaggaggaggtcctggcccagcagcgtgcagagcagcaaagacgcgagctggctcagaacgcctctagtgatacccccatggatcccgtgacattcatacaaaccttgccctcagacctgcgcaggtcagtgctggaggatatggaggattctgttttggctgtgatgcccccagacatcgcagcagaggctcaggccctgcggagagagcaggaggctcgccagcgccagttaatgcatgagcgtttgtttggtcactcatctaccagcgcactgagcgccatactccgaagcccagctttcacgagtcggctgtctggaaacaggggggtccagtacactcgactagcggtgcagcgagggggaacttttcagatgggaggtagttccagccacaatcgcccaagcggtagcaatgttgacacactactgcggcttagaggacggcttttactggatcacgaggccctttcatgtctactggttttgctgttcgtggatgaaccgaaacttaacacgagccggctgcaccgcgtgcttcgaaacctgtgctaccatgctcagactaggcattgggtcatccggtcattgctcagtattctgcagagatcttctgaatccgagctctgcatcgagacacccaagttgaccacatccgaggaaaaaggcaaaaaatcgagcaagagctgcggcagcagtagccacgaaaataggccactggacctcctgcataagatggagtcaaaatcgagtaaccagctgtcctggctgtccgtctctatggatgctgccctaggctgcagaacaaacatattccagattcagaggagcggtggacgcaaacacactgaaaagcatgcttccgggggaagcacggttcacatccatccgcaggctgcaccagtggtctgcagacatgtgttggataccctcatccagttggccaaggtgttcccctctcattttacccagcaaagaacaaaagagacaaattgcgaatctgatcgcgaacgcggtaataaagcctgttcaccctgctccagtcaatcaagctcaagcggaatctgtacagacttctgggatttgctcgtgaagctcgataacatgaatgtcagtcgaaagggaaaaaattcggtgaaaagcgtgccggtgtcggcgggaggcgagggagagactagtccatacagcttagaagcgagcccgctggggcagctgatgaatatgttgagccacccagttattcgtcgcagctccctgttaactgaaaagctgctgagactgctttctctgatttcgatcgcactgcctgagaataaggtttcagaggcgcaggctaacagtggatccggtgcctcctctactacaaccgccaccagcacaacctcaactaccacgacgactgccgcatcaactacgcccacccctcctacagcccctacccctgtcacgtcagcccctgccctggtagcggcaaccgctatatctacaattgtcgttgcggcatctaccactgtgacgactcccactaccgctacaaccaccgtttccatttccccgactacaaagggctccaagagcccagccaaggtatctgacgggggtagtagctctacggacttcaaaatggtgagtagcggattgactgaaaatcagctgcagctgagcgtggaagttctgaccagtcacagctgttctgaagaggggctggaggacgccgctaacgtgctactgcagctgagtcgcggagactccggaacacgcgatacagtattgaaattgctcctgaacggagcacggcatctgggctataccctctgcaaacagattgggacactgctggccgagctgcgggagtacaacctggaacagcaaagacgggctcagtgcgagaccttaagtcctgatggcttaccagaagaacagccacaaacaaccaaactgaagggaaagatgcagagccgctttgatatggcggagaatgtggtgatagtagctagtcaaaagcgtcctctgggcggtcgtgagctccagctgccctccatgagcatgctgacaagcaagacatccactcagaaattctttctcagggtactccaggttataatccagctgcgtgatgacacccgccgagcaaacaaaaaggcgaagcagactgggcgattaggctcttcgggcctgggctccgcaagctccatccaggccgctgtgcggcaactagaagctgaggccgacgcaatcattcagatggttagagagggacagcgcgcaaggcgccagcagcaggcggctacctccgagtcctcacagagcgaggcctcagtgagacgcgaggagtctcctatggatgtcgatcagcccagcccaagtgcccaggatactcagtccatcgcctctgacggcacaccacagggtgaaaaagagaaagaggagcggcctcccgaactgcctctcctctcagaacagctcagcctggacgaactgtgggacatgcttggagagtgcctgaaagagctcgaagaaagtcacgaccagcacgccgtgttggtattgcagcctgctgtcgaagcttttttcctcgtgcacgctaccgagagggagagtaaacctccggtgcgtgacactagggagtctcagctggctcatatcaaagatgagccgccacctctgagccctgccccactcacaccagccacccccagtagcctggatccctttttctcacgggagccttcctctatgcacatcagctcgagccttcctcctgatactcagaaatttctgaggttcgctgagacccatcggaccgtgctaaatcagatactgcgccagagcaccacccacctcgccgatggcccatttgccgtgctcgtagattatatcagggtgctggattttgacgtcaagaggaagtatttccggcaagagctcgagcggctcgatgaagggctccggaaggaagatatggctgtacatgtacgtcgagaccacgtcttcgaagacagctatagagagctacaccgtaagagccctgaagaaatgaaaaatcgactgtatatagtgtttgagggagaggagggacaggatgcaggcggtctccttcgggaatggtacatgattatatctcgcgagatgtttaaccctatgtacgctctctttcggacttcaccaggggatagggttacctatactatcaacccaagcagccattgcaacccaaatcacctcagctacttcaaattcgttgggcgtattgtcgccaaagccgtgtacgataatagactgctggaatgctacttcacaagatctttctataagcacattttgggaaaatctgtgcgatatactgacatggagtctgaagattaccatttttatcagggcttggtatatctcctggagaatgatgtcagcactctggggtacgacctgaccttctccactgaggtgcaggagtttggagtctgcgaagttagagacctgaaacccaacggagccaacatcctggtcactgaagagaataagaaggaatacgtgcacttggtttgtcagatgagaatgactggcgctatccggaaacaactggccgcatttctcgagggtttctatgaaattattcctaagcgcctgatttccattttcacagagcaggagctggaactactgatcagcggtctgcccactatcgatatagacgatctcaaatcaaacacagagtaccacaaataccaaagtaactctattcagatccagtggttctggcgcgctctgcgctcatttgaccaagcagatcgggcaaagttcctgcagtttgtcacaggcacaagtaaggtgcctctccaggggttcgccgctctagaggggatgaatggcatccagaagttccagatacacagagatgacaggtcaactgaccgattgccaagcgcacatacctgcttcaatcaactggacctgccagcatacgagagcttcgagaaactgaggcacatgctgctgttggctattcaggagtgctccgaaggctttggactggccta

SEQ ID NO: 324446 - DNA, 10227 bp, Artificial Sequence
  derived and/or modified sequence
tgaagcctgcccagcggctgcgagttcggccaggccgacatgcagaagctggtgcccaaggacgagaaggccgacggcgagcaggacggcgccgccggcagcatggacgccagcacccagggcctgctggagggcatcggcctggacggcgacaccctggcccccatggagaccgacgagcccaccgccagcgacagcaagggcaagagcaagatcacccccgccatggccgccagaatcaagcagatcaagcccctgctgagcgccagcagcagactgggcagagccctggccgagctgttcggcctgctggtgaagctgtgcgtgggcagccccgtgagacagagaagaagccaccacgccgccagcaccaccaccgcccccacccccgccgccagaagcaccgccagcgccctgaccaagctgctgaccaagggcctgagctggcagccccccccctacacccccacccccagattcagactgaccttcttcatctgcagcgtgggcttcaccagccccatgctgttcgacgagagaaagtacccctaccacctgatgctgcagaagttcctgtgcagcggcggccacaacgccctgttcgagaccttcaactgggccctgagcatgggcggcaaggtgcccgtgagcgagggcctggagcacagcgacctgcccgacggcaccggcgagttcctggacgcctggctgatgctggtggagaagatggtgaaccccaccaccgtgctggagagcccccacagcctgcccgccaagctgcccggcggcgtgcagaacttcccccagttcagcgccctgagattcctggtggtgacccagaaggccgccttcacctgcatcaagaacctgtggaacagaaagcccctgaaggtgtacggcggcagaatggccgagagcatgctggccatcctgtgccacatcctgagaggcgagcccgtgatcagagagagactgagcaaggagaaggagggcagcagaggcgaggaggacaccggccaggaggagggcggcagcagaagagagccccaggtgaaccagcagcagctgcagcagctgatggacatgggcttcaccagagagcacgccatggaggccctgctgaacaccagcaccatggagcaggccaccgagtacctgctgacccaccccccccccatcatgggcggcgtggtgagagacctgagcatgagcgaggaggaccagatgatgagagccatcgccatgagcctgggccaggacatccccatggaccagagagccgagagccccgaggaggtggcctgcagaaaggaggaggaggagagaaaggccagagagaagcaggaggaggaggaggccaagtgcctggagaagttccaggacgccgaccccctggagcaggacgagctgcacaccttcaccgacaccatgctgcccggctgcttccacctgctggacgagctgcccgacaccgtgtacagagtgtgcgacctgatcatgaccgccatcaagagaaacggcgccgactacagagacatgatcctgaagcaggtggtgaaccaggtgtgggaggccgccgacgtgctgatcaaggccgccctgcccctgaccaccagcgacaccaagaccgtgagcgagtggatcagccagatggccaccctgccccaggccagcaacctggccaccagaatcctgctgctgaccctgctgttcgaggagctgaagctgccctgcgcctgggtggtggagagcagcggcatcctgaacgtgctgatcaagctgctggaggtggtgcagccctgcctgcaggccgccaaggagcagaaggaggtgcagacccccaagtggatcacccccgtgctgctgctgatcgacttctacgagaagaccgccatcagcagcaagagaagagcccagatgaccaagtacctgcagagcaacagcaacaactggagatggttcgacgacagaagcggcagatggtgcagctacagcgccagcaacaacagcaccatcgacagcgcctggaagagcggcgagaccagcgtgagattcaccgccggcagaagaagatacaccgtgcagttcaccaccatggtgcaggtgaacgaggagaccggcaacagaagacccgtgatgctgaccctgctgagagtgcccagactgaacaagaacagcaagaacagcaacggccaggagctggagaagaccctggaggagagcaaggagatggacatcaagagaaaggagaacaagggcaacgacacccccctggccctggagagcaccaacaccgagaaggagaccagcctggaggagaccaagatcggcgagatcctgatccagggcctgaccgaggacatggtgaccgtgctgatcagagcctgcgtgagcatgctgggcgtgcccgtggaccccgacaccctgcacgccaccctgagactgtgcctgagactgaccagagaccacaagtacgccatgatgttcgccgagctgaagagcaccagaatgatcctgaacctgacccagagcagcggcttcaacggcttcacccccctggtgaccctgctgctgagacacatcatcgaggacccctgcaccctgagacacaccatggagaaggtggtgagaagcgccgccaccagcggcgccggcagcaccaccagcggcgtggtgagcggcagcctgggcagcagagagatcaactacatcctgagagtgctgggccccgccgcctgcagaaaccccgacatcttcaccgaggtggccaactgctgcatcagaatcgccctgcccgcccccagaggcagcggcaccgccagcgacgacgagttcgagaacctgagaatcaagggccccaacgccgtgcagctggtgaagaccacccccctgaagcccagccccctgcccgtgatccccgacaccatcaaggaggtgatctacgacatgctgaacgccctggccgcctaccacgcccccgaggaggccgacaagagcgaccccaagcccggcgtgatgacccaggaggtgggccagctgctgcaggacatgggcgacgacgtgtaccagcagtacagaagcctgaccagacagagcagcgacttcgacacccagagcggcttcagcatcaacagccaggtgttcgccgccgacggcgccagcaccgagaccagcgccagcggcaccagccagggcgaggccagcacccccgaggagagcagagacggcaagaaggacaaggagggcgacagagccagcgaggagggcaagcagaagggcaagggcagcaagcccctgatgcccaccagcaccatcctgagactgctggccgagctggtgagaagctacgtgggcatcgccaccctgatcgccaactacagctacaccgtgggccagagcgagctgatcaaggaggactgcagcgtgctggccttcgtgctggaccacctgctgccccacacccagaacgccgaggacaaggacacccccgccctggccagactgttcctggccagcctggccgccgccggcagcggcaccgacgcccaggtggccctggtgaacgaggtgaaggccgccctgggcagagccctggccatggccgagagcaccgagaagcacgccagactgcaggccgtgatgtgcatcatcagcaccatcatggagagctgccccagcaccagcagcttctacagcagcgccaccgccaagacccagcacaacggcatgaacaacatcatcagactgttcctgaagaagggcctggtgaacgacctggccagagtgccccacagcctggacctgagcagccccaacatggccaacaccgtgaacgccgccctgaagcccctggagaccctgagcagaatcgtgaaccagcccagcagcctgttcggcagcaagagcgccagcagcaagaacaagagcgagcaggacgcccagggcgccagccaggacagcagcagcaaccagcaggaccccggcgagcccggcgaggccgaggtgcaggaggaggaccacgacgtgacccagaccgaggtggccgacggcgacatcatggacggcgaggccgagaccgacagcgtggtgatcgccggccagcccgaggtgctgagcagccaggagatgcaggtggagaacgagctggaggacctgatcgacgagctgctggagagagacggcggcagcggcaacagcaccatcatcgtgagcagaagcggcgaggacgagagccaggaggacgtgctgatggacgaggcccccagcaacctgagccaggccagcaccctgcaggccaacagagaggacagcatgaacatcctggaccccgaggacgaggaggagcacacccaggaggaggacagcagcggcagcaacgaggacgaggacgacagccaggacgaggaggaggaggaggaggaggacgaggaggacgaccaggaggacgacgagggcgaggagggcgacgaggacgacgacgacgacggcagcgagatggagctggacgaggactaccccgacatgaacgccagccccctggtgagattcgagagattcgacagagaggacgacctgatcatcgagttcgacaacatgttcagcagcgccaccgacatcccccccagccccggcaacatccccaccacccaccccctgatggtgagacacgccgaccacagcagcctgaccctgggcagcggcagcagcaccaccagactgacccagggcatcggcagaagccagagaaccctgagacagctgaccgccaacaccggccacaccatccacgtgcactaccccggcaacagacagcccaacccccccctgatcctgcagagactgctgggccccagcgccgccgccgacatcctgcagctgagcagcagcctgcccctgcagagcagaggcagagccagactgctggtgggcaacgacgacgtgcacatcatcgccagaagcgacgacgagctgctggacgacttcttccacgaccagagcaccgccaccagccaggccggcaccctgagcagcatccccaccgccctgaccagatggaccgaggagtgcaaggtgctggacgccgagagcatgcacgactgcgtgagcgtggtgaaggtgagcatcgtgaaccacctggagttcctgagagacgaggagctggaggagagaagagagaagagaagaaagcagctggccgaggaggagaccaagatcaccgacaagggcaaggaggacaaggagaacagagaccagagcgcccagtgcaccgccagcaagagcaacgacagcaccgagcagaacctgagcgacggcacccccatgcccgacagctaccccaccacccccagcagcaccgacgccgccaccagcgagagcaaggagaccctgggcaccctgcagagcagccagcagcagcccaccctgcccaccccccccgccctgggcgaggtgccccaggagctgcagagccccgccggcgagggcggcagcagcacccagctgctgatgcccgtggagcccgaggagctgggccccaccagacccagcggcgaggccgagaccacccagatggagctgagccccgcccccaccatcaccagcctgagccccgagagagccgaggacagcgacgccctgaccgccgtgagcagccagctggagggcagccccatggacaccagcagcctggccagctgcaccctggaggaggccgtgggcgacaccagcgccgccggcagcagcgagcagcccagagccggcagcagcacccccggcgacgccccccccgccgtggccgaggtgcagggcagaagcgacggcagcggcgagagcgcccagccccccgaggacagcagcccccccgccagcagcgagagcagcagcaccagagacagcgccgtggccatcagcggcgccgacagcagaggcatcctggaggagcccctgcccagcaccagcagcgaggaggaggaccccctggccggcatcagcctgcccgagggcgtggaccccagcttcctggccgccctgcccgacgacatcagaagagaggtgctgcagaaccagctgggcatcagaccccccaccagaaccgcccccagcaccaacagcagcgcccccgccgtggtgggcaaccccggcgtgaccgaggtgagccccgagttcctggccgccctgccccccgccatccaggaggaggtgctggcccagcagagagccgagcagcagagaagagagctggcccagaacgccagcagcgacacccccatggaccccgtgaccttcatccagaccctgcccagcgacctgagaagaagcgtgctggaggacatggaggacagcgtgctggccgtgatgccccccgacatcgccgccgaggcccaggccctgagaagagagcaggaggccagacagagacagctgatgcacgagagactgttcggccacagcagcaccagcgccctgagcgccatcctgagaagccccgccttcaccagcagactgagcggcaacagaggcgtgcagtacaccagactggccgtgcagagaggcggcaccttccagatgggcggcagcagcagccacaacagacccagcggcagcaacgtggacaccctgctgagactgagaggcagactgctgctggaccacgaggccctgagctgcctgctggtgctgctgttcgtggacgagcccaagctgaacaccagcagactgcacagagtgctgagaaacctgtgctaccacgcccagaccagacactgggtgatcagaagcctgctgagcatcctgcagagaagcagcgagagcgagctgtgcatcgagacccccaagctgaccaccagcgaggagaagggcaagaagagcagcaagagctgcggcagcagcagccacgagaacagacccctggacctgctgcacaagatggagagcaagagcagcaaccagctgagctggctgagcgtgagcatggacgccgccctgggctgcagaaccaacatcttccagatccagagaagcggcggcagaaagcacaccgagaagcacgccagcggcggcagcaccgtgcacatccacccccaggccgcccccgtggtgtgcagacacgtgctggacaccctgatccagctggccaaggtgttccccagccacttcacccagcagagaaccaaggagaccaactgcgagagcgacagagagagaggcaacaaggcctgcagcccctgcagcagccagagcagcagcagcggcatctgcaccgacttctgggacctgctggtgaagctggacaacatgaacgtgagcagaaagggcaagaacagcgtgaagagcgtgcccgtgagcgccggcggcgagggcgagaccagcccctacagcctggaggccagccccctgggccagctgatgaacatgctgagccaccccgtgatcagaagaagcagcctgctgaccgagaagctgctgagactgctgagcctgatcagcatcgccctgcccgagaacaaggtgagcgaggcccaggccaacagcggcagcggcgccagcagcaccaccaccgccaccagcaccaccagcaccaccaccaccaccgccgccagcaccacccccaccccccccaccgcccccacccccgtgaccagcgcccccgccctggtggccgccaccgccatcagcaccatcgtggtggccgccagcaccaccgtgaccacccccaccaccgccaccaccaccgtgagcatcagccccaccaccaagggcagcaagagccccgccaaggtgagcgacggcggcagcagcagcaccgacttcaagatggtgagcagcggcctgaccgagaaccagctgcagctgagcgtggaggtgctgaccagccacagctgcagcgaggagggcctggaggacgccgccaacgtgctgctgcagctgagcagaggcgacagcggcaccagagacaccgtgctgaagctgctgctgaacggcgccagacacctgggctacaccctgtgcaagcagatcggcaccctgctggccgagctgagagagtacaacctggagcagcagagaagagcccagtgcgagaccctgagccccgacggcctgcccgaggagcagccccagaccaccaagctgaagggcaagatgcagagcagattcgacatggccgagaacgtggtgatcgtggccagccagaagagacccctgggcggcagagagctgcagctgcccagcatgagcatgctgaccagcaagaccagcacccagaagttcttcctgagagtgctgcaggtgatcatccagctgagagacgacaccagaagagccaacaagaaggccaagcagaccggcagactgggcagcagcggcctgggcagcgccagcagcatccaggccgccgtgagacagctggaggccgaggccgacgccatcatccagatggtgagagagggccagagagccagaagacagcagcaggccgccaccagcgagagcagccagagcgaggccagcgtgagaagagaggagagccccatggacgtggaccagcccagccccagcgcccaggacacccagagcatcgccagcgacggcaccccccagggcgagaaggagaaggaggagagaccccccgagctgcccctgctgagcgagcagctgagcctggacgagctgtgggacatgctgggcgagtgcctgaaggagctggaggagagccacgaccagcacgccgtgctggtgctgcagcccgccgtggaggccttcttcctggtgcacgccaccgagagagagagcaagccccccgtgagagacaccagagagagccagctggcccacatcaaggacgagcccccccccctgagccccgcccccctgacccccgccacccccagcagcctggaccccttcttcagcagagagcccagcagcatgcacatcagcagcagcctgccccccgacacccagaagttcctgagattcgccgagacccacagaaccgtgctgaaccagatcctgagacagagcaccacccacctggccgacggccccttcgccgtgctggtggactacatcagagtgctggacttcgacgtgaagagaaagtacttcagacaggagctggagagactggacgagggcctgagaaaggaggacatggccgtgcacgtgagaagagaccacgtgttcgaggacagctacagagagctgcacagaaagagccccgaggagatgaagaacagactgtacatcgtgttcgagggcgaggagggccaggacgccggcggcctgctgagagagtggtacatgatcatcagcagagagatgttcaaccccatgtacgccctgttcagaaccagccccggcgacagagtgacctacaccatcaaccccagcagccactgcaaccccaaccacctgagctacttcaagttcgtgggcagaatcgtggccaaggccgtgtacgacaacagactgctggagtgctacttcaccagaagcttctacaagcacatcctgggcaagagcgtgagatacaccgacatggagagcgaggactaccacttctaccagggcctggtgtacctgctggagaacgacgtgagcaccctgggctacgacctgaccttcagcaccgaggtgcaggagttcggcgtgtgcgaggtgagagacctgaagcccaacggcgccaacatcctggtgaccgaggagaacaagaaggagtacgtgcacctggtgtgccagatgagaatgaccggcgccatcagaaagcagctggccgccttcctggagggcttctacgagatcatccccaagagactgatcagcatcttcaccgagcaggagctggagctgctgatcagcggcctgcccaccatcgacatcgacgacctgaagagcaacaccgagtaccacaagtaccagagcaacagcatccagatccagtggttctggagagccctgagaagcttcgaccaggccgacagagccaagttcctgcagttcgtgaccggcaccagcaaggtgcccctgcagggcttcgccgccctggagggcatgaacggcatccagaagttccagatccacagagacgacagaagcaccgacagactgcccagcgcccacacctgcttcaaccagctggacctgcccgcctacgagagcttcgagaagctgagacacatgctgctgctggccatccaggagtgcagcgagggcttcggcctggcctag

SEQ ID NO: 324447 - DNA, 607 bp, Artificial Sequence
  derived and/or modified sequence
ttgaggaaaggagaggctaaaaattctgccttctctcctaaagccagccgggctctttatggtgggggaaggaaggatttgtttatttgcactcttctgaaataaaagttctctatcctccctcctggctggagttgggagggccccatgggtgggctctgagatgtggcacacggtacccagggcagggctgggaagggtggggtgcaggggcctccctggctgcagggcccacccaccaggtgcctgggcttgctgcactgagcaggcatgggctctggcccccctcactgtcccttccaggcccagcctgtgttcagggcccaggacagggtctggccagcaggccccaggcctccaagatgttctcagcctctggagtgtgtgtgatgatgagcactcatggagcttcctgtatgctgggccctgggcttctgagagggccaccgggtggcgactgagtcacgaggtggagggccagtcccagggactccaggtgacctcgtgtcggcaccacgcccttctcccatgggcagtcctgggcgccccttcctggccttgggcccagtggcctgtggcctgaccccgtccactcctgcttggttgt

SEQ ID NO: 324448 - protein, 230 aa, Artificial Sequence
  derived and/or modified sequence
MHTLLAATKDSLAMDPPVVNRPKKSKTKKAPIKTITKAAPAAPPVPAANEIATNKPKITWQALNLPVITQISQALPTTEVTNTQASSVTAQPKKANKMKRVTAKAAQGSQSPTGHEGGTIQLKSPLQVLKLPVISQNIHAPIANESASSQALITSIKPKKASKAKKAANKAIASATEVSLAATATHTATTQGQITNETASIHTTAASIRTKKASKARKTIAKVINTDTEH

SEQ ID NO: 324449 - protein, 962 aa, Artificial Sequence
  derived and/or modified sequence
MLRDVIQEYDEYFPEIIERASYTLEKMFRVNLKEIDKQSSLYILISTQESSAGILGTTKDTPKLGLLMVILSVIFMNGNKASEAVIWEVLRKLGLRPGVRHSLFGEVRKLITDEFVKQKYLEYKRVPNSRPPEYEFFWGLRSYHETSKMKVLKFACRVQKKDPKDWAVQYREAVEMEVQAAAVAVAEAEARAEARAQMGIGEEAVAGPWNWDDMDIDCLTREELGDDAQAWSRFSFEIEARAQENADASTNVNFSRGASTRAGFSDGASISFNGAPSSSGGFSGGPGITFGVAPSTSASFSNTASISFGGTLSTSSSFSSAASISFGCAHSTSTSFSSEASISFGGMPCTSASFSGGVSSSFSGPLSTSATFSGGASSGFGGTLSTTAGFSGVLSTSTSFGSAPTTSTVFSSALSTSTGFGGILSTSVCFGGSPSSSGSFGGTLSTSICFGGSPCTSTGFGGTLSTSVSFGGSSSTSANFGGTLSTSICFDGSPSTGAGFGGALNTSASFGSVLNTSTGFGGAMSTSADFGGTLSTSVCFGGSPGTSVSFGSALNTNAGYGGAVSTNTDFGGTLSTSVCFGGSPSTSAGFGGALNTNASFGCAVSTSASFSGAVSTSACFSGAPITNPGFGGAFSTSAGFGGALSTAADFGGTPSNSIGFGAAPSTSVSFGGAHGTSLCFGGAPSTSLCFGSASNTNLCFGGPPSTSACFSGATSPSFCDGPSTSTGFSFGNGLSTNAGFGGGLNTSAGFGGGLGTSAGFSGGLSTSSGFDGGLGTSAGFGGGPGTSTGFGGGLGTSAGFSGGLGTSAGFGGGLVTSDGFGGGLGTNASFGSTLGTSAGFSGGLSTSDGFGSRPNASFDRGLSTIIGFGSGSNTSTGFTGEPSTSTGFSSGPSSIVGFSGGPSTGVGFCSGPSTSGFSGGPSTGAGFGGGPNTGAGFGGGPSTSAGFGSGAASLGACGFSYG

SEQ ID NO: 324450 - protein, 192 aa, Artificial Sequence
  derived and/or modified sequence
MHTLLAATKDSLAMDPPVVNRPKKSKTKKAPIKTITKAAPAAPPVPAANEIATNKPKITWQALNLPVITQISQALPTTEVTNTQASSVTAQPKKANKMKRVTAKAAQGSQSPTGHEGGTIQLKSPLQVLKLPVISQNIHAPIANESASSQALITSIKPKKASKAKKAANKAIASATEVSLAATATHTATTQG

SEQ ID NO: 324451 - protein, 1516 aa, Artificial Sequence
  derived and/or modified sequence
MEPGSDDFLPPPECPVFEPSWAEFRDPLGYIAKIRPIAEKSGICKIRPPADWQPPFAVEVDNFRFTPRIQRLNELEIVVEEGGYEAICKDRRWARVAQRLNYPPGKNIGSLLRSHYERIVYPYEMYQSGANLVQCNTRPFDNEEKDKEYKPHSIPLRQSVQPSKFNSYGRRAKRLQPDPEPTEEDIEKNPELKKLQIYGAGPKMMGLGLMAKDKTLRKKDKEGPECPPTVVVKEELGGDVKVESTSPKTFLESKEELSHSPEPCTKMTMRLRRNHSNAQFIESYVCRMCSRGDEDDKLLLCDGCDDNYHIFCLLPPLPEIPKGVWRCPKCVMAECKRPPEAFGFEQATREYTLQSFGEMADSFKADYFNMPVHMVPTELVEKEFWRLVNSIEEDVTVEYGADIHSKEFGSGFPVSDSKRHLTPEEEEYATSGWNLNVMPVLEQSVLCHINADISGMKVPWLYVGMVFSAFCWHIEDHWSYSINYLHWGEPKTWYGVPSLAAEHLEEVMKKLTPELFDSQPDLLHQLVTLMNPNTLMSHGVPVVRTNQCAGEFVITFPRAYHSGFNQGYNFAEAVNFCTADWLPAGRQCIEHYRRLRRYCVFSHEELICKMAACPEKLDLNLAAAVHKEMFIMVQEERRLRKALLEKGITEAEREAFELLPDDERQCIKCKTTCFLSALACYDCPDGLVCLSHINDLCKCSSSRQYLRYRYTLDELPAMLHKLKVRAESFDTWANKVRVALEVEDGRKRSLEELRALESEARERRFPNSELLQQLKNCLSEAEACVSRALGLVSGQEAGPHRVAGLQMTLTELRAFLDQMNNLPCAMHQIGDVKGVLEQVEAYQAEAREALASLPSSPGLLQSLLERGRQLGVEVPEAQQLQRQVEQARWLDEVKRTLAPSARRGTLAVMRGLLVAGASVAPSPAVDKAQAELQELLTIAERWEEKAHLCLEARQKHPPATLEAIIREAENIPVHLPNIQALKEALAKARAWIADVDEIQNGDHYPCLDDLEGLVAVGRDLPVGLEELRQLELQVLTAHSWREKASKTFLKKNSCYTLLEVLCPCADAGSDSTKRSRWMEKELGLYKSDTELLGLSAQDLRDPGSVIVAFKEGEQKEKEGILQLRRTNSAKPSPLASSSTASSTTSICVCGQVLAGAGALQCDLCQDWFHGRCVSVPRLLSSPRPNPTSSPLLAWWEWDTKFLCPLCMRSRRPRLETILALLVALQRLPVRLPEGEALQCLTERAISWQGRARQALASEDVTALLGRLAELRQRLQAEPRPEEPPNYPAAPASDPLREGSGKDMPKVQGLLENGDSVTSPEKVAPEEGSDLELLSSLLPQLTGPVLELPEATRAPLEELMMEGDLLEVTLDENHSIWQLLQAGQPPDLERIRTLLELEKAERHGSRARGRALERRRRRKVDRGGEGDDPAREELEPKRVRSSGPEAEEVQEEEELEEETGGEGPPAPIPTTGSPSTQENQNGLEPAEGTTSGPSAPFSTLTPRLHLPCPQQPPQQQL

SEQ ID NO: 324452 - DNA, 4551 bp, Artificial Sequence
  derived and/or modified sequence
atggagcctgggtctgatgattttctgcccccaccagaatgcccagtcttcgaaccaagctgggccgaatttcgagatcccctaggatatatcgcaaaaatcagacctattgctgagaagtcaggcatctgtaagatacgccctccagccgactggcagccccctttcgccgtggaagtagacaatttccggttcacccctcggatccaacggttaaacgagttagaaattgtagtggaagagggcggatatgaggccatttgcaaagatagacggtgggctcgcgtggctcagcggctgaactacccaccaggcaagaacatcgggagcctgctccgctctcactatgagcggatcgtgtatccatatgagatgtatcagagcggtgccaaccttgtacagtgtaacacaagaccgttcgacaacgaagaaaaagacaaagagtataaaccccacagtatccccctgaggcagtctgtgcagcccagcaagttcaacagttatgggcggcgcgccaagcggctgcaacctgatcctgagcccacagaagaagacattgagaagaatccggagctcaaaaaactgcaaatctatggggccggacctaagatgatgggactggggctcatggccaaagacaagacactccgaaaaaaagacaaggaaggtcccgagtgtccccctacagtcgtcgtcaaagaggagctggggggggacgtcaaagtcgagtccacgagcccaaaaacctttctcgagtcaaaggaggagctgtcccacagtcctgagccttgtacgaagatgacgatgaggctcaggagaaaccacagcaacgctcagttcattgagagctatgtatgccgaatgtgttctcgcggcgacgaggacgataagctgctcctgtgcgacggatgtgatgacaattaccacatcttttgcttactgccccctcttccagagattcccaagggcgtttggagatgtccaaaatgcgtgatggccgagtgcaaacgtcccccggaagcattcgggttcgagcaggccacaagagagtacacgttgcaaagctttggggaaatggcagactctttcaaggctgactacttcaatatgccagtccatatggtgcccaccgaattagttgaaaaagaattctggcgactagtcaacagtatcgaagaggatgtgaccgtggaatatggcgcagacatacatagcaaagaattcggctcaggctttcctgtctctgatagcaagcggcacctcacacctgaggaggaagagtatgcaacaagcgggtggaacctaaacgtgatgcccgtccttgagcagtcagtgctgtgccacataaatgccgacatctcaggtatgaaggtgccgtggttatacgtggggatggtcttttctgccttttgttggcacattgaagaccattggagctattctattaactacctccactggggcgagcctaagacctggtacggcgtccctagtctggccgcggagcacctggaggaggtgatgaagaaattaacacccgagctcttcgattcccagcccgacctcttgcatcagctcgtgactttaatgaaccctaacacattgatgtcccacggcgttcccgttgtgcgaacaaatcagtgcgccggagagttcgtcataacatttccacgcgcttatcacagcgggtttaaccaaggttataacttcgcagaggcagtaaatttttgtacagccgattggctgccagccgggagacagtgtatcgagcattaccggcgattgaggaggtactgtgtcttctcccacgaagagctgatctgtaagatggcggcctgcccagagaagctagacctcaacctggcagccgctgtgcacaaggagatgtttattatggttcaggaagagcggaggcttagaaaggctctgctggagaagggcatcacagaagcagagagggaagccttcgagctcttgcccgacgacgaacgtcaatgcatcaagtgtaagacaacttgctttctgagcgcactcgcctgctacgactgtcccgatggactggtgtgcttgtcccatatcaatgatctgtgcaagtgttcctcatctcggcaatacctgcgttaccgctacactttggatgagttacctgcaatgctgcataagctgaaagtgagggctgagtccttcgacacatgggcaaataaggtcagagtagcactggaggttgaagatgggcgcaaaaggtccctggaagagctgagagctctcgaaagcgaggccagagagcggcgattccctaattctgagcttctccaacaactgaagaattgcctgtctgaagctgaggcatgtgtgtcccgcgctctgggacttgtgtccgggcaggaagcagggcctcacagagttgccggactacagatgacgttaacagaattgcgcgcctttctggaccagatgaataatcttccatgtgcaatgcaccagatcggagacgtgaagggagtgttggaacaagtggaggcctaccaagccgaagctcgagaagccctggccagtctcccatccagtccgggattgctccagtcactgcttgagagaggcagacagctgggggtagaggtgccagaggcccaacagcttcagcgacaagtagaacaggctcgctggttggatgaggttaagcgtacccttgcaccaagtgcaaggcgcgggactttggcagtgatgcgcggattattggtggccggcgccagtgttgccccgagcccagccgtggacaaagctcaggccgaactccaagaacttcttacaatcgctgagaggtgggaggaaaaggctcacctgtgcctggaagccaggcagaaacacccccctgcgactctggaggctatcatccgcgaagccgagaatatacctgttcacctaccgaacatccaggccctcaaggaagctttagctaaggcccgggcctggatcgccgatgtagatgaaatccaaaatggcgaccattacccttgcttggacgacctggagggcctcgtcgctgtgggccgtgatttgcctgttggactcgaagagctgaggcagctggagttgcaggtcctaaccgctcacagttggcgggagaaagcatctaaaacgtttcttaaaaaaaatagttgctatacgcttctggaagtgttgtgcccatgcgctgatgcaggctcagactccaccaagcggtcacgctggatggagaaagaactgggactgtacaaaagcgacaccgagttattgggacttagcgcacaggatctgagggatcccggtagtgtgatcgtggccttcaaggaaggggagcagaaggagaaagagggaattctgcagttaaggcgcacaaatagtgccaaaccgagtcctctggcctctagctctacagcatcctccacgacatctatctgcgtttgcggccaggttctggcaggagcaggagccctccaatgcgatctttgccaggactggttccatggcaggtgtgtctcagtgcctcggctactgtcaagcccaaggcctaaccccacctctagtcctttactggcctggtgggaatgggatacaaagtttttgtgcccattgtgtatgcgatccaggaggccccggctggaaactatactcgcactgttggttgctctgcagcgtctgcctgtgcggcttccagaaggggaggctctacagtgtctgaccgaaagggctatcagctggcaggggcgggcccgacaggccctggcttctgaggacgtgaccgctctcctcggacggcttgctgagttgcgtcagcggttgcaagcggaacctcggccggaagaaccccctaactatcccgccgcaccggcttcagacccgcttcgggaggggtcagggaaagatatgcccaaagttcagggtctgcttgagaacggtgatagcgtcaccagccccgagaaggtcgccccagaggagggttctgatttagagctcctgagcagcctgctacctcagctaacagggcccgtgctcgagctgccagaggccacgagagctcctttggaggagctcatgatggagggtgatctgttagaggtgacactcgacgagaatcacagcatttggcaacttctgcaagcaggccagcctccagaccttgaaagaatcagaaccctcctggaactggaaaaggctgaaagacatggttcccgggcccggggcagggcattagagagaagacgcagaaggaaagtggatcgggggggagaaggcgacgatcccgcccgagaggaactcgagcctaaaagggtgcggagctcaggcccagaggctgaggaggtacaagaagaagaggagttggaagaagaaaccggcggtgagggtcccccagcccccattccaacaactggctcgccaagtacacaggaaaaccagaatggactggagcccgcagaaggcaccacctcaggcccttctgccccattttccaccctgacgcctcggttgcacctgccatgtccacagcagcccccacaacaacagctctag

SEQ ID NO: 324453 - DNA, 4551 bp, Artificial Sequence
  derived and/or modified sequence
atggagcccggcagtgatgacttcctgcccccaccagaatgtcctgtgtttgagcccagctgggccgagttccgggaccccctgggctacatcgccaagatccggcccatcgccgagaagagcggcatctgcaagatccggcccccagctgactggcagcccccatttgctgtggaggtggacaacttccgcttcaccccccgcatccagaggctgaatgagctggagatcgtggtggaggagggcggctatgaggccatctgcaaggaccggcgctgggcccgggtggcccagaggctgaactacccacctgggaagaacatcggcagcctgctgcggagccactatgaaagaattgtgtacccctatgagatgtaccagagcggggccaacctggtgcagtgcaacacccggccctttgacaatgaggagaaggacaaggagtacaagccccacagcatccccctgcggcagagcgtgcagcccagcaagttcaacagctatggccggcgggccaagaggctgcagcctgaccctgagcccacagaggaggacatcgagaagaaccctgagctgaagaagctgcagatctacggggccggccccaagatgatgggcctgggcctgatggccaaggacaagaccctgaggaagaaggacaaggagggcccagaatgtcctcccaccgtggtggtgaaggaggagctgggcggagatgtgaaggtggagagcaccagccccaagaccttcctggagagcaaggaggagctgagccacagccctgagccctgcaccaagatgaccatgaggctgcggaggaaccacagcaatgcccagttcatcgagagctatgtgtgcaggatgtgcagcagaggagatgaagatgacaagctgctgctgtgtgatggctgtgatgacaactaccacatcttctgcctgctgccccccctgcctgagatccccaagggcgtgtggcgctgccccaagtgtgtgatggccgagtgcaagaggcctcctgaggccttcggctttgagcaggccacccgggagtacaccctgcagagctttggagagatggctgacagcttcaaggctgactacttcaacatgcctgtgcacatggtgcccacagagctggtggagaaggagttctggaggctggtgaacagcattgaagaagatgtgacagtggagtatggagctgacatccacagcaaggagtttggcagcggcttccctgtgtctgacagcaagaggcacctgaccccagaggaggaggagtatgccaccagcggctggaacctgaatgtgatgcctgtgctggagcagagcgtgctgtgccacatcaatgctgacatcagcggcatgaaggtgccctggctgtatgtgggcatggtgttcagcgccttctgctggcacatcgaggaccactggagctacagcatcaactacctgcactggggcgagcccaagacctggtacggcgtgcccagcctggccgctgagcacctggaggaggtgatgaagaagctgaccccagagctgtttgacagccagcctgacctgctgcaccagctggtgaccctgatgaaccccaacaccctgatgagccacggcgtgcctgtggtgaggaccaaccagtgtgccggggagtttgtgatcaccttcccccgggcctaccacagcggcttcaaccagggctacaactttgctgaggccgtgaacttctgcacagctgactggctgcctgctggccggcagtgcatcgagcactacagaaggctgcggcgctactgtgtgttcagccatgaggagctgatctgcaagatggccgcctgcccagagaagctggacctgaacctggccgctgctgtgcacaaggagatgttcatcatggtgcaggaggagcggcggctgaggaaggccctgctggagaagggcatcacagaagctgagcgggaggcctttgagctgctgcctgatgatgagcggcagtgcatcaagtgcaagaccacctgcttcctgagcgccctggcctgctatgactgcccagatggcctggtgtgcctgagccacatcaatgacctgtgcaagtgcagcagcagccggcagtacctgcgctaccgctacaccctggatgagctgcctgccatgctgcacaagctgaaggtgcgggcagagagctttgacacctgggccaacaaggtgcgggtggccctggaggtggaggatggcaggaagaggagcctggaggagctgcgggccctggagagcgaggcccgggagcggcgcttccccaacagcgagctgctgcagcagctgaagaactgcctgtctgaggccgaggcctgtgtgtcccgggccctgggcctggtgtctggccaggaggccggcccccaccgggtggccggcctgcagatgaccctgacagagctgcgggccttcctggaccagatgaacaacctgccctgtgccatgcaccagattggagatgtgaagggcgtgctggagcaggtggaggcctaccaggccgaggcccgggaggccctggccagcctgcccagcagccctggcctgctgcagagcctgctggagcggggccggcagctgggcgtggaggtgcctgaggcccagcagctgcagaggcaggtggagcaggcccgctggctggatgaggtgaagaggaccctggcccccagcgcccggcggggcaccctggccgtgatgaggggcctgctggtggccggggcctctgtggcccccagccctgctgtggacaaggcccaggccgagctgcaggagctgctgaccatcgccgagcgctgggaggagaaggcccacctgtgcctggaggcccggcagaagcaccccccagccaccctggaggccatcatccgggaggccgagaacatccctgtgcacctgcccaacatccaggccctgaaggaggccctggccaaggcccgggcctggattgctgatgtggatgagatccagaatggagaccactacccctgcctggatgacctggagggcctggtggccgtgggccgggacctgcctgtgggcctggaggagctgcggcagctggagctgcaggtgctgacagcccacagctggagggagaaggccagcaagaccttcctgaagaagaacagctgctacaccctgctggaggtgctgtgcccctgtgctgatgctggcagtgacagcaccaagaggagccgctggatggagaaggagctgggcctgtacaagagtgacacagagctgctgggcctgagcgcccaggacctgcgggaccccggcagcgtcatcgtggccttcaaggagggggagcagaaggagaaggagggcatcctgcagctgcggaggaccaacagcgccaagcccagccccctggccagcagcagcacagccagcagcaccaccagcatctgtgtgtgtggccaggtgctggccggggccggggccctgcagtgtgacctgtgccaggactggttccacggccgctgtgtgtctgtgccccggctgctgagcagcccccggcccaaccccaccagcagccccctgctggcctggtgggagtgggacaccaagttcctgtgccccctgtgcatgaggagccggcggccccggctggagaccatcctggccctgctggtggccctgcagaggctgcctgtgcggctgcctgagggggaggccctgcagtgcctgacagagcgggccatctcctggcagggccgggcccggcaggccctggcctctgaagatgtgacagccctgctgggccgcctggccgagctgcggcagaggctgcaggccgagcccaggcctgaggagccccccaactacccagctgccccagccagtgaccccctgcgggagggcagcggcaaggacatgcccaaggtgcagggcctgctggagaatggagacagcgtgaccagccctgagaaggtggcccctgaggagggcagtgacctggagctgctgagcagcctgctgccccagctgactggacctgtgctggagctgcctgaggccacccgggcccccctggaggagctgatgatggagggggacctgctggaggtgaccctggatgagaaccacagcatctggcagctgctgcaggccggccagcccccagacctggagcgcatccgcaccctgctggagctggagaaggccgagcggcacggcagccgggcccggggccgggccctggagaggagaagaagaaggaaggtggaccggggcggggagggagatgatcctgcccgggaggagctggagcccaagagggtgcgcagcagcggccctgaggccgaggaggtgcaggaggaggaggagctggaggaggagaccggcggggagggccccccagcccccatccccaccaccggcagccccagcacccaggagaaccagaatggcctggagcctgctgagggcaccaccagcggccccagcgcccccttcagcaccctgaccccccggctgcacctgccctgcccccagcagcccccccagcagcagctgtag

SEQ ID NO: 324454 - DNA, 5122 bp, Artificial Sequence
  derived and/or modified sequence
cttgttcctccgccgttgcaatgaactattttctctcagtccggggtggtacttttgagtaaccccttccaaatagaaacccataccagcctatttagctcggtctccactatatgaaggtttcctagggcttggtgtgacgcaacgtatacgaggctcggaaggacaccccgcggaaggatccggtttgttgtggtgtggggaggggagacgctgacaaaccaagatggcggcggcggcgctgaaggccgcggcgtttgggaggtaactgtggtggcgaaggctgcggtagtggggaggcaaccacacagtttggaagaaacggagcgggacgaagaggcggtagcagtagagtcagcctgagactctcagagcacgacggccacacgcccccttaggccctcggcgggcggcggctgccccgcttagggcctagcctccgagcattgcctcggcttcaaacagcggcggcgccatgagtccttaagggcggtccaagcctcccgatccctggcccagacctcgggcccaccatggagccggggtccgacgatttcctaccgccaccggagtgcccggtgttcgagcctagctgggccgagttccgagaccctcttggctacatcgcgaaaatcaggcccatcgcagagaaatcgggcatttgcaagatccgcccacccgcggactggcagccaccctttgctgtggaagtggacaacttcaggtttaccccccgaatccagaggctgaatgagctagagattgtggtggaggaaggtggttatgaagctatctgcaaggaccgtcggtgggctcgggtagcccagcgcctcaactatccaccaggcaaaaatattggctccttgctacgctcccactacgaacgcattgtttatccctatgaaatgtaccagtctggagccaaccttgtgcagtgtaacacacgtccatttgataatgaggagaaggacaaggaatacaaaccccacagcatccccctacgacagtctgtgcagccttccaagttcaacagctatggccggcgggccaagagactgcagcctgatccggaacccacagaggaagacattgagaagaatccagagctgaaaaagctacagatctatggggcaggccccaagatgatgggcctgggcctcatggccaaagacaagactctgcggaagaaagataaggaggggcctgagtgtccccccacagtagtggtgaaggaggagttaggtggggatgtgaaggtggagtcaacatcgcctaagaccttcctggagagcaaggaggagctgagtcacagcccagaaccctgcaccaagatgaccatgaggctacggaggaaccacagcaatgcccagtttattgagtcatatgtctgccggatgtgttctcgaggggatgaggatgacaagctcctgctgtgtgatggctgtgatgacaactaccacatcttctgcctgctgcctcctctgcctgagatccccaagggtgtctggcggtgcccaaagtgtgtcatggcggagtgtaagcggcccccagaagcctttggctttgagcaggctacccgggaatacactctgcagagctttggcgagatggccgactcctttaaagctgactacttcaacatgcccgtgcatatggtgcccacagaacttgtggagaaggagttctggaggctggtaaatagcattgaggaagatgtgactgttgagtatggagctgacatccattccaaagaatttggcagcggtttccctgtcagtgacagtaaacggcacctaacccccgaagaggaggagtatgctaccagtggttggaacctaaatgtgatgccggtgttggaacagtctgtactgtgccacatcaatgcagatatctctggcatgaaggtgccctggctctacgtgggcatggtcttctcagccttttgctggcatattgaggatcactggagttactccattaactacctccactggggtgagccgaagacctggtatggggtgccctcacttgcagcagaacatttggaagaagtgatgaagaagctgacacctgaactatttgatagccagcctgacctcctgcaccaacttgtcaccctcatgaatcccaacaccctcatgtcccatggtgtgccagttgtccgcacaaaccagtgtgcaggagagtttgtcatcaccttcccccgtgcttaccacagcggcttcaaccaaggctacaactttgccgaggctgtcaacttttgcactgctgactggttgcctgctgggcgccagtgcattgagcactaccgccggctccggagatactgcgtcttctcccatgaggagcttatctgcaagatggctgcctgcccagagaagctagacctgaacctggcggcagctgtgcataaggagatgttcatcatggtgcaagaagagcggcgtctacgaaaggccctgctggagaagggtatcacagaggctgagcgagaggctttcgagctgctcccagatgatgagcgccagtgtatcaagtgcaagactacgtgtttcctgtcagccctggcctgctacgactgcccagacggccttgtctgcctttcccacatcaatgatctctgcaagtgctccagtagccggcagtacctgcggtatcggtataccttggatgagcttcctgccatgctgcataagctgaaggttcgggctgagtcctttgacacctgggccaacaaagtgcgagtggccctggaggtggaggatgggcggaagcgcagccttgaagaactgagggcactagagtctgaagcccgtgagcggaggtttcctaatagtgagctgctgcagcaactaaagaactgcctgagtgaggcagaggcttgcgtgtcccgagctctgggactggtcagcggccaggaagctggcccccacagggtggctggtctacagatgaccctgactgagctccgggcctttctggaccagatgaacaacctgccttgcgccatgcaccagattggggatgtcaagggtgttctggaacaggtggaggcctaccaggctgaggctcgtgaggccctggcctcactgccctccagtccagggctactgcagtccctgttggagagggggcggcagctgggggtggaggtgcctgaggcccagcagctccagcggcaggtggaacaggcgcgatggctggatgaggtgaaacgcacactggccccctcagcccgaaggggcaccttggctgtcatgcgaggactgttggtcgcgggtgccagtgtagcccctagccctgctgtggataaagcccaggccgagctgcaggaactgctgaccattgctgaacgctgggaggagaaagcccacctctgcctggaggccaggcagaagcatccaccagccacacttgaggccataatccgtgaagcggaaaacatccctgttcacctgcccaacatccaggctctcaaggaggctcttgctaaggcccgggcctggattgctgatgttgatgagatccaaaatggtgaccactacccctgcctggatgacttggagggcctagtagctgtgggccgggacctacctgtggggctggaggagctgagacagctagagctacaggtactgacagcgcactcctggagggagaaggcctccaagaccttcctcaagaaaaattcttgctacacgctgctggaggttctctgcccatgtgcagatgccggctcagacagcaccaagcgcagccggtggatggagaaggagctggggttgtacaaatctgacacagagctgctggggctgtctgcgcaggacctcagggacccaggctctgtgatcgtggccttcaaggagggggaacagaaggagaaggagggtatcctgcagctgcgtcgcaccaattcggccaagcccagtccactggcatcatcgagcacggcctcctctacaacctctatctgtgtgtgtgggcaggtgctggctggggcgggagctctgcagtgtgacctgtgtcaggactggttccatgggcggtgtgtgtcagtgcctcgcctcctcagctctccgaggcccaatcccacctcatccccactgctggcctggtgggaatgggacaccaaattcctgtgtccactgtgtatgcgctcaaggcgcccgcgcctggagaccatcctggcactgctggtagccctgcagagactgcctgtgcggctgcccgagggcgaggccctgcagtgcctcacagagagggccatcagctggcaaggccgcgccaggcaggctctggcctctgaagatgtgactgctcttttgggacggctggctgagctccgccaacggctacaggctgaacctagacctgaggagcctcctaactaccctgcagcccctgcttctgaccccctcagagagggcagtggcaaggatatgcctaaggtccagggcttactggagaatggagacagtgtgaccagtcctgagaaggtagccccggaggagggctcagatctggagctgctgtcctcgctgttgccacagttgactggccctgtgttggaactgcctgaggcaacccgggcccccttggaggagctcatgatggagggggacctgctcgaggtgaccctggatgagaaccacagcatatggcagctgctgcaggctggacagcccccagacctggagaggatccgcacacttctggagctggagaaggcagagcgtcacgggagtcgggctcggggccgggccctggagaggcggcggcggcggaaggtggatcggggtggggagggcgatgacccagcccgagaggagctagagccaaagagggtacggagctcagggccagaggctgaggaggtccaggaggaggaagagctggaggaggagactgggggtgagggcccccctgcacccatccccaccactggcagccccagcacccaggagaaccagaatggcttggaaccggcggaagggaccacttcaggcccctcggcccctttctccactctgactccccggctgcatctgccctgcccacagcagccgcctcagcaacagttgtgacagtggctgagcctagcacagaccctgacagagacccc

SEQ ID NO: 324455 - DNA, 4551 bp, Artificial Sequence
  derived and/or modified sequence
atggagcccggcagcgacgacttcctgcccccccccgagtgccccgtttttgagcctagttgggccgaattccgcgatcctctggggtacattgccaagattagacccatcgctgagaagagcggcatctgcaagattaggccccctgctgattggcagccgcctttcgccgtggaagtggacaattttcggtttactccacgcatacagcgcctcaatgagctggagatcgtggtggaggaaggcggttacgaggcaatctgtaaggatcgtcggtgggcccgcgtggcccagaggttaaactatccccctggtaagaatatcgggtctctcctgaggtcacactacgagcggattgtgtatccttatgaaatgtatcagtccggagccaacctcgtgcagtgtaacacccgccccttcgataatgaagagaaagacaaggaatacaaaccgcattccatacctctgagacaatctgtccagcccagtaagtttaactcttacggccgacgcgcaaagcggctgcaacctgatcccgagcctactgaagaggatatcgagaaaaacccagaactgaaaaagctacagatttatggggcgggtccaaaaatgatgggcttaggtctcatggctaaggataaaactctgaggaaaaaggataaggaaggccctgagtgcccgccaacggtggtcgtgaaagaagaactgggaggggacgtcaaagttgagagtacaagccccaaaaccttcctggagagcaaggaagagttaagtcactctccggaaccgtgcaccaaaatgaccatgagactccggagaaatcactcaaacgctcagttcatcgagagttacgtatgtcggatgtgtagtcggggtgatgaggacgacaaactgctgctatgcgatggctgtgacgacaactaccacatcttctgcctgctccctccactgccagaaattcctaagggcgtgtggcgctgccctaagtgcgtcatggccgagtgcaaaaggccaccagaagcttttggctttgaacaagctacgcgcgagtacaccctgcagagtttcggcgaaatggctgactcattcaaggctgactatttcaatatgccggtccatatggtccctaccgagcttgtcgagaaggaattttggcggcttgtgaattccattgaagaagacgtgactgtggagtatggagccgacattcactcaaaagagtttggcagcggtttccctgtgtctgactcaaagcgtcacctaactcccgaggaagaggagtacgctacaagcggatggaatctgaatgtgatgcctgtgctggaacagagtgtcctttgtcacattaatgccgatattagcggcatgaaggttccatggctatatgtgggaatggttttctcagctttttgctggcatatcgaggatcactggagctattcaattaattacctccactggggcgaacccaaaacatggtacggtgtgccttctttagccgcagagcatctcgaggaggttatgaagaagcttacccccgagttatttgatagccagcccgaccttctgcaccagcttgtgactttaatgaatccaaacacactgatgtcacacggggtgccagttgtgcgtaccaaccagtgcgccggggaattcgtcatcacattcccacgggcttaccactcaggtttcaaccagggttacaattttgccgaagctgttaacttctgtaccgccgactggctccccgctggtcggcagtgtattgagcattatcgccggctgaggagatactgcgtgttttcacatgaagaactgatttgcaaaatggctgcctgccctgagaaactagatctgaatctggccgcagccgttcataaggaaatgtttatcatggtgcaagaggagagaaggcttaggaaggctttgctggagaaaggtattactgaggccgaacgggaagccttcgaactcctccccgacgatgagagacaatgcatcaaatgtaagactacctgtttcctgtccgccctggcatgttatgattgtcccgatggactggtctgcctcagtcatattaatgatttgtgcaagtgctccagctctcgccagtacctgcggtaccgatacaccttggacgaactgcccgctatgttgcacaagctgaaggtgcgggccgaaagcttcgatacttgggcaaacaaggttagggtggccctcgaggttgaagatggacggaaacgctccctggaggagctccgggccttggagtctgaggctcgcgaaaggaggtttcctaattcagagttgctgcagcagcttaagaattgcttgagcgaagccgaagcgtgcgtcagccgtgcactgggcctggtcagcgggcaggaggccgggccgcacagagtggccggactccaaatgactctgacggagcttcgcgctttcttagaccagatgaataatctcccgtgcgccatgcaccaaatcggagacgtgaagggggtgttagaacaggtggaggcataccaagcggaggctagagaggcgttagccagcctacctagttcccccgggttgctgcagagtcttctcgagcggggacgacagctaggcgtcgaagttccagaggcacaacagctgcagagacaggtcgaacaggctcggtggctggatgaggtaaagcggactttagcaccatcagcacgaaggggcactctggccgtaatgaggggacttctggtggcaggtgcaagtgtggcccctagcccggcggtggataaggcgcaggcagaactgcaggagctcttgacgatcgccgaaagatgggaagagaaggcacatctgtgtcttgaagcgaggcagaaacatcccccagccaccctcgaggccattatccgagaggcagagaatattcccgtgcatttgcctaatatccaggccctgaaggaggccctcgcaaaagcccgcgcatggatcgcagatgtggacgaaattcagaatggggaccactacccctgtctggatgacctggaggggttggtagccgttgggagggacctgcccgtgggcctggaggaacttaggcaactggagttacaggtgctcaccgcccattcctggagggagaaggcatcaaaaacttttctaaaaaagaacagctgttataccctgctggaagtcctatgtccctgtgccgacgccggcagcgacagtaccaaaaggagtaggtggatggagaaagagctggggctttacaaatcagataccgagctgctagggctgtcagctcaggatctgcgagacccgggaagcgttatcgtagcttttaaggagggcgagcagaaggagaaggaggggattttacagcttaggaggaccaactcagcaaagcccagcccactggccagtagctctacggccagttcgacaacatccatctgcgtctgtggccaggttctggccggtgcaggagccctgcagtgcgacctgtgtcaggattggttccacggccggtgtgtgtctgttccaagactgctgagctctcctagaccaaatcccaccagttcgcctttactcgcctggtgggagtgggacacgaaatttctttgccccctgtgtatgcgtagtaggcgccctcgactggagactatcctggcgctgctggtcgccctccagcgtctgcctgttcgcctccctgagggcgaagccctccagtgtctcacggagcgcgcgatttcttggcagggccgcgcccggcaggcactggcaagcgaggacgtgaccgctctgttgggccgtctcgctgagctgagacaacggctgcaagcggagccgcgcccagaggaaccccccaattacccggcagcacccgcctctgatcctctgcgcgagggttcgggcaaagacatgcccaaagtccaggggctacttgaaaatggcgatagtgtgactagccccgaaaaagtggcacccgaggaggggagcgaccttgagctgctttccagcctgctgcctcagctgaccggccctgtacttgagttgcctgaagccacccgggccccattggaggaactaatgatggagggcgacctgcttgaggtgacgctcgatgaaaaccatagtatctggcagctgcttcaggccggtcagccccccgatctggagcgcatccgaaccctgctagagcttgagaaagcagagagacacgggagccgggcgaggggacgagctctggaacggagaagacgccgcaaggtggataggggcggtgagggagatgaccccgctcgcgaagagctggagcctaaaagggtgcggtctagcgggcctgaggccgaagaggtacaggaagaggaagaattggaagaggaaaccggtggtgagggcccacctgcacccattcccaccaccggctcgccctcaacacaggagaaccagaatggtctcgaaccagcggaaggaactacatcgggaccgagcgcgcctttttccacactgacaccccggctgcatctgccttgcccccagcaaccacctcagcaacagttatag

SEQ ID NO: 324456 - DNA, 4551 bp, Artificial Sequence
  derived and/or modified sequence
atggaacccggaagtgatgactttctgcctcctcctgagtgcccggttttcgaaccctcttgggccgagtttcgagacccattgggttatatcgctaaaattcgccctattgctgaaaagtccggcatttgtaagattcgcccacctgccgactggcagcctccttttgcggttgaggtggacaactttaggtttacccctaggatccaaaggctgaacgagttggagatcgttgttgaggaggggggatacgaagctatctgcaaggaccggaggtgggccagagttgcacagagacttaattacccgcctggcaagaacatcggctctctgctcagatcccactacgaacgcattgtgtacccatacgagatgtatcagtccggggctaatttggtccaatgtaatacaaggcctttcgacaatgaggaaaaggataaggagtataaaccccactccataccactaaggcaatctgtgcagccttccaaattcaatagctatggccgaagagcgaaacgtttacagcctgatccagagccaactgaggaagacatcgaaaaaaaccccgagctgaagaaattgcaaatctatggagccggacccaagatgatggggctgggccttatggccaaagataaaaccctgcgcaaaaaggacaaagagggacccgagtgcccccctacagtggttgtgaaagaagagttggggggtgacgttaaggtcgagtctacctctcctaaaacttttttggaaagcaaggaggagctttctcactcgcctgagccatgcacgaagatgacaatgagattgcgccgaaatcatagcaacgcacagttcattgagtcatatgtttgcaggatgtgctccagaggagatgaggacgataaactgctgctgtgtgatggctgtgacgataactaccacatcttttgcttgttaccacctctgccggagatccccaagggggtgtggcggtgccctaagtgcgtcatggctgaatgcaagcgcccacctgaagccttcggcttcgaacaggccacccgcgagtacactttacagtccttcggggaaatggctgactcattcaaagctgactacttcaatatgcccgtgcacatggtgccaacagaactggtcgagaaagagttttggagattagtgaacagcatcgaggaggatgtgacagtggaatatggggctgatatccattccaaagaatttggaagtggattccccgtttccgacagtaagcggcatctaactccagaggaggaggaatatgccacaagtggttggaatctgaacgtcatgcctgtcttggaacagagtgttttgtgtcatattaatgctgatatcagcggaatgaaagtgccttggctgtacgttggcatggtgttttccgcattttgttggcatatcgaggatcactggtcatatagtataaactacctgcactggggagagcccaaaacttggtatggggtgccaagcttggctgccgagcatctggaggaggtgatgaaaaaactcaccccagagctcttcgattcccaacctgacttgcttcatcagttggtaaccctcatgaatccaaacaccctgatgtcccacggtgttcctgtagtgcgtaccaaccaatgtgcaggagagttcgttattactttccccagagcctatcattccggattcaaccagggctacaacttcgcagaagcagttaatttttgtactgccgactggctcccggcaggtcggcagtgcatcgagcactaccgtagattaagaagatactgcgtttttagccacgaggaactgatatgtaaaatggctgcctgccctgagaagctggatctgaaccttgctgccgcagtgcacaaagagatgttcataatggtacaagaggaacgcagactgagaaaagccctgcttgagaagggaattaccgaggcagagcgggaagctttcgagctgttaccagatgacgagcggcagtgtatcaagtgcaagaccacctgttttctctccgctcttgcgtgctatgactgccccgacggcttagtgtgcctctctcatattaatgatctgtgcaaatgtagcagctcccggcagtatcttaggtaccgttacacactcgacgagctgccagccatgctacacaagctcaaagtccgcgctgaatcctttgatacctgggccaataaagtccgcgtggcgctggaagtggaggatggacggaagcggagcctcgaggagctccgcgctttggaatcagaagccagagagagacgcttcccgaatagcgagctgctgcaacagctaaaaaactgtttgagcgaggctgaagcgtgtgtttctcgggctcttggcctggtgtccggtcaggaagctggcccacacagagtggccggactccaaatgacactgactgagctaagggccttccttgatcaaatgaacaatctgccttgtgcaatgcatcagataggagatgttaaaggggttttggaacaggtcgaagcctaccaggccgaagccagagaagcactcgcgtctctgccaagtagtcccggtctcctgcagagcctcctcgagagagggcgacagctgggagtggaggtgccagaggctcagcagttacagagacaggtggagcaggctcggtggcttgacgaggtgaaaagaaccctcgcaccgtctgcaaggagggggacactggctgttatgcggggtctgctcgtggcaggggcttccgtggctccatctcctgccgttgataaggcccaggccgagctgcaagaactgctcacaattgcggagcgctgggaggagaaagctcatttgtgcctagaagccagacagaagcacccccctgcaaccttggaggcaatcatccgggaagccgaaaacataccggtacatctccccaacattcaggccttgaaagaagcattggctaaagctagggcttggattgccgatgtcgacgagatccagaacggtgatcattacccttgtttggacgacctggagggactggtggccgtcgggcgtgacctgcctgtggggctggaagaactgcggcagctggagctgcaggtgctcaccgctcactcgtggcgtgagaaggcctccaagacctttctgaagaaaaactcctgttacactctcctggaggtgctgtgtccttgcgcagatgccggaagcgattcaactaagaggtccaggtggatggagaaagagcttggcctgtacaagtccgacaccgagctacttggtctgtccgcccaggatcttagagatcccggttcagtgattgtcgcctttaaggagggcgagcagaaagagaaggaggggatcctgcagctgcggaggaccaacagtgcaaagccctctcctctggcttccagttcaactgctagtagcacgacgtctatctgtgtgtgtggtcaggtcctcgctggggctggggctctgcagtgtgacctgtgccaagactggttccacggaagatgtgtgtccgtcccccgattgctgagttctcctcgtcctaatcctaccagtagccccctcctcgcctggtgggagtgggacaccaaattcttgtgtccactctgcatgcgatcacgaaggccaagacttgaaacgattctggcgctcctggtggccttgcagagactccctgtccgactgcccgagggagaagcactacagtgtctgactgagcgagcaattagctggcaagggcgagctagacaggcccttgcttccgaggatgttactgccttactggggcgactcgcggagctcaggcagagattgcaagccgagccgcgtcccgaggaaccccctaattatcctgcagcccctgcctcagacccactgcgcgagggcagtggtaaggacatgccgaaggtacagggtctcctggagaatggggactcggtaacatccccggaaaaggtggcacctgaggaagggagcgacctggaattgttatctagcctgctgccgcaactaaccggtccagtcttagagctccctgaggcaacaagggctccccttgaagaattgatgatggaaggggacctgcttgaggtgaccctggatgaaaatcactccatctggcagttacttcaggccggacagccaccagatttggagagaattcggaccttgctggagctggagaaagcagagagacatggttctagggccagaggacgcgcactcgagcgacgccgtaggaggaaagtcgaccgtggaggtgaaggagacgatcccgctagagaggaattagaacctaaacgtgtgcggtcgtcagggcctgaggcagaagaagtgcaggaggaagaagaacttgaagaggaaactggcggtgagggaccccctgcccctatcccaaccacaggatctccctccacacaagaaaaccagaacggtcttgagcctgcagagggcacaaccagcggcccatccgccccattctcaactcttaccccccgactccaccttccctgtccgcaacaaccacctcaacagcagctatag

SEQ ID NO: 324457 - DNA, 4551 bp, Artificial Sequence
  derived and/or modified sequence
atggagcccggcagcgacgacttcctgcccccccccgagtgccccgtgttcgagcccagctgggccgagttcagagaccccctgggctacatcgccaagatcagacccatcgccgagaagagcggcatctgcaagatcagaccccccgccgactggcagccccccttcgccgtggaggtggacaacttcagattcacccccagaatccagagactgaacgagctggagatcgtggtggaggagggcggctacgaggccatctgcaaggacagaagatgggccagagtggcccagagactgaactacccccccggcaagaacatcggcagcctgctgagaagccactacgagagaatcgtgtacccctacgagatgtaccagagcggcgccaacctggtgcagtgcaacaccagacccttcgacaacgaggagaaggacaaggagtacaagccccacagcatccccctgagacagagcgtgcagcccagcaagttcaacagctacggcagaagagccaagagactgcagcccgaccccgagcccaccgaggaggacatcgagaagaaccccgagctgaagaagctgcagatctacggcgccggccccaagatgatgggcctgggcctgatggccaaggacaagaccctgagaaagaaggacaaggagggccccgagtgcccccccaccgtggtggtgaaggaggagctgggcggcgacgtgaaggtggagagcaccagccccaagaccttcctggagagcaaggaggagctgagccacagccccgagccctgcaccaagatgaccatgagactgagaagaaaccacagcaacgcccagttcatcgagagctacgtgtgcagaatgtgcagcagaggcgacgaggacgacaagctgctgctgtgcgacggctgcgacgacaactaccacatcttctgcctgctgccccccctgcccgagatccccaagggcgtgtggagatgccccaagtgcgtgatggccgagtgcaagagaccccccgaggccttcggcttcgagcaggccaccagagagtacaccctgcagagcttcggcgagatggccgacagcttcaaggccgactacttcaacatgcccgtgcacatggtgcccaccgagctggtggagaaggagttctggagactggtgaacagcatcgaggaggacgtgaccgtggagtacggcgccgacatccacagcaaggagttcggcagcggcttccccgtgagcgacagcaagagacacctgacccccgaggaggaggagtacgccaccagcggctggaacctgaacgtgatgcccgtgctggagcagagcgtgctgtgccacatcaacgccgacatcagcggcatgaaggtgccctggctgtacgtgggcatggtgttcagcgccttctgctggcacatcgaggaccactggagctacagcatcaactacctgcactggggcgagcccaagacctggtacggcgtgcccagcctggccgccgagcacctggaggaggtgatgaagaagctgacccccgagctgttcgacagccagcccgacctgctgcaccagctggtgaccctgatgaaccccaacaccctgatgagccacggcgtgcccgtggtgagaaccaaccagtgcgccggcgagttcgtgatcaccttccccagagcctaccacagcggcttcaaccagggctacaacttcgccgaggccgtgaacttctgcaccgccgactggctgcccgccggcagacagtgcatcgagcactacagaagactgagaagatactgcgtgttcagccacgaggagctgatctgcaagatggccgcctgccccgagaagctggacctgaacctggccgccgccgtgcacaaggagatgttcatcatggtgcaggaggagagaagactgagaaaggccctgctggagaagggcatcaccgaggccgagagagaggccttcgagctgctgcccgacgacgagagacagtgcatcaagtgcaagaccacctgcttcctgagcgccctggcctgctacgactgccccgacggcctggtgtgcctgagccacatcaacgacctgtgcaagtgcagcagcagcagacagtacctgagatacagatacaccctggacgagctgcccgccatgctgcacaagctgaaggtgagagccgagagcttcgacacctgggccaacaaggtgagagtggccctggaggtggaggacggcagaaagagaagcctggaggagctgagagccctggagagcgaggccagagagagaagattccccaacagcgagctgctgcagcagctgaagaactgcctgagcgaggccgaggcctgcgtgagcagagccctgggcctggtgagcggccaggaggccggcccccacagagtggccggcctgcagatgaccctgaccgagctgagagccttcctggaccagatgaacaacctgccctgcgccatgcaccagatcggcgacgtgaagggcgtgctggagcaggtggaggcctaccaggccgaggccagagaggccctggccagcctgcccagcagccccggcctgctgcagagcctgctggagagaggcagacagctgggcgtggaggtgcccgaggcccagcagctgcagagacaggtggagcaggccagatggctggacgaggtgaagagaaccctggcccccagcgccagaagaggcaccctggccgtgatgagaggcctgctggtggccggcgccagcgtggcccccagccccgccgtggacaaggcccaggccgagctgcaggagctgctgaccatcgccgagagatgggaggagaaggcccacctgtgcctggaggccagacagaagcacccccccgccaccctggaggccatcatcagagaggccgagaacatccccgtgcacctgcccaacatccaggccctgaaggaggccctggccaaggccagagcctggatcgccgacgtggacgagatccagaacggcgaccactacccctgcctggacgacctggagggcctggtggccgtgggcagagacctgcccgtgggcctggaggagctgagacagctggagctgcaggtgctgaccgcccacagctggagagagaaggccagcaagaccttcctgaagaagaacagctgctacaccctgctggaggtgctgtgcccctgcgccgacgccggcagcgacagcaccaagagaagcagatggatggagaaggagctgggcctgtacaagagcgacaccgagctgctgggcctgagcgcccaggacctgagagaccccggcagcgtgatcgtggccttcaaggagggcgagcagaaggagaaggagggcatcctgcagctgagaagaaccaacagcgccaagcccagccccctggccagcagcagcaccgccagcagcaccaccagcatctgcgtgtgcggccaggtgctggccggcgccggcgccctgcagtgcgacctgtgccaggactggttccacggcagatgcgtgagcgtgcccagactgctgagcagccccagacccaaccccaccagcagccccctgctggcctggtgggagtgggacaccaagttcctgtgccccctgtgcatgagaagcagaagacccagactggagaccatcctggccctgctggtggccctgcagagactgcccgtgagactgcccgagggcgaggccctgcagtgcctgaccgagagagccatcagctggcagggcagagccagacaggccctggccagcgaggacgtgaccgccctgctgggcagactggccgagctgagacagagactgcaggccgagcccagacccgaggagccccccaactaccccgccgcccccgccagcgaccccctgagagagggcagcggcaaggacatgcccaaggtgcagggcctgctggagaacggcgacagcgtgaccagccccgagaaggtggcccccgaggagggcagcgacctggagctgctgagcagcctgctgccccagctgaccggccccgtgctggagctgcccgaggccaccagagcccccctggaggagctgatgatggagggcgacctgctggaggtgaccctggacgagaaccacagcatctggcagctgctgcaggccggccagccccccgacctggagagaatcagaaccctgctggagctggagaaggccgagagacacggcagcagagccagaggcagagccctggagagaagaagaagaagaaaggtggacagaggcggcgagggcgacgaccccgccagagaggagctggagcccaagagagtgagaagcagcggccccgaggccgaggaggtgcaggaggaggaggagctggaggaggagaccggcggcgagggcccccccgcccccatccccaccaccggcagccccagcacccaggagaaccagaacggcctggagcccgccgagggcaccaccagcggccccagcgcccccttcagcaccctgacccccagactgcacctgccctgcccccagcagcccccccagcagcagctgtag

SEQ ID NO: 324458 - protein, 1395 aa, Artificial Sequence
  derived and/or modified sequence
MLLPLPPQSSKPVPKKSQSSKIVPSHHDPSEKTGENCQTKISPSSLQESPSSLQGALKKRSAFEDLTNASQCQPVQPKKEANKEFVKVVSKKINRNTHALGLAKKNKRNLKWHKLEVTPVVASTTVVPNIMEKPLILDISTTSKTPNTEEASLFRKPLVLKEEPTIEDETLINKSLSLKKCSNHEEVSLLEKLQPLQEESDSDDAFVIEPMTFKKTHKTEEAAITKKTLSLKKKMCASQRKQSCQEESLAVQDVNMEEDSFFMESMSFKKKPKTEESIPTHKLSSLKKKCTIYGKICHFRKPPVLQTTICGAMSSIKKPTTEKETLFQELSVLQEKHTTEHEMSILKKSLALQKTNFKEDSLVKESLAFKKKPSTEEAIMMPVILKEQCMTEGKRSRLKPLVLQEITSGEKSLIMKPLSIKEKPSTEKESFSQEPSALQKKHTTQEEVSILKEPSSLLKSPTEESPFDEALAFTKKCTIEEAPPTKKPLILKRKHATQGTMSHLKKPLILQTTSGEKSLIKEPLPFKEEKVSLKKKCTTQEMMSICPELLDFQDMIGEDKNSFFMEPMSFRKNPTTEETVLTKTSLSLQEKKITQGKMSHLKKPLVLQKITSEEESFYKKLLPFKMKSTTEEKFLSQEPSALKEKHTTLQEVSLSKESLAIQEKATTEEEFSQELFSLHVKHTNKSGSLFQEALVLQEKTDAEEDSLKNLLALQEKSTMEEESLINKLLALKEELSAEAATNIQTQLSLKKKSTSHGKVFFLKKQLALNETINEEEFLNKQPLALEGYPSIAEGETLFKKLLAMQEEPSIEKEAVLKEPTIDTEAHFKEPLALQEEPSTEKEAVLKEPSVDTEAHFKETLALQEKPSIEQEALFKRHSALWEKPSTEKETIFKESLDLQEKPSIKKETLLKKPLALKMSTINEAVLFEDMIALNEKPTTGKELSFKEPLALQESPTYKEDTFLKTLLVPQVGTSPNVSSTAPESITSKSSIATMTSVGKSGTINEAFLFEDMITLNEKPTTGKELSFKEPLALQESPTCKEDTFLETFLIPQIGTSPYVFSTTPESITEKSSIATMTSVGKSRTTTESSACESASDKPVSPQAKGTPKEITPREDIDEDSSDPSFNPMYAKEIFSYMKEREEQFILTDYMNRQIEITSDMRAILVDWLVEVQVSFEMTHETLYLAVKLVDLYLMKAVCKKDKLQLLGATAFMIAAKFEEHNSPRVDDFVYICDDNYQRSEVLSMEINILNVLKCDINIPIAYHFLRRYARCIHTNMKTLTLSRYICEMTLQEYHYVQEKASKLAAASLLLALYMKKLGYWVPFLEHYSGYSISELHPLVRQLNKLLTFSSYDSLKAVYYKYSHPVFFEVAKIPALDMLKLEEILNCDCEAQGLVL

SEQ ID NO: 324459 - protein, 111 aa, Artificial Sequence
  derived and/or modified sequence
MLLPLPPQSSKPVPKKSQSSKIVPSHHDPSEKTGENCQTKISPSSLQESPSSLQGALKKRSAFEDLTNASQCQPVQPKKEANKEFVKVVSKKINRNTHALGLAKKNKRNLK

SEQ ID NO: 324460 - DNA, 4188 bp, Artificial Sequence
  derived and/or modified sequence
atgctgctgcccctgcccccccagagcagcaagcccgtgcccaagaagagccagagcagcaagatcgtgcccagccaccacgaccccagcgagaagaccggcgagaactgccagaccaagatcagccccagcagcctgcaggagagccccagcagcctgcagggcgccctgaagaagagaagcgccttcgaggacctgaccaacgccagccagtgccagcccgtgcagcccaagaaggaggccaacaaggagttcgtgaaggtggtgagcaagaagatcaacagaaacacccacgccctgggcctggccaagaagaacaagagaaacctgaagtggcacaagctggaggtgacccccgtggtggccagcaccaccgtggtgcccaacatcatggagaagcccctgatcctggacatcagcaccaccagcaagacccccaacaccgaggaggccagcctgttcagaaagcccctggtgctgaaggaggagcccaccatcgaggacgagaccctgatcaacaagagcctgagcctgaagaagtgcagcaaccacgaggaggtgagcctgctggagaagctgcagcccctgcaggaggagagcgacagcgacgacgccttcgtgatcgagcccatgaccttcaagaagacccacaagaccgaggaggccgccatcaccaagaagaccctgagcctgaagaagaagatgtgcgccagccagagaaagcagagctgccaggaggagagcctggccgtgcaggacgtgaacatggaggaggacagcttcttcatggagagcatgagcttcaagaagaagcccaagaccgaggagagcatccccacccacaagctgagcagcctgaagaagaagtgcaccatctacggcaagatctgccacttcagaaagccccccgtgctgcagaccaccatctgcggcgccatgagcagcatcaagaagcccaccaccgagaaggagaccctgttccaggagctgagcgtgctgcaggagaagcacaccaccgagcacgagatgagcatcctgaagaagagcctggccctgcagaagaccaacttcaaggaggacagcctggtgaaggagagcctggccttcaagaagaagcccagcaccgaggaggccatcatgatgcccgtgatcctgaaggagcagtgcatgaccgagggcaagagaagcagactgaagcccctggtgctgcaggagatcaccagcggcgagaagagcctgatcatgaagcccctgagcatcaaggagaagcccagcaccgagaaggagagcttcagccaggagcccagcgccctgcagaagaagcacaccacccaggaggaggtgagcatcctgaaggagcccagcagcctgctgaagagccccaccgaggagagccccttcgacgaggccctggccttcaccaagaagtgcaccatcgaggaggccccccccaccaagaagcccctgatcctgaagagaaagcacgccacccagggcaccatgagccacctgaagaagcccctgatcctgcagaccaccagcggcgagaagagcctgatcaaggagcccctgcccttcaaggaggagaaggtgagcctgaagaagaagtgcaccacccaggagatgatgagcatctgccccgagctgctggacttccaggacatgatcggcgaggacaagaacagcttcttcatggagcccatgagcttcagaaagaaccccaccaccgaggagaccgtgctgaccaagaccagcctgagcctgcaggagaagaagatcacccagggcaagatgagccacctgaagaagcccctggtgctgcagaagatcaccagcgaggaggagagcttctacaagaagctgctgcccttcaagatgaagagcaccaccgaggagaagttcctgagccaggagcccagcgccctgaaggagaagcacaccaccctgcaggaggtgagcctgagcaaggagagcctggccatccaggagaaggccaccaccgaggaggagttcagccaggagctgttcagcctgcacgtgaagcacaccaacaagagcggcagcctgttccaggaggccctggtgctgcaggagaagaccgacgccgaggaggacagcctgaagaacctgctggccctgcaggagaagagcaccatggaggaggagagcctgatcaacaagctgctggccctgaaggaggagctgagcgccgaggccgccaccaacatccagacccagctgagcctgaagaagaagagcaccagccacggcaaggtgttcttcctgaagaagcagctggccctgaacgagaccatcaacgaggaggagttcctgaacaagcagcccctggccctggagggctaccccagcatcgccgagggcgagaccctgttcaagaagctgctggccatgcaggaggagcccagcatcgagaaggaggccgtgctgaaggagcccaccatcgacaccgaggcccacttcaaggagcccctggccctgcaggaggagcccagcaccgagaaggaggccgtgctgaaggagcccagcgtggacaccgaggcccacttcaaggagaccctggccctgcaggagaagcccagcatcgagcaggaggccctgttcaagagacacagcgccctgtgggagaagcccagcaccgagaaggagaccatcttcaaggagagcctggacctgcaggagaagcccagcatcaagaaggagaccctgctgaagaagcccctggccctgaagatgagcaccatcaacgaggccgtgctgttcgaggacatgatcgccctgaacgagaagcccaccaccggcaaggagctgagcttcaaggagcccctggccctgcaggagagccccacctacaaggaggacaccttcctgaagaccctgctggtgccccaggtgggcaccagccccaacgtgagcagcaccgcccccgagagcatcaccagcaagagcagcatcgccaccatgaccagcgtgggcaagagcggcaccatcaacgaggccttcctgttcgaggacatgatcaccctgaacgagaagcccaccaccggcaaggagctgagcttcaaggagcccctggccctgcaggagagccccacctgcaaggaggacaccttcctggagaccttcctgatcccccagatcggcaccagcccctacgtgttcagcaccacccccgagagcatcaccgagaagagcagcatcgccaccatgaccagcgtgggcaagagcagaaccaccaccgagagcagcgcctgcgagagcgccagcgacaagcccgtgagcccccaggccaagggcacccccaaggagatcacccccagagaggacatcgacgaggacagcagcgaccccagcttcaaccccatgtacgccaaggagatcttcagctacatgaaggagagagaggagcagttcatcctgaccgactacatgaacagacagatcgagatcaccagcgacatgagagccatcctggtggactggctggtggaggtgcaggtgagcttcgagatgacccacgagaccctgtacctggccgtgaagctggtggacctgtacctgatgaaggccgtgtgcaagaaggacaagctgcagctgctgggcgccaccgccttcatgatcgccgccaagttcgaggagcacaacagccccagagtggacgacttcgtgtacatctgcgacgacaactaccagagaagcgaggtgctgagcatggagatcaacatcctgaacgtgctgaagtgcgacatcaacatccccatcgcctaccacttcctgagaagatacgccagatgcatccacaccaacatgaagaccctgaccctgagcagatacatctgcgagatgaccctgcaggagtaccactacgtgcaggagaaggccagcaagctggccgccgccagcctgctgctggccctgtacatgaagaagctgggctactgggtgcccttcctggagcactacagcggctacagcatcagcgagctgcaccccctggtgagacagctgaacaagctgctgaccttcagcagctacgacagcctgaaggccgtgtactacaagtacagccaccccgtgttcttcgaggtggccaagatccccgccctggacatgctgaagctggaggagatcctgaactgcgactgcgaggcccagggcctggtgctgtag

SEQ ID NO: 324461 - DNA, 4509 bp, Artificial Sequence
  derived and/or modified sequence
aggtgtctggaactggattacagtttcttctgattgaacgcagcctttgaatactgcctggcctatcgcgaatacatccctgccttggacaagacgcagctgaatctctaagtgatgctactgccactaccaccccagagctccaaacctgtgcctaagaaatctcagtccagcaaaattgtgcccagtcatcatgacccatctgaaaagacgggggagaattgccaaacgaagatatctccatcttcacttcaggagtctccatcttcacttcagggagcactcaaaaagagatcagcttttgaagatctcactaatgcttctcaatgtcaacctgtccagcccaagaaagaagccaataaagagtttgtaaaagttgtttccaagaagataaacaggaacacacatgctcttggactggccaaaaagaataagcggaatctaaaatggcataagctggaagtcacaccagtagtagcctctactaccgtggtaccaaacattatggagaaaccactcattctagacatatccaccacctccaaaacacccaacactgaggaggcatctctcttcagaaagccattagttttaaaggaggaacccactattgaggatgaaacccttatcaataagtcattatctttaaaaaagtgctcaaatcatgaggaggtgtccttactggaaaagctacagcccctgcaggaggagagtgacagtgatgatgcgtttgttatagagccaatgacttttaagaagacacataaaactgaggaggcagccatcaccaagaagacattatccttaaagaagaagatgtgtgcaagtcagcggaagcagtcctgccaggaagagtcgttggctgtgcaggatgtcaatatggaagaggattccttctttatggagtcaatgagttttaagaagaagcctaaaactgaggagtcaatccccacccataagttatcatctttaaagaagaaatgtaccatttatgggaagatatgccactttaggaagccaccagtattgcagacaaccatctgtggagcaatgtcctccattaagaagcctaccactgagaaggagacacttttccaagagctatctgtattgcaagagaaacacaccactgagcatgagatgtccatcttgaagaaatcattggccttgcagaagaccaactttaaagaggattcccttgttaaggagtcgttagcctttaagaagaagcctagcactgaggaggcaatcatgatgccagtaatattgaaggagcagtgcatgactgaggggaagaggtcccgtctgaagccattagtattgcaggagatcacctctggagagaagtcgctcattatgaagccattgtccattaaagaaaagccatctactgagaaggagtccttttcccaggaaccatctgcattgcaaaagaagcacaccactcaggaggaggtttccatcttaaaggagccctcgtccttgctaaagtctccaactgaggagtcaccttttgatgaggctttggcttttacaaagaagtgtaccattgaggaggcaccccccaccaagaagcctttaattttaaagaggaagcatgccactcaggggacaatgtcccacttgaagaaaccactaatattacagaccacctctggagaaaagtcacttattaaggagccactgccctttaaagaagaaaaagtgtctttaaagaaaaagtgtaccacacaagagatgatgtccatctgtccagaactgttggactttcaggatatgattggtgaagataagaattctttctttatggagccaatgtcatttaggaagaaccctacaactgaggagacagtacttaccaagacatcgttgtctttacaggaaaagaaaattactcaggggaagatgtcccacttaaagaagccactggtcttgcagaagatcacttctgaggaggagtcattctataagaagctgttgccctttaagatgaaatctacaacggaagaaaagttcctctcccaggaaccatctgcattgaaagagaagcataccaccttgcaggaagtgtccctctcaaaagagtcattggccatccaagagaaggctaccactgaggaggaattctctcaggaactattttcattgcatgttaagcataccaacaaaagtgggtccctcttccaggaggctttggtcttgcaagagaagactgatgccgaagaggattccttgaagaacttgttggctttgcaggagaaaagcaccatggaagaagagtcccttatcaataagctattggctctgaaggaggagctttctgctgaggcagccacaaacatacagacacaattatctttaaagaagaagtccacttctcatggaaaagtgttcttcctgaagaagcagttggctttgaatgagaccatcaatgaagaggagttccttaataagcagccactggccttggaggggtatcccagcattgcggagggggagaccctcttcaagaagcttttggccatgcaggaggagcccagcattgagaaggaagctgtcctcaaggagcccactattgacacagaagctcactttaaggaacctttggccttgcaggaggagcccagcactgagaaggaggctgtcctcaaggagcccagtgttgacacagaagctcactttaaggaaactttggccttgcaggagaagcccagcattgagcaggaggccctctttaagcgacactcagctttgtgggagaagcccagcactgagaaggagaccatcttcaaggagtctttggacttgcaagagaagcccagcattaagaaagagaccctcctcaaaaagccattagccttgaagatgtctaccatcaatgaggcagtcctcttcgaagatatgatagctctgaatgagaaacccaccactgggaaggagttgtccttcaaggagccattagccttacaagagagtcccacctacaaggaagacacctttctcaaaacattgttggtcccccaagttggaaccagcccaaatgtgtctagcactgcccctgaatccataaccagcaagtccagcattgctaccatgaccagtgtgggcaaatctggtaccatcaatgaggcattcctcttcgaagatatgataactctgaatgagaaacccaccactgggaaggagttgtccttcaaggagccattggccttacaagagagtcccacctgcaaggaagacacctttctggaaacattcttgatcccccaaattggaaccagcccatatgtgtttagcaccacccctgaatccataacagagaagtccagcattgcaaccatgaccagcgtgggcaagtccaggaccaccaccgagtccagtgcatgtgaatctgcttctgataaacctgtctcaccacaggccaagggaacaccaaaggagataaccccacgggaagatattgatgaggacagcagtgatccaagtttcaacccaatgtatgccaaggaaatcttcagttacatgaaagagagagaggaacagtttatacttacagattacatgaacaggcagattgaaatcaccagtgacatgagggccattcttgtggactggttggtggaggtgcaggtgtcctttgagatgacccatgagaccctgtacttggcagtgaagctggtggatctctacctaatgaaggcagtatgcaagaaggataagttacaactccttggtgccactgcctttatgattgcagcaaaatttgaggagcacaactcacctcgtgtggatgactttgtgtacatctgtgatgataattatcagcgatctgaggtactcagcatggaaatcaacatcctgaacgtcctcaaatgtgacattaacattcccatcgcctaccattttctgcgcagatatgctaggtgtatccacaccaacatgaagacactgaccttgtcccgctacatctgcgagatgaccctgcaggaataccactatgtccaggagaaggcttccaagctagctgctgcctccttactcctggccctctacatgaagaagctcggatactgggttcccttcctggagcattacagtggctacagtatctctgagcttcaccccttggtcagacagctgaacaaactgctgactttcagttcttacgatagtctcaaggctgtgtattacaagtattctcacccggtcttctttgaagtcgccaaaatccctgccttggatatgttgaagctggaggagattttgaactgtgattgtgaggctcagggcctggtactctagcagcagccacagggctaagcatgcatgttaacagggtatatttattctatgttcgaatttgtcttttgatcgcttttattcatttttcctttctttgtcttttcccaaactgataatgttataaatatttatgttgcttgtttttatgaaagaaaaaatattgtcatatttgactacaaatttaataaaaaattaatggttattgtt

SEQ ID NO: 324462 - DNA, 4693 bp, Artificial Sequence
  derived and/or modified sequence
gtggaagcatttccgtcattctgagacagttgggctgaggcggttggtcgcctctctctctctctctctctgttcctcatctacattttgattggtttatttttgtattgttttctttcagtttccgataggtggagaacattctgctaatagcttttcttccagtccatttgtggcttgttaaaggtgtctggaactggattacagtttcttctgattgaacgcagcctttgaatactgcctggcctatcgcgaatacatccctgccttggacaagacgcagctgaatctctaagtgatgctactgccactaccaccccagagctccaaacctgtgcctaagaaatctcagtccagcaaaattgtgcccagtcatcatgacccatctgaaaagacgggggagaattgccaaacgaagatatctccatcttcacttcaggagtctccatcttcacttcagggagcactcaaaaagagatcagcttttgaagatctcactaatgcttctcaatgtcaacctgtccagcccaagaaagaagccaataaagagtttgtaaaagttgtttccaagaagataaacaggaacacacatgctcttggactggccaaaaagaataagcggaatctaaaatggcataagctggaagtcacaccagtagtagcctctactaccgtggtaccaaacattatggagaaaccactcattctagacatatccaccacctccaaaacacccaacactgaggaggcatctctcttcagaaagccattagttttaaaggaggaacccactattgaggatgaaacccttatcaataagtcattatctttaaaaaagtgctcaaatcatgaggaggtgtccttactggaaaagctacagcccctgcaggaggagagtgacagtgatgatgcgtttgttatagagccaatgacttttaagaagacacataaaactgaggaggcagccatcaccaagaagacattatccttaaagaagaagatgtgtgcaagtcagcggaagcagtcctgccaggaagagtcgttggctgtgcaggatgtcaatatggaagaggattccttctttatggagtcaatgagttttaagaagaagcctaaaactgaggagtcaatccccacccataagttatcatctttaaagaagaaatgtaccatttatgggaagatatgccactttaggaagccaccagtattgcagacaaccatctgtggagcaatgtcctccattaagaagcctaccactgagaaggagacacttttccaagagctatctgtattgcaagagaaacacaccactgagcatgagatgtccatcttgaagaaatcattggccttgcagaagaccaactttaaagaggattcccttgttaaggagtcgttagcctttaagaagaagcctagcactgaggaggcaatcatgatgccagtaatattgaaggagcagtgcatgactgaggggaagaggtcccgtctgaagccattagtattgcaggagatcacctctggagagaagtcgctcattatgaagccattgtccattaaagaaaagccatctactgagaaggagtccttttcccaggaaccatctgcattgcaaaagaagcacaccactcaggaggaggtttccatcttaaaggagccctcgtccttgctaaagtctccaactgaggagtcaccttttgatgaggctttggcttttacaaagaagtgtaccattgaggaggcaccccccaccaagaagcctttaattttaaagaggaagcatgccactcaggggacaatgtcccacttgaagaaaccactaatattacagaccacctctggagaaaagtcacttattaaggagccactgccctttaaagaagaaaaagtgtctttaaagaaaaagtgtaccacacaagagatgatgtccatctgtccagaactgttggactttcaggatatgattggtgaagataagaattctttctttatggagccaatgtcatttaggaagaaccctacaactgaggagacagtacttaccaagacatcgttgtctttacaggaaaagaaaattactcaggggaagatgtcccacttaaagaagccactggtcttgcagaagatcacttctgaggaggagtcattctataagaagctgttgccctttaagatgaaatctacaacggaagaaaagttcctctcccaggaaccatctgcattgaaagagaagcataccaccttgcaggaagtgtccctctcaaaagagtcattggccatccaagagaaggctaccactgaggaggaattctctcaggaactattttcattgcatgttaagcataccaacaaaagtgggtccctcttccaggaggctttggtcttgcaagagaagactgatgccgaagaggattccttgaagaacttgttggctttgcaggagaaaagcaccatggaagaagagtcccttatcaataagctattggctctgaaggaggagctttctgctgaggcagccacaaacatacagacacaattatctttaaagaagaagtccacttctcatggaaaagtgttcttcctgaagaagcagttggctttgaatgagaccatcaatgaagaggagttccttaataagcagccactggccttggaggggtatcccagcattgcggagggggagaccctcttcaagaagcttttggccatgcaggaggagcccagcattgagaaggaagctgtcctcaaggagcccactattgacacagaagctcactttaaggaacctttggccttgcaggaggagcccagcactgagaaggaggctgtcctcaaggagcccagtgttgacacagaagctcactttaaggaaactttggccttgcaggagaagcccagcattgagcaggaggccctctttaagcgacactcagctttgtgggagaagcccagcactgagaaggagaccatcttcaaggagtctttggacttgcaagagaagcccagcattaagaaagagaccctcctcaaaaagccattagccttgaagatgtctaccatcaatgaggcagtcctcttcgaagatatgatagctctgaatgagaaacccaccactgggaaggagttgtccttcaaggagccattagccttacaagagagtcccacctacaaggaagacacctttctcaaaacattgttggtcccccaagttggaaccagcccaaatgtgtctagcactgcccctgaatccataaccagcaagtccagcattgctaccatgaccagtgtgggcaaatctggtaccatcaatgaggcattcctcttcgaagatatgataactctgaatgagaaacccaccactgggaaggagttgtccttcaaggagccattggccttacaagagagtcccacctgcaaggaagacacctttctggaaacattcttgatcccccaaattggaaccagcccatatgtgtttagcaccacccctgaatccataacagagaagtccagcattgcaaccatgaccagcgtgggcaagtccaggaccaccaccgagtccagtgcatgtgaatctgcttctgataaacctgtctcaccacaggccaagggaacaccaaaggagataaccccacgggaagatattgatgaggacagcagtgatccaagtttcaacccaatgtatgccaaggaaatcttcagttacatgaaagagagagaggaacagtttatacttacagattacatgaacaggcagattgaaatcaccagtgacatgagggccattcttgtggactggttggtggaggtgcaggtgtcctttgagatgacccatgagaccctgtacttggcagtgaagctggtggatctctacctaatgaaggcagtatgcaagaaggataagttacaactccttggtgccactgcctttatgattgcagcaaaatttgaggagcacaactcacctcgtgtggatgactttgtgtacatctgtgatgataattatcagcgatctgaggtactcagcatggaaatcaacatcctgaacgtcctcaaatgtgacattaacattcccatcgcctaccattttctgcgcagatatgctaggtgtatccacaccaacatgaagacactgaccttgtcccgctacatctgcgagatgaccctgcaggaataccactatgtccaggagaaggcttccaagctagctgctgcctccttactcctggccctctacatgaagaagctcggatactgggttcccttcctggagcattacagtggctacagtatctctgagcttcaccccttggtcagacagctgaacaaactgctgactttcagttcttacgatagtctcaaggctgtgtattacaagtattctcacccggtcttctttgaagtcgccaaaatccctgccttggatatgttgaagctggaggagattttgaactgtgattgtgaggctcagggcctggtactctagcagcagccacagggctaagcatgcatgttaacagggtatatttattctatgttcgaatttgtcttttgatcgcttttattcatttttcctttctttgtcttttcccaaactgataatgttataaatatttatgttgcttgtttttatgaaagaaaaaatattgtcatatttgactacaaatttaataaaaaattaatggttattgtt

SEQ ID NO: 324463 - DNA, 4188 bp, Artificial Sequence
  derived and/or modified sequence
atgctgctgcctcttcccccccagtctagcaaacccgtgcctaaaaagagtcagtcctctaaaatcgtgccatcacatcatgatcccagcgagaagactggcgagaactgccaaaccaagatcagcccaagtagtctgcaagagtccccttcctcccttcagggcgctctgaaaaagcgaagtgcattcgaggatctcacgaacgccagccagtgtcagccagtgcaacctaaaaaagaggccaataaggaattcgtgaaagtggtaagcaaaaagattaacaggaatacccacgcgctgggcttggctaaaaaaaacaaacgcaatctcaaatggcacaagctggaggtcacccccgtggtggccagcacaaccgtcgtcccaaatatcatggagaagcctctgatcctcgatatttccaccacttccaaaactccaaataccgaagaagcatcgctgtttcggaagccactggtgctgaaagaggaacccacgatcgaggacgagaccctcattaataaatcattgtccctaaagaaatgttcaaaccacgaggaagtgtctctgcttgaaaaactccagccattgcaggaggagtccgacagtgacgacgcattcgtgatcgagcctatgacctttaagaaaacgcacaagaccgaggaggcggctataaccaagaaaactctgagcctgaagaagaaaatgtgcgcctcccagcgcaagcaaagctgtcaagaagaatccctagctgttcaggatgtcaacatggaggaagattccttcttcatggagtcgatgtcgtttaaaaaaaagccaaaaacagaggagagtatcccgacacacaagctgtcatctctcaagaaaaagtgcacaatctatgggaagatctgtcattttcgtaaacctcctgtgttgcagacaacaatctgcggcgctatgtcttccattaaaaaacccacaacggagaaagaaaccctcttccaagagctgtctgttttacaggagaagcatactacagaacacgagatgtctatcctgaagaagtccctcgctcttcagaagaccaattttaaagaagactccctcgtcaaggaatctttggcgttcaagaaaaagcccagtacagaggaagccatcatgatgccagtcatcctcaaagaacagtgtatgaccgaaggcaagcgatctcggctcaagccactcgtcttgcaagagataacctctggggaaaaaagcctgattatgaaacctctgagtattaaggagaaacccagcactgagaaggaatcctttagtcaggagccatccgcgctccagaaaaagcatacaacgcaggaagaggtctcaatactcaaggagccatcctctctgctaaagtctccgaccgaggagagtccttttgacgaggctctggcctttactaagaagtgtactatcgaggaggctccccccaccaaaaagccactgatcctcaaaagaaagcatgccactcagggcaccatgtctcatttgaagaagccactaattttgcaaactacgagtggggagaagtcgcttatcaaggagcccttgcccttcaaagaagagaaagtgtccctgaaaaaaaaatgtactactcaggaaatgatgtcaatctgccctgagctcctcgatttccaggatatgattggagaggacaaaaactctttcttcatggagccgatgagcttccgcaagaacccaaccacagaggagaccgttctgaccaagacgtccctgtccctccaagaaaagaagatcactcagggaaagatgtcccatttaaaaaagccactagtgctccaaaagataacatcagaggaagagagcttctacaagaagctgctaccgttcaagatgaagtctactaccgaagagaagttcctgtctcaagagcccagcgccctgaaggaaaagcacacaactctgcaggaggtaagcctctccaaagaatcccttgccatccaagagaaagctaccacagaggaagagttcagccaggaattgttttccctgcatgtcaagcatactaataagagcggcagcttatttcaggaggctctagtcctccaggagaagacagacgccgaggaggatagcctcaaaaaccttctcgcgctgcaggaaaagagtacaatggaggaggagtctctgataaataagttactcgccctgaaagaggagcttagtgcggaagctgctactaatattcagactcagctcagtctcaagaaaaaatcaacttcccatggaaaggtgttctttctgaagaaacagcttgcgcttaacgaaaccatcaacgaggaagagttcctgaacaaacagcccctcgccctggaaggctatccaagtatcgctgagggggagaccctgtttaaaaagctgctcgccatgcaagaagagccatccattgaaaaggaagctgtacttaaggaaccaactatagatacggaggcccacttcaaggagcccctggctctgcaagaagaacctagcaccgaaaaagaggccgtgctgaaggagccaagtgtcgacacagaggcacacttcaaagagacccttgcactgcaggagaaacccagcattgaacaggaggctctgttcaagcgccattcggcactgtgggagaagcccagcactgagaaggagaccattttcaaggagtcgctggacctgcaggagaagccctccattaagaaagagaccctcctgaagaagcctctcgcgctgaaaatgtctacaataaacgaagctgtcctcttcgaggatatgatcgctctcaacgaaaagccgacaactggtaaagaacttagcttcaaggaacccttggccttgcaggagagtcctacctataaggaggacactttcctaaaaacactgctcgtgccccaggtaggaaccagccctaacgtgtctagcacggctcctgaatccatcacatcgaagtctagtattgccactatgaccagcgtgggcaaatctgggaccatcaatgaggcttttctctttgaggatatgatcaccctgaacgagaagccaaccacaggcaaggagctgagcttcaaggagccccttgctcttcaagaaagcccaacctgcaaggaagataccttcttagagaccttcctcatccctcaaataggcacaagcccttatgtattctccaccactcccgagagcataactgaaaaaagctcaatcgcgaccatgaccagcgtgggcaaaagtcgcactaccacagaatcatctgcttgcgaatccgccagcgataaacccgtgtcgccccaggcgaagggaacaccgaaggagataactcctcgagaagacatcgacgaagactcatctgatccgagttttaatccaatgtacgcgaaggaaatctttagctacatgaaagaacgggaagaacagttcatcctcaccgattacatgaataggcagatcgagatcacgtctgatatgcgtgcaatactggtcgattggttggtagaggtccaagtcagtttcgagatgacacacgagacactctatctggctgtaaaattagtggacctctatcttatgaaggccgtgtgcaagaaagataaattacagcttttgggtgccaccgctttcatgattgccgccaagttcgaggaacacaattctcccagggtggatgattttgtgtatatatgcgacgacaactatcaaagaagcgaggtgctctctatggagattaatatactgaacgtgcttaagtgcgacattaacatacctatcgcctaccatttcttacgcaggtacgctaggtgtattcacaccaacatgaagacgctgaccctgtctaggtatatttgcgaaatgacactccaggagtaccactatgttcaggagaaggctagtaagctcgcggccgcgagcctgcttcttgcgttatacatgaagaagttgggttattgggtacccttcctggaacactattctggatactcaatttctgagctgcaccccctggtgcgtcagctcaataagctgcttaccttcagttcatatgattctctaaaagctgtgtattataaatattctcaccccgtcttttttgaggtggccaagattccggccctggacatgttaaagctcgaggagatcctcaactgtgactgtgaagcacagggcttggttctttag

SEQ ID NO: 324464 - DNA, 4188 bp, Artificial Sequence
  derived and/or modified sequence
atgcttctgcccctgcccccgcaaagctctaagcctgtgccaaaaaagagccagagcagtaagatcgtcccctctcatcacgatccttcagaaaagacgggcgagaattgtcaaacaaaaatatctccttcaagtctgcaagagtctccatcttccttgcagggcgcacttaagaaacgcagcgcctttgaggacctgacaaacgctagtcagtgtcagcccgtacagcccaagaaagaagccaataaggaattcgttaaggtggtgagcaagaaaatcaaccgaaatacacacgccctgggactggccaagaagaataaacggaacttgaagtggcataagctggaggtcacaccagtcgtggctagcacaacggtggtgcctaatataatggaaaaaccactgatactcgacatctccactacatccaagacccccaacacggaggaggcctcattgttccgcaagccactagtgctaaaagaagaaccgacgattgaagatgagacgttgatcaataagtctctcagtcttaaaaaatgtagcaaccacgaagaagtctcacttctggagaagctccagcctctgcaggaggagtctgattcagacgacgcttttgtgatcgagccaatgacatttaagaaaacccacaaaactgaagaggcagcgattaccaagaagacgctgtccttgaaaaagaaaatgtgcgcatcgcagcgtaagcaaagctgccaggaggagagtctggcagtgcaggacgtgaacatggaggaggatagtttctttatggagagcatgagcttcaagaaaaagcccaaaacagaggaatcaattcccacgcataagctaagctccctcaagaaaaagtgtactatatacggcaagatctgtcactttagaaagcctcctgtgctacagacaacaatatgcggcgccatgtcttctattaaaaaacctactaccgagaaagaaaccctgttccaggagttgtccgtactgcaagagaaacacacgaccgagcacgaaatgtccatactcaaaaaaagtctcgccctgcagaagaccaattttaaagaggactctttggtgaaggagagcctggccttcaaaaagaaaccaagtaccgaagaagccataatgatgcctgtgatcctgaaggaacagtgtatgaccgagggaaagcgaagtagactgaagccactggtgcttcaagaaatcacttctggtgagaagtcactgatcatgaaacctctgagtattaaggagaagccctccaccgaaaaggaatccttctcacaggaacccagcgctctgcagaagaaacacacgacgcaagaagaggtttccatcctgaaagaacctagctctcttcttaaatctcctacggaggagtcacccttcgacgaggctctggcctttactaaaaagtgcacaattgaggaagcacccccaacaaagaagcccctaatattgaagagaaaacacgcgacccagggtaccatgagccacctgaaaaaacccttgattctgcagacgacctccggggagaaaagtctgattaaagaaccattaccattcaaagaggaaaaagtgtcattaaagaagaaatgtacaactcaggagatgatgtcaatctgtcccgagttgctggacttccaggatatgatcggggaagataagaattcattcttcatggaaccaatgtccttccggaagaaccctaccacggaggaaactgtcctcacaaagacaagcctcagtctccaggagaagaaaatcactcagggtaaaatgtcacatctaaaaaaacccctggttctgcaaaagataacctccgaggaggaatctttttacaaaaaactgcttccttttaagatgaagagcaccacagaagagaagttcctgtcacaggaaccatccgcacttaaagagaagcacactactctccaggaagtgtcactcagcaaggagagtttggcaatccaggaaaaagccacgacagaagaggaattctctcaggaattgttctccttgcacgtcaagcacactaataaatccggaagcctgttccaggaggcattagtgttacaagaaaagacggatgccgaggaggactccctgaaaaatttgctggccctgcaggagaaatccactatggaggaagagagcctaatcaataaactcctggccttgaaggaggaactgagcgccgaggcagccaccaacatccagactcagttgtccttgaagaagaaaagcacatcacacggaaaggtctttttcctcaaaaagcagctagccctgaacgagactatcaacgaagaagaatttcttaacaaacagccattggcactggagggatatccctctatagcagaaggcgagacattatttaaaaagttgcttgctatgcaggaagagccgtctatcgagaaagaagccgtgttgaaagaaccaacaattgatacagaagctcactttaaagagcctttggcactccaggaggaacctagtaccgagaaggaggccgtactcaaagagccctcagtggatacggaagcccattttaaggaaacactcgccctccaagagaagcccagcatagagcaggaggccctgttcaaaagacacagcgctctttgggaaaagccatcaaccgaaaaggaaacaatctttaaagaaagtttggatcttcaggagaaaccttccatcaagaaggagaccctgctgaagaaacctctcgctctcaagatgtccaccataaacgaggctgtactgtttgaggacatgattgcactcaacgagaaacctacaacaggaaaagagttgagttttaaggagcctctggccctccaggaatcacctacctataaggaggacaccttcctgaaaacactccttgtacctcaagtgggtacatctcctaacgtcagttccaccgcccccgagtctatcacatccaaaagttcaattgccacaatgacttccgtgggcaaatcagggactattaacgaggctttcttgtttgaagatatgatcacacttaacgagaaacccacgaccgggaaggagctgtcattcaaagagcccctggccctccaggaaagcccaacttgcaaagaggacaccttcctcgagaccttcctcattcctcagatcggaacctccccttacgtgtttagcaccacaccagagtcaatcacggagaagagctcaatagcaactatgacaagtgtgggaaagagccgcacaaccaccgaatcatcagcttgtgaaagcgccagtgataagcccgtgtcaccacaggcaaaaggtacacccaaggaaatcacaccgcgagaagatatagatgaagatagcagcgaccccagttttaacccaatgtatgctaaggagatcttctcatatatgaaagaaagagaagaacaattcatcttgacagactacatgaacagacagatcgagattacaagcgacatgcgcgcaatcctggtcgactggctggttgaagtccaagtcagcttcgagatgacccacgaaaccctgtatcttgccgtgaaactcgtagacctgtacctgatgaaggcagtgtgcaagaaggacaagttacaactgctgggtgcgactgcctttatgatcgcggcaaagttcgaagaacacaatagcccgcgggtcgacgatttcgtgtatatttgcgacgacaattaccagagatcagaggtgttgtccatggagattaacatcctcaacgtcctaaaatgcgacattaacatcccgatagcttatcactttttgcggcgttacgcccggtgtattcataccaatatgaaaaccctgacactttcgcgatacatctgcgaaatgacactgcaggaataccactatgtccaggagaaagcatcaaaattagccgctgcatctctcctcctcgccctgtatatgaagaaactgggatactgggtcccctttttagagcattacagcggctactccattagcgaattgcaccctcttgtcagacagctgaacaagctgctcaccttctcttcttacgattctctgaaggctgtctattataagtacagccacccagtgttttttgaagtggccaagatcccggcactggacatgctaaagctcgaagagattttgaactgcgactgtgaagcccagggtctggtgctctag

SEQ ID NO: 324465 - DNA, 4188 bp, Artificial Sequence
  derived and/or modified sequence
atgctcctgcctctccccccacagtcatccaaacccgtgcctaaaaagtcccagagcagcaagatcgtgccctcccatcacgatccatccgaaaaaactggtgagaattgccagaccaaaatttctccaagctccctccaggagagcccctcttcactgcagggcgctctcaagaagcgttcagccttcgaggacttgaccaacgcctcccagtgtcagcctgtccagcccaagaaggaggctaataaagaattcgtgaaagtggtctctaaaaagattaacagaaacacacatgccctgggattagccaaaaaaaacaagcgcaacctgaagtggcataagctggaggtgacgcccgtagtagcctccacaacagttgtgcccaacatcatggagaagccattgatccttgacatttcgacaacctccaagactcctaatacagaggaggcatctcttttccggaaacctctcgtacttaaggaggagcccaccattgaggacgagaccctgatcaacaagagtctaagcctgaaaaagtgtagcaatcacgaggaggtcagcctgctggaaaaactgcagccgctccaagaggagtccgattccgacgacgctttcgtgattgaacctatgactttcaagaagactcacaagacagaggaggctgctataacgaagaagacattaagcttgaaaaagaaaatgtgcgcatcccagcgaaaacaaagctgccaggaggaaagtctggccgtccaggacgtaaacatggaggaagattcgttctttatggagagcatgtcattcaagaaaaaaccaaaaaccgaagagagtatccctacccataaactctcaagcttaaagaaaaaatgtacgatatatgggaaaatttgccactttaggaaacccccagttctgcagacaaccatctgcggggcgatgagcagtattaagaaaccgacgaccgaaaaagaaactctgtttcaggaactgagcgtgctgcaagagaaacatactacggagcacgagatgtctatcctgaagaaatctttagctctccagaagacgaacttcaaggaggacagtctggtaaaggagagcctggcatttaagaaaaaacccagcacagaggaagctatcatgatgccagtaatccttaaggagcagtgcatgacagagggcaagcgctcacgattaaaacctctggtgcttcaggagataacctctggcgagaaatcccttatcatgaaacctttatccatcaaggagaagccatctacagagaaagaaagcttctcccaagagccctcagccctgcaaaaaaaacacaccacccaggaagaggtgtcaattctcaaggagccttcctccttgttgaaatctcccactgaggagagcccttttgacgaagctctcgcctttactaagaaatgcacaatagaggaagcccctcctactaaaaagcccctcatccttaagcggaagcatgccacccaaggtactatgtcgcatttaaagaagcccttaatccttcagacaacgtctggtgagaagtcacttataaaggagccattgccttttaaggaggagaaagttagtctgaaaaaaaagtgtaccacacaggaaatgatgtcgatttgccccgagctgttggacttccaagatatgatcggtgaggataagaactcctttttcatggagcctatgtcattccggaaaaatcccaccaccgaggaaaccgtgctaactaaaaccagcctctcactgcaagagaagaagatcacccagggcaagatgtctcacctgaagaaaccacttgttctgcaaaagataaccagtgaagaggagtctttttataaaaaactgctgccatttaagatgaagagtacaaccgaggagaaattcctcagccaggaaccgagtgctttaaaggaaaaacacacaacgcttcaggaagtgtctctgtccaaggaatctctcgctatccaggagaaggctacgaccgaggaggaattttcacaggagttgtttagtctgcacgtcaagcacacaaacaagagtggcagcctttttcaggaggccttggtcctgcaggaaaagacggacgcagaggaggacagtctaaagaacctcctggcgctccaggagaagtccaccatggaggaagagagtttaatcaacaaattattagctctgaaagaggaactctcggctgaggctgctacaaatattcagacccagctctctctgaaaaaaaagtctaccagtcatgggaaagtctttttcctgaagaaacaactggcccttaatgaaaccatcaacgaggaggaatttctgaacaagcagcctctggcccttgaaggatatcccagcattgctgaaggtgaaaccctttttaagaaactccttgctatgcaggaagaacccagcattgaaaaggaagccgtgttgaaggagccaactattgatactgaggcccacttcaaggagccgttggccctccaggaggagccgagtactgaaaaggaggctgtactcaaggagccgagtgtggacactgaagctcacttcaaagagacactcgccttgcaggaaaaaccatcgatagagcaggaggctttattcaaacggcacagcgcattgtgggagaaaccgtcgactgagaaggagacaatcttcaaagagtctctcgacctccaggagaagccctcaatcaaaaaggagactctgttgaagaaacctctggccttgaagatgtccacaatcaacgaagctgtgctcttcgaggacatgatcgcccttaacgaaaagccaacaaccggaaaggagttgagttttaaagaacccctggctttgcaagagtctccaacttataaggaagacactttcctgaagactttgctcgtcccacaggtgggcacgagccccaatgtctcatcaaccgccccagaaagtattacgagtaaatcatcaattgccaccatgaccagcgtgggaaagagcggtaccattaacgaagccttcctgttcgaggatatgataactcttaatgagaagcccacgaccgggaaagagctcagctttaaggaacctctggccctgcaggagtctccaacttgcaaagaagacacattcttggaaactttcctgatcccgcaaatcggtacttcaccatacgtgtttagtaccaccccagaatctataaccgagaagagctcaattgcaacaatgacctccgtcggcaaaagtagaacaaccactgaaagctccgcttgcgagtccgcaagcgacaagcccgtttctccgcaagccaaaggaacacccaaggaaattacgccccgcgaagatatcgatgaagactcttcagatccaagctttaatcccatgtatgccaaagagattttctcctacatgaaagagcgcgaagagcaatttatcctgacagattacatgaatcgccagattgagatcaccagtgatatgagggcgatacttgttgactggttggtcgaggttcaggttagctttgaaatgactcacgagacactgtaccttgccgtaaagctggtcgatttgtacttgatgaaagctgtatgcaaaaaagacaagcttcagctgttaggtgctactgcattcatgattgccgctaaatttgaagagcataacagccccagagtggacgattttgtgtacatctgtgatgacaactaccagaggtccgaagtgctgtcaatggaaattaacatactgaacgtccttaaatgtgacatcaacattcccattgcctaccactttctgcgtcggtacgcaaggtgtattcacaccaatatgaaaacactcacactcagcaggtatatctgcgaaatgacactgcaggagtaccactatgtgcaagagaaggccagtaagctagcagccgcttcgctgctgttggcattgtacatgaagaaattggggtattgggtccctttccttgagcactattctggttactccatctccgaactccacccactcgtgcgacagctaaataaattgttgaccttctcatcctacgactcgcttaaggctgtatactataagtactcccaccccgtcttctttgaagtggctaagattcccgcactggacatgctaaaactagaggagatcctgaattgcgactgtgaagcgcaaggtctggttctgtag

SEQ ID NO: 324466 - DNA, 4188 bp, Artificial Sequence
  derived and/or modified sequence
atgctgctcccactccctccacaatcatccaaaccggtgcctaaaaaaagccagtcctcaaaaattgtgccctcccaccacgaccctagtgagaaaacaggagagaactgtcagaccaagatttctccttctagtctacaggaatccccctccagcctgcagggcgctcttaaaaagaggtctgcttttgaggatttaacaaatgcaagccagtgccagcccgttcagcctaaaaaggaagccaataaggagttcgtgaaggtggttagcaaaaagataaaccgtaacacgcacgccctggggctggcaaagaagaacaaaaggaatctcaagtggcacaagcttgaggttaccccagtggttgcctccacaactgtggttcctaacatcatggagaagcccctgatactcgatatcagtactacgagcaaaacccccaacaccgaggaggcatccctgtttagaaaacctcttgtgttgaaggaggagccgacgatcgaggatgaaactctcatcaataaaagcttaagtctgaagaagtgtagcaaccacgaggaggtgtccctgctagagaagcttcagcctctgcaggaagagtcggattcagatgatgcattcgtgattgaacctatgacctttaaaaaaacacacaaaactgaggaggccgccatcaccaagaaaactctgtctctgaagaaaaaaatgtgcgcgtcacaaagaaagcaaagttgccaggaagagtccctggccgtccaggacgtgaacatggaagaggattcctttttcatggaatcaatgtcttttaagaaaaagcccaaaaccgaagagagcattccgactcacaaactctccagtctgaaaaaaaagtgtacaatatacggcaagatctgtcactttcggaagccacccgtcctgcagactactatttgtggagccatgtcctccatcaagaaacccactacagagaaggaaactctgttccaggaactgtctgtgctccaagagaagcacaccaccgagcacgagatgagcattctgaaaaagagtctggccctgcaaaaaacgaatttcaaagaagatagccttgtgaaggagagtttagcctttaagaagaagcccagtactgaagaagctatcatgatgcccgtaatccttaaggagcaatgcatgacagagggaaagagaagccgcttaaagccactcgtgctgcaggagattacctccggcgagaaatctttgatcatgaaacccctctccatcaaagagaaaccatccacggagaaagagtcattctctcaggaacccagcgccctccagaaaaaacacaccacacaagaggaggtgagcatcctgaaggagcccagctccctgctgaagtccccgacagaagagagtccttttgatgaggccctggcttttacgaaaaagtgcacaattgaggaggcccctccgacgaagaagccacttattctgaagcggaagcacgctacccagggcaccatgagtcacctgaaaaagcccctgatccttcagacaacaagcggggaaaaatccctcatcaaggagcctctgccattcaaggaagagaaggtcagcctgaagaaaaagtgtaccacacaggagatgatgagcatttgtccagagttactggacttccaggatatgatcggcgaggataaaaattcattcttcatggaacctatgtcgttcaggaagaaccccactacagaggagaccgtgctcacgaaaaccagcttgagtctccaggaaaaaaagatcacccagggaaaaatgagtcacctgaagaagccactggtcctgcagaagattacgagcgaggaggaatctttctacaaaaaactgctacctttcaagatgaagtccactactgaagagaagtttctaagccaggagcctagtgccctgaaggagaaacataccaccctgcaggaggtaagcctcagcaaggaatccttagcgattcaagagaaagccacgactgaggaagagttctctcaggaactcttctcactccacgtgaagcatactaataaatcaggtagcctctttcaagaggctttagttctgcaggaaaaaaccgacgcggaggaggactccctgaaaaacctgctggcccttcaagagaaatctacaatggaggaagaatcgttaatcaataaactgcttgcactaaaagaagagctgagcgccgaagccgcaaccaacatacagactcaactgtccctcaagaagaagtctacgtctcatggcaaggtgttttttttgaaaaagcagctggccctcaatgaaactataaacgaggaggagtttctgaacaagcagcctctggccttggagggctatccttctatcgctgaaggggaaacattgttcaagaagctgctggcaatgcaggaggaaccgtcaattgagaaggaagctgtcctcaaggagccaacgattgataccgaggctcactttaaagaaccactggccttgcaagaggaaccttctaccgaaaaagaagcagttcttaaggagccatccgttgacactgaagcgcattttaaggagactctggcacttcaagaaaaaccttctattgaacaagaggctcttttcaaacggcattctgcactgtgggaaaaacctagcacagaaaaagaaactatctttaaggaatcgcttgatctgcaggaaaagcctagcatcaagaaagagacactgcttaaaaagcccctcgccttgaaaatgagtacgatcaacgaggcagtgctctttgaggacatgatcgccctgaatgagaagccgactaccgggaaggagctctctttcaaggaaccgctagccctccaggagtccccaacttacaaagaggataccttcctgaagacattgttggtgcctcaggtcgggactagtccgaacgtgtcatccactgcgcctgagagtataacatcaaagtcaagtatagccacaatgacctctgtgggaaagtcaggtaccattaatgaggcctttctgttcgaggacatgattactctgaatgaaaagccaaccactgggaaagaattgtccttcaaagaaccactggcacttcaggagagccctacatgcaaagaggacacctttctggagacattcctcattcctcagattggcacaagcccatacgtatttagcacaactcccgagtctatcaccgaaaagagctccatagcgaccatgacctcagtaggtaagagtcgtacaactaccgaatcaagcgcctgtgaatctgctagcgataagcctgtatccccacaggcaaaaggcacaccaaaagagatcactcctcgggaggacatcgacgaggacagctccgatcccagcttcaatcccatgtacgctaaagaaattttttcttatatgaaagaaagagaggagcagtttatactgaccgattatatgaacagacaaattgagataacttccgacatgcgggccatacttgtggactggttggtggaggttcaggtctcatttgagatgactcacgaaacgctctacctggccgtaaagctggtagatctctatctgatgaaggccgtgtgcaagaaggataagttgcagctcctcggggcgaccgccttcatgatcgccgctaagttcgaggaacacaattcgcctagggtggatgacttcgtctatatatgtgatgacaattaccagcgctctgaagtcctgtccatggagatcaacattttaaatgtcctgaagtgtgatatcaacatccccatagcctaccacttcctcaggcgttatgcaaggtgtatacatacaaatatgaagactctgacattgagcagatacatatgtgaaatgacccttcaggagtatcattatgtccaggagaaagcatctaagctggccgccgctagtctcttgctggcgctttacatgaagaaactggggtattgggtgccatttctggaacactattccggttacagtatctctgaactgcatccgctggtgcggcagttgaataagctgcttacattttcatcttatgactctttaaaggctgtatattacaagtattcccatccggttttcttcgaggtggctaaaattcctgctttggatatgctgaagctggaggagatcctcaactgcgattgcgaagcccagggcctggtgctctag

SEQ ID NO: 324467 - DNA, 4188 bp, Artificial Sequence
  derived and/or modified sequence
atgctgctgcccctgcccccccagagcagcaagcctgtgcccaagaagagccagagcagcaagatcgtgcccagccaccacgaccccagcgagaagacaggagagaactgccagaccaagatcagccccagcagcctgcaggagagccccagcagcctgcagggcgccctgaagaagaggtctgcctttgaggacctgaccaatgccagccagtgccagcctgtgcagcccaagaaggaggccaacaaggagtttgtgaaggtggtgtccaagaagatcaacagaaacacccacgccctgggcctggccaagaagaacaagaggaacctgaagtggcacaagctggaggtgacccctgtggtggccagcaccaccgtggtgcccaacatcatggagaagcccctcatcctggacatcagcaccaccagcaagacccccaacacagaggaggccagcctcttcaggaagcccctggtgctgaaggaggagcccaccattgaagatgagaccctcatcaacaagagcctgagcctgaagaagtgcagcaaccacgaggaggtgtccctgctggagaagctgcagcccctgcaggaggagagtgacagtgatgatgccttcgtcatcgagcccatgaccttcaagaagacccacaagacagaggaggccgccatcaccaagaagaccctgagcctgaagaagaagatgtgtgccagccagaggaagcagagctgccaggaggagagcctggccgtgcaggatgtgaacatggaggaggacagcttcttcatggagagcatgtccttcaagaagaagcccaagacagaggagagcatccccacccacaagctgagcagcctgaagaagaagtgcaccatctacggcaagatctgccacttcaggaagccccctgtgctgcagaccaccatctgtggggccatgagcagcatcaagaagcccaccacagagaaggagaccctcttccaggagctgtctgtgctgcaggagaagcacaccacagaacatgagatgagcatcctgaagaagagcctggccctgcagaagaccaacttcaaggaggacagcctggtgaaggagagcctggccttcaagaagaagcccagcacagaggaggccatcatgatgcctgtgatcctgaaggagcagtgcatgacagagggcaagaggagccggctgaagcccctggtgctgcaggagatcaccagcggggagaagagcctcatcatgaagcccctgagcatcaaggagaagcccagcacagagaaggagagcttcagccaggagcccagcgccctgcagaagaagcacaccacccaggaggaggtgtccatcctgaaggagcccagcagcctgctgaagagccccacagaggagagcccctttgatgaggccctggccttcaccaagaagtgcaccatcgaggaggccccacccaccaagaagcccctcatcctgaagaggaagcacgccacccagggcaccatgagccacctgaagaagcccctcatcctgcagaccaccagcggggagaagagcctcatcaaggagcccctgcccttcaaggaggagaaggtgtccctgaagaagaagtgcaccacccaggagatgatgagcatctgcccagagctgctggacttccaggacatgattggagaggacaagaacagcttcttcatggagcccatgtccttcaggaagaaccccaccacagaggagaccgtgctgaccaagaccagcctgagcctgcaggagaagaagatcacccagggcaagatgagccacctgaagaagcccctggtgctgcagaagatcaccagcgaggaggagagcttctacaagaagctgctgcccttcaagatgaagagcaccacagaggagaagttcctgagccaggagcccagcgccctgaaggagaagcacaccaccctgcaggaggtgtccctgagcaaggagagcctggccatccaggagaaggccaccacagaggaggagttcagccaggagctgttcagcctgcacgtgaagcacaccaacaagagcggcagcctcttccaggaggccctggtgctgcaggagaagacagatgctgaggaggacagcctgaagaacctgctggccctgcaggagaagagcaccatggaggaggagagcctcatcaacaagctgctggccctgaaggaggagctgtctgctgaggccgccaccaacatccagacccagctgagcctgaagaagaagagcaccagccacggcaaggtgttcttcctgaagaagcagctggccctgaatgagaccatcaatgaggaggagttcctgaacaagcagcccctggccctggagggctaccccagcattgctgagggggagaccctcttcaagaagctgctggccatgcaggaggagcccagcattgagaaggaggccgtgctgaaggagcccaccatcgacacagaggcccacttcaaggagcccctggccctgcaggaggagcccagcacagagaaggaggccgtgctgaaggagcccagcgtggacacagaggcccacttcaaggagaccctggccctgcaggagaagcccagcattgagcaggaggccctcttcaagaggcacagcgccctgtgggagaagcccagcacagagaaggagaccatcttcaaggagagcctggacctgcaggagaagcccagcatcaagaaggagaccctgctgaagaagcccctggccctgaagatgagcaccatcaatgaggccgtgctgtttgaggacatgattgccctgaatgagaagcccaccaccgggaaggagctgtccttcaaggagcccctggccctgcaggagagccccacctacaaggaggacaccttcctgaagaccctgctggtgccccaggtgggcaccagccccaacgtgagcagcacagcccctgagagcatcaccagcaagagcagcatcgccaccatgacctctgtgggcaagagcggcaccatcaatgaggccttcctgtttgaggacatgatcaccctgaatgagaagcccaccaccgggaaggagctgtccttcaaggagcccctggccctgcaggagagccccacctgcaaggaggacaccttcctggagaccttcctgatcccccagatcggcaccagcccctacgtgttcagcaccaccccagagagcatcacagagaagagcagcatcgccaccatgacctctgtgggcaagagcaggaccaccacagagagcagcgcctgtgagagcgccagtgacaagcctgtgagcccccaggccaagggcacccccaaggagatcaccccccgggaggacattgatgaggacagcagtgaccccagcttcaaccccatgtatgccaaggagatcttctcctacatgaaggagcgggaggagcagttcatcctgacagactacatgaaccggcagatcgagatcaccagtgacatgagggccatcctggtggactggctggtggaggtgcaggtgtcctttgagatgacccatgagaccctgtacctggccgtgaagctggtggacctgtacctgatgaaggctgtgtgcaagaaggacaagctgcagctgctgggcgccacagccttcatgattgctgccaagtttgaggagcacaacagcccccgggtggatgactttgtgtacatctgtgatgacaactaccagaggtctgaggtgctgtccatggagatcaacatcctgaatgtgctgaagtgtgacatcaacatccccatcgcctaccacttcctgcggcgctatgcccgctgcatccacaccaacatgaagaccctgaccctgagccgctacatctgtgagatgaccctgcaggagtaccactacgtgcaggagaaggccagcaagctggccgccgccagcctgctgctggccctgtacatgaagaagctgggctactgggtgcccttcctggagcactacagcggctacagcatcagcgagctgcaccccctggtgcggcagctgaacaagctgctgaccttcagcagctatgacagcctgaaggctgtgtactacaagtacagccaccctgtgttctttgaggtggccaagatcccagccctggacatgctgaagctggaggagatcctgaactgtgactgtgaggcccagggcctggtgctgtag

SEQ ID NO: 324468 - DNA, 4188 bp, Artificial Sequence
  derived and/or modified sequence
atgctgctgcccctgcccccccagagcagcaagcccgtgcccaagaagtcacaatcaagcaaaatagtcccctcccatcatgatccatcggaaaaaacaggtgagaactgtcagacaaagatctccccttctagtctccaagagagtcccagctccttgcaaggcgcactgaaaaaacggtcagcctttgaggacctaaccaatgccagtcagtgccaacccgttcaaccaaagaaggaggctaacaaggaattcgtgaaggtcgtgagtaagaaaatcaaccggaacacacatgccctgggactcgccaagaaaaataaaagaaatctcaagtggcacaagttggaggtcactcccgtcgttgccagcaccaccgttgttcctaatatcatggagaaaccactgatcctcgatatcagcaccacctctaaaacaccaaacaccgaggaggccagcttgttccgtaagcccctggtactgaaagaggaacccaccattgaagatgagaccctcatcaataagtcactttctctgaaaaagtgttcgaatcatgaagaggtcagccttctcgaaaagctgcagcccctgcaggaggagtcagacagcgacgacgcctttgtgatcgaaccaatgactttcaaaaagacacacaagaccgaggaggccgcgatcaccaaaaagaccctgagcttaaaaaagaagatgtgtgcttctcagcggaaacagtcctgccaggaggagagcctggccgttcaggatgttaacatggaggaagatagctttttcatggagtccatgagcttcaaaaagaagcctaagaccgaggaaagcattcccacccataagctttcctccttgaagaaaaagtgcacgatttacggaaagatatgccattttcgaaaacccccagtgctgcaaacaactatatgtggagctatgtcttcgatcaaaaagcccaccacggaaaaagaaaccctttttcaggaactgagcgttctgcaggagaaacacacgaccgagcatgagatgagcatcctgaaaaagtccctagctcttcagaagacaaacttcaaagaagacagcctcgtgaaagaaagcctcgcattcaagaagaagccttcaaccgaggaggcaattatgatgccagtgattctgaaggaacagtgtatgacagaagggaagcgatcccgtctcaagccgctcgttctgcaagagatcactagcggtgagaaatccctcattatgaagcctctgagtattaaggagaaacccagtactgagaaggagagtttctctcaggaacccagcgctctgcagaagaagcatacaacccaggaggaagtgtccatcctaaaggaacctagcagtcttctcaaaagtcctacggaggaatcccccttcgatgaagcactggcttttactaagaaatgcacaatagaggaagcaccgccgacgaagaagccacttatcctgaagcggaaacatgctacacagggcactatgtcgcacttaaaaaaacccctgattcttcagactacctcaggcgaaaaatctcttattaaagaacccctaccttttaaagaggaaaaagtctcccttaaaaaaaaatgcaccacccaggaaatgatgagcatctgtccggagcttctcgatttccaagacatgatcggcgaagataagaatagcttcttcatggaacccatgtcgtttagaaaaaatcccactaccgaggaaaccgtgttaacaaagacaagcctgtctctacaagagaaaaagatcactcagggaaagatgtcgcacctgaagaaacctctggtattacagaagataacgtctgaagaagagtcattttacaaaaagctgctgcctttcaagatgaaatcaacaacggaggaaaagttcctgtctcaggagccgagcgctcttaaagagaagcatacaacccttcaggaagtgtccctgagtaaggagagtcttgccatccaggaaaaggcaactaccgaggaggagttcagtcaagagctctttagcttgcacgtcaagcataccaataaaagtggtagcctctttcaggaagccctggttctccaggagaaaacagacgcagaggaggactcgcttaagaaccttctggccctgcaggaaaaatctactatggaggaggaatccttgatcaataagttactcgccctaaaagaggagcttagtgcggaggcggcgactaacatacagacccaattgagtctaaagaagaagagcacgagccatgggaaggttttctttttgaagaagcagttagcactaaatgaaacgataaatgaagaagagttcctaaataagcagcctctggccctggagggttacccctccattgccgagggcgagacactgttcaagaagctgctagccatgcaggaggagccgagtatcgagaaggaggcagtgctcaaggagcccacaatagataccgaggcccatttcaaggaacctctcgccttacaagaagagccttccaccgagaaagaggccgtcctgaaagaaccttcagtggatactgaggcccactttaaagaaacgcttgctctgcaggaaaaaccatccatagaacaggaggcactgttcaaaagacactccgccttatgggaaaagccatctactgagaaggagacaatcttcaaagagagcctggaccttcaggagaaaccctccataaagaaagagactctgctgaagaagccactagctctaaaaatgtctactattaacgaagctgtcctttttgaggatatgatagcactaaacgagaaacctaccacaggcaaagagctctcttttaaggagccactcgcattgcaggaatctcccacgtacaaagaagatacatttctcaagaccctgctcgtgccacaagtaggtacctcccctaatgtaagttctacagcgccagagtcgatcaccagcaagtcgagcattgccacaatgacatcggttggaaaatctgggaccatcaatgaggcatttcttttcgaagacatgatcacactgaacgaaaagcctacgacagggaaagaactgtcctttaaggagcccttagctctgcaggagtcgcctacctgcaaagaggacaccttcctggaaacattcctcatccctcagattggtactagtccgtacgttttctctacgactcccgagtcaattacagagaagagtagtatagccaccatgacctcggtggggaagagcaggacaaccaccgaatcatcagcctgcgaaagcgcgtcagataaacctgtttcgcctcaggctaagggcacccccaaagagattactccaagggaagacatcgatgaagattcctcagacccaagcttcaaccccatgtacgcgaaggagattttctcatatatgaaggagagagaagaacagtttatcctcacagactatatgaaccgacaaatagagataacgtcagacatgagggcgattctggtggactggctggtggaggtgcaggtgagttttgaaatgacccatgaaactctctacctggccgtgaagctcgtagacctctacttaatgaaggcggtctgtaaaaaggataagctgcagctcctcggcgctacagcttttatgatcgccgctaaattcgaggagcataatagtccgagagttgacgattttgtgtacatatgcgacgataactaccagagatccgaagtcctttccatggagataaatatcctcaatgtgcttaaatgcgacattaacattcctattgcttaccattttctacggagatatgcacgctgtatccatacgaacatgaaaaccttgactctgtctcgatatatttgtgaaatgacgctccaagagtaccattacgttcaagagaaggcaagtaagctcgcagccgccagtctcttactggccctgtatatgaagaagttgggctactgggtcccattcctggaacattactccgggtatagcataagtgaattgcacccactggttagacaactgaacaagctactgaccttctccagctacgattctctgaaagctgtctattataagtactcccaccctgtttttttcgaagtggctaaaattcccgcactcgacatgttaaagctagaggaaatccttaactgcgactgcgaggcccagggtctggttttatag

SEQ ID NO: 324469 - DNA, 4188 bp, Artificial Sequence
  derived and/or modified sequence
atgctgctgcccctgcccccccagagcagcaagcccgtgcccaagaaatctcaaagcagcaagatcgtgcccagtcaccacgatccatctgaaaagaccggggaaaattgtcagaccaaaatcagtccaagctccctgcaagaatccccttctagcctgcagggcgccctgaaaaagagaagcgcttttgaagacctgacgaatgccagccagtgccagccggtccagccaaagaaagaagcgaacaaggagttcgtcaaggtggtgagtaaaaagatcaatcgcaacacacacgccctgggactcgctaagaagaacaagagaaacctgaagtggcacaaacttgaggtaacgcctgtggtcgcctcaacgactgttgtgccaaacatcatggaaaaaccactaatactggacatctcaaccacatcaaaaacccctaatactgaggaggcctccctgttcaggaagcctttggtactaaaggaagaacctaccatcgaggacgaaactttaatcaataagagtctcagcctgaagaaatgcagcaaccacgaggaggtcagcttgctggagaaacttcagccattgcaagaggaatcagacagcgatgatgcttttgtcatcgagcccatgactttcaagaaaactcacaaaacagaagaagcagccattaccaagaaaacgttgagcctgaagaagaagatgtgcgcctcgcagagaaagcaatcttgccaagaagagagcctcgccgtgcaggatgtaaacatggaagaggactctttctttatggagtctatgtcctttaagaagaagccaaaaaccgaagaatccatccccacgcataaactttcctcacttaagaagaaatgtactatctacggcaaaatctgccacttccgcaagccaccagtccttcagacaaccatatgtggcgccatgtcgtccatcaagaagcccactaccgaaaaggagactttattccaagagctatctgtcctgcaggaaaagcacaccaccgaacatgagatgtccatccttaaaaagagtctcgctctccagaagacaaattttaaagaagactctctggttaaggaatcattggcctttaaaaagaagccctccaccgaggaagccatcatgatgccagtaattcttaaagaacaatgtatgactgagggaaaaaggagcagactgaagcctctggtcctccaggaaattacctctggtgagaaatctctgattatgaaaccactctctataaaagagaagccatccacagagaaggagagtttcagccaggagccaagtgccctgcagaaaaaacacaccacccaagaagaggtgagcatcctgaaagagccttcatccctgctgaaaagcccaaccgaggaatccccatttgatgaagccttagccttcactaagaaatgcactatagaagaggcgccccccactaaaaagccattgatcctgaaacgtaaacatgctacacagggcactatgtcacacctgaagaagcctctgattttacagaccacctccggagaaaaatccctgattaaggagccgttgcccttcaaagaagagaaggtgtccctcaagaagaaatgcacaactcaagagatgatgtcaatatgcccagagctactggactttcaggatatgataggtgaagataagaattctttttttatggaaccaatgtccttcaggaagaaccccacaacagaagaaaccgtgttgaccaaaaccagcctaagcttacaggagaagaaaataactcaaggcaaaatgtcacaccttaagaaaccgctggtactgcagaaaatcacatccgaggaagagtccttttataagaaacttctgcctttcaagatgaagtccactacagaagaaaagttcttgtcccaggagccgtctgcgctgaaagagaagcacactactctgcaggaagtttcactttctaaagaaagtctggcaattcaggagaaggcaactacagaggaggagttctctcaggaattgttctcgctgcatgtcaaacacactaataaatcgggcagcctgtttcaggaagcactggtcctacaggagaagactgacgccgaagaggactccctgaaaaatctgctggcactacaggaaaagtccaccatggaggaagagagtttgataaacaagctgctggctttgaaagaggagctcagcgcagaagcagctaccaacattcagacccaactgtccctgaagaaaaaaagcacgtctcacggaaaagtgttttttttaaaaaaacagttggctctgaacgaaacgatcaacgaggaagaattcctcaacaagcaaccactcgctttagagggctatccatccattgccgaaggagagacgttgttcaagaaactattggcgatgcaggaggagccttccatagagaaggaagcagtactcaaggagcccaccatagacaccgaggcccattttaaggagcctttagccttgcaggaagaaccatccaccgaaaaggaagccgtactgaaagagccttcagtggacaccgaggcacattttaaggagaccttggcccttcaggagaaaccctccatcgaacaggaagctttatttaagcggcatagcgcgctgtgggagaaaccctcaacagaaaaagagactatattcaaggaatctctggacctccaagaaaaaccctctatcaagaaggagacactgctgaagaagccattggcactcaaaatgagtaccatcaatgaagccgtcctgtttgaagatatgatcgcactaaatgagaaacctactactggtaaagagttgtcttttaaggagcccctagcacttcaggaaagtccaacgtacaaggaagataccttcctaaagaccctgctggtgccacaggtgggaacctcacccaatgtgtcctctacggcaccagagtctatcacctccaaaagttctattgccactatgaccagtgttggcaaatctgggactattaacgaggcattcttgttcgaagacatgatcacgctgaatgagaagccaacgactggaaaggaactcagtttcaaggagcctctcgctctgcaagagagcccaacttgtaaagaagacacatttctggaaactttcctcatcccgcagattggtaccagcccttacgtcttctccactacccccgaatccattaccgagaagtcatctatcgccacgatgacctccgtgggtaagagtcgcaccactaccgagtcatccgcttgtgagtccgcatccgacaagccagtgtctccacaggctaaaggcacccccaaggaaataacgcctcgagaagacatcgatgaagattcatccgacccttcatttaatccgatgtacgccaaagaaatcttctcctatatgaaggagagagaagagcagtttatcctcaccgattatatgaatcggcagatcgaaattacctccgacatgagagccatcctagtcgactggctcgtggaagtccaggtgagtttcgaaatgacacacgagactctgtatctggctgtgaagctggtagacttgtatctcatgaaagccgtttgcaaaaaagacaagctccaactgctgggggcaacagccttcatgatcgccgcaaaatttgaagaacacaacagtccacgggtagacgacttcgtttatatctgtgacgataactaccagcgctcagaagtactgtccatggaaattaacatattaaatgtactcaagtgtgatataaacatccctattgcctatcacttcctgcggaggtatgcccggtgtattcatactaacatgaagacactgacgctgagtaggtacatatgtgaaatgactctccaagagtatcactatgtgcaggagaaggccagtaaactggccgccgccagtctgctcttggccttgtacatgaaaaaactgggctactgggtcccctttttggaacattactccggttactctatcagtgaattacaccctctggtgcgccaactcaacaaattactcactttctcaagttacgactctctcaaagctgtctactacaagtactcacacccagttttctttgaggtggctaaaattcccgctctagatatgctgaagttggaagagatattaaattgcgattgtgaggcccagggactggttctgtag

SEQ ID NO: 324470 - DNA, 4188 bp, Artificial Sequence
  derived and/or modified sequence
atgctgctgcccctgcccccccagagcagcaagcccgtgcccaagaagagccaaagtagcaagatagtacccagccaccatgacccatccgagaagaccggcgaaaattgccagaccaaaatcagccctagttctcttcaggaatccccctcgagtctacaaggcgccctgaaaaaacgcagcgcattcgaggatttaacaaacgcttcgcaatgtcagcctgtgcagcctaagaaagaggctaacaaggagttcgtcaaagttgtcagcaagaagataaaccggaatacacacgccctgggcctcgcaaagaaaaataagagaaacttgaagtggcataagctcgaggtaacgcctgtggttgcctccactacagtcgtcccgaacattatggagaagcctctaattctggacatatctactacaagcaaaacccctaacaccgaagaggccagtttatttcggaagcccctggtattaaaagaagagccaaccatcgaagatgaaacactcataaataaaagcctgtccctcaagaaatgcagtaatcacgaggaagtctctctgctcgagaaactgcaaccactgcaggaagagagcgactccgacgatgccttcgttatcgagcccatgacctttaagaagacacataagaccgaagaggctgcaatcaccaagaaaaccctcagcttgaagaagaaaatgtgtgccagtcaacggaagcagtcttgccaggaggaatccctcgccgttcaggatgtcaacatggaggaagactcattttttatggaatctatgagttttaagaaaaaacctaagaccgaggagagcattcctacgcataaactttcatcgctgaagaagaaatgtactatatacggaaagatctgccactttaggaaacccccagtactgcagacaacaatttgtggcgccatgtctagtatcaagaaaccaaccacggaaaaggaaaccctatttcaggagctttcggtactccaggaaaagcacacaacggagcacgagatgtcaattcttaagaaatccctggcccttcagaaaacaaatttcaaagaagactccctggtgaaagaaagtttagctttcaaaaagaagcccagcaccgaagaggctataatgatgccggtgatactgaaagaacaatgtatgacagagggcaaaaggagcagactaaagcccttggtgcttcaggaaattaccagcggcgaaaagtcattgataatgaagccactaagcattaaagagaaacctagtaccgaaaaagagagcttttcccaggagccatctgcactgcaaaagaaacatactacccaagaggaagtgtcaattctcaaggaaccttcatctctcttaaagtccccaacagaagaatcccctttcgacgaagctctcgcgtttacaaaaaagtgtacgatagaggaagctccacccactaaaaagccattgattttaaaacggaagcacgccacccagggcacaatgtctcaccttaagaagccgcttatcctccagaccaccagcggcgaaaaaagtctgatcaaggagccgcttccattcaaggaagaaaaagtgtcactgaagaagaagtgtaccacccaagagatgatgtccatctgcccagaacttctcgattttcaggatatgattggagaggataaaaacagtttttttatggagccaatgtctttccgaaagaaccccacaacagaagaaactgttctcacaaaaacatcactcagcctacaggagaaaaagattacacaaggaaaaatgagtcacctgaagaagcccctggttctgcaaaagatcacctctgaggaagaatccttttataaaaagcttctcccattcaaaatgaagtcaaccacggaagagaagttcctctcccaagaaccatccgctctgaaagagaagcataccaccctccaggaggtatcactgtccaaggaatccctggcaatacaggaaaaggccaccactgaggaggaattctcacaggagctgttctcattacatgtcaagcacacaaacaagtccgggagcctgtttcaagaggcactggttctccaggagaagacagatgccgaagaggattctctgaagaacctgcttgcgctgcaggaaaaaagcacaatggaggaagaatctctcatcaataaattgctggccttgaaagaggaactgtctgccgaagcggcaactaacattcagactcaactctcactgaaaaaaaagtcaacttctcatggcaaggtgttctttctcaagaaacagctggcactaaatgaaacaattaatgaagaggagttcctcaataagcagccactggccctggagggataccccagtatcgctgaaggcgagacgctatttaaaaagctccttgccatgcaagaggagccatctattgaaaaagaagcggtgctcaaggaacccactattgacactgaagctcattttaaggaacctctagctctgcaagaggaacccagcaccgagaaggaagcggtcctcaaggagccaagtgtcgatacagaggctcacttcaaggaaaccctcgcgttacaggaaaaaccgagcatcgaacaagaggctttgtttaagagacattctgctctgtgggagaaacccagtacagagaaggagactatctttaaggagagtttggacctgcaggaaaagccctcaatcaagaaggaaaccctgctgaagaagcctctcgcactgaagatgtccacaattaatgaagccgtgcttttcgaagacatgattgctcttaacgaaaaaccaaccacagggaaggagctctcttttaaggagcctctcgctctacaggagagtccgacatacaaagaggacacattcctcaaaaccctcctagtgccccaggtgggcacttcgcccaacgtgagctctacagcacctgagtctatcacttctaagtcgtctatagcgaccatgacaagtgtgggtaaaagtggcacaatcaatgaggcgtttctcttcgaagatatgattacccttaatgagaagccaacaaccggcaaagagctgagttttaaagaacccctcgccctgcaggaatcaccaacatgcaaagaggatacctttttagaaactttcttaataccccagattggaacaagtccctatgtgtttagcaccacgcctgaaagtataactgagaaatcctctatcgccactatgactagcgtggggaagagccgtactaccaccgagagctcggcctgcgagtctgcatccgacaaacctgtgtctccccaagctaagggaacacctaaggagatcacacctcgcgaagacatcgatgaggactccagcgacccaagctttaacccaatgtatgccaaggaaattttttcttacatgaaagagagggaagaacagtttattctcaccgactacatgaaccgacagatcgagataacatccgacatgagagcaatcctggtcgactggctggtggaggtgcaggtgtccttcgagatgacccatgaaacactgtatttagccgtgaagctcgtggacctatacttgatgaaagctgtttgtaagaaagataagttacagttgctgggtgccaccgcctttatgatagccgcaaaatttgaagaacataattctccccgggtcgacgattttgtctatatttgtgacgacaattatcagaggtccgaggtgctgtccatggagataaatattctgaacgtgctcaaatgtgatattaacatacctatagcctaccacttcctgagaaggtacgccaggtgtattcataccaacatgaaaacgttaacattgtctcgctatatttgtgagatgaccctccaggagtaccactacgtgcaggaaaaggcgtcgaaactggccgccgctagcctcttgttggcgctgtatatgaagaaactgggctactgggtgccatttctggagcactattccggatatagtatcagcgagcttcaccccctggtcagacagctcaataagctgcttactttctcctcttatgattccctcaaggctgtgtattacaagtatagtcatcctgtcttcttcgaggtggcaaagatacccgctctggatatgctcaaactggaggagattctcaattgtgactgcgaagcccagggcctggtgttgtag

SEQ ID NO: 324471 - DNA, 4188 bp, Artificial Sequence
  derived and/or modified sequence
atgctgctgcccctgcccccccagagcagcaagcccgtgcccaagaagagtcagtcctccaaaatagtccctagccaccacgaccccagcgaaaagacgggggaaaactgtcaaaccaaaatctccccctcttccctgcaagagagtccttcctctctgcagggagccctgaaaaaacgaagcgcattcgaggatctcacaaacgccagccagtgccagcccgtgcagcctaagaaagaggccaacaaggagtttgtgaaggtggtgtctaaaaaaatcaacagaaatacccatgcactcggtctagccaagaaaaacaagcggaacctgaagtggcataaactggaggtcactccagtggtggcttccacaacggttgttccaaacatcatggagaaacccctgatcctggatatcagcaccacttccaaaacacctaacactgaagaggcttcgctctttaggaagccactcgtactgaaggaagagccgactattgaagacgagactctgatcaacaagagcctgtccctcaagaagtgttccaatcatgaagaggtcagcctccttgaaaaactgcagcccctgcaggaggaaagcgactccgacgatgcttttgtaatcgaaccaatgacctttaagaagactcacaagacggaggaggcagctattactaagaagacactgtcgctgaaaaaaaagatgtgtgcttctcagcgaaaacaatcctgtcaggaagaatccctagccgttcaggacgtcaatatggaagaagattccttctttatggaatcgatgtcattcaaaaagaagcccaaaaccgaagagagcatccctacgcataagcttagttctctgaagaaaaagtgcacaatctacggcaagatctgtcactttaggaaaccaccagtcctgcagactacaatctgcggcgccatgtcttctatcaagaagcccacaacagagaaggaaacgctgttccaagagctgtcagtgctgcaagagaagcataccaccgaacacgaaatgtccatacttaaaaagtcactcgcactgcagaaaaccaattttaaagaggactccctggtcaaggagtctctcgccttcaaaaagaagccgagcactgaagaggccattatgatgccggtcattctgaaagagcagtgtatgacagaaggcaagcggtccagactgaaaccccttgtactacaggagatcacttcgggcgagaagagcctcataatgaaaccgctcagtattaaggagaaacccagtacagaaaaggagtccttctcacaagaacctagtgctcttcaaaaaaaacacacaactcaagaggaggtaagtatccttaaggagccctcctcactcctgaaatcccctacagaagagtctccgttcgatgaagccctggctttcacaaagaaatgcactatcgaggaggctccccctactaagaaaccactcattctcaaaagaaagcacgccacacagggcactatgtcacatctgaaaaaaccactgatccttcagactacgtctggcgagaaaagtctgattaaggaacctctcccgtttaaggaggagaaggtctctctgaaaaaaaaatgtactacgcaggagatgatgtccatctgtcccgaactgctagatttccaggacatgatcggggaggacaaaaattctttttttatggagccaatgtcgtttaggaaaaaccccaccaccgaagagaccgtcctcaccaagacatccctctcactgcaggagaaaaagatcactcaaggcaagatgtctcatctgaagaaacctttggttcttcaaaaaatcacatccgaagaggaatccttttacaaaaaactgctcccctttaaaatgaagtccaccacagaagagaagttcttatcacaggagccatctgccctgaaagaaaaacatactaccctgcaggaggtgagtctctccaaagagtctctggctattcaggagaaggccaccactgaggaggaattttcccaggagctcttttccttgcatgtgaaacacactaacaagtccggatctctgttccaggaggccctggtcctccaggagaagacagacgcagaagaggactcactgaagaacctcctggccttgcaggagaaaagcaccatggaggaggagagtctgattaataagctactggccctcaaagaagaactgagcgcggaagctgcaacaaatatacaaacccagctctccctgaaaaaaaaaagcaccagtcatggaaaggtgttcttcttaaaaaaacagttggcgctgaatgagacgataaacgaagaagagttcttaaacaaacaacccctggctctggaagggtacccgagcatcgccgaaggggagacgctcttcaagaagctcttggcaatgcaggaggagcccagcatcgagaaggaagccgtgctgaaggaacccaccatcgatactgaagcacatttcaaggaacctctggcactgcaggaagagccaagtaccgagaaagaggccgtgctcaaggagccatcggtcgacacagaggcccatttcaaagaaacactcgctctgcaggaaaagccttccatcgaacaggaggcactgttcaagcgacactcagctctttgggagaaaccaagcacagagaaagagactatttttaaggaaagcctggacctccaggagaagccatccattaaaaaagagacactgctgaagaaaccacttgccctgaagatgagcacaattaacgaggccgtactgtttgaggatatgatagccctgaacgaaaaaccaacgaccggaaaagagcttagttttaaggagccattggccctgcaggaaagtccgacgtacaaagaggacactttcttaaaaaccctgctcgtgccgcaggtgggaacatccccaaacgtgtcaagcacagcccctgagtcaattacttccaaatcttctattgccaccatgacaagtgttgggaagtcgggcacaatcaacgaagctttcttgttcgaagacatgatcaccctgaacgagaaacctacaacaggtaaagagctgtccttcaaagagccacttgccctccaggagagtccaacctgtaaggaggacaccttcctggagacattcctcatacctcagatcggcaccagcccatatgttttttcaacaactcccgagtctattactgaaaagagtagtatcgccaccatgacaagcgtaggtaaaagtcgaacaactactgaatcttccgcgtgtgaaagtgcctcagacaagccggtctctcctcaggccaaggggacacccaaagaaattaccccacgggaagacattgacgaggacagttcagacccgtctttcaacccaatgtatgcaaaagaaatcttctcttacatgaaggagcgcgaagagcagttcatcctcacagactacatgaatcggcaaatcgagattacctctgatatgcgcgctatacttgtcgactggcttgttgaggtacaggtgagcttcgagatgacgcacgaaactttgtacctggcagttaagctggtagacctttatcttatgaaagccgtctgcaaaaaagataaacttcagttgcttggcgcgacggcttttatgatcgccgcaaagtttgaggaacataacagccctagagtggatgattttgtttacatttgtgatgacaactatcaaagatcagaagtgctaagcatggaaatcaatatactcaatgtgctgaagtgcgatattaacatccccatcgcttaccattttctgaggcggtacgcccgatgcatccatacaaatatgaaaacactgaccctgtctagatacatctgcgagatgactttacaggaatatcactacgttcaggaaaaggccagtaagctggcagccgcatccctgctgcttgccctctacatgaagaaactgggatattgggttcccttcctggagcactacagtgggtatagtatcagcgagctccacccgctggtccgtcagctgaataaactccttacgtttagtagctatgattctttgaaagcagtttactacaagtacagccacccggtgttctttgaggtggcgaagatcccggctttggatatgctcaagcttgaggaaatcctgaactgcgattgtgaagcacagggcctggttctctag

SEQ ID NO: 324472 - DNA, 4188 bp, Artificial Sequence
  derived and/or modified sequence
atgctgctgcctctgcccccacagtcatcaaaaccggtgcccaagaagtcccagagttccaagatcgtcccctcccatcatgatcccagtgaaaaaaccggtgagaattgccagacgaaaatcagtcctagctctctgcaggagtcccctagcagcctacagggcgctctgaagaagaggagtgccttcgaagatctcactaacgccagtcagtgtcagcccgttcagcctaagaaagaggccaacaaggagtttgtaaaggtggtgagcaagaagatcaaccggaatacacatgctctgggtctggctaaaaagaataagcgcaacctcaagtggcataagctggaggtgacacctgtggtggctagtaccacggtggtccccaacattatggaaaagcctctgatcctggatatctccactacttccaaaacccctaacaccgaggaagcttccttattccgcaaaccacttgttctgaaggaggagccaacgatcgaggacgaaacacttatcaataaatccttgagcttaaagaagtgtagcaatcatgaggaagtgagcctgctggaaaagctccaacctctccaggaggaatccgacagtgatgatgccttcgtgatagagcccatgaccttcaagaagactcacaagaccgaggaagctgctatcaccaaaaagaccctgtcgctgaaaaagaagatgtgtgcatctcagaggaaacagtcctgccaggaggagagcttagcagtgcaggatgtaaacatggaggaagattcattctttatggagtccatgtcttttaagaaaaaacctaaaacggaagaaagcattcctacccataaattgagttccctgaagaaaaagtgcaccatctacggaaagatttgtcatttccgtaaacctccagtactgcaaacgactatatgcggggctatgagctcgatcaagaaacccacaacagagaaggagacactgtttcaggagttgagcgtgctccaggaaaaacacactactgagcatgagatgtctatactaaagaagtcgttggcactgcaaaagacaaactttaaggaggattctttggtcaaggaatcattggcctttaagaagaagccgagtacggaagaggcaatcatgatgccagtgattctcaaggagcagtgtatgacagaagggaagcggtctagattaaagcctctcgttctacaggagatcactagcggggaaaagtccctaatcatgaaacccttaagcatcaaggagaagccctccaccgagaaggagagcttttcccaagagccgagcgcactgcaaaaaaagcatacgacacaggaagaggtcagcatcctcaaggagccttcatccttgctgaaatctcctacggaagaatcaccatttgacgaggctctggcatttacgaaaaagtgcactatcgaggaggcccctccaaccaagaagccactgattcttaaaaggaaacatgccacccagggaactatgtcccacctaaaaaagccactgattcttcaaacaaccagcggggaaaaaagtttaattaaagagcctctaccattcaaagaggagaaagttagtctgaaaaaaaagtgcacaactcaagagatgatgagtatctgcccagagctcctcgacttccaggatatgatcggcgaagacaaaaatagtttcttcatggaaccaatgagtttcaggaagaaccccacaacagaagaaacggttttgactaagaccagcttgtcacttcaggagaaaaaaatcacccaagggaagatgagccaccttaagaagccattggttctacagaagatcacatccgaagaggagtccttctacaagaaactactcccttttaagatgaagagtacaaccgaggagaagttcttaagtcaagagccttctgctcttaaggaaaagcatacaaccctccaggaggtctcgctcagcaaggagtcgcttgccatccaggagaaggctaccaccgaggaggaattctcgcaagagctgttctctctgcacgtgaagcacactaacaaatctggttccctctttcaagaagccttagtattacaagagaagactgatgcagaggaagactcattgaagaatcttcttgcgctccaggaaaagagcacaatggaggaggagtcactcatcaataaactcttagcgttgaaagaggagctgtctgccgaggcagccactaatatccagacacagctgagcctgaagaaaaaaagcacatcacacggaaaggtgttcttcctcaagaagcagctagccttgaacgagacgataaatgaagaggagtttctgaataagcagcctttggccctagaagggtatccgtctattgctgaaggcgaaactctgtttaaaaagttactcgcgatgcaagaggagccatccatcgagaaagaggcagttctgaaagagcctactattgatactgaggcgcacttcaaagaaccacttgctcttcaggaagaaccctccacagaaaaggaagcggttcttaaagaaccgtcagtggatactgaagcacactttaaagagacgctggccctacaggagaaacccagcatagagcaggaagcactcttcaaaagacacagcgccttgtgggagaagccttccaccgagaaagagaccatctttaaagaaagtctggatctccaggaaaagccttctattaagaaggaaacgctcctcaaaaaacccctcgccctaaaaatgagcacaattaacgaggcagtgctcttcgaagacatgatcgctctaaacgagaaacctacaacgggaaaggagctttcttttaaggaacccctcgccctgcaggaatcccccacatacaaggaagatacctttcttaaaactctgctcgtcccccaggtcgggacgagccccaatgtgtcgagtaccgctcccgaatccatcaccagtaaatcgtctatcgccacaatgacatccgtgggtaagtctgggaccatcaatgaagccttcctgtttgaggacatgatcaccttgaacgagaagcccacaacaggaaaggaactatcgtttaaggagcctctcgccctgcaggagtcccctacctgtaaggaggacacgtttctggagaccttcctgattcctcaaatcggtacttccccttacgtgttcagtactacacctgagtctattaccgagaagagttccatcgccactatgacctctgtaggcaagtctagaaccactactgagtcttccgcttgtgaaagcgcatccgacaagcctgtatccccccaggcgaagggaacccccaaagagattactccacgagaggacatagacgaagatagttcggatccttctttcaatccaatgtatgccaaagaaatatttagctacatgaaagagcgggaggaacaattcatcctgaccgactacatgaaccgtcaaattgaaatcactagcgacatgcgagcaatcctggttgactggttggtggaagtacaggtgtcattcgaaatgacacatgaaactctttatctcgcagtgaagttggtggacttgtatctgatgaaagccgtttgcaaaaaggacaaactgcagctcctgggcgcaaccgcgttcatgatcgccgcaaagttcgaggagcacaattctcccagagttgatgattttgtgtacatctgcgatgacaactatcagcggagcgaagtgctgtccatggagattaacatcctaaacgtgctgaagtgcgatattaatattcctattgcttatcacttcctccggcgatacgccagatgcatacacaccaatatgaaaacactgaccctgagcagatatatatgtgaaatgaccctgcaggaataccattatgtgcaggagaaggcttcaaagctcgctgcggcatcactcctacttgctctgtatatgaaaaaactggggtattgggtgccatttctcgagcactattcgggctattccattagcgaactgcatccattggtccgtcagctcaataagcttctaacgttttcaagttacgacagcctcaaggccgtgtactataaatatagccacccagttttcttcgaagtggccaagatacctgcactggatatgcttaagttggaagagattctgaactgcgattgcgaggctcagggcctggtgctgtag

SEQ ID NO: 324473 - DNA, 4188 bp, Artificial Sequence
  derived and/or modified sequence
atgctcctgccactccctcctcaatccagcaagcccgtcccgaaaaagagtcagtcatccaagatagtgccgtcccatcacgatccatcagaaaaaacaggcgaaaattgtcaaactaagatctctccgtccagcctgcaagagagcccttcttcgttacagggagcccttaagaaacggtccgcattcgaggacttaacaaatgcctcccagtgtcaaccagtacagcctaagaaagaggctaataaggagtttgtaaaagttgtgagtaaaaagatcaataggaacacccacgctttggggttagcgaaaaagaacaaacgaaacctcaagtggcataagttggaggttacccccgtcgtggcatcaacaacagtcgtgcccaatataatggaaaagcctctcatactggacattagcacgacttccaaaacaccaaataccgaagaagctagcctttttaggaaaccgctggtgctcaaggaggaaccaacaatcgaggacgaaacccttataaacaagtccctgtccttgaaaaagtgcagtaatcacgaggaggtatccctgctcgaaaagcttcagcctctacaggaagagtcagatagcgatgacgctttcgtcattgagcccatgacctttaaaaaaacacataaaacagaggaggccgcaatcaccaagaagacattgtctctcaagaaaaagatgtgcgcgtcgcaacgcaagcagtcttgccaggaggaaagtttggcagtgcaagacgttaatatggaagaggacagtttcttcatggagtccatgagttttaagaagaagccaaaaactgaggagagcatacctacccataagctgtcttctttaaagaaaaagtgcacgatctacggtaagatctgccactttagaaagcccccagtcctccagactaccatctgcggcgcaatgtcttcaatcaagaagcctactaccgagaaggaaacactgtttcaagagctgtctgttctgcaggaaaaacacaccacggagcacgaaatgtccatcctgaaaaaatccctggcactgcaaaaaaccaattttaaggaggattctcttgtgaaagaaagtctggcatttaaaaagaagcccagcacagaagaagcgattatgatgcctgtaatcctcaaggagcagtgtatgacagagggaaagcgctctcgcctgaagccactggtgctccaggagattacctctggtgagaagtccctcattatgaagcctctttccataaaagagaagcccagtacagaaaaagaatcttttagccaggagccaagtgccctgcaaaaaaagcatacaacccaggaggaagtctcaatcctgaaggaaccctcttcgctgctcaaaagccccactgaggagtcaccttttgatgaggccttggccttcacaaagaaatgcactatcgaggaagcaccaccgacaaaaaagcccctcattctgaaacgcaaacacgcgactcagggcacaatgtcccatctgaaaaaacccctcatcctccagactactagtggggagaagagtctgatcaaagagccactcccctttaaggaggagaaagtgagtctgaaaaaaaagtgtacaactcaggagatgatgtctatctgtccagagctgcttgacttccaggacatgatcggagaggataagaactcattttttatggagcctatgtctttccgcaaaaatcctacaacagaagagaccgtccttaccaaaaccagcctatcactgcaagagaaaaagattactcaggggaaaatgtcccacctgaagaagcccctggtgctacagaaaatcaccagcgaggaagaatctttctacaaaaagctactaccattcaaaatgaagagcaccacggaagaaaagttcctgtctcaggagccctcagccctgaaagaaaagcacactactctgcaggaggtgagcctgtccaaagagtccttggctatacaggaaaaggccactaccgaagaggagtttagccaggagctcttttctctgcacgtcaagcacaccaacaaatcaggaagtctgttccaagaagcccttgtactccaggaaaaaaccgacgccgaggaggactcgctcaagaatcttttagcactacaggaaaagtcaacaatggaggaggagtctctgatcaacaagcttctcgccctcaaagaagagttgtcggccgaggctgccaccaatattcagactcagttatcgttgaaaaagaagagcacttcacacgggaaagtattttttttgaaaaaacagctggcccttaacgaaaccattaatgaggaagaattcctcaacaagcagcctctggccctagaggggtaccccagtattgctgagggagagacccttttcaaaaagctccttgctatgcaggaggaacctagcatcgaaaaggaggcagttttaaaagaacctactattgataccgaagctcacttcaaagagcctttggccctgcaagaggagcccagtactgagaaggaggcagtgctgaaggaaccaagtgtcgacacagaggcgcactttaaagaaacactggccttacaggaaaagccatctatagagcaggaggctcttttcaaacgacacagtgctctgtgggaaaagccgtccaccgaaaaggagacgattttcaaagagtctttagatttgcaggagaagcctagcattaaaaaggagacactgctgaaaaaacctcttgcgctgaagatgagcacaatcaatgaagccgtccttttcgaggatatgatagcactgaacgagaagcccaccacgggcaaggaactatcatttaaagagcctcttgctttgcaggaatcacctacatataaggaggacactttcctcaagacccttctcgtaccacaagtgggaacatctccgaacgtatcttcaacagctcccgaatcaatcaccagtaaatcatctatcgctacaatgacatccgtagggaaatcaggaacaattaacgaagcatttctttttgaggacatgatcacattgaacgaaaagccgaccaccgggaaagaactctctttcaaggaacctctcgcactacaggaatcacccacctgtaaggaggacacattccttgagaccttcctgattccacagattggtacctctccttatgtgttctctacaacccctgaatctataaccgaaaagtcttcaattgctaccatgacaagcgtaggaaagagccgcacgacaacggagagctctgcatgcgaatccgcaagcgataagccagtgtcgccacaggctaagggaacaccaaaagagatcactccaagagaagatattgacgaagattcttctgatccctcctttaaccctatgtatgccaaggaaattttcagttacatgaaggaacgtgaggaacagttcatcctgaccgactacatgaaccggcagatagagattacaagcgacatgcgagcaatcctcgtggactggctggtagaagtgcaggtttcgttcgagatgactcatgaaacgctgtacttggctgtcaagctcgtggatctctatctaatgaaagccgtgtgcaagaaagataaactccagctgctcggtgccacagccttcatgatagcagctaagttcgaggaacacaattctccaagagtcgatgatttcgtctatatttgtgatgacaactaccaacggagcgaggtgctttcgatggagataaacattctgaacgttctgaaatgcgatatcaacattcctattgcttatcacttccttcgcaggtacgcccgttgcattcacactaatatgaagaccctgaccctgagccggtatatatgcgaaatgacgctccaagaatatcattatgtgcaggaaaaagcaagcaagttggccgcagcctctctactgctggcactctacatgaagaagctggggtactgggtgccctttttggagcattattctggatacagcatctcggaattacaccctctagttagacaattgaacaagttactgaccttttcctcctacgattcccttaaagcggtatactacaagtattcccaccccgtctttttcgaggtcgccaagataccagccttagacatgctgaaattagaagaaattctaaactgcgattgcgaggcgcaaggtctggtgctctag

SEQ ID NO: 324474 - DNA, 4188 bp, Artificial Sequence
  derived and/or modified sequence
atgcttcttcccctccccccacagtcatcaaagcctgtgccgaagaagagccagtcgagtaaaattgtgccatcacatcacgacccttctgagaaaactggcgagaactgtcagactaaaatctcaccaagcagcctgcaagaatcccccagtagtctgcagggagcactgaagaagcgctcagcattcgaggacctgaccaatgcttcccaatgtcagcctgtgcagcccaaaaaggaggcaaataaggaatttgtgaaagtagtgagcaaaaagatcaaccgaaacactcacgccctgggcctggcgaagaagaataagaggaacctgaaatggcataaattggaagttaccccagtggtggctagcaccacagtggtgccgaacatcatggaaaagccgctaatcttagacatttcaaccactagcaagaccccaaacacggaagaggcttcgctttttaggaagcctttggtgctgaaggaagaacccacaatcgaagacgagactctcatcaacaagtcactgtcacttaagaagtgcagtaatcatgaggaggtttccctcctggagaaacttcagcctctgcaggaagagagcgacagcgacgatgcattcgtaatcgagcctatgaccttcaagaaaacacataaaacggaggaggccgctatcaccaagaagactttaagcttaaagaagaaaatgtgcgcctctcagagaaagcagtcctgccaggaagaatctctcgctgtgcaggatgtaaatatggaagaagattccttctttatggagtccatgagtttcaaaaaaaagcccaaaaccgaggagtctattcccacccacaaactatcttctctcaagaaaaagtgtacgatctatgggaaaatatgtcactttcgtaaacccccagtactgcagaccactatctgcggagctatgtctagcatcaagaaacctactacagagaaagagacattgtttcaagagctatctgtgttacaagaaaagcatacaaccgaacacgaaatgagcattcttaaaaagtctctggcgctgcagaagacgaatttcaaggaagactctttggtgaaggagagtttggcattcaaaaaaaagccttccaccgaagaggcgatcatgatgccagttatcctaaaggagcagtgcatgacagaaggcaagagatccagactgaagcctcttgtgctgcaggaaattaccagtggggaaaaaagcctgatcatgaagccactctcaattaaggaaaaaccttcgacggagaaagagtccttctcccaggagccatcggccctgcaaaagaagcataccacccaggaggaagttagcattttgaaggaacccagtagtctcctcaaatcacccaccgaagaatctcccttcgacgaagccctggccttcactaagaaatgtacaattgaggaagcgcctcccacaaagaaacctctgattcttaagcgcaagcatgctactcaggggaccatgtctcacctcaagaagcctctgatactccagaccaccagcggagagaaatccttaattaaagaacctctgccctttaaggaagagaaggtttccctgaagaagaaatgcaccacgcaagaaatgatgagcatctgtccagagttactggacttccaggacatgattggagaagataagaatagttttttcatggagccaatgtcctttagaaaaaacccaacaaccgaggagacggtactcactaaaactagcctgtcccttcaggaaaagaaaattacacaaggcaaaatgtcacatctcaagaagccgctggtactgcagaagataacttctgaagaagagtccttttacaagaagctgctcccattcaaaatgaagagtaccacggaggaaaagttcttaagtcaagaacctagcgcgctgaaggagaagcacaccactctgcaggaggtctcacttagtaaggagtccctggccatccaggagaaggctacaaccgaagaggagttcagccaggagctgttctctttacatgtcaaacacaccaacaaatctggaagcctctttcaggaagctttagtgctgcaggaaaaaactgacgccgaagaggacagtcttaagaatctgttagccctacaggaaaagtcaactatggaggaagaaagtttgattaacaagctgttagcactgaaagaggaactctcagccgaggcagcaacaaatatacagactcaactgagcttaaagaaaaaatccacctcacacggtaaggtgttttttctgaagaaacaattggctctcaacgagaccataaatgaagaagaattcctgaataaacaaccgctcgcacttgaaggttatccatctattgcagagggagaaactttgtttaagaaacttctggcaatgcaggaggaacctagcattgaaaaggaagctgtgctcaaggaacccacaatcgacactgaagcacacttcaaagagccattagctctccaggaggagccgtcgaccgaaaaagaagccgtacttaaagaacccagcgtggatacggaggcccatttcaaggaaacgctggctctgcaggaaaagcctagcattgaacaggaagccctatttaagcgccacagcgcactgtgggagaaacctagcaccgaaaaagaaactattttcaaagaatcattagatcttcaggagaaaccttccataaagaaagagactctgctgaagaagcctctcgcactcaaaatgagcacaataaacgaagctgtactgttcgaggacatgattgctcttaatgaaaagcctaccacagggaaagagttgagcttcaaggagcccctagctcttcaggaatctcccacgtataaggaagatacgtttctgaaaacccttcttgtcccacaagtaggcacttcaccgaatgtgtcgtctaccgcccctgagtccatcacctccaagtcctccatcgccacaatgaccagcgtcgggaaatcagggactattaatgaggcattccttttcgaggacatgataacccttaacgagaagcctaccaccgggaaggagctctcctttaaggaacctctggctttgcaggaatcccccacatgcaaggaggatacctttctggagacctttctcataccacaaattgggacttctccctatgtattttctacgactcccgaaagtatcacggagaaatcctctatcgctaccatgacgtccgtggggaagagtcggactactaccgagagctctgcctgcgagagtgcatcggataagcctgtgtcaccccaggccaagggaacacctaaggagattacacccagagaggacatcgacgaggatagcagtgacccaagctttaatcctatgtacgctaaggaaatcttctcctatatgaaggagcgcgaggagcagtttattctaactgactacatgaacaggcaaattgaaattacttctgatatgagagccatcctggtcgactggctagtggaggttcaagtgtctttcgaaatgacacacgaaaccctctacctggctgtgaagctcgttgatctgtacctaatgaaggctgtgtgtaaaaaagataagctgcagcttcttggcgcaaccgctttcatgatcgcggctaagttcgaagagcacaactcaccacgggtcgatgattttgtttacatttgcgatgacaactatcaacggtccgaggttctgtcaatggagattaacatactgaacgtgctgaaatgtgatatcaatattcctattgcataccatttcttgcgacgctatgcccgatgcatacataccaatatgaaaacgttaaccctgtctcggtacatatgtgagatgaccctgcaggagtatcactacgtgcaagaaaaggcttccaagctcgcagcggcttctctgctgcttgcactgtatatgaagaaactgggatactgggtgccattccttgagcattactcaggatacagtatttccgagcttcaccccctggtacgtcaactcaataagctcctgaccttctcaagctatgactcccttaaggcggtctattataagtatagccatcctgtgtttttcgaagtcgccaaaatcccggcactcgatatgctgaaattagaagagatcctgaactgcgactgcgaggcccaaggactggttttgtag

SEQ ID NO: 324475 - DNA, 4188 bp, Artificial Sequence
  derived and/or modified sequence
atgctgcttccactgccgcctcagtcttcaaaaccagtgccaaaaaaatcccagtcttctaaaattgtaccttcacaccacgacccctccgagaaaaccggtgagaattgccaaacgaagattagtccttcttctctacaagagtcaccttctagtttgcagggtgcactgaaaaagcggtccgctttcgaagaccttacgaacgcatctcaatgccaacccgtgcaacctaagaaggaggcaaacaaggaattcgtcaaagtggtgagtaagaagatcaatagaaacacccacgccctcgggctcgcgaaaaaaaacaagcgcaacctcaagtggcataaactggaagtaacccccgtcgtcgcttcaaccacagtcgtaccaaacatcatggagaaacccctgatcctcgatatatcaactacctctaaaacccccaacacagaagaagccagtttgtttagaaagccccttgtgctcaaagaggaacccacaatagaggatgaaacgctgattaacaagagcctgtcactgaaaaagtgcagcaaccacgaagaggtatccctactcgaaaagctgcagccactacaagaagaaagtgatagcgacgatgcattcgtcatcgagccaatgactttcaaaaaaacgcacaaaaccgaagaagccgctattactaaaaaaacactatccctcaagaaaaaaatgtgcgcgtctcaacgcaaacaatcctgtcaggaagaatctctagccgtccaagacgtgaacatggaggaggattccttttttatggagtcgatgtcattcaagaaaaagccaaagacggaggaaagcataccaacccacaagctgagctccctgaaaaaaaaatgtacaatttacggcaagatttgtcattttcgtaaaccccctgtgctccaaactaccatctgcggcgcaatgagctcaattaagaagccaactacagaaaaagaaaccctgtttcaggaactgtctgtgctgcaggagaagcacacaaccgaacacgagatgtcaatcctgaagaaatccctagccttgcaaaaaacaaatttcaaggaggattccctcgtgaaagagtctctagcctttaaaaagaaaccgagcaccgaggaggcaattatgatgcccgtgattttgaaggaacagtgtatgacagaaggcaaaagatcccggctcaagcctcttgtcttgcaggagattacctcgggagagaagtccctgatcatgaaaccgctctctattaaggagaaacctagcactgagaaagaaagctttagccaggaacccagcgctctgcagaagaagcacactacccaggaagaagtttccattctgaaggaacccagcagcctgctgaagtctccgacagaggagagccccttcgatgaggcactggcctttacaaaaaaatgtacaattgaggaggccccacccactaagaagccactgatcttaaaacgcaaacacgctactcaaggaacaatgtctcatctgaaaaagcctctgatccttcagactacatcaggagaaaagagcctgatcaaagagccattgccattcaaagaggagaaggtaagcttaaagaaaaagtgtactactcaggagatgatgtccatctgccccgaacttcttgattttcaagatatgataggcgaggacaaaaattccttcttcatggaacctatgagctttaggaagaaccctacaactgaagaaacagtgctgacaaagacttccctcagcttgcaggagaaaaaaatcacccagggcaagatgagtcatctgaagaagcctcttgtgctccagaagataacctcagaagaagaatccttttacaagaagttactcccattcaagatgaagtccaccactgaagaaaagtttctcagccaggagccatcagccctgaaggaaaagcacacaaccctacaggaggtgagtctctctaaagaatccctcgccatccaagaaaaggccaccactgaggaggagtttagccaggagttgttcagcctccatgttaagcataccaacaagtccggtagcctgttccaggaggcactggttctccaggagaaaacggacgcggaggaagatagcctcaaaaacttactagccctccaggagaaaagcacaatggaagaagaatctctgatcaacaaactccttgctcttaaggaggagctttctgcggaagcggcaaccaatatacagacacagttgtcactgaagaaaaaatccacttctcacgggaaggttttttttttgaaaaaacagctggctctcaatgagactatcaacgaagaagaattcttgaacaagcagccccttgctttggaaggatacccctcaatcgcggagggtgagacattattcaagaaacttctggcgatgcaagaagagcctagcatcgaaaaggaagcagtgctgaaggagcccacaatcgacactgaagcacatttcaaagaaccccttgcgctccaggaggagcccagcacagaaaaagaagccgtccttaaagaaccttccgtggacactgaggctcatttcaaggaaacgctggcactgcaggagaaaccttcaattgagcaggaggccttgttcaaacgacactctgcattatgggaaaagccatccacagagaaggagacaatcttcaaagaaagcctggatctccaggagaaaccaagtatcaagaaggaaactctgctcaagaagcctctcgccctcaagatgtcaacaattaacgaggccgtattattcgaggatatgattgccctgaacgagaaaccgaccacaggcaaagagctctcctttaaggaacctcttgctctgcaggagtcccctacctataaggaagataccttcctgaaaaccctgctcgtgccgcaggtcgggacctctccaaacgtctcttcaactgcccctgagtcaattacatctaagtcatctattgccacaatgacatctgtcggcaagtctggaacgatcaatgaagctttcctattcgaggacatgattacattgaacgagaaacccacgaccggtaaagaattgtcattcaaggagccattggcacttcaagaatcgccgacctgtaaggaggatacgttcctggagacattcctgatacctcagattgggacctccccatacgtctttagtaccacccctgagtctataacagaaaagtcttcaattgctaccatgacgtccgtcggcaaatcccgcacaactaccgagagttcagcttgcgagtctgcatccgataagcctgtctccccccaggccaaaggaactccaaaggaaatcacgccccgtgaagatatcgatgaggactcgagcgacccttccttcaaccctatgtatgccaaggagattttctcttacatgaaagaaagagaagaacagtttattctcactgactacatgaataggcagatagaaatcacttctgatatgagagcgatactggttgattggttggtggaagtccaggtttcattcgaaatgactcatgagacactgtacctggccgtcaagctggtggacctgtatctgatgaaagcagtttgtaaaaaagacaaactgcagctgttgggagctacagccttcatgattgcagcgaaatttgaagaacataactctcctagagtggacgactttgtgtacatctgcgacgataactaccagagatccgaggtcctgagtatggaaatcaatattctcaatgtgttaaaatgtgacataaacatccccatcgcttatcatttcctgcggcgttacgctagatgcatccacaccaatatgaagacattgaccctaagtcggtatatctgcgagatgaccctgcaagaatatcattacgtgcaggagaaggcgtctaaactagcagccgcatccctgttgttagctctgtacatgaagaagctcggatactgggtaccttttctggagcactacagcgggtattctatatctgagctccacccccttgtgcgtcaattgaacaaattgttaaccttctctagttatgattccctcaaggctgtttactataagtatagccatccggtgttcttcgaagttgccaaaatccccgctctagacatgcttaaattggaagagatactcaactgcgactgtgaggcgcaggggttggttctgtag

SEQ ID NO: 324476 - DNA, 4188 bp, Artificial Sequence
  derived and/or modified sequence
atgctcttaccacttccacctcagtcctccaagcccgtgcccaagaagagccaatcctccaagattgtgcctagtcatcacgatcctagcgaaaaaacaggagaaaattgtcagacaaaaatcagtccatcatccctccaagagtctccgtcctctctacaaggggccctcaagaaacgttctgcctttgaagaccttacaaacgcaagtcaatgtcagcctgtgcagcctaagaaagaggcaaacaaggagttcgtaaaagtcgtgagcaaaaagataaaccgtaacactcacgccctgggccttgctaagaaaaataagcgaaacctgaaatggcacaagctcgaggttacgccagttgttgcctccaccactgtcgtaccaaacattatggagaaacctcttattctggatatttcaacaacttcgaagacccccaatacggaggaggccagtctgtttcgaaaacccctcgtccttaaagaggagcccaccattgaagacgagacgctgataaataagtctctgagcctaaaaaaatgtagcaaccacgaagaagtctcgcttctggaaaaactccagcctctccaagaggaaagtgacagcgatgatgccttcgtcatcgaacctatgacctttaaaaagacacacaagacagaggaggcggctatcacaaaaaaaacactaagcttgaagaaaaagatgtgcgcctctcagagaaaacaaagctgccaggaagaaagcctggcggtgcaggacgtcaatatggaagaggattcatttttcatggagtctatgtcctttaaaaagaagcctaagacagaggaaagcataccgacacacaaactgagcagcctcaagaagaagtgtacgatatatgggaaaatctgccatttcaggaaaccacccgtccttcaaactactatatgcggagccatgtcaagtataaaaaaaccaacgactgagaaagagacccttttccaggaactgagtgtcctgcaggagaagcacactacggagcacgagatgtcaatcctgaagaagtcactagccctgcagaagaccaacttcaaggaagactctctggtgaaagaaagtctagcgtttaaaaaaaagccttccactgaggaagccattatgatgcccgtgatactgaaagaacagtgcatgaccgaagggaagcggtcaaggctgaagcctttggtgctgcaggaaatcaccagcggggaaaaaagcttaattatgaaacccctgtcaataaaagagaagccatccaccgagaaagagagcttttctcaggaaccatctgcgttgcagaaaaaacatacaactcaggaggaggtgtctattttgaaggaaccgagctcgctgctgaaatcccctactgaagaatccccttttgacgaggcactcgcttttacgaaaaaatgtacaatagaagaggcccctcccactaagaaacccctgatccttaaacgtaagcatgccacacagggaaccatgagccacctaaaaaaacccctcatcttacagactacctcaggggaaaagtccctaattaaggagcctctgccctttaaggaggaaaaggttagtttgaaaaaaaagtgcacaactcaggaaatgatgagcatttgcccagagcttctggactttcaagacatgattggcgaagataagaatagcttttttatggagccaatgtcattccgaaaaaacccaaccacggaagaaacagttctgaccaagacaagcctgtcacttcaagaaaagaaaattacacagggtaaaatgtcacacctcaagaagccactggtgctgcaaaaaattaccagtgaagaggaaagtttctataagaagctcctgccgttcaaaatgaagtccacgacggaggaaaagtttttgtctcaggaaccaagcgctctcaaagagaaacatactaccctgcaggaggtgagtctgtccaaagaatctctcgctattcaggagaaggctaccacagaagaagagttctcccaagagttgttttctctccatgtgaagcacacaaacaagagtggctcactgtttcaagaggccctggttcttcaggagaagacagacgcagaggaggacagtctcaagaaccttctcgccctgcaggaaaaatccaccatggaagaggagtcccttataaacaagctgctggctttaaaagaggagcttagcgcggaggcagccaccaatatccagacccagctgagtctgaaaaaaaaaagtacctcccacggtaaggtctttttcctaaaaaagcaattggccctgaatgagactatcaacgaggaagagtttttgaacaagcaacccctggcccttgagggataccctagcatcgccgaaggcgaaacgctgtttaagaaactgctggcaatgcaggaggagcctagtatagaaaaagaagcagtgctgaaggagccaaccatcgataccgaggctcacttcaaggaacctctcgcactacaggaggaaccatccacggagaaagaggccgtgctaaaagaaccctcggttgacacggaggctcactttaaggaaactctggcactgcaggagaaacctagcatcgagcaagaggcactgttcaaacggcacagtgccctgtgggagaagccttccaccgaaaaagagactatctttaaggagagcttagatctgcaagaaaaaccttccatcaagaaggaaaccctactgaagaaaccactggctctgaaaatgtctactatcaatgaggcggtcctattcgaagatatgatagcactcaacgagaagcctaccaccggcaaggaactgagttttaaggagccactagccctgcaggagtcccctacatataaagaagataccttcctgaagacgctcctggtgccccaggtgggaactagtcctaacgtgagtagcacagcacccgagagcattactagtaagagttcaattgctacaatgacatcagtgggaaagtcagggactattaacgaagccttcctattcgaagacatgattacacttaatgagaagcctacaaccgggaaagagctctccttcaaagagccgctggctctgcaggagtcccctacgtgtaaggaggataccttcctggagacctttttgatccctcagatcggaaccagtccctatgtgttcagtaccacgcccgaaagtatcacagaaaagtcctccattgcaactatgactagtgtaggcaaaagcagaaccacgactgagtcctccgcctgcgagtcagcgtcagacaaaccagtaagcccccaagctaaggggacacccaaggaaataacacctcgggaggatatcgatgaggacagttcggatccgtcgttcaacccaatgtacgcgaaagaaatcttctcctatatgaaggaacgcgaagaacagttcattctgacagactacatgaacagacagatcgagatcacaagtgacatgcgggctattctagttgactggctcgtcgaggttcaggtgtctttcgaaatgactcacgaaaccctgtatctcgcagtaaagcttgtggatctgtatctgatgaaagcagtgtgtaagaaggataaactgcaactcttaggtgcaacggcatttatgattgctgccaagttcgaggagcataattcaccccgggtcgacgacttcgtgtacatctgtgatgacaactatcagcggtctgaagtgctgtcaatggaaattaacatactcaatgtgctaaagtgcgatattaatatccctattgcctaccatttcttgagaaggtacgcacggtgcatccataccaacatgaaaacattgacactgagcagatatatctgcgaaatgactctccaagaataccactacgtgcaggagaaggctagtaaactcgccgccgcatccctactgctggcgctgtacatgaagaaactcggatattgggtgcccttcctggaacattattctggctattctatctccgaactgcaccccttagtaagacaattgaataagctcctcacgttctctagctatgattctctcaaagccgtgtactataaatactcccatccagtgttcttcgaagtggctaaaatccctgcgctagatatgctcaaactcgaagaaattcttaattgtgattgcgaggctcaggggctggtcttgtag

SEQ ID NO: 324477 - DNA, 4188 bp, Artificial Sequence
  derived and/or modified sequence
atgctgctgcccttgccccctcagtcctcaaaacctgtgcccaaaaagagtcaatcttccaagattgtgccaagccaccacgatccaagcgagaagacaggcgagaactgccagaccaagatatctccgtccagcttgcaggaaagtccttcctctcttcagggggcactgaagaaaagatctgccttcgaggacctgacaaacgcatcgcaatgtcagccagtgcagcccaagaaggaggccaataaagagttcgttaaagtggtcagtaaaaagatcaatcgcaatacacacgctttgggcttagccaaaaagaataaacggaatctaaaatggcacaagctggaggtgacacctgtggtggccagcactacagtcgtgcccaatatcatggagaagcctctgatactcgatatctctaccacctcgaagacaccaaataccgaggaagcctccctgttccgtaagccgctcgttctgaaggaagagcctaccatcgaagacgagaccctcataaacaagtccctgagcctgaagaagtgttcaaatcacgaggaagtctcactcctggaaaaattacagcctctccaggaagaatccgattccgatgacgcatttgtgatcgagccgatgacctttaagaaaacacacaagaccgaggaggccgcgatcacaaaaaaaaccctgtcccttaagaagaagatgtgcgcctctcaacggaaacagagctgtcaggaggagtcccttgctgtgcaggacgtgaacatggaggaggattccttcttcatggaatccatgtctttcaaaaagaagcccaaaacagaagagagtatacccacacacaagctctcctcactgaaaaaaaagtgtaccatttatggtaagatctgccacttcaggaaacctcccgtgcttcagaccacgatttgcggggccatgagcagcatcaagaagccaacgactgagaaggaaaccctgtttcaggaactaagcgtgttacaggagaaacacactacggaacatgaaatgtcaatccttaaaaaaagtttggcactccagaagactaactttaaggaggattccctggtcaaggagtctctggccttcaagaaaaagccctctacagaggaagcaattatgatgcctgtgatattgaaggagcagtgtatgacggagggcaagcgatcccgattgaagccattggtcttacaagaaatcacctctggcgaaaaaagcctcataatgaagcccctatcgattaaagagaaaccaagtacagagaaagagtcattcagccaagaaccgagcgcactccagaaaaagcacaccacgcaggaagaggtttctattcttaaggaacctagttctctgctgaagtcgcccacggaggaatctcctttcgacgaagctttggcattcaccaaaaagtgcaccatcgaagaagccccacccaccaagaaacctctgatcctcaagcggaaacacgcaacacaagggactatgtcccacttaaagaaacctctgatactgcagactacttcgggggagaaatctctgattaaggagcccctgccatttaaggaagagaaagtgagcctcaagaaaaaatgtaccacccaggagatgatgagcatctgccctgaactgcttgactttcaggatatgattggtgaggataaaaactccttttttatggagccaatgtcatttcgcaagaatccgactactgaagagacagtgctcaccaaaacaagcttaagcctacaggaaaagaagatcacccagggaaagatgtcccacctgaaaaagccattagttttgcagaagatcaccagcgaggaagagtccttctataagaaattactgccatttaaaatgaaatcgacaacggaagaaaagttcctttctcaggaaccatctgctcttaaagagaagcacactaccctccaggaagtctcgctcagcaaggagtctctggctattcaggaaaaagcaaccactgaggaagaatttagccaggagctcttctccctccacgttaagcacacaaacaagtctggtagcctgttccaggaagcactggtgctgcaggagaagacggatgcggaagaggatagccttaaaaatttgctggcgttgcaggagaaaagcactatggaagaggagtctctgataaacaaactacttgcacttaaggaagagctgtctgccgaggctgcaaccaacattcaaacacagctgagtctgaagaagaaatctacttcccatggcaaagtattctttctgaaaaagcagttggcactcaatgagacaataaacgaagaggagtttttgaataagcagccactggccctggaaggctacccaagcatagccgagggagaaactctttttaagaagctgctggcaatgcaagaggaaccttccatcgagaaggaggcagtgctgaaagaaccgaccattgatactgaggcccactttaaagaacctctggctcttcaggaagagccaagtaccgagaaggaagctgttctgaaggaacctagcgtagatacggaggcgcactttaaagagactctggccctgcaggagaagccaagcattgaacaggaggcattattcaagagacactcggccttgtgggaaaagccttctacagagaaggagacaatttttaaggaaagtttggacctccaggagaaaccatcaattaagaaagagacactgttaaagaagcctttagcactgaagatgtctaccataaacgaggcagtgctttttgaagacatgatagccttgaacgaaaaaccgaccacaggaaaagagttaagctttaaagagcctctggcactgcaggaaagtccgacttacaaagaggacactttcctgaaaaccctcctcgtgccccaggtggggacaagccccaacgtgtcttctacggcgcccgaaagcatcacatctaaaagctctattgccacaatgactagcgtgggaaaatcagggaccattaacgaggctttcttgtttgaagatatgataaccttgaacgagaagcccactacaggcaaggagctgtctttcaaggagcccctggcattacaagagagccccacgtgcaaggaggatacatttctcgagacatttctcatccctcagatcggcactagtccctacgtctttagcaccactcctgagtcgattacagaaaaaagcagtattgcaacaatgacttccgtggggaagtctcggactactacggagagtagtgcttgtgagagcgcgagtgacaagcccgtttctccccaggccaagggcacccctaaggagattacaccacgggaggacatagacgaggattcttcagaccctagttttaatcctatgtacgcaaaggaaatattcagctacatgaaagaacgcgaggagcaattcatcctcacagattacatgaaccggcagatcgagatcacctccgatatgcgggcaattctggttgactggctcgtggaagtacaggtgtctttcgagatgactcacgaaaccctttacctcgctgttaaactggtggatctgtatctaatgaaagcggtgtgtaagaaagacaagctgcagctgctgggcgctaccgcctttatgattgctgccaagtttgaggagcacaactccccacgggttgacgatttcgtctacatctgcgacgataattatcagcggtccgaagtactatcgatggagataaacattttgaatgtgctgaagtgcgacataaatattcctatcgcttaccactttctgcgcagatatgcccggtgtatccacacaaacatgaagaccctcaccctcagtcgctacatctgtgagatgaccctccaggaatatcactacgtgcaggagaaggcttctaagctcgctgcagcatctcttcttctcgccctgtatatgaaaaaactgggatactgggtcccattcctggagcactactccggctattccatttcagaacttcatcccctcgttcgtcaactgaacaagctgctgacgttttcctcatatgactcactgaaggctgtgtactacaagtacagtcatcccgtctttttcgaggttgcaaagattcctgcactagatatgttgaagcttgaagaaatactcaattgtgactgtgaagcccagggcttagtcctgtag

SEQ ID NO: 324478 - DNA, 4188 bp, Artificial Sequence
  derived and/or modified sequence
atgctgctgcccctgcccccccagagcagcaagcccgtgcccaagaagtcacagagtagcaaaatcgtgccctcccatcatgatcctagcgagaagaccggtgaaaattgccagaccaaaatatctccatcatctctccaagaatcaccttctagcctgcagggagctctgaaaaaaagaagcgcctttgaggatctcactaatgcgagtcagtgtcagcctgtacaacctaaaaaagaggccaacaaggagtttgtgaaggtcgttagtaagaaaatcaaccgtaacacacacgcgctcggattagctaaaaaaaacaaaaggaatctgaagtggcataagctggaggtgacaccagtcgtggcctccacaactgttgtgccaaatattatggagaagcctcttattctggacattagtaccacctctaaaacacccaatacagaagaggcaagcctttttaggaagccactggtcttgaaagaagagcccacaatcgaagatgaaacactaattaataaatcactgtcccttaaaaaatgtagcaaccatgaggaagtgtccttattggaaaaattacaacctctgcaggaagaaagcgactccgatgacgccttcgtaatcgaacctatgaccttcaaaaaaactcataaaacggaggaggcggcgatcactaaaaaaaccttgtctttgaagaaaaagatgtgcgcgagccaacgcaagcaatcatgccaggaagaaagcctagccgtccaggacgtgaacatggaagaggactctttctttatggagagcatgtcgtttaagaaaaagcctaagaccgaggaatccattccaacccataaattgagctccctcaaaaaaaaatgtaccatctacgggaagatttgccattttcgaaagcctcccgtgttacaaaccaccatttgtggtgctatgtcctccattaaaaagccaaccacagagaaagagacgttattccaggagctgagcgtgttgcaggagaagcataccactgagcatgaaatgtctattcttaaaaaatccctagcccttcaaaagacaaactttaaggaggactcactcgtgaaggagagtctggcctttaaaaaaaagccgagcaccgaggaagcaatcatgatgccggtgatactgaaggaacagtgtatgacagaagggaaacgatctagactcaaacccctggtactgcaggaaatcacctcaggggagaaatcactgataatgaaaccactcagtattaaggaaaaacccagtacagaaaaggaatcattctcacaggagccctctgctctgcagaagaaacacacaacccaagaggaggtgagtattctgaaggagccatcatccctgcttaaatcccctaccgaggaatcacccttcgacgaagctctggcattcacaaagaagtgtacaatagaggaggcccctccaactaaaaaaccattgatccttaaacggaagcacgcgactcaaggaactatgtcccacctgaagaaaccccttattctgcaaactacatctggggaaaaaagcctcatcaaggaacccctgccttttaaggaggaaaaggtcagtctcaagaagaaatgcactacacaggagatgatgtccatctgccctgaattgctggactttcaagatatgattggcgaggataaaaactccttttttatggagcccatgtcttttagaaagaaccctaccactgaagaaaccgtactgactaagaccagtctatcccttcaagaaaaaaagatcacgcagggtaaaatgtcgcacctgaaaaagcctctcgtgctacagaaaatcactagcgaggaagaatctttctacaagaaattgttgccatttaaaatgaaatccactaccgaagaaaagtttttgtcacaggagcctagtgccctgaaagagaaacacaccactctgcaggaggtgtccctgtccaaagaatccctggccattcaggagaaagcgacaacagaggaagagttctcccaggagctgttcagcctccatgtgaagcataccaataaatctggaagcctcttccaagaagcgctagtcctgcaagagaagactgatgcagaggaggacagcttaaaaaaccttcttgctctgcaggagaagtcaacgatggaggaagagtctctaatcaacaagctcctcgccttaaaggaggagctcagcgcagaagcagcgactaatattcagacacaactctcccttaagaagaaaagcacctcacacggaaaagtattcttcctgaaaaaacaactagcactgaatgaaacaatcaacgaggaggagttcctgaacaagcagccccttgccctggaggggtacccttcaatagccgaaggtgaaacactgttcaaaaagttgttagccatgcaagaggaaccttcaattgagaaagaagctgtgctgaaggaaccgactattgatactgaagcacactttaaagagcctctggcgctgcaggaggagccatctaccgaaaaggaagccgttctgaaggagcccagcgtggatactgaagctcactttaaggagactctagcgctgcaggagaagccctcgattgagcaggaagcgctattcaagcgccattctgctctctgggaaaagccttccaccgaaaaggaaactatctttaaggagtcattggatttgcaggaaaagcccagtattaaaaaagagaccctgctgaaaaagccactggccttaaaaatgtcaactattaatgaggcagtacttttcgaggacatgatcgcactgaacgagaaacctacaacagggaaagagctgagctttaaagagccactcgccctgcaagagagcccaacgtataaagaggatacatttctgaaaactctgctagtcccccaagtgggtactagcccaaatgttagctctacagcccccgagagcataacctcaaagagcagcatcgccaccatgacaagcgtgggcaaatctggtaccatcaacgaagcattcctcttcgaggacatgattaccctcaatgaaaagccgaccactggaaaggagttgtcatttaaagaaccacttgctctgcaggagagtcccacatgtaaagaagataccttcctggagacattcttgattccccaaattgggacttctccttacgtgtttagcacgaccccagaaagcataacagagaagtcctccattgccacaatgacctctgttggtaagtcgcgaaccaccaccgaatcctcagcctgcgaaagcgcatctgacaagcccgtgagccctcaagccaaaggaactcctaaagaaataacaccaagggaggatatagatgaagattctagtgacccatctttcaaccctatgtacgctaaggaaattttctcttacatgaaggagcgcgaagagcaatttatattgaccgattatatgaaccgccagattgagatcaccagcgacatgcgcgcaatcctggtggattggctagtggaggtacaggtgagtttcgaaatgactcatgaaaccctctatctagccgtcaaattagttgacctttacctcatgaaggccgtgtgcaagaaagacaaactacaactgctgggcgccaccgcgttcatgatcgctgcaaagttcgaggagcataactctccccgggtggatgatttcgtgtatatctgtgatgataattatcaaagatctgaagttctgtccatggagatcaatattctgaatgtgctaaaatgcgacattaatattcccatcgcctatcacttcctgcgcaggtatgcccggtgcatccacacgaacatgaagaccctcactctgagtagatacatctgcgagatgacactccaggagtatcactacgtccaagagaaagcatccaaactggcagccgctagcttgcttctcgccttatatatgaaaaaactgggttactgggttcccttcctagagcactattctgggtacagcatatcggagctccatcccctggtgcggcagctgaataaattattgaccttctcaagttatgattcccttaaggctgtgtactataaatattcgcatccagtgtttttcgaggtggccaaaattcctgcacttgacatgctcaaattagaagagatcctcaattgcgactgcgaagcccagggcctagtgttatag

SEQ ID NO: 324479 - DNA, 4188 bp, Artificial Sequence
  derived and/or modified sequence
atgctgctgcccctgcccccccagagcagcaagcccgtgcccaagaagagccagtcatctaagatagttccttcacatcacgatccgtctgagaaaacaggagagaactgccagacaaagatttcaccttctagcttgcaagaaagcccaagcagcctgcagggagcccttaagaaacggtcagccttcgaagatctcaccaacgctagtcagtgccagcctgtgcagccaaaaaaggaggcaaacaaggaattcgtgaaggttgtctctaaaaagattaacaggaacacacatgctcttggcctagccaaaaagaacaagagaaatctgaaatggcacaaactagaggtaacccctgtggtggcttccacaaccgtcgtgcctaacattatggagaaacccctcatactggatatttccactacttctaaaaccccaaacacagaagaggcgtccctgtttcggaaacctctggttcttaaggaagagcccaccatcgaggatgagactcttattaacaagtctctgtccctgaagaaatgctctaaccacgaagaggtttctctgctggagaaactgcagccattacaggaagagagcgactcagatgatgcgttcgtgatcgagcctatgacattcaaaaaaacccataaaaccgaggaagccgcaattactaaaaaaactctgtcactgaagaaaaagatgtgcgcaagccagcgaaaacagtcatgccaggaagagagcctggctgtgcaggatgtgaacatggaggaggatagtttctttatggagtctatgagcttcaagaaaaagccaaagaccgaagaaagtatcccaacacataagctgagttccctgaagaaaaagtgcactatatatggcaagatttgccatttccggaagccccctgttctgcaaacaacaatctgtggagccatgtcctctatcaaaaaaccaactacagaaaaagaaactttgttccaggagctgtctgtactccaagaaaaacacactactgaacacgagatgtctatactgaagaagtctctggcactccaaaagacaaatttcaaggaggatagtttggtgaaagagtccttggcttttaaaaagaagccttcgaccgaggaagcgattatgatgccagtgattctgaaggagcaatgtatgaccgagggtaagcggtcacgcttgaagcctctcgtgcttcaggaaataacatccggagaaaaatctttaataatgaaacccctatccattaaagagaagccctcaaccgagaaggagagcttttctcaggaaccatccgcgttgcagaagaagcatacgacgcaggaggaagtctctatcctgaaagagccaagctcacttcttaagagtcctactgaggaatcccccttcgatgaagccttggccttcactaagaaatgtactatcgaggaagccccccccaccaagaaaccgcttattctgaagcggaaacacgccactcaaggaaccatgtcgcacctcaagaaaccattaatcttgcagaccacttccggggagaaaagccttattaaggagcctctcccttttaaggaggaaaaagtgagcttgaaaaaaaagtgcacaacgcaagagatgatgtcaatttgcccagaactactcgacttccaggatatgataggagaggacaagaacagtttctttatggagccaatgagtttcaggaagaacccaacaacagaagagacagtactcacgaagaccagtttgagcctgcaggagaagaaaattactcagggaaagatgagccaccttaagaaacccctcgttctgcagaaaatcacaagcgaggaggaaagcttttataagaagctgttaccgtttaagatgaagtctactacggaggaaaagttccttagccaggagccatcagcattgaaggagaaacataccactctccaggaggtgtcactctccaaggaatctttggcgattcaggagaaagcgaccaccgaggaggagttttcacaggagctcttttctcttcatgtgaaacacacaaacaagtcgggatctctttttcaggaagccctggttctgcaggaaaaaacggatgctgaggaggatagcttgaaaaacctgcttgcgctccaggaaaaatcaacaatggaagaggaatccttgatcaacaagctcttggctctgaaggaggaactcagtgctgaagctgcgactaacattcagacccagctcagccttaagaagaagagcacctcacatgggaaggtgtttttcctaaaaaagcaactagccttaaacgagaccatcaatgaggaagaattcctcaataaacagcctttggcactcgaagggtatccttccatcgctgagggggaaactctgtttaaaaaactgttggcaatgcaggaggaaccatccatcgaaaaagaagcggttcttaaggaacctacaatcgatacagaggcacatttcaaggaacccctggccctacaggaagagccatctacggagaaggaagccgtgctgaaggagcccagcgtggataccgaggcccactttaaggagacgctggcccttcaagagaagccctccatcgaacaggaagccctgttcaagcgacattcagccctctgggagaagccctccacagagaaagagactatattcaaggagtcactggatctccaagaaaagcccagcataaaaaaagagactctccttaagaaacccctggccctgaagatgagcacaattaacgaggcagtcctgttcgaagatatgatcgcccttaacgaaaaacctacgacggggaaggaactgagcttcaaagagccattagcccttcaggagtccccaacatacaaggaagataccttcctgaagacactgttagttccccaagtgggtacctccccaaacgtgtcctctacagcacccgagagcattacttctaaaagcagtatcgctactatgacatccgtgggcaagtcaggcacaataaacgaagcattcctgtttgaagatatgatcaccctgaacgagaaacccacaacaggcaaggagctttcttttaaagaacccttggcactccaggagtcccccacgtgcaaagaggacacgttcctcgagacttttctgataccacaaataggcacctctccgtacgtgttttctacaactcctgaatccattaccgaaaaatcatccatcgcgacaatgacgtcagtcgggaagtctcgcactacaaccgaatcttctgcatgcgagtctgcctcagacaaaccagtgagcccacaggccaagggcacacccaaggagatcactccccgcgaggacatcgacgaggatagcagcgacccatcatttaacccaatgtatgccaaagagattttttcttatatgaaggaacgggaggagcagttcatcctcaccgactatatgaacagacagattgaaatcacaagcgatatgcgggccattctggtagactggctagtggaagtccaggttagctttgagatgactcacgagaccctgtatctggccgttaaactggtagacctctacctcatgaaagcagtctgcaagaaagataagcttcaattattaggagccacagcatttatgatagcagcaaaattcgaggagcataattcgcctcgtgtcgatgatttcgtatacatctgcgacgacaactaccagaggtccgaggtgctttctatggagatcaacattctaaatgtcctgaagtgcgacattaacatcccaatcgcctaccactttctgcggcggtatgcgcggtgtatccacacaaacatgaagactttgactctgagccgctacatatgcgaaatgacactccaggagtaccactatgtccaggagaaggcgagtaagctagcagcggcttctttgctattagccctttatatgaaaaagcttggctactgggtgccttttctagagcattatagtgggtacagcattagtgagctgcaccctcttgttcggcaacttaataagctgctcacattctcctcttatgacagcttaaaggccgtctactataaatattcacaccctgtattcttcgaagtcgccaaaatcccagctctggacatgcttaaactggaggagatccttaactgcgattgcgaagctcaggggcttgtcctctag

SEQ ID NO: 324480 - DNA, 4188 bp, Artificial Sequence
  derived and/or modified sequence
atgctgttaccactgcccccacagagctccaagccagtgcctaagaaatctcaatcgtccaaaatcgtgccatcccaccacgaccccagcgagaaaaccggcgagaactgccagaccaagatttcacccagtagcctgcaggaatccccatccagtctccaaggggcactgaagaaacggagcgcttttgaggatctgaccaacgcatctcagtgccagccagtgcaaccgaagaaggaagcaaacaaagagttcgtgaaggtagtgtctaagaagatcaaccggaatactcatgccttggggttggcgaaaaagaacaaaagaaacctaaaatggcataagttggaggttactcctgtcgtggcatccacgaccgttgtccccaatattatggagaaacccttaattctagacatcagcaccacatccaagacgccaaatacagaggaggcgtcgttgtttcgcaaacctttggtgcttaaagaggagccgacaattgaagatgaaaccctaataaataaatccctctccttgaagaaatgctctaaccatgaggaggtctctcttctcgagaagctccagccactccaggaagagagcgactccgatgatgcattcgtcatcgagccaatgacgttcaaaaagactcataagacagaagaggcagccattaccaagaagacactgagcttgaaaaagaaaatgtgcgcctcccagcgcaagcagtcttgccaggaagagagtttggctgtgcaggacgtcaatatggaggaagactctttcttcatggaaagtatgagttttaagaaaaaaccgaagactgaagagtccatcccaacccacaaactgtcttctttgaaaaagaagtgcactatttacggaaagatatgccactttaggaagcctcctgtcttgcaaaccacaatatgtggagccatgagtagtatcaaaaagcccaccaccgaaaaggaaacgctgtttcaagaactgtctgtgttgcaggagaagcataccaccgaacacgagatgagcatcctgaaaaagtccctagctctgcaaaagacaaatttcaaggaggattctctggtcaaggagtccctggcttttaagaagaaaccatctactgaagaagccatcatgatgcctgtgattttgaaggagcaatgcatgactgaaggaaaaagaagcagacttaagcccctggtgctgcaggagattaccagtggtgaaaagtcactcatcatgaaacctcttagcatcaaggagaagccttctactgagaaggagtcattctcacaggagccatccgccctgcagaagaaacacaccacccaagaggaagtgtccattctgaaggaaccctcaagcttgttgaagtccccaacagaagagtcaccgtttgacgaggcccttgcctttaccaaaaaatgcaccattgaggaggccccacccactaagaaaccattgatcctaaaacgtaagcatgccacacagggcactatgagtcacctgaagaaaccactgatcctccaaacaacaagtggtgaaaagtctctgattaaagaaccattaccctttaaggaggagaaggtcagtctgaagaagaagtgcacgacccaggagatgatgtccatatgtcctgagttgctggactttcaggacatgattggggaggacaaaaactctttctttatggaaccaatgtctttccggaagaacccaaccactgaagaaacagtcctcaccaagacaagcctctccctccaggagaagaagatcacgcagggcaagatgtcccacctgaaaaagcccctggtgctgcagaaaattacatccgaggaggagagcttctacaagaagctgctgccgttcaagatgaagtctaccaccgaagaaaaattcttgtcgcaagagccatctgccttaaaggagaaacacaccactctccaagaagtgtctctctctaaggagtcattggcgatccaagagaaggctacgacagaagaggagttctcacaagagctgttttcactgcacgtgaaacacactaataaatcggggagcttgtttcaggaggctctggtgctgcaggagaaaaccgacgccgaggaagactccctgaaaaatctcctggctctccaggaaaaatctactatggaagaggagtcactgatcaacaagttgctcgccttgaaagaggaattatccgcagaagccgcaacgaacatccagactcagcttagcctgaaaaagaagtctacctcccatggtaaagtgtttttcctaaagaaacagcttgccctgaacgagaccattaacgaagaggagttcctaaataaacaaccactggccctggagggctaccccagcattgccgagggggagacgctgttcaaaaagctgctggccatgcaggaggaaccatctatcgaaaaggaggcagttcttaaagagccgacaatcgacaccgaagctcactttaaggaacccctcgccctgcaagaggagccaagtacagagaaggaggcagtcctgaaagagccatcggtcgataccgaggctcactttaaggaaaccctcgcattgcaggaaaagccgagcatcgagcaggaggcactcttcaaacgccatagcgccctgtgggaaaaaccttctacagaaaaagagacaatttttaaggagtcactggacctgcaggagaaacccagtatcaaaaaagaaactctcctgaagaagccccttgccctgaagatgagcaccattaatgaggcagtgctatttgaggatatgatcgcactcaacgaaaagccaacaacaggcaaagagttgtccttcaaagagccccttgcgttacaggaatcgccaacctataaggaggacacctttttgaaaacactgctggtaccccaggttggcacttcgcctaacgtttccagcaccgcacccgaaagtataacctcgaaaagcagcatagccacaatgacctctgtcggtaaaagcggaacaataaacgaagcctttctctttgaagatatgataaccctcaacgagaagccgactacggggaaggagctgtcattcaaagaacccctagcccttcaggagagtccaacttgcaaggaggacacgttcctggaaaccttcctgattcctcagatcgggacctccccatatgtcttcagcactacacctgagtccataaccgagaagtcaagcatcgccacaatgacatctgtgggcaagtctcgaacaaccactgagagtagcgcctgcgaaagcgcctccgacaaaccagttagcccacaggccaagggaactcccaaagagattacccctcgggaggatattgacgaagattcttcagacccatcatttaatcccatgtacgcgaaagaaattttttcctacatgaaggaaagagaggagcagttcattctgaccgactatatgaatagacagatagaaattacatcggacatgagagccatcttggtcgattggttagtcgaggtacaggtttcttttgagatgacgcacgaaacgctctatcttgctgtcaagctcgtggatttgtacctgatgaaggccgtctgtaaaaaggacaaactgcagctactcggagccaccgctttcatgatcgctgcaaaatttgaagagcacaactcccccagagtagatgattttgtctacatctgtgacgacaactatcaaaggagcgaggttcttagcatggaaattaacatcctaaacgttctgaagtgcgacattaacatccccattgcttatcattttcttcgaagatacgctagatgcattcacacaaacatgaagaccttaacactctcacggtacatctgcgagatgacgctgcaggagtaccactatgtacaggaaaaagcttcaaaattagcagccgcatccctgcttctggctctttatatgaaaaagctgggctactgggtgccctttctggagcactacagcggctacagtatctctgaactgcatcctcttgttcgccagctgaataagcttctgactttcagctcatacgatagcttgaaggccgtttactacaaatatagccacccggtgttctttgaagtggcaaagattccagctctcgacatgctaaagcttgaagagattctgaattgcgattgcgaagctcagggcctcgtgctttag

SEQ ID NO: 324481 - DNA, 4188 bp, Artificial Sequence
  derived and/or modified sequence
atgctcttgccgctcccccctcagtcctcaaaacctgtgcctaagaagtcacagtctagcaagatcgtgccttcacaccacgatcctagcgagaagacaggagaaaactgtcagaccaagataagcccaagctcactgcaggaaagccccagctcactgcagggcgctttgaaaaaaaggtcggctttcgaggacctgactaacgcctcgcagtgccaaccagtccagcctaaaaaggaagccaataaggagtttgttaaggttgtcagcaagaagatcaaccgaaatactcacgccctcggcctcgccaaaaaaaacaaacggaacctcaaatggcacaaacttgaggtgacgccggtcgtggcttctaccacggtggtcccaaacattatggagaagccactcattctagatattagcactaccagcaagacaccaaatactgaggaagctagcttattcaggaagccgctcgtgctgaaggaggagcctacaattgaagatgaaactttgataaataagtcgctgagtttgaagaagtgctcaaatcacgaagaggtgtctctcttggaaaaacttcagccactccaggaggagtctgatagtgatgacgcatttgtgatcgagccaatgactttcaaaaaaacacataagactgaagaggccgcaatcacgaaaaaaactctcagcctgaaaaaaaagatgtgcgcgagtcagcggaaacagagctgccaggaagaaagcctggcagtgcaagatgtgaatatggaggaggattccttcttcatggaatcgatgagctttaagaaaaaaccgaagacagaggaatcaatcccaacccacaagctttcttcactgaaaaagaaatgcacaatatatggaaaaatctgtcactttcgtaagccccctgtgttacagactacaatttgtggagcaatgtctagcataaagaagcctaccaccgagaaagaaacacttttccaggaactttcggtgctccaagagaagcatactaccgagcacgagatgtctatcttgaaaaagagtctcgctctccagaagactaattttaaagaggactcccttgtcaaggaaagtctggctttcaagaagaagccatccacggaagaggctatcatgatgcctgtcatcttgaaagagcagtgtatgaccgagggaaagcggagccggctgaagccactggtattgcaggaaatcacttctggcgagaaaagcctgataatgaagcccctatctattaaggaaaaaccaagcaccgaaaaagaatcctttagccaggaacctagtgcactgcagaaaaaacataccacccaagaagaagtgagtatcctcaaagaaccctcctctctgctgaaatcaccaacagaggagtcacccttcgacgaagccttggcattcaccaagaaatgcacgatcgaggaagccccaccaacgaaaaaaccattaatcctgaagcggaaacacgccacacaggggactatgtcccatctcaagaaaccactgattcttcaaactactagcggcgaaaaaagcctaattaaggagccgctccctttcaaagaggagaaggtatctttgaagaagaaatgcaccacacaggagatgatgagtatctgccccgagctcctagattttcaagacatgattggagaggacaagaactccttctttatggaacccatgtctttcaggaagaatcccacaactgaagaaacagttttgactaagacttccctctcactgcaagagaagaaaatcacacagggaaaaatgagccatctgaagaaacctcttgtgctgcagaagataaccagcgaggaagaatccttctataaaaaactgttgccgtttaaaatgaaaagtacaactgaagagaaattcctgtcccaggaacccagtgccctgaaagagaaacacacaacgttgcaggaggtgtcactgagcaaggagtctctggctatccaggaaaaggccacgacagaggaagaattttctcaggagctgttcagcctgcacgtcaagcacactaacaagagtggaagcctgttccaggaagccctagtgttgcaggagaaaaccgatgcagaggaggactccctcaaaaacctgctggctttgcaggaaaagagcaccatggaagaagagtccctcatcaataagctcttggctttaaaggaagaattgagcgccgaggccgctaccaatatccagactcagctaagcctcaaaaaaaaaagtaccagtcatggtaaagtattcttcctcaagaagcagcttgcgttaaatgaaacgatcaacgaggaagaatttctgaataagcagcccctagccctcgaaggctacccttcgatcgctgagggcgagacattatttaaaaagctgttggccatgcaggaggaaccttcaatcgagaaggaggcagttctaaaggaacccactatcgatacggaagctcacttcaaggagcccctagctttacaggaagagccctcaactgagaaagaggcagtgctgaaagaaccgagtgttgataccgaagcccacttcaaagagaccttggcactccaggagaagccaagcatcgaacaggaggcgctctttaagaggcacagtgccctgtgggaaaaacctagcacggagaaggagacaatatttaaggaatcgttagatctgcaagagaaaccatctatcaagaaagagaccctgttgaaaaagccgctcgctctcaaaatgtccacgattaatgaggcggtgctctttgaggacatgatagctcttaacgagaaaccaacaacgggcaaagaactctctttcaaggaaccactggcccttcaggaaagccctacctataaggaagataccttcctcaaaacactgctcgttccacaagtgggaacctcccccaacgtgagctctaccgcccctgagtccatcacctccaagagttctattgctaccatgacaagcgttggaaagagcggaaccatcaacgaagcttttctattcgaagatatgatcacacttaacgaaaagcctacaactgggaaggagttgagtttcaaagaaccattagccttgcaagagtcgccaacgtgtaaagaggacacttttcttgagacatttcttattccacagatagggacttccccttacgtattttccaccactcctgagtcaataacagagaagtctagcatcgctaccatgacatccgtgggaaaaagccgcacgactaccgaatcatcagcctgtgagtcagctagtgacaagcccgtttcgcctcaggctaagggtactcccaaggagataactcccagggaggacattgatgaggacagtagtgatccttccttcaatccaatgtacgcaaaggagatatttagttatatgaaggagagggaggaacagttcatcttaacagattatatgaataggcagatcgagatcacaagcgacatgagagctatcctcgttgactggcttgttgaagtgcaggtgtctttcgagatgacacatgagacgttgtacctcgctgtgaagctggttgatctctatctgatgaaggccgtgtgcaagaaagataagctgcaactcctcggagccacagcctttatgattgctgcaaagttcgaagaacacaacagcccaagagttgatgatttcgtgtatatctgcgacgataattatcagaggtcagaggtgctctctatggagatcaacattttgaatgtgctcaaatgtgatattaacatcccgatagcataccactttttacggaggtacgctcgatgtatacataccaacatgaaaaccctcactctctcccgttacatctgcgagatgacgcttcaggagtatcattacgtgcaagaaaaagctagcaaattagcagccgcttctctgctgctggctctgtatatgaagaagctcggctactgggtccctttcctagagcactactctggctacagcatcagcgagttgcatcctctggtgaggcagttgaacaagctgcttacatttagctcctacgactcactgaaggctgtgtattacaaatactcacaccctgtattttttgaagtcgcaaagatcccagccttggacatgcttaaacttgaggagattctcaattgcgattgtgaggcgcagggcctggtgctgtag

SEQ ID NO: 324482 - DNA, 336 bp, Artificial Sequence
  derived and/or modified sequence
atgctgttaccgttacctccccagtcctccaagcctgtgccaaaaaaaagccagagctccaagatcgtcccatcacaccatgatccatcggagaagactggcgaaaactgccagacaaagatcagtcccagcagcctgcaagagagcccatcttctcttcaaggagcactcaaaaagcgaagcgccttcgaagacctgaccaacgcctctcagtgccagcctgtgcagcccaagaaagaggctaataaggagtttgtcaaagtggttagtaagaagattaatcggaatacacatgccttaggcctggccaagaagaacaaacgtaacctgaaatag

SEQ ID NO: 324483 - DNA, 336 bp, Artificial Sequence
  derived and/or modified sequence
atgctgctgcccctgcccccccagagcagcaagcctgtgcccaagaagagccagagcagcaagatcgtgcccagccaccacgaccccagcgagaagacaggagagaactgccagaccaagatcagccccagcagcctgcaggagagccccagcagcctgcagggcgccctgaagaagaggtctgcctttgaggacctgaccaatgccagccagtgccagcctgtgcagcccaagaaggaggccaacaaggagtttgtgaaggtggtgtccaagaagatcaacagaaacacccacgccctgggcctggccaagaagaacaagaggaacctgaagtag

SEQ ID NO: 324484 - DNA, 336 bp, Artificial Sequence
  derived and/or modified sequence
atgctgctgcccctgcccccccagagcagcaagcccgtgcccaagaagagccaaagctccaagatcgtgccatcccaccatgacccgagcgagaagaccggtgaaaattgtcagactaaaattagccctagctccttgcaggagagtcctagcagtctccaaggcgcacttaagaagcggtcagcctttgaagatcttaccaatgccagtcaatgtcagccagtgcaaccgaagaaggaagcaaacaaagaattcgtcaaggtagtttcgaagaagatcaataggaacacccatgctcttgggctggcaaagaaaaacaagaggaatcttaaatag

SEQ ID NO: 324485 - DNA, 336 bp, Artificial Sequence
  derived and/or modified sequence
atgttactccccctccccccacagagctcaaaacctgtgcccaaaaagtctcagagctccaagatcgtgcctagccaccatgacccaagcgagaaaactggtgaaaactgccagactaagatttcaccttcgagcctgcaggagtctccctcctccctgcaaggtgctcttaagaaacgcagcgcttttgaggatcttaccaacgcaagtcagtgtcagccagtgcagccaaaaaaagaggccaataaggaatttgtcaaggtggtgtcaaaaaagattaaccgaaatacacacgcgctgggacttgccaagaagaataaacgcaaccttaagtag

SEQ ID NO: 324486 - DNA, 1521 bp, Artificial Sequence
  derived and/or modified sequence
ttccaggtgtctggaactggattacagtttcttctgattgaacgcagcctttgaatactgcctggcctatcgcgaatacatccctgccttggacaagacgcagctgaatctctaagtgatgctactgccactaccaccccagagctccaaacctgtgcctaagaaatctcagtccagcaaaattgtgcccagtcatcatgacccatctgaaaagacgggggagaattgccaaacgaagatatctccatcttcacttcaggagtctccatcttcacttcagggagcactcaaaaagagatcagcttttgaagatctcactaatgcttctcaatgtcaacctgtccagcccaagaaagaagccaataaagagtttgtaaaagttgtttccaagaagataaacaggaacacacatgctcttggactggccaaaaagaataagcggaatctaaaatgataaccccacgggaagatattgatgaggacagcagtgatccaagtttcaacccaatgtatgccaaggaaatcttcagttacatgaaagagagagaggaacagtttatacttacagattacatgaacaggcagattgaaatcaccagtgacatgagggccattcttgtggactggttggtggaggtgcaggtgtcctttgagatgacccatgagaccctgtacttggcagtgaagctggtggatctctacctaatgaaggcagtatgcaagaaggataagttacaactccttggtgccactgcctttatgattgcagcaaaatttgaggagcacaactcacctcgtgtggatgactttgtgtacatctgtgatgataattatcagcgatctgaggtactcagcatggaaatcaacatcctgaacgtcctcaaatgtgacattaacattcccatcgcctaccattttctgcgcagatatgctaggtgtatccacaccaacatgaagacactgaccttgtcccgctacatctgcgagatgaccctgcaggaataccactatgtccaggagaaggcttccaagctagctgctgcctccttactcctggccctctacatgaagaagctcggatactgggttcccttcctggagcattacagtggctacagtatctctgagcttcaccccttggtcagacagctgaacaaactgctgactttcagttcttacgatagtctcaaggctgtgtattacaagtattctcacccggtcttctttgaagtcgccaaaatccctgccttggatatgttgaagctggaggagattttgaactgtgattgtgaggctcagggcctggtactctagcagcagccacagggctaagcatgcatgttaacagggtatatttattctatgttcgaatttgtcttttgatcgcttttattcatttttcctttctttgtcttttcccaaactgataatgttataaatatttatgttgcttgtttttatgaaagaaaaaatattgtcatatttgactacaaatttaataaaaaattaatggttattgtt

SEQ ID NO: 324487 - DNA, 336 bp, Artificial Sequence
  derived and/or modified sequence
atgctgctgcccctgcccccccagagcagcaagcccgtgcccaagaagagccagagcagcaagatcgtgcccagccaccacgaccccagcgagaagaccggcgagaactgccagaccaagatcagccccagcagcctgcaggagagccccagcagcctgcagggcgccctgaagaagagaagcgccttcgaggacctgaccaacgccagccagtgccagcccgtgcagcccaagaaggaggccaacaaggagttcgtgaaggtggtgagcaagaagatcaacagaaacacccacgccctgggcctggccaagaagaacaagagaaacctgaagtag

SEQ ID NO: 324488 - DNA, 1518 bp, Artificial Sequence
  derived and/or modified sequence
atgtcgtgtgaaatgctgactgagcagactccatctagcgatcccgaaaatgctctggaggtaaatggcgcagaggtcaccggggagaaggagaaccattgcgacgacaagacctgcgtgccgtcaacaagcgctgaagatatgtctgaaaacgtacccattgccgaggacaccaccgaacaaccaaagaaaaatcggattacatacagccagatcatcaaagaagggcggcgctttaatattgaccttgttagtaaactcctgtactcccgcggtctgctcatcgacctgttaataaagagcaacgtcagtcgttacgccgagtttaagaacatcactagaattcttgctttcagagagggacgcgtggaacaggttccttgctctagagccgatgtcttcaattccaagcagcttaccatggtggagaagcgtatgctcatgaagtttctcaccttttgtatggagtatgaaaaatacccagacgaatataaagggtatgaagaaataacgttctatgaatacttgaagacacagaagcttactcctaatctccagtacattgtgatgcactccattgctatgacatctgagacagcaagcagcaccattgatggactgaaggccacaaagaatttcctgcactgccttggtaggtacggaaatacgcctttcctctttccgctctacggtcaaggcgagcttccacagtgcttttgcagaatgtgtgcagtcttcggcggcatctattgcctccgtcatagcgtgcagtgcctggtggtcgataaagagtctagaaaatgtaaagccatcatcgaccaatttggacaacggattataagcgaacatttcttagttgaggactcctactttccagagaatatgtgcagtcgagtgcaatatcggcaaatttcaagggcggtgctgatcactgataggtcagtcctgaaaactgattccgaccaacaaatttcaattctgacggttcccgctgaagagcccgggaccttcgctgttagagtaatcgaactttgttcaagtactatgacttgcatgaagggaacctatttggtccacctgacctgcacttcgagtaagactgctagagaagacctagagagtgtggtgcagaaacttttcgtaccgtacactgaaatggagattgaaaatgaacaggtcgagaagccccggattctctgggccctctattttaatatgcgggactcttctgatatatctcgcagttgctacaacgacctcccatctaatgtctatgtttgtagcggccctgattgtggtcttggaaatgacaatgccgtgaagcaggcagagactttatttcaggaaatctgtcccaatgaggacttctgcccaccaccccctaatcccgaagatattatcctagatggtgactcccttcagcccgaagcgtccgagtctagtgcaattcccgaagcaaactccgaaacattcaaagaaagcaccaacctgggcaatctggaggagtctagcgagtag

SEQ ID NO: 324489 - DNA, 1518 bp, Artificial Sequence
  derived and/or modified sequence
atgagctgtgagatgctgacagagcagacccccagcagtgaccctgaaaatgccctggaggtgaatggagctgaggtgactggagagaaggagaaccactgtgatgacaagacctgtgtgcccagcaccagcgctgaggacatgtctgaaaatgtgcccatcgccgaggacaccacagagcagcccaagaagaaccgcatcacctacagccagatcatcaaggagggccgccgcttcaacatcgacctggtgtccaagctgctgtacagccggggcctgctgattgacctgctgatcaagagcaatgtgagccgctatgcagagttcaagaacatcacccgcatcctggccttccgggagggccgggtggagcaggtgccctgcagcagagcagatgtgttcaacagcaagcagctgaccatggtggagaagaggatgctgatgaagttcctgaccttctgcatggagtatgagaagtacccagatgagtacaagggctatgaggagatcaccttctatgagtacctgaagacccagaagctgacccccaacctgcagtacatcgtgatgcacagcatcgccatgaccagcgagacagccagcagcaccattgatggcctgaaggccaccaagaacttcctgcactgcctgggccgctatggcaacacccccttcctgttccccctgtatggccagggcgagctgccccagtgcttctgcaggatgtgtgctgtgtttggaggcatctactgcctgcggcacagcgtgcagtgcctggtggtggacaaggagagcaggaagtgcaaggccatcatcgaccagtttggccagaggatcatcagcgagcacttcctggtggaggacagctacttccctgagaacatgtgcagccgggtgcagtaccggcagatcagcagagctgtgctgatcacagacagatctgtgctgaagacagacagcgaccagcagatcagcatcctgactgtgcctgctgaggagcccggcacctttgctgtgcgggtcatcgagctgtgcagcagcaccatgacctgcatgaagggcacctacctggtgcacctgacctgcaccagcagcaagacagcccgggaggacctggagagcgtggtgcagaagctgtttgtgccctacacagagatggagattgaaaatgagcaggtggagaagccccgcatcctgtgggccctgtacttcaacatgagggacagcagtgacatcagccgcagctgctacaatgacctgcccagcaatgtgtatgtgtgcagcggccctgactgtggcctgggcaatgacaatgctgtgaagcaggccgagaccctcttccaggagatctgccccaatgaagacttctgccccccaccacccaaccctgaggacatcatcctggatggagacagcctgcagcctgaggccagcgagagcagcgccatccctgaggccaacagcgagaccttcaaggagagcaccaacctgggcaacctggaggagagcagcgagtag

SEQ ID NO: 324490 - DNA, 1518 bp, Artificial Sequence
  derived and/or modified sequence
atgagctgcgagatgctgaccgagcagacccccagcagcgaccccgaaaatgctctggaggttaacggagccgaagtcaccggagagaaagaaaatcactgtgacgacaagacttgcgtgccgtctaccagtgccgaagacatgagcgagaacgtgccgatcgctgaggatacgactgagcagcccaagaagaatcggatcacttatagccagatcataaaagagggaagaaggttcaatattgatctggtctccaaactcttgtactcgcgggggttactaatagacctgctcatcaagagcaatgtgtctcggtacgccgagtttaagaatattaccagaattctagcttttagagagggccgagtggaacaggttccctgcagtcgcgccgacgttttcaattcaaagcagctgaccatggttgagaaacgcatgcttatgaagttcctgactttctgtatggagtacgagaaataccccgacgaatacaagggatacgaggagatcactttctatgagtacctcaaaactcagaaattaactcccaacctacaatacatcgtgatgcattcaatcgcaatgacatctgagactgccagctcaacaattgatggccttaaagccactaagaatttcctgcactgcctgggtagatacgggaacactccgttcctgttccctttatatggacagggcgaactacctcaatgtttctgtaggatgtgtgctgtgttcgggggaatttactgcttgaggcattccgttcagtgcctcgtggtggataaagagtcaagaaagtgcaaagctattatcgatcagtttgggcagcgcattatctccgagcacttcttggtggaagactcctattttccagaaaacatgtgcagccgcgtccagtacaggcaaattagccgagccgttctgatcactgatcggtctgttttaaaaacagactccgaccagcaaatttccatactcactgtgccggccgaggaaccaggaacatttgctgtcagggtcatcgagctttgcagctctacaatgacatgtatgaaggggacctatctggtccacttgacttgcaccagtagtaagacagcccgagaagacctggagtcagtcgtgcagaagctcttcgtcccatatacagagatggaaatcgagaatgaacaagtggaaaagcctcgtattctttgggctttgtatttcaatatgagggacagcagtgacatctctagatcatgctataacgacctgccatccaacgtgtacgtgtgcagcggaccagactgcgggctgggcaacgacaacgccgttaaacaggccgaaacactctttcaggagatttgccctaatgaggacttctgcccaccaccacccaaccctgaagatatcattcttgacggggactcactgcagccggaggctagtgagtctagcgcaattccagaggccaatagtgaaacgttcaaggaaagcacaaatcttggcaatttagaggagagttctgaatag

SEQ ID NO: 324491 - DNA, 1518 bp, Artificial Sequence
  derived and/or modified sequence
atgtcctgcgagatgctcacagagcaaacgccctcaagtgaccctgaaaatgctctggaggtgaatggggcagaagtaacaggggaaaaagaaaaccattgcgatgataagacctgcgtcccaagcacgtctgccgaagatatgtcagagaatgtgccaattgccgaggatactacagagcaaccaaagaaaaatcggatcacctattcccagattataaaagagggcaggaggttcaatattgacctagtcagcaaactgctgtattctcggggtctcctcattgatctgctcataaagtccaacgtatctagatacgccgagtttaagaacattaccaggatcctcgcctttcgcgaggggagagtcgagcaggtaccctgctccagggcagacgtgtttaactcaaaacagttaactatggtggaaaaaagaatgcttatgaaatttctgaccttctgcatggagtatgagaagtatcccgatgagtacaagggctacgaggagattacattctatgaatacctcaagacgcagaaactgacgcctaacctgcaatacatcgtcatgcacagcatcgcaatgacatctgagacggcttcgagcacaattgacggtctgaaagctacgaaaaattttctgcactgtttaggcaggtacggcaatacaccatttctatttccactgtatggccagggggagcttccccagtgtttttgccggatgtgcgcggtgttcgggggaatctactgcctgcgccattctgtgcaatgcctcgtagttgataaagagagcaggaagtgcaaggctattatcgaccagttcgggcagcggatcatcagcgagcattttctggtggaagattcttatttcccggaaaacatgtgctctagagtgcagtatagacagatttcaagagccgtgctgataaccgacaggtccgttttgaaaacagactcagatcaacagatttcaattttaactgtgcccgctgaggagcccggaactttcgctgtcagggtcatcgagctgtgtagtagtacaatgacatgtatgaaaggcacatacctggttcatctgacgtgcacatctagcaaaaccgccagggaggatctggaaagcgtggtgcaaaagctgttcgtgccctatacagagatggaaattgagaacgaacaagtggagaagcctcgcatcctgtgggccctgtactttaacatgagggactcaagcgacatcagtagaagttgctataatgacctgccctccaacgtctacgtctgctccggcccagactgtggcttgggtaatgataacgcggttaagcaggcagagactttgttccaggaaatttgccctaatgaagacttctgcccccctcctcctaacccggaggatatcatcctagatggggatagcctgcaacctgaagccagcgagtcgtcggccattcccgaggccaactccgagactttcaaggaaagcaccaacctgggcaacctggaagaatcctcagagtag

SEQ ID NO: 324492 - DNA, 1518 bp, Artificial Sequence
  derived and/or modified sequence
atgagctgcgagatgctgaccgagcagacccccagcagcgaccccgagaacgccctggaggtgaacggcgccgaggtgaccggcgagaaggagaaccactgcgacgacaagacctgcgtgcccagcaccagcgccgaggacatgagcgagaacgtgcccatcgccgaggacaccaccgagcagcccaagaagaacagaatcacctacagccagatcatcaaggagggcagaagattcaacatcgacctggtgagcaagctgctgtacagcagaggcctgctgatcgacctgctgatcaagagcaacgtgagcagatacgccgagttcaagaacatcaccagaatcctggccttcagagagggcagagtggagcaggtgccctgcagcagagccgacgtgttcaacagcaagcagctgaccatggtggagaagagaatgctgatgaagttcctgaccttctgcatggagtacgagaagtaccccgacgagtacaagggctacgaggagatcaccttctacgagtacctgaagacccagaagctgacccccaacctgcagtacatcgtgatgcacagcatcgccatgaccagcgagaccgccagcagcaccatcgacggcctgaaggccaccaagaacttcctgcactgcctgggcagatacggcaacacccccttcctgttccccctgtacggccagggcgagctgccccagtgcttctgcagaatgtgcgccgtgttcggcggcatctactgcctgagacacagcgtgcagtgcctggtggtggacaaggagagcagaaagtgcaaggccatcatcgaccagttcggccagagaatcatcagcgagcacttcctggtggaggacagctacttccccgagaacatgtgcagcagagtgcagtacagacagatcagcagagccgtgctgatcaccgacagaagcgtgctgaagaccgacagcgaccagcagatcagcatcctgaccgtgcccgccgaggagcccggcaccttcgccgtgagagtgatcgagctgtgcagcagcaccatgacctgcatgaagggcacctacctggtgcacctgacctgcaccagcagcaagaccgccagagaggacctggagagcgtggtgcagaagctgttcgtgccctacaccgagatggagatcgagaacgagcaggtggagaagcccagaatcctgtgggccctgtacttcaacatgagagacagcagcgacatcagcagaagctgctacaacgacctgcccagcaacgtgtacgtgtgcagcggccccgactgcggcctgggcaacgacaacgccgtgaagcaggccgagaccctgttccaggagatctgccccaacgaggacttctgcccccccccccccaaccccgaggacatcatcctggacggcgacagcctgcagcccgaggccagcgagagcagcgccatccccgaggccaacagcgagaccttcaaggagagcaccaacctgggcaacctggaggagagcagcgagtag

SEQ ID NO: 324493 - DNA, 780 bp, Artificial Sequence
  derived and/or modified sequence
atgctgagatgcggccagatgatgctggcccaggccctgatctgcagacacctgggcagagactggagctgggagaagcagaaggagcagcccaaggagtaccagagaatcctgcagtgcttcctggacagaaaggactgctgctacagcatccaccagatggcccagatgggcgtgggcgagggcaagagcatcggcgagtggttcggccccaacaccgtggcccaggtgctgaagaagctggccctgttcgacgagtggaacagcctggccgtgtacgtgagcatggacaacaccgtggtgatcgaggacatcaagaagatgtgcagagtgctgcccctgagcgccgacaccgccggcgacagaccccccgacagcctgaccgccagcaaccagagcgacgagctgatcttcctggacccccacaccacccagaccttcgtggacaccgaggagaacggcaccgtgaacgaccagaccttccactgcctgcagagcccccagagaatgaacatcctgaacctggaccccagcgtggccctgggcttcttctgcaaggaggagaaggacttcgacaactggtgcagcctggtgcagaaggagatcctgaaggagaacctgagaatgttcgagctggtgcagaagcaccccagccactggccccccttcgtgccccccgccaagcccgaggtgaccaccaccggcgccgagttcatcgacagcaccgagcagctggaggagttcgacctggaggaggacttcgagatcctgagcgtgtag

SEQ ID NO: 324494 - DNA, 780 bp, Artificial Sequence
  derived and/or modified sequence
atgcttcgatgcgggcagatgatgctggcacaggctctcatctgccggcatctgggacgggattggtcatgggaaaagcagaaagagcagcccaaggaataccagagaattctgcagtgtttcttggaccggaaagattgctgttattcgatccaccaaatggctcagatgggagtgggcgaaggaaagagcattggcgaatggttcgggcccaatacggtggcccaggtcctcaaaaagctggccctatttgacgagtggaactcactggcagtctacgtgtctatggataataccgtcgtcatcgaagacattaagaagatgtgccgtgtgctgccattgtcagccgacacagccggcgacagacctccagacagtcttacagcttctaaccagtccgacgaactgatctttctggacccacatactactcagacatttgtggacacggaggagaacggcaccgtgaatgaccaaacattccactgcctgcagtctccccagcgtatgaacattctaaacctggacccaagtgtagcattgggcttcttctgtaaagaagagaaagatttcgataattggtgcagtttggtacagaaagagattctcaaggagaacctacgcatgtttgaactggtgcaaaagcacccgagccattggcctcctttcgtgccccctgccaagcccgaagtgacaacaacgggagcagaatttatcgatagcacagagcaactagaggaatttgacctcgaagaggatttcgagattctatcagtgtag

SEQ ID NO: 324495 - DNA, 780 bp, Artificial Sequence
  derived and/or modified sequence
atgctgcgctgtggccagatgatgctggcccaggccctgatctgccgccacctgggccgggactggagctgggagaagcagaaggagcagcccaaggagtaccagaggatcctgcagtgcttcctggacaggaaggactgctgctacagcatccaccagatggcccagatgggcgtgggggagggcaagagcattggagagtggtttggccccaacacagtggcccaggtgctgaagaagctggccctgtttgatgagtggaacagcctggccgtgtatgtgtccatggacaacacagtggtgattgaggacatcaagaagatgtgccgggtgctgcccctgtctgctgacacagctggggaccggcccccagacagcctgacagccagcaaccagagtgatgagctgatcttcctggacccccacaccacccagacctttgtggacacagaggagaatggaacagtgaatgaccagaccttccactgcctgcagagcccccagaggatgaacatcctgaacctggaccccagcgtggccctgggcttcttctgcaaggaggagaaggactttgacaactggtgcagcctggtgcagaaggagatcctgaaggagaacctgaggatgtttgagctggtgcagaagcaccccagccactggcccccatttgtgcccccagccaagccagaggtgaccaccaccggggctgagttcatcgacagcacagagcagctggaggagtttgacctggaggaggactttgagatcctgtctgtgtag

SEQ ID NO: 324496 - DNA, 780 bp, Artificial Sequence
  derived and/or modified sequence
atgctgcggtgcggccagatgatgctggcccaggccctgatctgccgccatttaggccgcgattggtcatgggagaaacagaaggaacaacccaaagaatatcaaaggatcttgcagtgctttctggatagaaaggactgctgttattccatccaccaaatggcccagatgggcgtaggagaagggaaatctattggcgaatggttcggacccaatacggtggcccaggtactgaaaaaacttgcactgtttgacgagtggaattctctggccgtgtatgtttctatggataatacagtggttattgaggatattaaaaaaatgtgcagagtgctgccactaagcgcagatacagccggcgaccgtccgcccgactcactgacggcatccaaccagagtgacgaattgatattcctggatccacacaccactcagacatttgttgacacagaggagaacggaacggtgaacgaccagactttccactgcttacagtcccctcaaagaatgaacatattgaacttggacccttcggtcgcgctgggatttttctgcaaagaggagaaggattttgacaattggtgctcccttgtgcagaaagagatcctgaaggaaaatctccgaatgtttgaattggtgcagaagcatcccagccactggcctccatttgtccctccagccaaaccagaagtcacaacaaccggggctgaatttatagacagcaccgagcagctggaagagtttgatttggaagaagacttcgagatactgtctgtgtag

SEQ ID NO: 324497 - DNA, 780 bp, Artificial Sequence
  derived and/or modified sequence
atgttacggtgtgggcagatgatgcttgcccaggccctgatttgcagacacctaggacgagattggtcttgggaaaagcaaaaggaacagcccaaagaataccagagaattctccagtgcttcttggataggaaggactgctgttatagtatccaccagatggcacagatgggtgtgggcgaggggaagtctataggtgagtggtttggtcccaatactgtggcccaggtgctgaagaagctggctctgttcgatgaatggaactctctagccgtctatgtatcgatggataacactgtagtcatcgaggacataaagaaaatgtgtcgggtactcccactgagcgccgatactgcaggcgataggccaccggattccctgactgcctcaaatcaatccgacgaactgatcttcctcgacccacacacaactcagacattcgtggatactgaggagaacggtaccgttaacgatcagacttttcattgcttacaatcaccccagagaatgaatattttaaatctggacccctccgtcgcacttgggttcttttgcaaggaggagaaggattttgacaattggtgttcgctggtgcagaaggaaatattgaaggaaaacctccggatgtttgaattggttcagaagcacccttcccattggcccccttttgtgccaccagctaaacccgaggtgactaccaccggagctgagtttattgatagcacggaacaactagaggagttcgacctggaggaagacttcgagatcctgtccgtctag

SEQ ID NO: 324498 - DNA, 5076 bp, Artificial Sequence
  derived and/or modified sequence
atgaagctgagaggcgtgagcctggccgccggcctgttcctgctggccctgagcctgtggggccagcccgccgaggccgccgcctgctacggctgcagccccggcagcaagtgcgactgcagcggcatcaagggcgagaagggcgagagaggcttccccggcctggagggccaccccggcctgcccggcttccccggccccgagggcccccccggccccagaggccagaagggcgacgacggcatccccggcccccccggccccaagggcatcagaggcccccccggcctgcccggcttccccggcacccccggcctgcccggcatgcccggccacgacggcgcccccggcccccagggcatccccggctgcaacggcaccaagggcgagagaggcttccccggcagccccggcttccccggcctgcagggcccccccggcccccccggcatccccggcatgaagggcgagcccggcagcatcatcatgagcagcctgcccggccccaagggcaaccccggctaccccggcccccccggcatccagggcctgcccggccccaccggcatccccggccccatcggcccccccggcccccccggcctgatgggcccccccggcccccccggcctgcccggccccaagggcaacatgggcctgaacttccagggccccaagggcgagaagggcgagcagggcctgcagggcccccccggcccccccggccagatcagcgagcagaagagacccatcgacgtggagttccagaagggcgaccagggcctgcccggcgacagaggcccccccggcccccccggcatcagaggcccccccggcccccccggcggcgagaagggcgagaagggcgagcagggcgagcccggcaagagaggcaagcccggcaaggacggcgagaacggccagcccggcatccccggcctgcccggcgaccccggctaccccggcgagcccggcagagacggcgagaagggccagaagggcgacaccggcccccccggcccccccggcctggtgatccccagacccggcaccggcatcaccatcggcgagaagggcaacatcggcctgcccggcctgcccggcgagaagggcgagagaggcttccccggcatccagggcccccccggcctgcccggcccccccggcgccgccgtgatgggcccccccggcccccccggcttccccggcgagagaggccagaagggcgacgagggcccccccggcatcagcatccccggcccccccggcctggacggccagcccggcgcccccggcctgcccggcccccccggccccgccggcccccacatcccccccagcgacgagatctgcgagcccggcccccccggcccccccggcagccccggcgacaagggcctgcagggcgagcagggcgtgaagggcgacaagggcgacacctgcttcaactgcatcggcaccggcatcagcggcccccccggccagcccggcctgcccggcctgcccggcccccccggcagcctgggcttccccggccagaagggcgagaagggccaggccggcgccaccggccccaagggcctgcccggcatccccggcgcccccggcgcccccggcttccccggcagcaagggcgagcccggcgacatcctgaccttccccggcatgaagggcgacaagggcgagctgggcagccccggcgcccccggcctgcccggcctgcccggcacccccggccaggacggcctgcccggcctgcccggccccaagggcgagcccggcggcatcaccttcaagggcgagagaggcccccccggcaaccccggcctgcccggcctgcccggcaacatcggccccatgggcccccccggcttcggcccccccggccccgtgggcgagaagggcatccagggcgtggccggcaaccccggccagcccggcatccccggccccaagggcgaccccggccagaccatcacccagcccggcaagcccggcctgcccggcaaccccggcagagacggcgacgtgggcctgcccggcgaccccggcctgcccggccagcccggcctgcccggcatccccggcagcaagggcgagcccggcatccccggcatcggcctgcccggcccccccggccccaagggcttccccggcatccccggcccccccggcgcccccggcacccccggcagaatcggcctggagggcccccccggcccccccggcttccccggccccaagggcgagcccggcttcgccctgcccggcccccccggcccccccggcctgcccggcttcaagggcgccctgggccccaagggcgacagaggcttccccggcccccccggcccccccggcagaaccggcctggacggcctgcccggccccaagggcgacgtgggccccaacggccagcccggccccatgggcccccccggcctgcccggcatcggcgtgcagggcccccccggcccccccggcatccccggccccatcggccagcccggcctgcacggcatccccggcgagaagggcgaccccggcccccccggcctggacgtgcccggcccccccggcgagagaggcagccccggcatccccggcgcccccggccccatcggcccccccggcagccccggcctgcccggcaaggccggcgccagcggcttccccggcaccaagggcgagatgggcatgatgggcccccccggcccccccggccccctgggcatccccggcagaagcggcgtgcccggcctgaagggcgacgacggcctgcagggccagcccggcctgcccggccccaccggcgagaagggcagcaagggcgagcccggcctgcccggcccccccggccccatggaccccaacctgctgggcagcaagggcgagaagggcgagcccggcctgcccggcatccccggcgtgagcggccccaagggctaccagggcctgcccggcgaccccggccagcccggcctgagcggccagcccggcctgcccggcccccccggccccaagggcaaccccggcctgcccggccagcccggcctgatcggcccccccggcctgaagggcaccatcggcgacatgggcttccccggcccccagggcgtggagggcccccccggccccagcggcgtgcccggccagcccggcagccccggcctgcccggccagaagggcgacaagggcgaccccggcatcagcagcatcggcctgcccggcctgcccggccccaagggcgagcccggcctgcccggctaccccggcaaccccggcatcaagggcagcgtgggcgaccccggcctgcccggcctgcccggcacccccggcgccaagggccagcccggcctgcccggcttccccggcacccccggcccccccggccccaagggcatcagcggcccccccggcaaccccggcctgcccggcgagcccggccccgtgggcggcggcggccaccccggccagcccggcccccccggcgagaagggcaagcccggccaggacggcatccccggccccgccggccagaagggcgagcccggccagcccggcttcggcaaccccggcccccccggcctgcccggcctgagcggccagaagggcgacggcggcctgcccggcatccccggcaaccccggcctgcccggccccaagggcgagcccggcttccacggcttccccggcgtgcagggcccccccggcccccccggcagccccggccccgccctggagggccccaagggcaaccccggcccccagggcccccccggcagacccggccccaccggcttccagggcctgcccggccccgagggcccccccggcctgcccggcaacggcggcatcaagggcgagaagggcaaccccggccagcccggcctgcccggcctgcccggcctgaagggcgaccagggcccccccggcctgcagggcaaccccggcagacccggcctgaacggcatgaagggcgaccccggcctgcccggcgtgcccggcttccccggcatgaagggccccagcggcgtgcccggcagcgccggccccgagggcgagcccggcctgatcggcccccccggcccccccggcctgcccggccccagcggccagagcatcatcatcaagggcgacgccggcccccccggcatccccggccagcccggcctgaagggcctgcccggcccccagggcccccagggcctgcccggccccaccggcccccccggcgaccccggcagaaacggcctgcccggcttcgacggcgccggcggcagaaagggcgaccccggcctgcccggccagcccggcaccagaggcctggacggcccccccggccccgacggcctgcagggcccccccggcccccccggcaccagcagcgtggcccacggcttcctgatcaccagacacagccagaccaccgacgccccccagtgcccccagggcaccctgcaggtgtacgagggcttcagcctgctgtacgtgcagggcaacaagagagcccacggccaggacctgggcaccgccggcagctgcctgagaagattcagcaccatgcccttcatgttctgcaacatcaacaacgtgtgcaacttcgccagcagaaacgactacagctactggctgagcacccccgagcccatgcccatgagcatgcagcccctgaagggccagagcatccagcccttcatcagcagatgcgccgtgtgcgaggcccccgccgtggtgatcgccgtgcacagccagaccatccagatcccccactgcccccagggctgggacagcctgtggatcggctacagcttcatgatgcacaccagcgccggcgccgagggcagcggccaggccctggccagccccggcagctgcctggaggagttcagaagcgcccccttcatcgagtgccacggcagaggcacctgcaactactacgccaacagctacagcttctggctggccaccgtggacgtgagcgacatgttcagcaagccccagagcgagaccctgaaggccggcgacctgagaaccagaatcagcagatgccaggtgtgcatgaagagaacctag

SEQ ID NO: 324499 - DNA, 5058 bp, Artificial Sequence
  derived and/or modified sequence
atgaagctgagaggcgtgagcctggccgccggcctgttcctgctggccctgagcctgtggggccagcccgccgaggccgccgcctgctacggctgcagccccggcagcaagtgcgactgcagcggcatcaagggcgagaagggcgagagaggcttccccggcctggagggccaccccggcctgcccggcttccccggccccgagggcccccccggccccagaggccagaagggcgacgacggcatccccggcccccccggccccaagggcatcagaggcccccccggcctgcccggcttccccggcacccccggcctgcccggcatgcccggccacgacggcgcccccggcccccagggcatccccggctgcaacggcaccaagggcgagagaggcttccccggcagccccggcttccccggcctgcagggcccccccggcccccccggcatccccggcatgaagggcgagcccggcagcatcatcatgagcagcctgcccggccccaagggcaaccccggctaccccggcccccccggcatccagggcctgcccggccccaccggcatccccggccccatcggcccccccggcccccccggcctgatgggcccccccggcccccccggcctgcccggccccaagggcaacatgggcctgaacttccagggccccaagggcgagaagggcgagcagggcctgcagggcccccccggcccccccggccagatcagcgagcagaagagacccatcgacgtggagttccagaagggcgaccagggcctgcccggcgacagaggcccccccggcccccccggcatcagaggcccccccggcccccccggcggcgagaagggcgagaagggcgagcagggcgagcccggcaagagaggcaagcccggcaaggacggcgagaacggccagcccggcatccccggcctgcccggcgaccccggctaccccggcgagcccggcagagacggcgagaagggccagaagggcgacaccggcccccccggcccccccggcctggtgatccccagacccggcaccggcatcaccatcggcgagaagggcaacatcggcctgcccggcctgcccggcgagaagggcgagagaggcttccccggcatccagggcccccccggcctgcccggcccccccggcgccgccgtgatgggcccccccggcccccccggcttccccggcgagagaggccagaagggcgacgagggcccccccggcatcagcatccccggcccccccggcctggacggccagcccggcgcccccggcctgcccggcccccccggccccgccggcccccacatcccccccagcgacgagatctgcgagcccggcccccccggcccccccggcagccccggcgacaagggcctgcagggcgagcagggcgtgaagggcgacaagggcgacacctgcttcaactgcatcggcaccggcatcagcggcccccccggccagcccggcctgcccggcctgcccggcccccccggcagcctgggcttccccggccagaagggcgagaagggccaggccggcgccaccggccccaagggcctgcccggcatccccggcgcccccggcgcccccggcttccccggcagcaagggcgagcccggcgacatcctgaccttccccggcatgaagggcgacaagggcgagctgggcagccccggcgcccccggcctgcccggcctgcccggcacccccggccaggacggcctgcccggcctgcccggccccaagggcgagcccggcggcatcaccttcaagggcgagagaggcccccccggcaaccccggcctgcccggcctgcccggcaacatcggccccatgggcccccccggcttcggcccccccggccccgtgggcgagaagggcatccagggcgtggccggcaaccccggccagcccggcatccccggccccaagggcgaccccggccagaccatcacccagcccggcaagcccggcctgcccggcaaccccggcagagacggcgacgtgggcctgcccggcgaccccggcctgcccggccagcccggcctgcccggcatccccggcagcaagggcgagcccggcatccccggcatcggcctgcccggcccccccggccccaagggcttccccggcatccccggcccccccggcgcccccggcacccccggcagaatcggcctggagggcccccccggcccccccggcttccccggccccaagggcgagcccggcttcgccctgcccggcccccccggcccccccggcctgcccggcttcaagggcgccctgggccccaagggcgacagaggcttccccggcccccccggcccccccggcagaaccggcctggacggcctgcccggccccaagggcgacgtgggccccaacggccagcccggccccatgggcccccccggcctgcccggcatcggcgtgcagggcccccccggcccccccggcatccccggccccatcggccagcccggcctgcacggcatccccggcgagaagggcgaccccggcccccccggcctggacgtgcccggcccccccggcgagagaggcagccccggcatccccggcgcccccggccccatcggcccccccggcagccccggcctgcccggcaaggccggcgccagcggcttccccggcaccaagggcgagatgggcatgatgggcccccccggcccccccggccccctgggcatccccggcagaagcggcgtgcccggcctgaagggcgacgacggcctgcagggccagcccggcctgcccggccccaccggcgagaagggcagcaagggcgagcccggcctgcccggcccccccggccccatggaccccaacctgctgggcagcaagggcgagaagggcgagcccggcctgcccggcatccccggcgtgagcggccccaagggctaccagggcctgcccggcgaccccggccagcccggcctgagcggccagcccggcctgcccggcccccccggccccaagggcaaccccggcctgcccggccagcccggcctgatcggcccccccggcctgaagggcaccatcggcgacatgggcttccccggcccccagggcgtggagggcccccccggccccagcggcgtgcccggccagcccggcagccccggcctgcccggccagaagggcgacaagggcgaccccggcatcagcagcatcggcctgcccggcctgcccggccccaagggcgagcccggcctgcccggctaccccggcaaccccggcatcaagggcagcgtgggcgaccccggcctgcccggcctgcccggcacccccggcgccaagggccagcccggcctgcccggcttccccggcacccccggcccccccggccccaagggcatcagcggcccccccggcaaccccggcctgcccggcgagcccggccccgtgggcggcggcggccaccccggccagcccggcccccccggcgagaagggcaagcccggccaggacggcatccccggccccgccggccagaagggcgagcccggccagcccggcttcggcaaccccggcccccccggcctgcccggcctgagcggccagaagggcgacggcggcctgcccggcatccccggcaaccccggcctgcccggccccaagggcgagcccggcttccacggcttccccggcgtgcagggcccccccggcccccccggcagccccggccccgccctggagggccccaagggcaaccccggcccccagggcccccccggcagacccggcctgcccggccccgagggcccccccggcctgcccggcaacggcggcatcaagggcgagaagggcaaccccggccagcccggcctgcccggcctgcccggcctgaagggcgaccagggcccccccggcctgcagggcaaccccggcagacccggcctgaacggcatgaagggcgaccccggcctgcccggcgtgcccggcttccccggcatgaagggccccagcggcgtgcccggcagcgccggccccgagggcgagcccggcctgatcggcccccccggcccccccggcctgcccggccccagcggccagagcatcatcatcaagggcgacgccggcccccccggcatccccggccagcccggcctgaagggcctgcccggcccccagggcccccagggcctgcccggccccaccggcccccccggcgaccccggcagaaacggcctgcccggcttcgacggcgccggcggcagaaagggcgaccccggcctgcccggccagcccggcaccagaggcctggacggcccccccggccccgacggcctgcagggcccccccggcccccccggcaccagcagcgtggcccacggcttcctgatcaccagacacagccagaccaccgacgccccccagtgcccccagggcaccctgcaggtgtacgagggcttcagcctgctgtacgtgcagggcaacaagagagcccacggccaggacctgggcaccgccggcagctgcctgagaagattcagcaccatgcccttcatgttctgcaacatcaacaacgtgtgcaacttcgccagcagaaacgactacagctactggctgagcacccccgagcccatgcccatgagcatgcagcccctgaagggccagagcatccagcccttcatcagcagatgcgccgtgtgcgaggcccccgccgtggtgatcgccgtgcacagccagaccatccagatcccccactgcccccagggctgggacagcctgtggatcggctacagcttcatgatgcacaccagcgccggcgccgagggcagcggccaggccctggccagccccggcagctgcctggaggagttcagaagcgcccccttcatcgagtgccacggcagaggcacctgcaactactacgccaacagctacagcttctggctggccaccgtggacgtgagcgacatgttcagcaagccccagagcgagaccctgaaggccggcgacctgagaaccagaatcagcagatgccaggtgtgcatgaagagaacctag

SEQ ID NO: 324500 - DNA, 5076 bp, Artificial Sequence
  derived and/or modified sequence
atgaagctgagaggcgtgagcctggccgccggcctgttcctgctggccctgagcctgtggggccagcccgccgaggccgccgcctgctacggctgcagccccggcagcaagtgcgactgcagcggcatcaagggcgagaagggcgagagaggcttccccggcctggagggccaccccggcctgcccggcttccccggccccgagggcccccccggccccagaggccagaagggcgacgacggcatccccggcccccccggccccaagggcatcagaggcccccccggcctgcccggcttccccggcacccccggcctgcccggcatgcccggccacgacggcgcccccggcccccagggcatccccggctgcaacggcaccaagggcgagagaggcttccccggcagccccggcttccccggcctgcagggcccccccggcccccccggcatccccggcatgaagggcgagcccggcagcatcatcatgagcagcctgcccggccccaagggcaaccccggctaccccggcccccccggcatccagggcctgcccggccccaccggcatccccggccccatcggcccccccggcccccccggcctgatgggcccccccggcccccccggcctgcccggccccaagggcaacatgggcctgaacttccagggccccaagggcgagaagggcgagcagggcctgcagggcccccccggcccccccggccagatcagcgagcagaagagacccatcgacgtggagttccagaagggcgaccagggcctgcccggcgacagaggcccccccggcccccccggcatcagaggcccccccggcccccccggcggcgagaagggcgagaagggcgagcagggcgagcccggcaagagaggcaagcccggcaaggacggcgagaacggccagcccggcatccccggcctgcccggcgaccccggctaccccggcgagcccggcagagacggcgagaagggccagaagggcgacaccggcccccccggcccccccggcctggtgatccccagacccggcaccggcatcaccatcggcgagaagggcaacatcggcctgcccggcctgcccggcgagaagggcgagagaggcttccccggcatccagggcccccccggcctgcccggcccccccggcgccgccgtgatgggcccccccggcccccccggcttccccggcgagagaggccagaagggcgacgagggcccccccggcatcagcatccccggcccccccggcctggacggccagcccggcgcccccggcctgcccggcccccccggccccgccggcccccacatcccccccagcgacgagatctgcgagcccggcccccccggcccccccggcagccccggcgacaagggcctgcagggcgagcagggcgtgaagggcgacaagggcgacacctgcttcaactgcatcggcaccggcatcagcggcccccccggccagcccggcctgcccggcctgcccggcccccccggcagcctgggcttccccggccagaagggcgagaagggccaggccggcgccaccggccccaagggcctgcccggcatccccggcgcccccggcgcccccggcttccccggcagcaagggcgagcccggcgacatcctgaccttccccggcatgaagggcgacaagggcgagctgggcagccccggcgcccccggcctgcccggcctgcccggcacccccggccaggacggcctgcccggcctgcccggccccaagggcgagcccggcggcatcaccttcaagggcgagagaggcccccccggcaaccccggcctgcccggcctgcccggcaacatcggccccatgggcccccccggcttcggcccccccggccccgtgggcgagaagggcatccagggcgtggccggcaaccccggccagcccggcatccccggccccaagggcgaccccggccagaccatcacccagcccggcaagcccggcctgcccggcaaccccggcagagacggcgacgtgggcctgcccggcgaccccggcctgcccggccagcccggcctgcccggcatccccggcagcaagggcgagcccggcatccccggcatcggcctgcccggcccccccggccccaagggcttccccggcatccccggcccccccggcgcccccggcacccccggcagaatcggcctggagggcccccccggcccccccggcttccccggccccaagggcgagcccggcttcgccctgcccggcccccccggcccccccggcctgcccggcttcaagggcgccctgggccccaagggcgacagaggcttccccggcccccccggcccccccggcagaaccggcctggacggcctgcccggccccaagggcgacgtgggccccaacggccagcccggccccatgggcccccccggcctgcccggcatcggcgtgcagggcccccccggcccccccggcatccccggccccatcggccagcccggcctgcacggcatccccggcgagaagggcgaccccggcccccccggcctggacgtgcccggcccccccggcgagagaggcagccccggcatccccggcgcccccggccccatcggcccccccggcagccccggcctgcccggcaaggccggcgccagcggcttccccggcaccaagggcgagatgggcatgatgggcccccccggcccccccggccccctgggcatccccggcagaagcggcgtgcccggcctgaagggcgacgacggcctgcagggccagcccggcctgcccggccccaccggcgagaagggcagcaagggcgagcccggcctgcccggcccccccggccccatggaccccaacctgctgggcagcaagggcgagaagggcgagcccggcctgcccggcatccccggcgtgagcggccccaagggctaccagggcctgcccggcgaccccggccagcccggcctgagcggccagcccggcctgcccggcccccccggccccaagggcaaccccggcctgcccggccagcccggcctgatcggcccccccggcctgaagggcaccatcggcgacatgggcttccccggcccccagggcgtggagggcccccccggccccagcggcgtgcccggccagcccggcagccccggcctgcccggccagaagggcgacaagggcgaccccggcatcagcagcatcggcctgcccggcctgcccggccccaagggcgagcccggcctgcccggctaccccggcaaccccggcatcaagggcagcgtgggcgaccccggcctgcccggcctgcccggcacccccggcgccaagggccagcccggcctgcccggcttccccggcacccccggcccccccggccccaagggcatcagcggcccccccggcaaccccggcctgcccggcgagcccggccccgtgggcggcggcggccaccccggccagcccggcccccccggcgagaagggcaagcccggccaggacggcatccccggccccgccggccagaagggcgagcccggccagcccggcttcggcaaccccggcccccccggcctgcccggcctgagcggccagaagggcgacggcggcctgcccggcatccccggcaaccccggcctgcccggccccaagggcgagcccggcttccacggcttccccggcgtgcagggcccccccggcccccccggcagccccggccccgccctggagggccccaagggcaaccccggcccccagggcccccccggcagacccggccccaccggcttccagagcctgcccggccccgagggcccccccggcctgcccggcaacggcggcatcaagggcgagaagggcaaccccggccagcccggcctgcccggcctgcccggcctgaagggcgaccagggcccccccggcctgcagggcaaccccggcagacccggcctgaacggcatgaagggcgaccccggcctgcccggcgtgcccggcttccccggcatgaagggccccagcggcgtgcccggcagcgccggccccgagggcgagcccggcctgatcggcccccccggcccccccggcctgcccggccccagcggccagagcatcatcatcaagggcgacgccggcccccccggcatccccggccagcccggcctgaagggcctgcccggcccccagggcccccagggcctgcccggccccaccggcccccccggcgaccccggcagaaacggcctgcccggcttcgacggcgccggcggcagaaagggcgaccccggcctgcccggccagcccggcaccagaggcctggacggcccccccggccccgacggcctgcagggcccccccggcccccccggcaccagcagcgtggcccacggcttcctgatcaccagacacagccagaccaccgacgccccccagtgcccccagggcaccctgcaggtgtacgagggcttcagcctgctgtacgtgcagggcaacaagagagcccacggccaggacctgggcaccgccggcagctgcctgagaagattcagcaccatgcccttcatgttctgcaacatcaacaacgtgtgcaacttcgccagcagaaacgactacagctactggctgagcacccccgagcccatgcccatgagcatgcagcccctgaagggccagagcatccagcccttcatcagcagatgcgccgtgtgcgaggcccccgccgtggtgatcgccgtgcacagccagaccatccagatcccccactgcccccagggctgggacagcctgtggatcggctacagcttcatgatgcacaccagcgccggcgccgagggcagcggccaggccctggccagccccggcagctgcctggaggagttcagaagcgcccccttcatcgagtgccacggcagaggcacctgcaactactacgccaacagctacagcttctggctggccaccgtggacgtgagcgacatgttcagcaagccccagagcgagaccctgaaggccggcgacctgagaaccagaatcagcagatgccaggtgtgcatgaagagaacctag

SEQ ID NO: 324501 - DNA, 5076 bp, Artificial Sequence
  derived and/or modified sequence
atgaagttgagaggagtgagcctggctgccgggttgtttctcctggccttatccttgtgggggcagcccgctgaagctgcagcgtgctacggatgctccccgggatctaagtgcgattgctccggaatcaaaggagagaagggagagagaggattccctggactcgaaggtcaccctggactgcccgggttccccgggcccgaagggccgcctggcccccggggccagaaaggcgacgacgggatccctggaccacccggacctaaaggcatccgggggccgccaggccttccaggcttccccggtacgccaggcctcccaggaatgccgggccacgatggcgcacctgggccgcaaggtatcccgggttgcaacggcactaagggagagcgcgggtttccaggctctccgggcttccccggcctccagggaccaccaggcccccccggaatccccggcatgaaaggcgaaccaggaagtataataatgtcaagcctgccaggacctaagggtaacccaggatatccagggcctcccggtatacagggactgcctggacccactggcatccctggcccaatcgggcctcctggcccaccaggcctgatgggaccccccggcccacctggcctgcccggcccaaaagggaacatgggcctcaattttcagggtcccaaaggcgagaagggggagcagggccttcaggggccccctggaccccctggtcaaataagcgagcagaagagaccaatcgatgttgagttccagaaaggcgaccagggattaccgggggatcgggggcctcccgggccccctgggatccgagggcctccggggcccccgggtggtgagaagggggaaaagggggagcagggtgagcccggcaagagagggaagcctggtaaagacggggaaaacgggcagcccggcattccggggctgcccggcgatcctgggtaccccggcgaaccaggacgggacggggaaaagggccagaagggagataccggcccacccggcccacccggccttgtgatcccaagacccgggactggcatcactatcggggagaaaggaaatatcggtctgcccggtctgcctggagaaaagggtgaaagggggttcccgggtattcaggggccccctgggctgcccggccctcctggcgctgccgttatggggccaccaggaccccccgggttcccgggggagcggggccagaaaggcgacgagggccccccagggataagcatccctggtccacctgggctggacggacaacctggcgcgccagggctgcccggccctccaggccccgccgggccccacattccccctagtgatgaaatctgcgagcctggacctcccggccccccgggatcaccaggcgataagggactgcaaggcgagcagggcgttaagggagacaagggggacacctgctttaattgcatcggcaccggcatatccgggccaccgggccagcctggactgcctggcttgcctggcccccctggatcgctggggttccccggtcaaaaaggcgagaagggacaggccggcgcaaccggccctaaaggcctcccgggcatccccggtgcaccgggcgcgccaggctttcccggctctaaaggtgaacccggcgatattctgacctttccgggcatgaagggcgacaaaggtgaactggggtcccctggtgcacctggtctcccaggactgccggggacccctggtcaggacgggctccccgggctgcccggccccaagggagaacccggggggatcactttcaaaggcgaaagagggccccctggaaaccccggcttgcctggacttcccggcaacatcgggcccatgggtccccccgggtttgggcccccagggccagtgggcgagaagggaatccaaggggtggccggcaaccctgggcagcccggtattcccgggccaaagggagaccctgggcaaacgatcacgcagccaggcaagcccggccttccaggaaatccgggacgggatggagatgtggggcttcccggggatcccgggctgccgggtcaaccgggcctgccaggaatccccggctcaaaaggtgagcccgggatcccaggcatcggattaccaggtcctccgggacccaaaggctttccagggatccccggccctcctggggcacctggcacccccggtcggattggccttgaaggcccgccaggaccccccgggtttcctggaccaaaaggtgaacccggctttgcgctccccggcccccctggccccccaggcctgccaggctttaagggtgctctgggccccaagggtgaccggggtttccccggccctccaggaccacccggacgcacgggccttgacggactgcccggtccaaagggggatgttggtcccaatggacagccagggcctatggggccgccgggacttcctggcatcggagtccagggtcccccaggccctccaggcattcccggtccaataggtcaacctggtctgcacggaatccccggagaaaagggcgatcctggaccgccaggcctggatgtgcctggcccgccaggagaacgcggctctcccgggattcccggagcgcccggcccaatcggcccacccggatcacctgggctccctgggaaggccggagcaagtggcttcccaggtaccaagggtgaaatggggatgatgggacctccggggcctccaggcccattgggaatcccaggtagatctggagtaccgggactgaaaggcgatgatgggcttcaggggcaacctgggctgcctggacctactggtgagaagggctccaaaggagaacctggattgccaggaccccctgggcccatggatcctaatttgctcggttcgaaaggtgagaaaggggaaccaggactgccagggatccccggggtcagcggaccgaaaggctaccaaggtcttccgggcgaccctgggcaacccggactgtcggggcaacccggactgcccgggccgccaggacctaaaggcaatcctggactgccgggccagccaggactcattggcccgcccggacttaagggaaccatcggggacatggggtttccaggcccccaaggggtggaagggccgccaggaccctctggagtgcctggacaacccgggtctccaggcctgcctggtcagaagggggacaaaggtgatcccgggattagctccattggactccctggattgccggggccaaaaggcgagcccgggctgcccggctaccccggcaatcccgggatcaaggggtctgtgggagaccccggcttgccaggtctgccagggactcctggggcaaaaggccagccgggtctgcctggattcccagggacacccgggcctccgggcccgaaagggatttctgggccaccgggaaaccctgggctccccggcgagcctgggcctgtcggaggtgggggtcacccaggacagcccgggccacccggagaaaagggaaagcctggtcaggatggcattccaggtcctgctggccaaaaaggtgaaccaggtcagcctggattcggaaatccagggcctccgggcctacccggcctgagcggacaaaagggtgatgggggattgcccggcattccgggtaatcctggccttcccggacccaaaggcgaacccggtttccacgggtttcccggcgtgcagggaccgcctggacctccagggagccctggacccgccctcgaaggaccaaaaggcaatccgggcccccaggggcccccggggcgccctgggccaaccggcttccagggactccctgggcctgagggcccaccagggttacctggcaacggtggtatcaaaggagaaaagggtaaccccggccagccaggcctccctggattaccgggattgaaaggagatcagggcccacccgggctccaagggaatcccgggcgacccggactcaatggcatgaagggggatcctggcttgccgggagttcccggcttccccggcatgaagggaccgagtggggtgcccggatccgctggacccgagggagaaccaggtctgattgggcctcctgggccacctggtctgccaggacctagcggacagtctatcatcatcaaaggggacgccggcccaccaggcattcccgggcaaccagggctgaagggcctacccggccctcagggcccccagggattacccggtcctacagggccgcccggcgatccgggtagaaacgggctgcccggctttgacggcgcgggagggcgcaagggggatccagggctgcctgggcagcccggcactagaggcctcgacggaccacctgggcccgacggattgcagggtccacccggacctccaggcacatcaagtgttgcacacggttttctgatcacccgtcatagccagacgacagatgccccacaatgcccccaggggacactgcaggtgtacgaagggttctctctcctatacgtccaggggaacaagcgagcacacggccaggatctcggaacagcgggatcctgcctgcgaaggttcagcactatgcctttcatgttctgcaacataaacaacgtgtgcaattttgccagtcgcaatgactactcgtattggttaagtactcccgagccaatgcctatgtcaatgcaacccctgaagggacagtccattcagccgttcatctctcggtgtgcagtctgcgaagcgcccgccgtcgtgattgcagttcattcacagacgatacagatcccccactgtccccagggctgggactcactgtggataggctattcgttcatgatgcacacgtccgctggggcggaaggctcaggccaggccttagcctctcccggatcctgcctggaggagttcaggagcgcgccattcatcgaatgccacggtagaggtacatgcaactactatgccaattcctactccttctggctggcaacagtggatgttagcgacatgttttccaagccacagtccgaaactttgaaggccggggatctccgtacaaggattagccgctgccaggtgtgcatgaaaaggacctag

SEQ ID NO: 324502 - DNA, 5058 bp, Artificial Sequence
  derived and/or modified sequence
atgaagctacgcggcgtgtccttggcagcaggactgttcctgctggccttgagcctctggggacagcctgccgaagctgcggcctgctacggctgcagccccggctctaaatgtgattgtagcggcatcaagggagaaaagggggagcgcggttttcccgggctggagggtcacccaggcctcccggggtttcccgggcctgagggtcctccaggcccaaggggacagaagggggacgatggtatacccgggccacctggacccaagggaattcggggtccaccgggactgcctggctttccaggcacgccagggcttcctggcatgcctggccacgacggagcccctgggcctcagggcatccctgggtgcaatggaactaagggtgaacgcggattcccaggatcccctggcttccccggcctgcagggtcctccagggccacctgggatccccggaatgaaaggcgaaccaggctctatcatcatgagtagtttaccgggcccgaaggggaatcccggctatccggggcctcccgggattcaaggcctgcctgggcctaccgggatccctggaccaatcggcccacctggcccacccgggcttatgggtcctcctggccctccaggtctgcctggccctaaagggaacatgggtctgaattttcaagggcccaaaggggaaaagggagagcagggtctgcagggaccaccagggcctcctggccaaatctcagagcagaaaaggcctattgacgttgagtttcagaaaggtgatcagggcctaccgggtgaccgcggcccccctggccctcccggcatccgcgggccacccggtcccccgggaggcgagaagggcgaaaagggggaacagggagaacctggtaaaaggggaaaaccaggcaaagatggcgaaaatggtcaaccagggattccaggactccccggagatccaggatatcctggagagccaggcagagacggtgaaaagggtcaaaagggagatacagggccgccaggcccacctggtctggtgatacctcggccaggtactggcattaccattggtgaaaagggcaatattgggctacccgggctgcctggtgaaaagggggagcgcggcttcccaggcatccagggccctcctggcctaccgggaccaccgggcgcagccgttatggggcctccaggacccccaggatttccaggcgaacgcgggcaaaagggcgacgaggggcctccagggatatcgatacccgggccccccggattggatgggcagcccggcgcccctggactgccaggacccccaggtccagcaggcccacacattcctccctctgacgagatttgtgagccaggtcctcccggacctcccggcagcccaggggacaaaggtctgcagggagagcagggggtgaagggagacaagggggacacgtgctttaactgtattggcacgggcatctctggccctcctggccagcccggcctgcccgggctacctgggcctcctggctcacttggttttccgggccaaaagggcgaaaaaggacaagctggcgcaacaggacctaaggggctcccgggaatccctggagctccaggtgcacctggttttcccgggagtaaaggggagccgggagacattctcacttttccaggcatgaaaggagataaaggggaactgggatcacctggtgctcctgggctaccaggtctgccgggaactcccggtcaggatggactaccaggtctgcctggacccaagggggaaccaggagggatcacgttcaaaggcgagaggggccctcctggaaatccagggcttccgggtctcccaggtaatattgggcctatggggccccctggattcgggcctccgggcccagtgggagagaaaggcattcaaggcgtggccggaaatccaggacagccagggattcctgggcctaaaggggatcccggccagactatcacgcaacccggaaaacctgggctgcctggcaatccagggcgcgacggcgatgtggggcttcctggggaccccgggctccccggacagccaggacttcctggtatccctggatcaaagggtgaaccaggcattccagggattggccttcccggtccacctggtcccaagggtttccccggaatacctggaccgcctggcgccccaggtaccccaggacgaataggattggagggaccgcccggaccgcctggtttcccggggcccaaaggagagccagggttcgccctacccggaccgccaggccctccgggtctccccggttttaaaggagcgttgggaccaaaaggtgacagaggatttcccgggcctccaggccctccgggccggacagggctcgacggactccctgggcctaagggggacgtcgggcccaacggccagcccgggcccatgggtccacctggtctgcctggaatcggagttcaggggccccctggtcctccaggcataccaggtcccattgggcagcctggattgcacggcatacccggagagaagggtgatccgggtccccccggattagacgtcccaggacctccaggagagcgtggctctcccgggatcccaggagctccaggccctattgggccaccgggctctccgggactgccagggaaagccggtgcatctggcttcccgggcaccaaaggcgaaatgggaatgatggggcccccgggacctcccggccccctcggtattcctggccgaagcggggtgcctggccttaaaggagatgatggcttgcagggtcagcctggactgccaggacctaccggcgaaaagggctctaagggcgaacccgggcttccggggccgcctggtccaatggatcctaacctcctgggctcgaaaggagagaaaggggagcccggcctgccaggcattcccggggtgagcgggcctaaggggtatcagggcttgcctggcgacccaggtcagccaggactgagcggtcagccaggactgcccggaccaccaggcccgaaggggaaccctggcctgcctgggcaacctggtttgatcggaccccctggactgaaaggtacaatcggtgatatgggttttcctggacctcagggagtggaggggcctcctggaccgagtggggtgcccggacagcccgggtcgcctggcttgcctggtcaaaaaggagacaagggcgatccgggaatctcctcaattgggctccccggactgccggggcctaagggcgaacccgggctgcccggttatcctgggaaccccggcatcaagggaagtgtaggcgatcctgggctgccaggacttcccggcactcccggcgctaagggccagcctggtctgccaggattccccgggactcctgggcctcccggtcctaagggaatctccggccccccaggtaaccccggattaccaggcgagccgggcccagtgggaggaggtggccatccagggcagccgggcccccccggtgaaaagggcaagcctggtcaggatgggatccccggacctgcaggccagaaaggggaacccggacaaccaggcttcgggaatcctgggccacctggtctgccaggactgtctggccagaagggggatgggggcctccccggtatcccagggaatcccggcctgccaggccctaagggtgaaccaggattccatggctttcctggagtgcaaggcccgcctggaccacccggtagcccaggacccgcactggaggggcccaaaggaaatcccggaccacaaggacccccaggtcgccccgggctgcccggccctgaggggccacctggcctccccggcaatggaggtattaaaggggagaagggcaacccagggcagcctggcctgcctggtctgcctggactcaaaggcgatcaaggcccccccgggcttcagggcaatccaggcaggcctggcctgaacgggatgaaaggggaccccggtctcccaggggttccggggtttccagggatgaagggaccgtcaggagtgcctggatccgccggccctgagggagagcccggactgatcggaccccctggtcctcctggcttaccaggtccttctggccagagtatcattataaagggcgacgctggcccccctggcatccctgggcagcccggcctgaaggggttaccgggcccacaggggcctcaggggctgcctgggccaactggacctcctggagaccctggaaggaatgggctacccggatttgacggtgctggcggaagaaaaggagatcctgggctccccggccaaccgggcacgagaggactggatgggcctcctgggcccgacggattacagggtccccctggccctcccggcacctccagcgtggctcatggcttcctcatcacacgccactctcagacaactgacgcccctcagtgtccacagggtacattacaggtctacgagggtttttcgttattgtatgtgcagggcaacaaacgagcacacggtcaggatctgggaaccgctggcagctgcctgcgccggttcagtacaatgccttttatgttctgtaatatcaataacgtgtgcaactttgcctcaaggaacgactatagttattggctgtcaacgccagaaccaatgcccatgtccatgcaaccactcaaagggcagtccattcaaccgttcattagtaggtgcgctgtatgcgaggcccccgcagtcgttatagccgtgcattcgcagaccattcagattccacattgcccacaaggctgggattctctgtggattggctactcctttatgatgcatacctccgccggggccgagggctccggacaagccctggcatccccaggtagctgcctggaggaatttcgctcggccccctttattgagtgtcacggccgcgggacctgcaattattacgctaatagctactctttctggctggccaccgtcgacgtgagcgatatgttctcaaagccacaaagtgagactctcaaggcgggagatctgaggactcgaatctccagatgccaagtttgcatgaagcgcacatag

SEQ ID NO: 324503 - DNA, 5076 bp, Artificial Sequence
  derived and/or modified sequence
atgaagttgcgtggtgttagcctggccgcaggcctgtttctgctggccttgagcctgtggggccagccggccgaggccgctgcctgttatggttgctcaccaggaagtaaatgcgactgtagcgggattaaaggggaaaagggtgaacgtggcttcccaggtttggagggacaccctggattgcctggctttcccgggcctgagggtcctccagggccacgtgggcagaaaggagatgatggaattcccggtccccctggccccaaaggcataagggggcctcctggcttgccaggattcccaggcacccccggactgcccggaatgcccggtcacgatggcgctcccggaccacagggtattcccggctgtaatggaacgaagggtgaaagagggttcccggggtcccccggatttcccggtctgcagggtcctcctggcccgcccggcattcccggcatgaagggagaaccagggagcattatcatgtcatccctccctggccctaaaggtaacccaggttatccaggcccgcccggtattcagggcctcccaggccccacagggatccctgggcccattggtcctcctgggcctcccggactgatggggcctcccggccccccagggctgccagggcccaaaggtaatatgggactgaatttccaaggccccaagggggaaaagggggagcaaggtctgcaggggcccccaggaccaccaggccaaatcagcgagcaaaagcgccccattgacgtagagttccagaaaggcgatcagggtctgcccggggatcgcgggccaccaggtccacctgggattcggggcccaccagggccccccgggggggagaagggcgaaaagggtgagcagggcgagcccggtaagaggggtaagccaggcaaagatggagaaaacggtcagcccgggatccctgggctgcccggcgaccctggctacccaggggagcctggccgcgacggtgagaaaggacaaaaaggggacaccgggcctcccggtcctcctgggctggtgatacctcggcccggcacgggtatcaccattggcgaaaaaggtaatataggtctgccaggtctgcctggcgagaaaggcgagcgtggatttcctggcatccagggacctccaggactcccaggccctccgggtgctgcagtgatggggccccccggcccaccaggcttccctggagaacgcggtcagaaaggggatgaaggtccacccggaatatcgattccgggccccccgggactggatggacagccaggcgcaccaggcctacccggcccgcccggcccagccgggccccacattccccccagcgacgagatttgcgagcctgggccaccaggccccccgggtagtccaggcgataaagggctgcagggagaacagggggtgaaaggggataagggtgatacctgcttcaactgcattggcacaggcatttccgggcctccaggtcagccggggctgcccgggcttccaggcccccccggttccctgggatttccagggcagaaaggcgagaagggacaggcaggggctactggcccaaagggcctgcctggcatccccggtgcccccggtgcacccggatttcctggttccaaaggagaaccgggtgatatacttacctttccaggaatgaagggtgacaaaggggaacttggctcacctggcgccccaggtcttcccggcctgcctggtacacccggacaagacggcctgcctggcttgccaggaccaaagggggagcccggcggcatcaccttcaagggcgaacggggtccacccggcaaccccggtctgccagggctgcctggcaacataggtccaatgggtcccccaggattcggcccccctgggccggtgggtgaaaaagggatacagggtgtcgccggaaaccccggacaaccgggcatacctgggcccaagggtgacccaggccaaacaattacccagcctgggaaacctggtttgccaggaaatcccggaagggatggcgacgtggggctcccgggggatccaggactgccaggccagccaggattaccggggatccctgggtcaaaaggggaacctggtatacctgggattgggctacctggacctccaggtcccaaaggttttcccgggataccaggacctccaggggccccaggaacgccgggcaggatcggtctggaagggcctccggggccaccagggttcccggggcctaaaggagagccaggctttgctctccccggaccccctggcccccctggacttccaggtttcaagggcgcactcggccccaaaggagaccggggcttcccagggccacccggtcctcccggacggacgggcttagatggtcttcctggacctaaaggagacgtcggtccaaacggccagcccggacccatggggccaccaggcctcccaggcattggcgtgcagggccctcctggccccccagggattccggggcccattggccagccaggcctccatggcatccccggggagaagggagaccctggccccccgggtctcgatgttccggggcctccgggcgaacgaggctcacccggcatccctggggctcctggccctattggtcctccgggctcacccggcctgccaggcaaagcaggagcatccgggttccctggcactaaaggagaaatgggtatgatgggaccacctggacccccaggacccctgggcattcctgggaggtctggagtgcctgggctcaagggggatgacggtctgcagggacaacccggcctcccaggccctacgggcgagaaaggaagcaagggggagcccggcctgcctggccccccagggcccatggatcccaatcttctgggctcaaagggcgagaagggcgaaccagggctgccaggaattcctggggtgtctggaccaaaaggataccagggcctccctggcgatcctggccagccaggtctttccggccaacccggcttgcccggccctcccgggcctaagggaaaccccggactgccaggacagcctggactaatcggaccccctggcttgaaggggactatcggggatatgggcttccctggccctcagggggtggagggccctccaggaccatctggagtgcccgggcagcccggttctcctgggcttcctgggcagaagggggacaaaggagatcccggcattagttcaattggcttgccggggctgcccggcccaaaaggggaacctggcttacctgggtatcccgggaacccaggcatcaaaggatctgtgggtgaccctgggctcccaggtctccctgggacccccggggccaagggccagcctgggcttcccgggttcccagggacaccgggtcccccgggcccaaagggcatttccggtccacccggcaacccagggctgccaggtgagccgggtccagtgggtggaggcggccatcccggccagcccggcccaccaggtgagaaaggcaagcccggacaggatggaattcctggtccggcgggccagaaaggcgagccaggccaacccgggttcggtaatccaggtcctcccgggctgcccggtttgagcggtcagaagggcgacggcggactgcccgggatacccggtaatccgggccttccaggacccaaaggcgaacccgggtttcacggcttccccggggtccagggcccccccggtccacccgggagtcccgggcccgccttagagggtcccaaaggaaaccccggccctcagggtcccccgggtcgtcctggacctactggatttcagagtctcccaggcccggagggcccacctggcctaccaggcaacggtggcattaaaggcgagaaggggaacccgggccagccaggcctgcccggcctccccggcctgaagggtgatcagggcccacccggacttcaaggcaatcccggccgccctggcctcaacggtatgaagggagaccctgggcttcccggggtaccggggttccccggcatgaagggcccctcaggggtacctgggtcagccggacccgagggcgagccgggcttaatagggccgcccggcccacctgggctgcccggcccaagtggacaatctattatcattaaaggcgatgcgggaccacccgggataccaggacagccaggcctgaaaggcctgccgggacctcagggccctcagggcctgccaggtcctacagggcctccgggggaccctggtagaaacggccttcccggcttcgatggagccggtgggcgaaagggcgaccctggactcccgggccaacctggtacacggggcttggatggccctcccggccccgatggccttcagggccctccgggacctccgggcacctcctcggttgcccacggcttcctcatcaccagacattcccagactaccgatgccccccaatgccctcaggggacactgcaggtgtacgaagggttctcactcctgtacgtgcaggggaacaagcgggcccacggtcaagatttgggaaccgctgggtcctgcttgcgaaggttctccaccatgccattcatgttttgcaacataaataacgtctgcaactttgcctctagaaacgattatagctattggctgtccacacctgaaccaatgcccatgtctatgcagcctctgaagggtcaaagcatccagccctttatcagccgttgtgcagtatgtgaagcccccgccgttgttattgccgtgcactcacagacaatccagatccctcattgtccccagggctgggacagcctatggataggatatagcttcatgatgcacacgtccgccggggccgagggatcagggcaggctctcgcgagtccggggagctgcttggaagagttcagaagtgcaccctttatcgagtgtcacggacgaggcacgtgcaactattacgctaattcttattccttctggcttgccacagtggacgtgtcagacatgttctccaaacctcaaagcgaaactttaaaagcaggggatttaagaaccaggatctctaggtgtcaggtgtgcatgaagcgcacatag

SEQ ID NO: 324504 - DNA, 6483 bp, Artificial Sequence
  derived and/or modified sequence
agaagggaaaagttctcctgagagaccggctttggggaggggaggggggaaggaagagtagctccttcttcttcttcttttttttttcttccactcttaaaaagcttctttctcttcacccaagcctcactgtccctctccggctctagctctctccatataaaccctcaagattatgtcaattggttagagccagccgggaatttcgtgcgggtgctgaaggagctgcgggagccggagaagaatgaaactgcgtggagtcagcctggctgccggcttgttcttactggccctgagtctttgggggcagcctgcagaggctgcggcttgctatgggtgttctccaggatcaaagtgtgactgcagtggcataaaaggggaaaagggagagagagggtttccaggtttggaaggacacccaggattgcctggatttccaggtccagaagggcctccggggcctcggggacaaaagggtgatgatggaattccagggccaccaggaccaaaaggaatcagaggtcctcctggacttcctggatttccagggacaccaggtcttcctggaatgccaggccacgatggggccccaggacctcaaggtattcccggatgcaatggaaccaagggagaacgtggatttccaggcagtcccggttttcctggtttacagggtcctccaggaccccctgggatcccaggtatgaagggtgaaccaggtagtataattatgtcatcactgccaggaccaaagggtaatccaggatatccaggtcctcctggaatacaaggcctacctggtcccactggtataccagggccaattggtcccccaggaccaccaggtttgatgggccctcctggtccaccaggacttccaggacctaaggggaatatgggcttaaatttccagggacccaaaggtgaaaaaggtgagcaaggtcttcagggcccacctgggccacctgggcagatcagtgaacagaaaagaccaattgatgtagagtttcagaaaggagatcagggacttcctggtgaccgagggcctcctggacctccagggatacgtggtcctccaggtcccccaggtggtgagaaaggtgagaagggtgagcaaggagagccaggcaaaagaggtaaaccaggcaaagatggagaaaatggccaaccaggaattcctggtttgcctggtgatcctggttaccctggtgaacccggaagggatggtgaaaagggccaaaaaggtgacactggcccacctggacctcctggacttgtaattcctagacctgggactggtataactataggagaaaaaggaaacattgggttgcctgggttgcctggagaaaaaggagagcgaggatttcctggaatacagggtccacctggccttcctggacctccaggggctgcagttatgggtcctcctggccctcctggatttcctggagaaaggggtcagaaaggtgatgaaggaccacctggaatttccattcctggacctcctggacttgacggacagcctggggctcctgggcttccagggcctcctggccctgctggccctcacattcctcctagtgatgagatatgtgaaccaggccctccaggccccccaggatctccaggtgataaaggactccaaggagaacaaggagtgaaaggtgacaaaggtgacacttgcttcaactgcattggaactggtatttcagggcctccaggtcaacctggtttgccaggtctcccaggtcctccaggatctcttggtttccctggacagaaaggggaaaaaggacaagctggtgcaactggtcccaaaggattaccaggcattccaggagctccaggtgctccaggctttcctggatctaaaggtgaacctggtgatatcctcacttttccaggaatgaagggtgacaaaggagagttgggttcccctggagctccagggcttcctggtttacctggcactcctggacaggatggattgccagggcttcctggcccgaaaggagagcctggtggaattacttttaagggtgaaagaggtccccctgggaacccaggtttaccaggcctcccagggaatatagggcctatgggtccccctggtttcggccctccaggcccagtaggtgaaaaaggcatacaaggtgtggcaggaaatccaggccagccaggaataccaggtcctaaaggggatccaggtcagactataacccagccggggaagcctggcttgcctggtaacccaggcagagatggtgatgtaggtcttccaggtgaccctggacttccagggcaaccaggcttgccagggatacctggtagcaaaggagaaccaggtatccctggaattgggcttcctggaccacctggtcccaaaggctttcctggaattccaggacctccaggagcacctgggacacctggaagaattggtctagaaggccctcctgggccacccggctttccaggaccaaagggtgaaccaggatttgcattacctgggccacctgggccaccaggacttccaggtttcaaaggagcacttggtccaaaaggtgatcgtggtttcccaggacctccgggtcctccaggacgcactggcttagatgggctccctggaccaaaaggtgatgttggaccaaatggacaacctggaccaatgggacctcctgggctgccaggaataggtgttcagggaccaccaggaccaccagggattcctgggccaataggtcaacctggtttacatggaataccaggagagaagggggatccaggacctcctggacttgatgttccaggacccccaggtgaaagaggcagtccagggatccccggagcacctggtcctataggacctccaggatcaccagggcttccaggaaaagcaggtgcctctggatttccaggtaccaaaggtgaaatgggtatgatgggacctccaggcccaccaggacctttgggaattcctggcaggagtggtgtacctggtcttaaaggtgatgatggcttgcagggtcagccaggacttcctggccctacaggagaaaaaggtagtaaaggagagcctggccttccaggccctcctggaccaatggatccaaatcttctgggctcaaaaggagagaagggggaacctggcttaccaggtatacctggagtttcagggccaaaaggttatcagggtttgcctggagacccagggcaacctggactgagtggacaacctggattaccaggaccaccaggtcccaaaggtaaccctggtctccctggacagccaggtcttataggacctcctggacttaaaggaaccatcggtgatatgggttttccagggcctcagggtgtggaagggcctcctggaccttctggagttcctggacaacctggctccccaggattacctggacagaaaggcgacaaaggtgatcctggtatttcaagcattggtcttccaggtcttcctggtccaaagggtgagcctggtctgcctggatacccagggaaccctggtatcaaaggttctgtgggagatcctggtttgcccggattaccaggaacccctggagcaaaaggacaaccaggccttcctggattcccaggaaccccaggccctcctggaccaaaaggtattagtggccctcctgggaaccccggccttccaggagaacctggtcctgtaggtggtggaggtcatcctgggcaaccagggcctccaggcgaaaaaggcaaacccggtcaagatggtattcctggaccagctggacagaagggtgaaccaggtcaaccaggctttggaaacccaggaccccctggacttccaggactttctggccaaaagggtgatggaggattacctgggattccaggaaatcctggccttccaggtccaaagggcgaaccaggctttcacggtttccctggtgtgcagggtcccccaggccctcctggttctccgggtccagctctggaaggacctaaaggcaaccctgggccccaaggtcctcctgggagaccaggtcctacaggttttcaaggtctaccaggtccagaaggtcctccaggtctccctggaaatggaggtattaaaggagagaagggaaatccaggccaacctgggctacctggcttgcctggtttgaaaggagatcaaggaccaccaggactccagggtaatcctggccggccgggtctcaatggaatgaaaggagatcctggtctccctggtgttccaggattcccaggcatgaaaggacccagtggagtacctggatcagctggccctgagggggaaccgggacttattggtcctccaggtcctcctggattacctggtccttcaggacagagtatcataattaaaggagatgctggtcctccaggaatccctggccagcctgggctaaagggtctaccaggaccccaaggacctcaaggcttaccaggtccaactggccctccaggagatcctggacgcaatggactccctggctttgatggtgcaggagggcgcaaaggagacccaggtctgccaggacagccaggtacccgtggtttggatggtccccctggtccagatggattgcaaggtcccccaggtccccctggaacctcctctgttgcacatggatttcttattacacgccacagccagacaacggatgcaccacaatgcccacagggaacacttcaggtctatgaaggcttttctctcctgtatgtacaaggaaataaaagagcccacggtcaagacttggggacggctggcagctgccttcgtcgctttagtaccatgcctttcatgttctgcaacatcaataatgtttgcaactttgcttcaagaaatgactattcttactggctctctaccccagagcccatgccaatgagcatgcaacccctaaagggccagagcatccagccattcattagtcgatgtgcagtatgtgaagctccagctgtggtgatcgcagttcacagtcagacgatccagattccccattgtcctcagggatgggattctctgtggattggttattccttcatgatgcatacaagtgcaggggcagaaggctcaggtcaagccctagcctcccctggttcctgcttggaagagtttcgttcagctcccttcatcgaatgtcatgggaggggtacctgtaactactatgccaactcctacagcttttggctggcaactgtagatgtgtcagacatgttcagtaaacctcagtcagaaacgctgaaagcaggagacttgaggacacgaattagccgatgtcaagtgtgcatgaagaggacataacattttgaagaattccttttgtgttttaaaatgtgatatatatatatataaaattcctaggatgcagtgtctcattgtccccaactttactactgctgccgtcaatggtgctactatatatgatcaagataacatgctgactagtaaccatgaagattcagatgtacctcagcaatgcgccagagcaaagtctctattatttttctactaaagaaataaggaagtgaatttactttttgggtccagaatgactttctccaagaattataagatgaaaattatatattttgcccagttactaaaatggtacattaaaaattcaattaagagaagagtcacattgagtaaaataaaagactgcagtttgtgggaagaattatttttcacggtgctactaatcctgctgtatcccgggtttttaatataaaggtgttaagcttattttgctttgtaagtaaagaatgtgtatattgtgaacagccttttagctcaaaatgttgagtcatttacatatgacatagcatgaatcactctttacagaaaatgtaggaaaccctagaatacagacagcaatattttatattcatgtttatcaaagtgagaggacttatattcctacatcaagttactactgagagtaaatttattttgagttttatcccgtaagttctgttttgattttttttaaaaaacaaacccttttagtcactttaatcagaattttaaatgttcatgttacataccaaattataatatctaatggagcaatttgtcttttgctatattctccaagattatctcttaagaccatatgccccctgttttaatgtttcttacatcttgtttttactcatttctgactggacaaagttcttccaaacaattctgagaaacaaaaacacacacgcagaattaacaattcttttccctgtgcttcttatgtaagaatcctcctgtggcctctgcttgtacagaactgggaaacaacacttggttagtctcttttaagttacaaaaagccaattgatgtttcttattctttttaaattttaaatattttgttataaatactcacaggataccttatttccctagctatcatctcctgacttaatgttttttaaacccaccaatataaatttaattaaagatatatgttgtaa

SEQ ID NO: 324505 - DNA, 6469 bp, Artificial Sequence
  derived and/or modified sequence
agaagggaaaagttctcctgagagaccggctttggggaggggaggggggaaggaagagtagctccttcttcttcttcttttttttttcttccactcttaaaaagcttctttctcttcacccaagcctcactgtccctctccggctctagctctctccatataaaccctcaagattatgtcaattggttagagccagccgggaatttcgtgcgggtgctgaaggagctgcgggagccggagaagaatgaaactgcgtggagtcagcctggctgccggcttgttcttactggccctgagtctttgggggcagcctgcagaggctgcggcttgctatgggtgttctccaggatcaaagtgtgactgcagtggcataaaaggggaaaagggagagagagggtttccaggtttggaaggacacccaggattgcctggatttccaggtccagaagggcctccggggcctcggggacaaaagggtgatgatggaattccagggccaccaggaccaaaaggaatcagaggtcctcctggacttcctggatttccagggacaccaggtcttcctggaatgccaggccacgatggggccccaggacctcaaggtattcccggatgcaatggaaccaagggagaacgtggatttccaggcagtcccggttttcctggtttacagggtcctccaggaccccctgggatcccaggtatgaagggtgaaccaggtagtataattatgtcatcactgccaggaccaaagggtaatccaggatatccaggtcctcctggaatacaaggcctacctggtcccactggtataccagggccaattggtcccccaggaccaccaggtttgatgggccctcctggtccaccaggacttccaggacctaaggggaatatgggcttaaatttccagggacccaaaggtgaaaaaggtgagcaaggtcttcagggcccacctgggccacctgggcagatcagtgaacagaaaagaccaattgatgtagagtttcagaaaggagatcagggacttcctggtgaccgagggcctcctggacctccagggatacgtggtcctccaggtcccccaggtggtgagaaaggtgagaagggtgagcaaggagagccaggcaaaagaggtaaaccaggcaaagatggagaaaatggccaaccaggaattcctggtttgcctggtgatcctggttaccctggtgaacccggaagggatggtgaaaagggccaaaaaggtgacactggcccacctggacctcctggacttgtaattcctagacctgggactggtataactataggagaaaaaggaaacattgggttgcctgggttgcctggagaaaaaggagagcgaggatttcctggaatacagggtccacctggccttcctggacctccaggggctgcagttatgggtcctcctggccctcctggatttcctggagaaaggggtcagaaaggtgatgaaggaccacctggaatttccattcctggacctcctggacttgacggacagcctggggctcctgggcttccagggcctcctggccctgctggccctcacattcctcctagtgatgagatatgtgaaccaggccctccaggccccccaggatctccaggtgataaaggactccaaggagaacaaggagtgaaaggtgacaaaggtgacacttgcttcaactgcattggaactggtatttcagggcctccaggtcaacctggtttgccaggtctcccaggtcctccaggatctcttggtttccctggacagaaaggggaaaaaggacaagctggtgcaactggtcccaaaggattaccaggcattccaggagctccaggtgctccaggctttcctggatctaaaggtgaacctggtgatatcctcacttttccaggaatgaagggtgacaaaggagagttgggttcccctggagctccagggcttcctggtttacctggcactcctggacaggatggattgccagggcttcctggcccgaaaggagagcctggtggaattacttttaagggtgaaagaggtccccctgggaacccaggtttaccaggcctcccagggaatatagggcctatgggtccccctggtttcggccctccaggcccagtaggtgaaaaaggcatacaaggtgtggcaggaaatccaggccagccaggaataccaggtcctaaaggggatccaggtcagactataacccagccggggaagcctggcttgcctggtaacccaggcagagatggtgatgtaggtcttccaggtgaccctggacttccagggcaaccaggcttgccagggatacctggtagcaaaggagaaccaggtatccctggaattgggcttcctggaccacctggtcccaaaggctttcctggaattccaggacctccaggagcacctgggacacctggaagaattggtctagaaggccctcctgggccacccggctttccaggaccaaagggtgaaccaggatttgcattacctgggccacctgggccaccaggacttccaggtttcaaaggagcacttggtccaaaaggtgatcgtggtttcccaggacctccgggtcctccaggacgcactggcttagatgggctccctggaccaaaaggtgatgttggaccaaatggacaacctggaccaatgggacctcctgggctgccaggaataggtgttcagggaccaccaggaccaccagggattcctgggccaataggtcaacctggtttacatggaataccaggagagaagggggatccaggacctcctggacttgatgttccaggacccccaggtgaaagaggcagtccagggatccccggagcacctggtcctataggacctccaggatcaccagggcttccaggaaaagcaggtgcctctggatttccaggtaccaaaggtgaaatgggtatgatgggacctccaggcccaccaggacctttgggaattcctggcaggagtggtgtacctggtcttaaaggtgatgatggcttgcagggtcagccaggacttcctggccctacaggagaaaaaggtagtaaaggagagcctggccttccaggccctcctggaccaatggatccaaatcttctgggctcaaaaggagagaagggggaacctggcttaccaggtatacctggagtttcagggccaaaaggttatcagggtttgcctggagacccagggcaacctggactgagtggacaacctggattaccaggaccaccaggtcccaaaggtaaccctggtctccctggacagccaggtcttataggacctcctggacttaaaggaaccatcggtgatatgggttttccagggcctcagggtgtggaagggcctcctggaccttctggagttcctggacaacctggctccccaggattacctggacagaaaggcgacaaaggtgatcctggtatttcaagcattggtcttccaggtcttcctggtccaaagggtgagcctggtctgcctggatacccagggaaccctggtatcaaaggttctgtgggagatcctggtttgcccggattaccaggaacccctggagcaaaaggacaaccaggccttcctggattcccaggaaccccaggccctcctggaccaaaaggtattagtggccctcctgggaaccccggccttccaggagaacctggtcctgtaggtggtggaggtcatcctgggcaaccagggcctccaggcgaaaaaggcaaacccggtcaagatggtattcctggaccagctggacagaagggtgaaccaggtcaaccaggctttggaaacccaggaccccctggacttccaggactttctggccaaaagggtgatggaggattacctgggattccaggaaatcctggccttccaggtccaaagggcgaaccaggctttcacggtttccctggtgtgcagggtcccccaggccctcctggttctccgggtccagctctggaaggacctaaaggcaaccctgggccccaaggtcctcctgggagaccaggtctaccaggtccagaaggtcctccaggtctccctggaaatggaggtattaaaggagagaagggaaatccaggccaacctgggctacctggcttgcctggtttgaaaggagatcaaggaccaccaggactccagggtaatcctggccggccgggtctcaatggaatgaaaggagatcctggtctccctggtgttccaggattcccaggcatgaaaggacccagtggagtacctggatcagctggccctgagggggaaccgggacttattggtcctccaggtcctcctggattacctggtccttcaggacagagtatcataattaaaggagatgctggtcctccaggaatccctggccagcctgggctaaagggtctaccaggaccccaaggacctcaaggcttaccaggtccaactggccctccaggagatcctggacgcaatggactccctggctttgatggtgcaggagggcgcaaaggagacccaggtctgccaggacagccaggtacccgtggtttggatggtccccctggtccagatggattgcaaggtcccccaggtccccctggaacctcctctgttgcacatggatttcttattacacgccacagccagacaacggatgcaccacaatgcccacagggaacacttcaggtctatgaaggcttttctctcctgtatgtacaaggaaataaaagagcccacggtcaagacttggggacggctggcagctgccttcgtcgctttagtaccatgcctttcatgttctgcaacatcaataatgtttgcaactttgcttcaagaaatgactattcttactggctctctaccccagagcccatgccaatgagcatgcaacccctaaagggccagagcatccagccattcattagtcgatgtgcagtatgtgaagctccagctgtggtgatcgcagttcacagtcagacgatccagattccccattgtcctcagggatgggattctctgtggattggttattccttcatgatgcatacaagtgcaggggcagaaggctcaggtcaagccctagcctcccctggttcctgcttggaagagtttcgttcagctcccttcatcgaatgtcatgggaggggtacctgtaactactatgccaactcctacagcttttggctggcaactgtagatgtgtcagacatgttcagtaaacctcagtcagaaacgctgaaagcaggagacttgaggacacgaattagccgatgtcaagtgtgcatgaagaggacataacattttgaagaattccttttgtgttttaaaatgtgatatatatatatataaaattcctaggatgcagtgtctcattgtccccaactttactactgctgccgtcaatggtgctactatatatgatcaagataacatgctgactagtaaccatgaagattcagatgtacctcagcaatgcgccagagcaaagtctctattatttttctactaaagaaataaggaagtgaatttactttttgggtccagaatgactttctccaagaattataagatgaaaattatatattttgcccagttactaaaatggtacattaaaaattcaattaagagaagagtcacattgagtaaaataaaagactgcagtttgtgggaagaattatttttcacggtgctactaatcctgctgtatcccgggtttttaatataaaggtgttaagcttattttgctttgtaagtaaagaatgtgtatattgtgaacagccttttagctcaaaatgttgagtcatttacatatgacatagcatgaatcactctttacagaaaatgtaggaaaccctagaatacagacagcaatattttatattcatgtttatcaaagtgagaggacttatattcctacatcaagttactactgagagtaaatttattttgagttttatcccgtaagttctgttttgattttttttaaaaaacaaacccttttagtcactttaatcagaattttaaatgttcatgttacataccaaattataatatctaatggagcaatttgtcttttgctatattctccaagattatctcttaagaccatatgccccctgttttaatgtttcttacatcttgtttttactcatttctgactggacaaagttcttccaaacaattctgagaaacaaaaacacacacgcagaattaacaattcttttccctgtgcttcttatgtaagaatcctcctgtggcctctgcttgtacagaactgggaaacaacacttggttagtctcttttaagttacaaaaagccaattgatgtttcttattctttttaaattttaaatattttgttataaatactcacaggataccttatttccctagctatcatctcctgacttaatgttttttaaacccaccaatataaatttaattaaagatatatgttgtaaggat

SEQ ID NO: 324506 - DNA, 5602 bp, Artificial Sequence
  derived and/or modified sequence
cctcactgtccctctccggctctagctctctccatataaaccctcaagattatgtcaattggttagagccagccgggaatttcgtgcgggtgctgaaggagctgcgggagccggagaagaatgaaactgcgtggagtcagcctggctgccggcttgttcttactggccctgagtctttgggggcagcctgcagaggctgcggcttgctatgggtgttctccaggatcaaagtgtgactgcagtggcataaaaggggaaaagggagagagagggtttccaggtttggaaggacacccaggattgcctggatttccaggtccagaagggcctccggggcctcggggacaaaagggtgatgatggaattccagggccaccaggaccaaaaggaatcagaggtcctcctggacttcctggatttccagggacaccaggtcttcctggaatgccaggccacgatggggccccaggacctcaaggtattcccggatgcaatggaaccaagggagaacgtggatttccaggcagtcccggttttcctggtttacagggtcctccaggaccccctgggatcccaggtatgaagggtgaaccaggtagtataattatgtcatcactgccaggaccaaagggtaatccaggatatccaggtcctcctggaatacaaggcctacctggtcccactggtataccagggccaattggtcccccaggaccaccaggtttgatgggccctcctggtccaccaggacttccaggacctaaggggaatatgggcttaaatttccagggacccaaaggtgaaaaaggtgagcaaggtcttcagggcccacctgggccacctgggcagatcagtgaacagaaaagaccaattgatgtagagtttcagaaaggagatcagggacttcctggtgaccgagggcctcctggacctccagggatacgtggtcctccaggtcccccaggtggtgagaaaggtgagaagggtgagcaaggagagccaggcaaaagaggtaaaccaggcaaagatggagaaaatggccaaccaggaattcctggtttgcctggtgatcctggttaccctggtgaacccggaagggatggtgaaaagggccaaaaaggtgacactggcccacctggacctcctggacttgtaattcctagacctgggactggtataactataggagaaaaaggaaacattgggttgcctgggttgcctggagaaaaaggagagcgaggatttcctggaatacagggtccacctggccttcctggacctccaggggctgcagttatgggtcctcctggccctcctggatttcctggagaaaggggtcagaaaggtgatgaaggaccacctggaatttccattcctggacctcctggacttgacggacagcctggggctcctgggcttccagggcctcctggccctgctggccctcacattcctcctagtgatgagatatgtgaaccaggccctccaggccccccaggatctccaggtgataaaggactccaaggagaacaaggagtgaaaggtgacaaaggtgacacttgcttcaactgcattggaactggtatttcagggcctccaggtcaacctggtttgccaggtctcccaggtcctccaggatctcttggtttccctggacagaaaggggaaaaaggacaagctggtgcaactggtcccaaaggattaccaggcattccaggagctccaggtgctccaggctttcctggatctaaaggtgaacctggtgatatcctcacttttccaggaatgaagggtgacaaaggagagttgggttcccctggagctccagggcttcctggtttacctggcactcctggacaggatggattgccagggcttcctggcccgaaaggagagcctggtggaattacttttaagggtgaaagaggtccccctgggaacccaggtttaccaggcctcccagggaatatagggcctatgggtccccctggtttcggccctccaggcccagtaggtgaaaaaggcatacaaggtgtggcaggaaatccaggccagccaggaataccaggtcctaaaggggatccaggtcagactataacccagccggggaagcctggcttgcctggtaacccaggcagagatggtgatgtaggtcttccaggtgaccctggacttccagggcaaccaggcttgccagggatacctggtagcaaaggagaaccaggtatccctggaattgggcttcctggaccacctggtcccaaaggctttcctggaattccaggacctccaggagcacctgggacacctggaagaattggtctagaaggccctcctgggccacccggctttccaggaccaaagggtgaaccaggatttgcattacctgggccacctgggccaccaggacttccaggtttcaaaggagcacttggtccaaaaggtgatcgtggtttcccaggacctccgggtcctccaggacgcactggcttagatgggctccctggaccaaaaggtgatgttggaccaaatggacaacctggaccaatgggacctcctgggctgccaggaataggtgttcagggaccaccaggaccaccagggattcctgggccaataggtcaacctggtttacatggaataccaggagagaagggggatccaggacctcctggacttgatgttccaggacccccaggtgaaagaggcagtccagggatccccggagcacctggtcctataggacctccaggatcaccagggcttccaggaaaagcaggtgcctctggatttccaggtaccaaaggtgaaatgggtatgatgggacctccaggcccaccaggacctttgggaattcctggcaggagtggtgtacctggtcttaaaggtgatgatggcttgcagggtcagccaggacttcctggccctacaggagaaaaaggtagtaaaggagagcctggccttccaggccctcctggaccaatggatccaaatcttctgggctcaaaaggagagaagggggaacctggcttaccaggtatacctggagtttcagggccaaaaggttatcagggtttgcctggagacccagggcaacctggactgagtggacaacctggattaccaggaccaccaggtcccaaaggtaaccctggtctccctggacagccaggtcttataggacctcctggacttaaaggaaccatcggtgatatgggttttccagggcctcagggtgtggaagggcctcctggaccttctggagttcctggacaacctggctccccaggattacctggacagaaaggcgacaaaggtgatcctggtatttcaagcattggtcttccaggtcttcctggtccaaagggtgagcctggtctgcctggatacccagggaaccctggtatcaaaggttctgtgggagatcctggtttgcccggattaccaggaacccctggagcaaaaggacaaccaggccttcctggattcccaggaaccccaggccctcctggaccaaaaggtattagtggccctcctgggaaccccggccttccaggagaacctggtcctgtaggtggtggaggtcatcctgggcaaccagggcctccaggcgaaaaaggcaaacccggtcaagatggtattcctggaccagctggacagaagggtgaaccaggtcaaccaggctttggaaacccaggaccccctggacttccaggactttctggccaaaagggtgatggaggattacctgggattccaggaaatcctggccttccaggtccaaagggcgaaccaggctttcacggtttccctggtgtgcagggtcccccaggccctcctggttctccgggtccagctctggaaggacctaaaggcaaccctgggccccaaggtcctcctgggagaccaggtcctacaggttttcaaagtctaccaggtccagaaggtcctccaggtctccctggaaatggaggtattaaaggagagaagggaaatccaggccaacctgggctacctggcttgcctggtttgaaaggagatcaaggaccaccaggactccagggtaatcctggccggccgggtctcaatggaatgaaaggagatcctggtctccctggtgttccaggattcccaggcatgaaaggacccagtggagtacctggatcagctggccctgagggggaaccgggacttattggtcctccaggtcctcctggattacctggtccttcaggacagagtatcataattaaaggagatgctggtcctccaggaatccctggccagcctgggctaaagggtctaccaggaccccaaggacctcaaggcttaccaggtccaactggccctccaggagatcctggacgcaatggactccctggctttgatggtgcaggagggcgcaaaggagacccaggtctgccaggacagccaggtacccgtggtttggatggtccccctggtccagatggattgcaaggtcccccaggtccccctggaacctcctctgttgcacatggatttcttattacacgccacagccagacaacggatgcaccacaatgcccacagggaacacttcaggtctatgaaggcttttctctcctgtatgtacaaggaaataaaagagcccacggtcaagacttggggacggctggcagctgccttcgtcgctttagtaccatgcctttcatgttctgcaacatcaataatgtttgcaactttgcttcaagaaatgactattcttactggctctctaccccagagcccatgccaatgagcatgcaacccctaaagggccagagcatccagccattcattagtcgatgtgcagtatgtgaagctccagctgtggtgatcgcagttcacagtcagacgatccagattccccattgtcctcagggatgggattctctgtggattggttattccttcatgatgcatacaagtgcaggggcagaaggctcaggtcaagccctagcctcccctggttcctgcttggaagagtttcgttcagctcccttcatcgaatgtcatgggaggggtacctgtaactactatgccaactcctacagcttttggctggcaactgtagatgtgtcagacatgttcagtaaacctcagtcagaaacgctgaaagcaggagacttgaggacacgaattagccgatgtcaagtgtgcatgaagaggacataacattttgaagaattccttttgtgttttaaaatgtgatatatatatatataaaattcctaggatgcagtgtctcattgtccccaactttactactgctgccgtcaatggtgctactatatatgatcaagataacatgctgactagtaaccatgaagattcagatgtacctcagcaatgcgccagagcaaagtctctattatttttctactaaagaaataaggaagtgaatttactttttgggtccagaatgactttctccaagaattataagatgaaaattatatattttgcccagttactaaaatggtacattaaaaattcaattaagagaagagtcacattgagtaaaataaaagactgcagtttgtgggaagaattatttttcacggtgctactaatcctgctg

SEQ ID NO: 324507 - DNA, 5076 bp, Artificial Sequence
  derived and/or modified sequence
atgaagctgcggggcgtgtccctggccgccggcctcttcctgctggccctgagcctgtggggccagcctgctgaggccgccgcctgctacggctgcagccctggcagcaaatgtgactgcagcggcatcaagggggagaagggggagcggggcttccctggcctggagggccaccctggcctgcccggcttccctggccctgagggccccccaggcccccggggccagaagggagatgatggcatccctggccccccaggccccaagggcatccggggccccccaggcctgcccggcttccctggcaccccaggcctgcccggcatgcctggccatgatggagcccctggcccccagggcatccctggctgcaatggcaccaagggggagcggggcttccctggcagccctggcttccctggcctgcagggccccccaggccccccaggcatccctggcatgaagggggagcccggcagcatcatcatgagcagcctgcccggccccaagggcaaccctggctacccaggccccccaggcatccagggcctgcccggccccaccggcatccctggccccatcggccccccaggccccccaggcctgatgggccccccaggccccccaggcctgcccggccccaagggcaacatgggcctgaacttccagggccccaagggggagaagggggagcagggcctgcagggccccccaggccccccaggccagatcagcgagcagaagaggcccattgatgtggagttccagaagggggaccagggcctgcccggggaccggggccccccaggccccccaggcatccggggccccccaggccccccaggaggagagaagggggagaagggggagcagggcgagcccgggaagaggggcaagccaggcaaggatggagaaaatggccagcccggcatccctggcctgcccggggaccccggctacccaggagagcccggcagagatggagagaagggccagaagggggacaccggccccccaggccccccaggcctggtgatccccaggcctggcaccggcatcaccatcggggagaagggcaacatcggcctgcccggcctgcctggagagaagggggagcggggcttccctggcatccagggccccccaggcctgcccggccccccaggagctgctgtgatgggccccccaggccccccaggcttccctggagagcggggccagaagggagatgagggccccccaggcatcagcatccctggccccccaggcctggatggccagcccggggcccctggcctgcccggccccccaggccctgctggcccccacatccccccatctgatgagatctgtgagcccggccccccaggccccccaggcagccctggggacaagggcctgcagggcgagcagggcgtgaagggggacaagggggacacctgcttcaactgcattggaacaggcatcagcggccccccaggccagcccggcctgcccggcctgcccggccccccaggcagcctgggcttccctggccagaagggggagaagggccaggccggggccaccggccccaagggcctgcccggcatccctggggcccctggggcccctggcttccctggcagcaagggggagcccggggacatcctgaccttccctggcatgaagggggacaagggggagctgggcagccctggggcccctggcctgcccggcctgcccggcaccccaggccaggacggcctgcccggcctgcccggccccaagggggagcccggcggcatcaccttcaagggggagcggggccccccaggcaaccctggcctgcccggcctgcccggcaacatcggccccatgggccccccaggctttggacctcctggccctgtgggggagaagggcatccagggcgtggccggcaaccctggccagcccggcatccctggccccaagggggaccccggccagaccatcacccagcccgggaagccaggcctgcccggcaaccctggaagagatggagatgtgggcctgcccggggaccccggcctgcccggccagcccggcctgcccggcatccctggcagcaagggggagcccggcatccctggcatcggcctgcccggccccccaggccccaagggcttccctggcatccctggccccccaggggcccctggcaccccaggaagaattggcctggagggccccccaggccccccaggcttccctggccccaagggggagcccggctttgccctgcccggccccccaggccccccaggcctgcccggcttcaagggggccctgggccccaagggggaccggggcttccctggccccccaggccccccaggccgcacaggcctggatggcctgcccggccccaagggagatgtgggccccaacggccagcccggccccatgggccccccaggcctgcccggcatcggcgtgcagggccccccaggccccccaggcatccctggccccatcggccagcccggcctgcacggcatccctggagagaagggggaccccggccccccaggcctggatgtgcccggccccccaggagagcggggcagccctggcatccctggggcccctggccccatcggccccccaggcagccctggcctgcccgggaaggccggggccagcggcttccctggcaccaagggggagatgggcatgatgggccccccaggccccccaggccccctgggcatccctggccgcagcggcgtgcccggcctgaagggagatgatggcctgcagggccagcccggcctgcccggccccactggagagaagggcagcaaaggagagcccggcctgcccggccccccaggccccatggaccccaacctgctgggcagcaaaggagagaagggggagcccggcctgcccggcatccctggggtgtctggccccaagggctaccagggcctgcccggggaccccggccagcccggcctgagcggccagcccggcctgcccggccccccaggccccaagggcaaccctggcctgcccggccagcccggcctcatcggccccccaggcctgaagggcaccatcggggacatgggcttccctggcccccagggcgtggagggccccccaggccccagcggcgtgcccggccagcccggcagccctggcctgcccggccagaagggggacaagggggaccccggcatcagcagcatcggcctgcccggcctgcccggccccaagggggagcccggcctgcccggctacccaggcaaccctggcatcaagggctctgtgggggaccccggcctgcccggcctgcccggcacccctggggccaagggccagcccggcctgcccggcttccctggcaccccaggccccccaggccccaagggcatcagcggccccccaggcaaccctggcctgcctggagagcccggccctgtgggcggcggcggccaccctggccagcccggccccccaggagagaagggcaagccaggccaggacggcatccctggccctgctggccagaagggggagcccggccagcccggctttggaaatcctggccccccaggcctgcccggcctgagcggccagaagggagatggcggcctgcccggcatccctggcaaccctggcctgcccggccccaagggggagcccggcttccacggcttccctggggtgcagggccccccaggccccccaggcagccctggccctgccctggagggccccaagggcaaccctggcccccagggccccccaggccggcccggccccaccggcttccagggcctgcccggccctgagggccccccaggcctgcctggaaatggaggcatcaagggggagaagggcaaccctggccagcccggcctgcccggcctgcccggcctgaagggggaccagggccccccaggcctgcagggcaaccctggccggcccggcctgaatggcatgaagggggaccccggcctgcccggggtgcccggcttccctggcatgaagggccccagcggcgtgcccggcagcgctggccctgagggggagcccggcctgattggccccccaggccccccaggcctgcccggccccagcggccagagcatcatcatcaagggagatgctggccccccaggcatccctggccagcccggcctgaagggcctgcccggcccccagggcccccagggcctgcccggccccaccggccccccaggggaccccggcagaaatggcctgcccggctttgatggagctgggggcaggaaaggagaccccggcctgcccggccagcccggcacccggggcctggatggccccccaggcccagatggcctgcagggccccccaggccccccaggcaccagctctgtggcccacggcttcctgatcaccaggcacagccagaccacagatgccccccagtgcccccagggcaccctgcaggtgtatgagggcttcagcctgctgtatgtgcagggcaacaagagggcccacggccaggacctgggcacagctggcagctgcctgcggcgcttcagcaccatgcccttcatgttctgcaacatcaacaacgtgtgcaactttgccagcagaaatgactacagctactggctgagcaccccagagcccatgcccatgtccatgcagcccctgaagggccagagcatccagcccttcatcagccgctgtgctgtgtgtgaggccccagctgtggtgattgctgtgcacagccagaccatccagatcccccactgcccccagggctgggacagcctgtggattggctacagcttcatgatgcacaccagcgctggagctgagggcagcggccaggccctggccagccctggcagctgcctggaggagttccgcagcgcccccttcattgaatgtcatggccggggcacctgcaactactatgccaacagctacagcttctggctggccaccgtggatgtgtctgacatgttcagcaagccccagagcgagaccctgaaggccggggacctgcggacccgcatcagccgctgccaggtgtgcatgaagaggacatag

SEQ ID NO: 324508 - DNA, 5058 bp, Artificial Sequence
  derived and/or modified sequence
atgaagctgcggggcgtgtccctggccgccggcctcttcctgctggccctgagcctgtggggccagcctgctgaggccgccgcctgctacggctgcagccctggcagcaaatgtgactgcagcggcatcaagggggagaagggggagcggggcttccctggcctggagggccaccctggcctgcccggcttccctggccctgagggccccccaggcccccggggccagaagggagatgatggcatccctggccccccaggccccaagggcatccggggccccccaggcctgcccggcttccctggcaccccaggcctgcccggcatgcctggccatgatggagcccctggcccccagggcatccctggctgcaatggcaccaagggggagcggggcttccctggcagccctggcttccctggcctgcagggccccccaggccccccaggcatccctggcatgaagggggagcccggcagcatcatcatgagcagcctgcccggccccaagggcaaccctggctacccaggccccccaggcatccagggcctgcccggccccaccggcatccctggccccatcggccccccaggccccccaggcctgatgggccccccaggccccccaggcctgcccggccccaagggcaacatgggcctgaacttccagggccccaagggggagaagggggagcagggcctgcagggccccccaggccccccaggccagatcagcgagcagaagaggcccattgatgtggagttccagaagggggaccagggcctgcccggggaccggggccccccaggccccccaggcatccggggccccccaggccccccaggaggagagaagggggagaagggggagcagggcgagcccgggaagaggggcaagccaggcaaggatggagaaaatggccagcccggcatccctggcctgcccggggaccccggctacccaggagagcccggcagagatggagagaagggccagaagggggacaccggccccccaggccccccaggcctggtgatccccaggcctggcaccggcatcaccatcggggagaagggcaacatcggcctgcccggcctgcctggagagaagggggagcggggcttccctggcatccagggccccccaggcctgcccggccccccaggagctgctgtgatgggccccccaggccccccaggcttccctggagagcggggccagaagggagatgagggccccccaggcatcagcatccctggccccccaggcctggatggccagcccggggcccctggcctgcccggccccccaggccctgctggcccccacatccccccatctgatgagatctgtgagcccggccccccaggccccccaggcagccctggggacaagggcctgcagggcgagcagggcgtgaagggggacaagggggacacctgcttcaactgcattggaacaggcatcagcggccccccaggccagcccggcctgcccggcctgcccggccccccaggcagcctgggcttccctggccagaagggggagaagggccaggccggggccaccggccccaagggcctgcccggcatccctggggcccctggggcccctggcttccctggcagcaagggggagcccggggacatcctgaccttccctggcatgaagggggacaagggggagctgggcagccctggggcccctggcctgcccggcctgcccggcaccccaggccaggacggcctgcccggcctgcccggccccaagggggagcccggcggcatcaccttcaagggggagcggggccccccaggcaaccctggcctgcccggcctgcccggcaacatcggccccatgggccccccaggctttggacctcctggccctgtgggggagaagggcatccagggcgtggccggcaaccctggccagcccggcatccctggccccaagggggaccccggccagaccatcacccagcccgggaagccaggcctgcccggcaaccctggaagagatggagatgtgggcctgcccggggaccccggcctgcccggccagcccggcctgcccggcatccctggcagcaagggggagcccggcatccctggcatcggcctgcccggccccccaggccccaagggcttccctggcatccctggccccccaggggcccctggcaccccaggaagaattggcctggagggccccccaggccccccaggcttccctggccccaagggggagcccggctttgccctgcccggccccccaggccccccaggcctgcccggcttcaagggggccctgggccccaagggggaccggggcttccctggccccccaggccccccaggccgcacaggcctggatggcctgcccggccccaagggagatgtgggccccaacggccagcccggccccatgggccccccaggcctgcccggcatcggcgtgcagggccccccaggccccccaggcatccctggccccatcggccagcccggcctgcacggcatccctggagagaagggggaccccggccccccaggcctggatgtgcccggccccccaggagagcggggcagccctggcatccctggggcccctggccccatcggccccccaggcagccctggcctgcccgggaaggccggggccagcggcttccctggcaccaagggggagatgggcatgatgggccccccaggccccccaggccccctgggcatccctggccgcagcggcgtgcccggcctgaagggagatgatggcctgcagggccagcccggcctgcccggccccactggagagaagggcagcaaaggagagcccggcctgcccggccccccaggccccatggaccccaacctgctgggcagcaaaggagagaagggggagcccggcctgcccggcatccctggggtgtctggccccaagggctaccagggcctgcccggggaccccggccagcccggcctgagcggccagcccggcctgcccggccccccaggccccaagggcaaccctggcctgcccggccagcccggcctcatcggccccccaggcctgaagggcaccatcggggacatgggcttccctggcccccagggcgtggagggccccccaggccccagcggcgtgcccggccagcccggcagccctggcctgcccggccagaagggggacaagggggaccccggcatcagcagcatcggcctgcccggcctgcccggccccaagggggagcccggcctgcccggctacccaggcaaccctggcatcaagggctctgtgggggaccccggcctgcccggcctgcccggcacccctggggccaagggccagcccggcctgcccggcttccctggcaccccaggccccccaggccccaagggcatcagcggccccccaggcaaccctggcctgcctggagagcccggccctgtgggcggcggcggccaccctggccagcccggccccccaggagagaagggcaagccaggccaggacggcatccctggccctgctggccagaagggggagcccggccagcccggctttggaaatcctggccccccaggcctgcccggcctgagcggccagaagggagatggcggcctgcccggcatccctggcaaccctggcctgcccggccccaagggggagcccggcttccacggcttccctggggtgcagggccccccaggccccccaggcagccctggccctgccctggagggccccaagggcaaccctggcccccagggccccccaggccggcccggcctgcccggccctgagggccccccaggcctgcctggaaatggaggcatcaagggggagaagggcaaccctggccagcccggcctgcccggcctgcccggcctgaagggggaccagggccccccaggcctgcagggcaaccctggccggcccggcctgaatggcatgaagggggaccccggcctgcccggggtgcccggcttccctggcatgaagggccccagcggcgtgcccggcagcgctggccctgagggggagcccggcctgattggccccccaggccccccaggcctgcccggccccagcggccagagcatcatcatcaagggagatgctggccccccaggcatccctggccagcccggcctgaagggcctgcccggcccccagggcccccagggcctgcccggccccaccggccccccaggggaccccggcagaaatggcctgcccggctttgatggagctgggggcaggaaaggagaccccggcctgcccggccagcccggcacccggggcctggatggccccccaggcccagatggcctgcagggccccccaggccccccaggcaccagctctgtggcccacggcttcctgatcaccaggcacagccagaccacagatgccccccagtgcccccagggcaccctgcaggtgtatgagggcttcagcctgctgtatgtgcagggcaacaagagggcccacggccaggacctgggcacagctggcagctgcctgcggcgcttcagcaccatgcccttcatgttctgcaacatcaacaacgtgtgcaactttgccagcagaaatgactacagctactggctgagcaccccagagcccatgcccatgtccatgcagcccctgaagggccagagcatccagcccttcatcagccgctgtgctgtgtgtgaggccccagctgtggtgattgctgtgcacagccagaccatccagatcccccactgcccccagggctgggacagcctgtggattggctacagcttcatgatgcacaccagcgctggagctgagggcagcggccaggccctggccagccctggcagctgcctggaggagttccgcagcgcccccttcattgaatgtcatggccggggcacctgcaactactatgccaacagctacagcttctggctggccaccgtggatgtgtctgacatgttcagcaagccccagagcgagaccctgaaggccggggacctgcggacccgcatcagccgctgccaggtgtgcatgaagaggacatag

SEQ ID NO: 324509 - DNA, 5076 bp, Artificial Sequence
  derived and/or modified sequence
atgaagctgcggggcgtgtccctggccgccggcctcttcctgctggccctgagcctgtggggccagcctgctgaggccgccgcctgctacggctgcagccctggcagcaaatgtgactgcagcggcatcaagggggagaagggggagcggggcttccctggcctggagggccaccctggcctgcccggcttccctggccctgagggccccccaggcccccggggccagaagggagatgatggcatccctggccccccaggccccaagggcatccggggccccccaggcctgcccggcttccctggcaccccaggcctgcccggcatgcctggccatgatggagcccctggcccccagggcatccctggctgcaatggcaccaagggggagcggggcttccctggcagccctggcttccctggcctgcagggccccccaggccccccaggcatccctggcatgaagggggagcccggcagcatcatcatgagcagcctgcccggccccaagggcaaccctggctacccaggccccccaggcatccagggcctgcccggccccaccggcatccctggccccatcggccccccaggccccccaggcctgatgggccccccaggccccccaggcctgcccggccccaagggcaacatgggcctgaacttccagggccccaagggggagaagggggagcagggcctgcagggccccccaggccccccaggccagatcagcgagcagaagaggcccattgatgtggagttccagaagggggaccagggcctgcccggggaccggggccccccaggccccccaggcatccggggccccccaggccccccaggaggagagaagggggagaagggggagcagggcgagcccgggaagaggggcaagccaggcaaggatggagaaaatggccagcccggcatccctggcctgcccggggaccccggctacccaggagagcccggcagagatggagagaagggccagaagggggacaccggccccccaggccccccaggcctggtgatccccaggcctggcaccggcatcaccatcggggagaagggcaacatcggcctgcccggcctgcctggagagaagggggagcggggcttccctggcatccagggccccccaggcctgcccggccccccaggagctgctgtgatgggccccccaggccccccaggcttccctggagagcggggccagaagggagatgagggccccccaggcatcagcatccctggccccccaggcctggatggccagcccggggcccctggcctgcccggccccccaggccctgctggcccccacatccccccatctgatgagatctgtgagcccggccccccaggccccccaggcagccctggggacaagggcctgcagggcgagcagggcgtgaagggggacaagggggacacctgcttcaactgcattggaacaggcatcagcggccccccaggccagcccggcctgcccggcctgcccggccccccaggcagcctgggcttccctggccagaagggggagaagggccaggccggggccaccggccccaagggcctgcccggcatccctggggcccctggggcccctggcttccctggcagcaagggggagcccggggacatcctgaccttccctggcatgaagggggacaagggggagctgggcagccctggggcccctggcctgcccggcctgcccggcaccccaggccaggacggcctgcccggcctgcccggccccaagggggagcccggcggcatcaccttcaagggggagcggggccccccaggcaaccctggcctgcccggcctgcccggcaacatcggccccatgggccccccaggctttggacctcctggccctgtgggggagaagggcatccagggcgtggccggcaaccctggccagcccggcatccctggccccaagggggaccccggccagaccatcacccagcccgggaagccaggcctgcccggcaaccctggaagagatggagatgtgggcctgcccggggaccccggcctgcccggccagcccggcctgcccggcatccctggcagcaagggggagcccggcatccctggcatcggcctgcccggccccccaggccccaagggcttccctggcatccctggccccccaggggcccctggcaccccaggaagaattggcctggagggccccccaggccccccaggcttccctggccccaagggggagcccggctttgccctgcccggccccccaggccccccaggcctgcccggcttcaagggggccctgggccccaagggggaccggggcttccctggccccccaggccccccaggccgcacaggcctggatggcctgcccggccccaagggagatgtgggccccaacggccagcccggccccatgggccccccaggcctgcccggcatcggcgtgcagggccccccaggccccccaggcatccctggccccatcggccagcccggcctgcacggcatccctggagagaagggggaccccggccccccaggcctggatgtgcccggccccccaggagagcggggcagccctggcatccctggggcccctggccccatcggccccccaggcagccctggcctgcccgggaaggccggggccagcggcttccctggcaccaagggggagatgggcatgatgggccccccaggccccccaggccccctgggcatccctggccgcagcggcgtgcccggcctgaagggagatgatggcctgcagggccagcccggcctgcccggccccactggagagaagggcagcaaaggagagcccggcctgcccggccccccaggccccatggaccccaacctgctgggcagcaaaggagagaagggggagcccggcctgcccggcatccctggggtgtctggccccaagggctaccagggcctgcccggggaccccggccagcccggcctgagcggccagcccggcctgcccggccccccaggccccaagggcaaccctggcctgcccggccagcccggcctcatcggccccccaggcctgaagggcaccatcggggacatgggcttccctggcccccagggcgtggagggccccccaggccccagcggcgtgcccggccagcccggcagccctggcctgcccggccagaagggggacaagggggaccccggcatcagcagcatcggcctgcccggcctgcccggccccaagggggagcccggcctgcccggctacccaggcaaccctggcatcaagggctctgtgggggaccccggcctgcccggcctgcccggcacccctggggccaagggccagcccggcctgcccggcttccctggcaccccaggccccccaggccccaagggcatcagcggccccccaggcaaccctggcctgcctggagagcccggccctgtgggcggcggcggccaccctggccagcccggccccccaggagagaagggcaagccaggccaggacggcatccctggccctgctggccagaagggggagcccggccagcccggctttggaaatcctggccccccaggcctgcccggcctgagcggccagaagggagatggcggcctgcccggcatccctggcaaccctggcctgcccggccccaagggggagcccggcttccacggcttccctggggtgcagggccccccaggccccccaggcagccctggccctgccctggagggccccaagggcaaccctggcccccagggccccccaggccggcccggccccaccggcttccagagcctgcccggccctgagggccccccaggcctgcctggaaatggaggcatcaagggggagaagggcaaccctggccagcccggcctgcccggcctgcccggcctgaagggggaccagggccccccaggcctgcagggcaaccctggccggcccggcctgaatggcatgaagggggaccccggcctgcccggggtgcccggcttccctggcatgaagggccccagcggcgtgcccggcagcgctggccctgagggggagcccggcctgattggccccccaggccccccaggcctgcccggccccagcggccagagcatcatcatcaagggagatgctggccccccaggcatccctggccagcccggcctgaagggcctgcccggcccccagggcccccagggcctgcccggccccaccggccccccaggggaccccggcagaaatggcctgcccggctttgatggagctgggggcaggaaaggagaccccggcctgcccggccagcccggcacccggggcctggatggccccccaggcccagatggcctgcagggccccccaggccccccaggcaccagctctgtggcccacggcttcctgatcaccaggcacagccagaccacagatgccccccagtgcccccagggcaccctgcaggtgtatgagggcttcagcctgctgtatgtgcagggcaacaagagggcccacggccaggacctgggcacagctggcagctgcctgcggcgcttcagcaccatgcccttcatgttctgcaacatcaacaacgtgtgcaactttgccagcagaaatgactacagctactggctgagcaccccagagcccatgcccatgtccatgcagcccctgaagggccagagcatccagcccttcatcagccgctgtgctgtgtgtgaggccccagctgtggtgattgctgtgcacagccagaccatccagatcccccactgcccccagggctgggacagcctgtggattggctacagcttcatgatgcacaccagcgctggagctgagggcagcggccaggccctggccagccctggcagctgcctggaggagttccgcagcgcccccttcattgaatgtcatggccggggcacctgcaactactatgccaacagctacagcttctggctggccaccgtggatgtgtctgacatgttcagcaagccccagagcgagaccctgaaggccggggacctgcggacccgcatcagccgctgccaggtgtgcatgaagaggacatag

SEQ ID NO: 324510 - DNA, 5058 bp, Artificial Sequence
  derived and/or modified sequence
atgaagctgcggggcgtgagcctggccgccggcctgttcctgctggctttgtcattgtggggacagcctgctgaggcggccgcttgctacggatgttcaccagggagcaaatgcgattgcagtggcatcaaaggcgaaaagggagagaggggttttccagggctggagggacatcccggactccctgggttccccggccctgaaggtcctcccggcccacgggggcagaagggagacgacggcatcccgggacctcctgggcctaagggtatacgtggccccccgggactccccgggtttccagggactccaggactcccaggcatgccaggccacgacggtgctcccggcccacaaggcatccccggatgtaacgggacaaaaggagagagagggtttccggggtcacccgggtttcccggcttacaaggtcctccgggcccacccggaatccctgggatgaagggagagcccggatctatcatcatgagctcattacctgggcccaagggcaatcctggctacccaggtcctccaggaattcagggccttcctgggccaactggcatcccagggcctattggacctcccggcccgcctggcttgatgggcccccccggcccccccggcctcccaggcccaaaaggcaatatgggcttgaacttccagggtccaaaaggggagaaaggggaacaaggcctgcagggtcccccaggcccacccggccagatttcggagcaaaaaaggccaattgatgtggagtttcagaaaggagaccagggtctgccgggtgataggggaccacccggcccccccggtatcagaggacctcccgggcccccaggcggcgaaaagggagagaaaggcgagcagggagaacctggcaaaaggggtaagcccggcaaggatggcgaaaatgggcagcccggtatcccaggtctgcctggagacccgggatatcctggcgagccagggcgcgacggggaaaagggccagaagggcgacactgggccgcctggcccgccagggcttgttataccacgaccaggtacaggaatcacaataggcgaaaaaggaaacattggcctccccggtctgcctggagagaaaggagagagggggtttcccggcattcagggccccccggggcttccaggtcccccgggagccgccgtcatgggtccaccgggaccacccgggttcccaggggaaagagggcagaagggggacgagggacccccgggcatcagcattccaggcccaccaggactcgatggccaacccggagcccctggactgccagggcctcctggccctgctggcccccacattcctccatcggacgaaatctgcgaacctggcccaccaggccctccaggaagtcctggagacaaaggactgcagggcgaacagggggtgaagggcgacaagggggatacatgcttcaattgtatcggaaccggtattagcgggcctcctgggcaaccaggattgccgggactccctggtcctccaggctcgttgggcttccccggccagaagggggaaaagggccaggccggcgccacaggtcctaaaggactgccgggaattcccggtgcgcccggagcccctggattccccggttccaaaggcgagcctggcgatattcttaccttccccgggatgaagggcgataagggagagctggggagccccggcgccccgggtctgccagggctgcccgggactcctggacaagacggtctgccaggtctgcccggaccaaaaggggaaccaggaggaataacgttcaaaggcgaacgcggccctccagggaaccctggtctgcccggactccctggcaacattggtcctatgggacctcctggattcgggccacctggcccagtaggcgagaagggtattcagggggtggctgggaaccccggccagccagggattccaggccctaaaggcgatcccggtcagacaattacccagcccgggaagcctgggctccccgggaaccccgggagagatggagacgttggcctgcctggggacccaggtcttcccgggcagcctggactacccggaattccaggctctaaaggcgaaccaggaattcctggtataggtttgccagggcctcccggacctaaaggcttccctggcatccctggccctcctggagctcctggcacgccggggcggattggactcgaaggtcctcccggccccccagggttccctggtcctaaaggggaacctgggttcgctctccctggaccccctggtccacccgggttacccggatttaagggcgctctcggaccaaagggcgaccgtggattcccagggccaccaggcccacccgggcggacaggtctcgacgggctgcctggcccaaagggggatgtcgggcccaacggacagccaggcccgatgggcccgccggggctacctggaatcggtgtccaaggcccgccaggcccgcccgggatcccgggacccataggccagcctggcctacatgggatcccaggcgagaaaggcgaccccggaccgcctggacttgacgtcccaggcccccccggggaacggggatcccccggaatccccggcgcccccggtccaattggcccacctggctccccaggactgccggggaaggccggcgcctctgggttcccgggcaccaagggggaaatgggaatgatgggaccgccaggcccccctgggcctcttggaatcccaggtcgttcgggagtgcctggacttaaaggggatgatggcctgcagggtcagcctgggctcccaggtcctactggcgagaaggggtccaagggcgagcctggcctgcctgggccgcctgggccaatggacccgaacttactgggctctaagggggagaagggggaaccgggactgcccgggattcccggggtgtcaggacctaagggttatcagggcctgcctggagacccagggcaacccgggctttcgggtcaaccaggattgcccggccctcctggacctaaaggaaatccaggcttgcccggccagccagggttaatcggccctcctggactgaaaggcactattggtgatatgggttttcccggacctcaaggtgttgaagggccgccgggacctagtggagtgccgggccaacctggaagcccaggccttccaggacaaaagggagacaagggggatccaggaatcagttctatagggctgcccgggctccccgggcctaagggagagcccggcctccctggttatccaggcaacccaggtatcaagggctccgtcggcgatccggggcttcctggcttgcctgggacccctggggctaaaggccaacccggactgcctggctttcctgggacacctgggccaccagggcccaagggaatatccggtcctcccgggaatcccggattgcccggagagccaggccccgtcggaggtggaggacaccctggacagccggggccccccggcgagaaaggaaagccgggccaggatggcattcctgggcccgccgggcagaagggtgaaccagggcagcccggattcggtaacccaggaccaccggggctgccaggcctgagtggacagaagggagacggcggcctgccgggaatacctggtaatcccggtttaccgggccccaaaggtgaacccgggttccacgggttccccggggtccaggggcctcccggcccaccagggagtcccggtcccgcgttggaaggtccaaaaggaaatcccggccctcagggacctcccggtagacccggacttcccggacctgaagggcccccggggctccccggaaacggaggcatcaaaggcgaaaaaggaaatcccggtcaacctggcctccctggcctgccaggactgaaaggtgatcagggccctcccggcctgcagggcaacccaggtagacccgggctgaacgggatgaaaggcgatccagggctgccaggagttcctggcttccccgggatgaagggtccctcaggggtcccaggaagtgccggacccgaaggcgagccaggcctaataggcccacctggcccacctggcctgccaggaccttcagggcaaagcataattattaaaggagacgccggtccgccggggatccctggacagcctggactgaagggactacccgggccccagggaccccaaggattgcctggccccactggaccccccggcgaccctggaaggaatggattacctggctttgacggagcgggggggaggaaaggtgaccctggcctcccgggacagccgggtacaagaggactggatggtccaccaggccccgatggcctgcaaggtccccctggcccccctggcacatccagcgttgcccatggatttctgattaccaggcatagccagacaactgacgcacctcagtgtccacagggtactcttcaggtctatgaaggcttttccctgttatatgttcagggcaataaacgagcccacggtcaggatctaggaacagccggctcctgcttgagacggttcagcaccatgcctttcatgttctgtaacatcaataacgtttgcaactttgcaagcagaaacgattatagctattggctaagcactccagagcctatgcccatgtccatgcagcccctgaagggacaatcaattcagccttttataagccgttgtgccgtatgcgaggcccccgctgtggtgattgccgtacacagtcagacgatccagatcccccactgcccacaagggtgggacagtctgtggatcggatattcctttatgatgcatacaagcgcaggcgccgagggaagtgggcaggctcttgcctccccgggaagctgtctggaggaattccggtcagcacccttcatcgaatgtcacggtcgcggcacatgtaattattatgccaactcgtattcgttttggctggctactgtagacgtcagcgacatgttctcaaaaccccaaagcgaaacgctcaaagcaggagatctgcggactcgaatttcccggtgccaggtgtgcatgaaaagaacctag

SEQ ID NO: 324511 - DNA, 5076 bp, Artificial Sequence
  derived and/or modified sequence
atgaagctgcggggcgtgagcctggccgccggcctgttcctgctggccctttccctatggggccagcccgccgaagctgctgcatgttacgggtgttcccctggctctaaatgcgattgctcaggaattaagggtgaaaagggagagcggggttttccagggctggagggacatcctggcctgcccggattccccggccccgagggccctcccgggcctcgaggccagaagggcgacgatgggatccctggaccgccaggtcccaagggtattcgggggccacctgggctgcccgggttccccggcacacccgggctgccggggatgcccggacatgacggtgcaccagggccacaaggcattccaggatgcaatggcacaaaaggggagcgcgggtttccaggatctccaggtttccccggcctccagggtccccccgggcctcccggaattccaggaatgaaaggcgaacccggttcaataattatgagcagtctgccaggacccaaagggaatcctggttaccccggccctcctgggatccagggtttacctggccccaccgggatcccaggaccaatcggccctcccgggcctcccggcttaatggggcccccaggcccaccaggcctgcctggcccgaagggaaatatgggcctgaatttccaaggaccgaagggtgagaaaggagagcagggactccagggacctccaggacctccaggtcagattagcgaacagaagagacccattgatgtcgagtttcagaagggggaccaaggccttccgggcgacagaggacctcctggacccccaggcatcaggggcccgccaggtcctccaggtggcgaaaagggtgaaaagggggagcaaggcgaacccggaaagcgcggaaagcccggaaaagatggtgagaacgggcagcctgggatacccggtctgcctggcgaccctggctaccccggggaacctggtagggacggtgagaaggggcagaaaggggacactggtcctccaggcccccctggtctcgttattccacggccaggaaccggaatcaccattggagaaaaagggaatatcgggctgcctggcttgccaggggaaaaaggcgaacgcggtttccccggaattcaaggccctcccggcctgcctggaccacccggtgcggctgtcatggggccgccgggcccgccgggcttcccaggtgagcggggccaaaaaggagacgaagggccgcctgggatctctatccctggtcctccggggctggatgggcagcccggggcacccggacttcccggaccacccgggcccgctggcccacacataccaccctccgacgagatatgcgagcctgggcctcccggccctccaggctctccaggggataaggggctccagggcgagcagggcgtgaagggagataagggcgatacctgtttcaattgcataggcactggtatcagcggtccacctggccagccagggctccccggactgcctggacccccagggtccttgggcttcccgggccaaaaaggggagaaagggcaggccggcgctaccgggcccaaaggcttgcctggcattccgggtgcccctggcgctcccggattcccaggatctaaaggtgagcccggtgacatcctgaccttcccaggaatgaagggtgataagggagagctggggagtcctggagccccgggcctccccgggctcccaggcaccccggggcaagatggcttaccaggattacctggcccaaagggggagcccggagggatcacctttaaaggcgagaggggacctcctggcaacccggggttacccgggctgcctgggaacatcgggccaatggggccacccggattcggcccccccgggccggtaggggaaaaaggaattcagggagtcgccggtaaccccgggcagcccgggataccaggccctaaaggggaccccggccagacgattacgcagccgggcaaacctgggctaccgggaaatcccggacgagacggcgacgtgggccttccaggcgaccctggactacccggacagcccggcctgccagggattccaggcagtaaaggcgagccaggtattcctgggattggcttacccgggccacccggccctaagggttttcctggcatcccaggacctcctggcgcccctgggacccctggacggatcgggctggaggggccgcccgggccaccaggattcccaggcccaaagggcgagcccgggttcgccctgcccgggccacccgggcctcctggcctgcccgggttcaaaggggccctcggacccaagggcgataggggatttcctggccctcccggaccccccggacgaacggggctggatggcttgcccgggcccaagggggacgtcgggcctaacggacagccagggccaatggggcctcctgggttaccaggaatcggggtgcaaggccccccaggcccacccggcatccccgggccaattgggcaacctggtctccacggaatccctggcgaaaaaggcgaccctggccccccagggctggacgttccgggccccccaggggagcgaggctccccgggcattcccggagctccaggtcctattggccctcccgggtcacccggtctacccggaaaggcaggcgcaagtggtttccctgggacgaagggggaaatggggatgatgggcccacctggcccccccggtcctctggggatacctggacgtagtggagtaccaggtctgaagggggatgatgggctgcagggacagcccggtctgccagggcccaccggagaaaagggctcaaagggtgagccaggcctacctgggcctccaggacctatggaccccaatctcctaggcagtaagggggaaaagggcgagcctgggcttccggggatcccaggtgtctctggacctaagggttatcagggcttacctggcgatcctggtcagccaggtttgagcggacagccgggacttccaggaccccccggaccaaaagggaacccgggcctccctggtcagccaggccttattggaccgccagggcttaagggcaccatcggcgacatggggttcccaggcccccaaggcgtagagggcccccctggacctagcggagtgcccgggcaaccaggatcccccggcctgcccggacaaaagggcgacaagggcgatcccggaatttcatcaatcggactgcccgggctgcccggtcctaagggagagccggggttgccagggtatcctggcaatccgggaatcaagggaagcgttggcgaccctggattaccgggactgcccggaactccaggcgctaagggccaacccggcttacctggcttccccggcactcccggaccgccggggcccaaggggatttctggtccccccgggaatccggggttacctggcgagcctggacccgtgggcggcgggggccatcccggccaacctgggccaccaggggagaaggggaagccgggccaggacggaatcccagggcctgcaggacagaaaggagagccaggtcagcctggattcggaaatcccggacctcctgggctgcctggcctcagcggtcagaagggagatggcggcctgcccggcatcccaggcaatccgggtctccccggcccaaaaggcgagcccggattccacgggtttccgggcgttcaagggccacctggcccaccagggtcccctggccccgctctagaggggccaaaaggaaaccctggcccgcaaggcccaccaggaaggccagggccaaccggctttcagtccctgccgggacccgaaggaccacccggcttgccaggaaacggcggaataaagggggagaaaggcaatcctggacagccaggcctgccaggtttacctggcctgaagggggaccaggggccgccgggactgcaaggcaacccgggccgccccggtctcaacggcatgaaaggggatcccggtctcccaggtgtccccggatttcccgggatgaagggccccagcggagtgcccggctctgctgggccagaaggagaacctgggctgatcggtccccctggccctccggggcttcctggcccaagcgggcagagcataatcattaagggcgatgcaggcccgccaggtattcccgggcagccaggcttaaaaggtctccccggccctcagggaccccagggcttgcccggtcccaccggtccccccggcgaccccgggcggaacggcctccccggatttgacggagctggagggcgcaagggcgatcccggcctgcccggtcagccaggcaccagaggcctcgatggtccccctggtcctgacggattgcaggggcccccagggcctccgggaacatcctcggtggctcacggatttttaatcacacgccactctcagacgacagatgctccacagtgtccacaaggcacgctgcaagtgtatgagggatttagtcttctgtacgtgcagggcaataagcgtgcccacggacaagatttgggcaccgcgggcagctgtctgaggaggttcagcacaatgcccttcatgttctgcaacatcaataacgtctgcaatttcgcatcacgaaatgattattcttactggctgagtacccccgagcctatgcctatgtcaatgcagccgttgaaaggccagtctatccaaccatttatttctcgctgcgccgtttgcgaggcgcccgctgtcgtgatcgccgttcatagccagaccattcagataccccattgtcctcagggatgggattcactgtggattggttatagtttcatgatgcatacgtccgcaggcgccgaaggctctgggcaagctctggcatctccaggcagctgccttgaggagttcaggagtgcgccatttatcgaatgccatggccggggaacgtgcaactactacgctaactcttacagtttctggctggctactgtggacgtttccgacatgttctcaaaacctcagagcgagacattgaaggcaggggatctgcgtaccagaattagccgttgccaagtttgtatgaaaagaacgtag

SEQ ID NO: 324512 - DNA, 5075 bp, Artificial Sequence
  derived and/or modified sequence
atgaagcttaggggggtgtccctggccgcaggacttttcctgctcgcactatccctgtgggggcagccagcagaggctgcggcttgctacgggtgtagccccggttccaagtgcgactgcagcggaattaagggtgaaaaaggagagcggggtttccctgggttggagggacaccctggcttaccaggttttcccggtcccgagggaccacctggaccacggggacagaagggtgatgatggaattcccggacctcctgggccaaaaggtattcgtgggcctccaggtctgccagggtttcctgggacaccaggcctccccggaatgcccggtcacgacggggcaccgggtccacagggtattccagggtgcaatgggaccaagggagagcggggatttccagggtcacctgggttcccaggactgcagggccctcccggacctcccggtatcccaggcatgaaaggtgaaccaggtagtatcatcatgtcctctcttcctggaccaaaggggaatcctggatacccgggacccccaggaatacaggggttgccgggtccaacagggattcccggacctattggtccaccaggccctcctgggctgatgggccctcctggccctccaggcctccctggtcctaagggcaatatgggcttgaatttccagggccctaaaggcgaaaagggggaacaggggctgcagggccctccaggtcctccgggacagatctctgaacaaaagcgacctattgacgttgaatttcagaagggcgatcagggtttgccaggagatcgcggaccaccagggcctcctgggattcgcggaccacctgggccacctggcggtgaaaaaggggaaaaaggcgaacaaggagaacctggcaagaggggaaagcccggaaaagacggtgagaacggtcaaccaggcatcccgggattaccaggcgaccccggatatcccggagagcccggaagagacggtgagaagggacagaaaggcgacacgggaccacctgggcctccagggctggtcatccccaggccaggcaccgggatcactattggtgagaagggtaacatagggctgccgggactgcctggggagaaaggcgagagaggcttcccgggaatacagggccctcccggtcttccgggacctccaggggcagccgtgatgggcccaccaggaccaccagggttcccaggcgaaagagggcagaaaggagatgaaggtccccctggaatttcaatcccaggcccacctggactggacggccaacccggtgctcccggactaccaggacctccagggcctgcagggccacatatcccaccatcagacgagatctgtgaacccggaccacccggtcccccagggtctccgggagacaaaggcctgcaaggggagcagggggttaaaggcgataagggggacacttgcttcaattgtattgggacaggcatatctggacctccgggtcagccagggttaccgggactgccgggacccccaggctcccttgggttccctggccaaaagggtgagaaaggtcaggcaggagccactggcccaaaaggtcttccgggtatacctggggcacctggcgcacctggcttccctggatcaaaaggcgaacccggtgatattctcacgtttccgggaatgaaaggtgataaaggagagctgggctcccctggcgctccgggtctccccggtttaccaggtacccccggacaggatggtttgcctggactgcccggaccaaaaggtgagccagggggtattacattcaagggcgaacgcggtccccctggcaatcccggtctgccagggctgcctgggaacattggaccaatgggccctccgggattcggtccacctggccctgtcggtgaaaaaggtattcaaggcgtggccggtaaccctggtcagccgggtatcccaggaccgaaaggagacccagggcaaaccatcactcagcccggaaagccaggtctgcccggaaaccccggaagagatggagatgtgggcctgcctggggaccctggcctccctgggcagccgggattgcccggaataccagggtcaaaaggggagccaggcattcctgggataggcctccccggtcctccaggtcctaaaggatttcccggaatcccgggacctcccggagcaccgggtacccccggacggatcgggctcgaagggcctcccggtccacctggctttcccggacctaagggcgagcccggtttcgcgcttcccggtcctcccggtccccctgggttgccgggtttcaaaggcgcactcggccctaagggtgaccggggattccccggaccacccggaccccctggtaggactggattagacggcctgcccggaccgaaaggcgacgtcggacctaacggccagcccggtcccatgggccctcccggtctaccaggaattggggtgcagggccctccaggacccccagggatcccagggccaataggacagccgggtcttcatggcatccccggagaaaaaggggacccaggccctccaggactggacgtgcccggacctcccggtgaaaggggttctccaggtatccctggagctccgggaccaattgggcctccagggtcgcctggtctgcccggtaaagctggggcatctggttttcccggaacaaaaggtgaaatgggcatgatgggccctcccggtccccctggccctctgggtatccccggaaggtccggagtgcccggtctgaaaggcgacgacgggttgcagggacagcccggtctgcctgggccaactggggagaaagggagtaaaggggagccaggccttcctggacctccagggcctatggaccccaacttactgggcagcaagggtgagaaaggcgaaccaggtctgccaggaattccaggagtttccggacctaaaggctaccagggactgcctggagacccgggacaacccggactgagcggccagcctggactgcccggtcccccaggtcccaagggcaaccccggtctgcccggtcaacctggactcatcgggcctcccggactgaaaggaaccattggcgatatgggctttcctgggccacagggagtggagggccctccaggaccaagcggagtcccaggccagccaggttcccccggattaccagggcagaagggagacaaaggagacccgggaatctcgagtatcggcctaccaggcctgcccggtcctaagggtgaacctggactgcccggatacccagggaacccgggaataaagggctctgtgggtgatcctggcctccccggtctccccggaaccccaggagccaaaggacaacccggtctgccgggtttcccaggcacccccggacctcccggacccaaaggcatttctgggcctccaggcaaccccggacttcctggcgagcctggccctgtcggagggggagggcaccccggtcagcccggtccgccaggggagaaaggcaagccaggtcaggacggaataccgggacctgcgggacaaaaaggggagccgggtcaacccggatttgggaacccaggcccacctggtcttccaggactctccgggcagaaaggagatgggggacttcctggaatcccgggtaaccccggtcttcccggacctaaaggcgaaccaggatttcacggcttccccggtgtccaggggcctccgggaccacctgggagccccggaccggcactcgaaggcccaaaaggaaatcctgggccacagggccctcctggtagacctggacccacgggttttcaaggactcccaggccctgaaggccctccaggacttcctgggaatggcggtattaagggcgagaaggggaaccccggtcagcctggactaccgggtctacccggtttaaagggggaccagggtccacctgggctacagggaaacccgggtcggccaggccttaatggaatgaagggcgatcctggcctgccgggagtccctggcttcccaggtatgaaggggccatcaggggtgcccggttctgcgggtcccgagggcgaaccaggcttgatcggcccacccggaccacctggactgcccggacccagcggtcagtctattataataaaaggggatgcgggaccgccaggcatcccaggccagcccggtctgaaggggctccccggtccccaaggtccccagggcctccccggtcctactggccctccaggcgatcccggaaggaacggccttcctggatttgatggagcaggaggtcggaaaggtgacccaggactcccgggacagccgggaacgcgaggactcgacggccctcctggaccagacggcctgcaaggtccaccaggccctccaggcactagttctgtggctcatggtttccttatcacccggcattcacaaactacagacgcccctcagtgcccccaagggaccctccaggtctacgagggcttttcactgctctatgtgcagggaaataagcgggcacacggccaggacctggggacagcaggttcttgcttacgacgcttttccaccatgcccttcatgttttgtaacatcaataatgtctgcaattttgccagtagaaacgactatagttattggctatcgactccggagcccatgcctatgtctatgcagcctctcaagggtcagagcatccagccattcatctcgagatgcgccgtctgtgaagctcccgctgtggtgatcgccgtacacagtcagaccatacagatcccgcattgtccacaggggtgggactctctctggattggctatagcttcatgatgcatacaagcgccggtgccgaaggctctggtcaagcccttgcctcaccaggatcatgtcttgaggagttcagatctgcaccattcattgaatgtcacggcagaggcacctgcaattactatgcaaacagctactctttttggctggctacggtcgatgtgagcgacatgttcagtaagccacagagcgaaactctgaaggccggagacctgcggacccgcattagcaggtgccaagtttgtatgaaacgtacata

SEQ ID NO: 324513 - DNA, 5057 bp, Artificial Sequence
  derived and/or modified sequence
atgaagttgcgcggtgtgtctctggcagctggtttattcctactggcactaagtctatggggccagccagcagaggccgctgcctgctacgggtgtagccctggctccaaatgtgactgcagtggcattaagggcgagaagggtgagcgcggattccccggattggagggacaccctggattgcccggattccctgggccagagggtccaccgggaccacgaggccaaaaaggtgacgatgggattcctgggccacccggacctaagggcatacgcggacccccagggttacctggctttcccggtacaccaggcctccctgggatgcccggacatgacggggcacccggacctcagggaattcccggttgtaatggaactaaaggagagagaggcttccccggttcgcctgggttcccaggactgcagggaccccctggcccacctggaatccccggaatgaaaggggaaccagggagcattataatgagcagtctccctggaccaaagggcaaccctggatatcccggaccccctgggatccagggccttcccggacccaccggcattcccggtccaatcggtccacctggtccgccaggattgatgggcccacccggacccccaggtctccccggtccaaaaggaaacatgggcctgaactttcagggtcctaagggagaaaaaggcgaacaggggctgcaggggcctccaggcccacccggtcagatctccgaacagaaaagaccaatcgatgttgaattccagaagggagatcaaggtctgcctggcgacaggggccctcccggtcccccaggtattcggggaccccctggacctcctgggggagagaaaggagagaagggcgaacagggagaacctgggaagaggggtaagcctggaaaagacggcgaaaatggacagccaggaatccctggactgcccggtgatccgggttaccctggcgaaccaggtagagacggtgagaagggtcagaaaggcgataccggcccacccggtcctccgggtctggtgatcccacgccctggaacaggtattacaattggtgaaaaaggtaatatcgggctgcccggactccccggagagaaaggggaacggggtttccctggaattcaggggccaccgggtctccctggccctccgggtgccgctgtcatgggcccaccgggacctcctggatttcctggagagcgaggtcagaagggcgacgagggaccccctggcatctcaataccgggacctccgggactggacggccagcccggagcaccgggtctgccagggcctccgggaccagctggcccacacatccctccatccgacgagatatgcgaacctggcccacccggtcctcccggaagccctggagataagggactacagggggagcaaggagtcaaaggcgacaagggcgacacatgttttaattgtattggaacggggatcagcggtcccccaggccagcctgggctcccaggtttgcccggaccaccgggttccctgggattcccaggccagaaaggggagaaaggacaggccggtgcaaccggtcccaagggcctccccggtatacctggcgcacctggcgcaccaggtttccctggaagcaagggcgagccaggcgacatcttgacttttccaggaatgaaaggggacaaaggcgaactgggctccccgggagccccagggctccctggactgcccggtacacctggacaagacgggttgcccggactccctggacctaaaggagagcctggtggaatcacctttaagggcgagagagggccacctggcaatccaggcctgcccggactacctgggaacatcggccctatgggccctccagggtttggaccaccaggccctgtgggcgaaaaaggaatccagggcgtggccggtaaccccggtcagccgggaattccgggtcctaaaggtgaccccggacaaaccatcacccagccgggaaagcccggtttaccgggaaaccctggacgagacggggacgtgggactcccaggcgatcctgggctgccaggtcagcccggactgcccggaatccctggctcaaagggcgagcctgggattcccggaatcgggctgccaggccctcccggtcccaaggggttcccaggaataccaggcccacctggagcccctggtacacccggaaggattgggctggaaggcccaccaggcccacccggattccccggaccgaaaggagagccgggatttgcattaccaggccctccaggcccacccggattaccaggcttcaaaggggctttgggcccaaagggggacagaggattcccaggccctcccggtccccctggacgcacaggcctagatggtttaccagggcctaaaggcgatgtcggtccaaatggccagcctgggccaatgggaccccctggacttcctgggattggagtgcaaggtcctcctgggcctccaggcatacccggaccaataggccaacccggactccacggtatccctggtgagaagggtgatccgggacccccagggttagacgtgcccggacccccaggtgagcgtggtagccccggaatccctggggctccaggccctattggaccccctggcagccccggtcttccaggaaaggctggggcaagtggctttccgggaactaaaggtgagatgggcatgatgggtcccccagggccacctggacctctgggcatccccggaagatcaggagtcccagggctgaagggggacgacggcctgcagggccagcctggcctgccgggtccaaccggagaaaaagggtccaagggcgagcccggactgcccggtcctccaggacccatggatcctaatctgctgggatcaaagggcgaaaaaggggagcccggtctcccaggaatccccggagtgtcaggacctaagggttatcagggccttcccggagacccaggtcaaccgggtttatcaggccagcccggtctgccaggccctcccggtccgaagggcaaccctgggttgcccggacagcccggtctgattggcccaccaggcctcaaagggactataggagacatgggatttcctgggccacagggtgtcgaaggaccacccggtccatctggcgtccccggacaaccaggatcacctggcctgcccggacagaaaggtgacaaaggcgatcctggaatctcctctattggcctcccaggtcttcccggacccaagggtgaacccggactgccagggtacccaggcaacccaggtatcaaagggagcgtgggggacccaggactgcccggtcttccaggcactcctggggctaaaggacagcccggactgccagggtttcccggaacaccgggacccccaggcccaaagggcatctcaggcccacctggcaatccgggactcccaggagaaccgggacccgtcgggggaggcggtcaccccggacaaccgggacctccaggagagaagggcaaacccggacaagacggaattccaggacccgctggacagaagggagagcctggccaacctggtttcggcaaccctggcccaccaggtctacccggattgagcggccagaaaggggatggtgggctgccagggattcctggcaacccaggcctcccgggaccaaaaggcgagccagggttccacggttttcccggagtgcagggccctcctggccctccaggcagtcctggtcctgcacttgaagggcctaaaggcaatcccggaccacaggggcctcccggacgcccaggcctgcccggacccgaaggcccacctggcctgcccggaaacggtgggattaaaggggaaaagggcaacccagggcagcccggactccctggccttcctgggttaaagggcgaccagggcccaccaggactccagggcaatccaggtagacctggactgaatggtatgaagggggacccaggacttcctggcgttccgggttttcccggaatgaagggacctagcggcgttcctggctccgccggacccgagggagaacccggactgataggcccaccaggaccccctggactgcctggaccctccggccagagtataatcatcaagggagacgccggtccaccaggcattcccggacagccaggcctgaagggcctgcctggacctcagggaccccaggggctccctggtcctacagggcctcccggtgaccctggcagaaatggtcttccgggattcgacggtgccggtgggagaaaaggtgatcccggtctcccaggtcagcctgggactagaggtctggacggcccacctggcccagatggcctgcagggccctcctgggcctccaggaacatcttcagtagcccacggattcctgattaccagacacagccagacaactgacgccccacagtgcccacagggaacgctgcaggtctatgaaggattctcactgctctatgtgcagggaaataagcgagcccacggccaggatctgggcactgccggaagctgcttaaggcgcttctcaaccatgccatttatgttctgcaatataaacaatgtatgtaacttcgcctcacgaaacgattactcctattggttgtcaacccccgagccaatgcccatgagcatgcagcccctgaaagggcagagtatccaaccttttatttcccgttgcgccgtgtgtgaagccccagctgttgtgatagccgttcactcccagaccatccagattccccactgtcctcaggggtgggactcactctggatcggctatagctttatgatgcacacatctgccggagccgaaggaagtggacaagcccttgcctctcctgggagctgcctcgaggaattcaggtcggccccattcatcgaatgccacggacggggtacttgtaattactacgctaatagctattctttctggcttgcaacagtcgacgtgagcgacatgttttcaaaaccccagtcggaaactctgaaggcaggcgatttaaggacacggatctcccgctgccaggtctgcatgaagcggactta

SEQ ID NO: 324514 - DNA, 5076 bp, Artificial Sequence
  derived and/or modified sequence
atgaaactgaggggtgtgagcttagccgcaggactgttcctgctggctctttccctgtggggacaacctgctgaagctgccgcatgctacgggtgttcacctgggagcaaatgcgactgcagcggtataaagggggagaagggggaaagagggtttccagggctcgaggggcaccccggattaccgggtttccccggtcccgaaggccctccaggtcctcgcggtcagaaaggtgatgatggcattcccggaccaccgggtccaaaaggcatcagaggccctccaggactcccaggatttccgggaacccctggcctgcctgggatgcccggacacgacggggcaccagggccacagggaattcccggatgcaacggaacgaaaggtgagcgcggattccccggatccccaggtttccctgggttacaggggccaccaggcccaccagggatccctggaatgaaaggggaacctggcagtattataatgtcctccttgccaggcccaaagggaaaccccggttatcccggacccccaggaatccagggcctccccggacccaccggcattccgggaccaatcggaccccctgggcctcccggactgatgggacctccaggccctcctggcttacccggtcccaaggggaacatgggcctgaactttcagggaccgaaaggcgagaaaggagaacagggtcttcagggccctccgggaccacccggtcagataagcgaacagaagagacccattgacgttgaattccagaaaggagaccagggactgccaggagatcgaggcccacccggaccaccaggaatccgcggtccccctggtcctcccggtggtgaaaaaggtgagaaaggggaacagggagagccgggtaaaagaggaaaaccaggaaaagacggtgagaacggacaacccggtatccccggtctgccaggggaccctgggtatcccggagaaccgggtagagatggagaaaaaggccaaaaaggcgacacaggccctcccggtcccccaggcctcgtgattcctagacccggtactggtattaccattggagagaagggcaatattggactacctggcctccccggagaaaaaggggaaaggggcttcccaggaatccagggccctccaggtctgcccggacccccaggggctgctgtaatgggtccgcctggacctcccggatttcccggtgagcgcggacagaaaggagacgaggggcctcccggtatttctatccccggtcctcctggattggacggtcaacctggcgcaccaggcctcccagggcctccgggacctgctggccctcacatccccccttccgatgagatctgcgagccagggccacccggtcccccaggctccccgggagataaaggactccagggggagcagggcgtgaagggagataaaggggacacctgtttcaactgcataggtactggcatctctggccctcctggccagcccggattgcccggattacctggcccacctgggagtttgggcttcccaggccagaagggtgaaaagggacaggcgggtgctaccggtcccaagggtctgccaggtatcccaggcgcacctggcgcacccggattccctggatctaagggagaacccggagatatccttacctttcccggaatgaagggagataagggcgaattaggctcaccgggagcaccaggccttccaggccttccaggaacccctggccaagatggtctgccagggttgccaggacctaaaggggaacctggaggaatcacattcaaaggcgagaggggcccacctggaaatccgggactaccagggctccccggaaacatcggcccaatgggcccacccggtttcggccctcccggtccagtcggagagaaggggatccagggagtggccggaaaccccggacagcctggcatccctggtccaaaaggcgacccaggacaaacgatcacccaacctggcaagcccggactacccggtaatcctggacgcgacggcgacgtgggactccccggtgaccctggcctccccggacagcccggtttgcccggtattccagggtccaagggcgagccaggcataccaggaatcggtctcccgggacctcccggaccaaaaggattccctgggattccaggacccccaggggcacccggtactccaggcagaatcggccttgaagggccacctggaccaccgggatttcccggtcccaaaggggagccgggttttgccttgccagggccaccaggaccacctgggctacccggattcaagggcgctcttggcccaaaaggcgaccggggattcccaggaccacccggacctcctggaagaacaggcctggacgggttacctggtcctaaaggcgacgtcgggccaaatggacagcccggtcccatgggccctccgggtctgcctggtataggagtgcaggggcctcccggtccaccaggcatccctgggccaataggacagcccggactgcacggtatccccggagaaaagggtgatccaggaccaccaggtttggacgttccaggccctcctggcgaacgagggtctccaggaatcccaggtgcccctgggcctatagggcctcccggttcccccggactgcccggtaaggcgggtgcctctggcttccccggaaccaagggagagatggggatgatgggccctccgggacctccaggtccactcggaataccaggccgaagcggggtgcctgggctgaagggggacgatggcctgcagggccagccaggtctcccagggcctacgggggaaaaaggatccaagggagaacctggcctgccaggccctcccggaccaatggatccaaacctacttgggtccaagggtgagaagggagaacctggtttgcccggtatcccgggagtgtctggtcccaaggggtatcagggattgcctggcgaccctggacaaccgggactgtccggccagccaggactgccagggccaccaggacccaagggcaacccagggttacctggacagccaggacttatcggtcctccgggactgaaaggcaccattggtgatatgggctttccaggtccccagggtgtagaaggccctccagggccttctggcgttcccggacagcccggatcccctggtcttccaggtcagaaaggtgacaaaggagatcccggtatttcatctatcgggttgccaggtctgccaggacccaagggcgagcccggattacctggctatcctggaaatccgggtattaagggaagcgtgggggatccgggactgccaggactccccggaacaccaggagctaaggggcagcctggcctccccggattccccggtacacccggtcctcctggcccaaagggcatctcaggcccacccggaaatcccggactgccgggtgagccgggacctgtgggtggcggagggcaccccggacagcccggtcccccaggagagaaggggaagccaggtcaagacggcattcctgggcctgctggacagaaaggcgaacctgggcagccaggctttggcaatcctggacctcccggactccccggactttctggacagaaaggagatgggggacttcctggaataccaggcaacccaggactgcctggcccaaagggtgagcccggtttccacgggtttcctggagttcagggccctcccggaccgccaggaagccctggacccgctctcgagggaccgaaagggaatcctggacctcagggaccacctggcaggccaggtccaactgggtttcagtcccttccaggccctgagggacccccagggctgcctggtaacggcggaataaaaggagagaagggcaatccgggacagccaggcctacctggcctacctggactcaagggggaccagggccctcccggtctgcagggaaatcccggtcgccctggcttaaatggaatgaaaggcgaccctggtctccctggcgtgccaggatttcccggaatgaaagggccttctggtgtgcccggaagtgccggtccagaaggagaacctgggttgatcggtccacccggaccccctgggctgcctggcccttccggtcaaagtatcattataaaaggagacgccggaccacctggcattcctggtcagcccggacttaagggccttcctgggccacaaggcccacagggcctaccaggcccaacgggacccccaggcgatcccggaagaaatgggctccccggatttgacggcgcaggaggacggaaaggagaccctggcttgcccggacagccaggaactcggggacttgacggacctccaggacctgatggactgcagggccctcctggacccccaggcacaagtagcgtcgcccacggattcttgatcacccggcattctcagaccacagacgcccctcagtgtccacaaggaactctgcaggtctacgaagggttctctctattgtacgtccaggggaacaagagagcacatggccaggatctgggaacagcgggatcctgtctacgtcggttttcgacaatgccttttatgttttgcaatatcaataacgtgtgtaattttgcaagtcgtaacgactactcttattggctgtccactcccgagcccatgcccatgtccatgcagcccctgaaaggccagagtatccagcctttcatctcgagatgcgccgtgtgtgaggctcccgctgttgtgatcgccgtccattcacaaaccatccaaattcctcactgcccgcagggatgggactccctgtggattgggtatagctttatgatgcatacctccgccggtgctgaaggcagcggccaggcgctggcatctccaggtagctgtctggaggagttccgtagtgccccatttatcgagtgccacggacggggaacatgcaattactacgccaactcgtacagcttctggcttgccacagtcgatgtgtccgacatgttctcgaagccgcaatccgaaacactgaaagctggcgacctgaggactcgaatctcccgctgtcaggtttgcatgaaacggacttag

SEQ ID NO: 324515 - DNA, 5001 bp, Artificial Sequence
  derived and/or modified sequence
atgcaccccggcctgtggctgctgctggtgaccctgtgcctgaccgaggagctggccgccgccggcgagaagagctacggcaagccctgcggcggccaggactgcagcggcagctgccagtgcttccccgagaagggcgccagaggcagacccggccccatcggcatccagggccccaccggcccccagggcttcaccggcagcaccggcctgagcggcctgaagggcgagagaggcttccccggcctgctgggcccctacggccccaagggcgacaagggccccatgggcgtgcccggcttcctgggcatcaacggcatccccggccaccccggccagcccggccccagaggcccccccggcctggacggctgcaacggcacccagggcgccgtgggcttccccggccccgacggctaccccggcctgctgggcccccccggcctgcccggccagaagggcagcaagggcgaccccgtgctggcccccggcagcttcaagggcatgaagggcgaccccggcctgcccggcctggacggcatcaccggcccccagggcgcccccggcttccccggcgccgtgggccccgccggcccccccggcctgcagggcccccccggcccccccggccccctgggccccgacggcaacatgggcctgggcttccagggcgagaagggcgtgaagggcgacgtgggcctgcccggccccgccggccccccccccagcaccggcgagctggagttcatgggcttccccaagggcaagaagggcagcaagggcgagcccggccccaagggcttccccggcatcagcggcccccccggcttccccggcctgggcaccaccggcgagaagggcgagaagggcgagaagggcatccccggcctgcccggccccagaggccccatgggcagcgagggcgtgcagggcccccccggccagcagggcaagaagggcaccctgggcttccccggcctgaacggcttccagggcatcgagggccagaagggcgacatcggcctgcccggccccgacgtgttcatcgacatcgacggcgccgtgatcagcggcaaccccggcgaccccggcgtgcccggcctgcccggcctgaagggcgacgagggcatccagggcctgagaggccccagcggcgtgcccggcctgcccgccctgagcggcgtgcccggcgccctgggcccccagggcttccccggcctgaagggcgaccagggcaaccccggcagaaccaccatcggcgccgccggcctgcccggcagagacggcctgcccggcccccccggcccccccggcccccccagccccgagttcgagaccgagaccctgcacaacaaggagagcggcttccccggcctgagaggcgagcagggccccaagggcaacctgggcctgaagggcatcaagggcgacagcggcttctgcgcctgcgacggcggcgtgcccaacaccggcccccccggcgagcccggcccccccggcccctggggcctgatcggcctgcccggcctgaagggcgccagaggcgacagaggcagcggcggcgcccagggccccgccggcgcccccggcctggtgggccccctgggccccagcggccccaagggcaagaagggcgagcccatcctgagcaccatccagggcatgcccggcgacagaggcgacagcggcagccagggcttcagaggcgtgatcggcgagcccggcaaggacggcgtgcccggcctgcccggcctgcccggcctgcccggcgacggcggccagggcttccccggcgagaagggcctgcccggcctgcccggcgagaagggccaccccggcccccccggcctgcccggcaacggcctgcccggcctgcccggccccagaggcctgcccggcgacaagggcaaggacggcctgcccggccagcagggcctgcccggcagcaagggcatcaccctgccctgcatcatccccggcagctacggccccagcggcttccccggcacccccggcttccccggccccaagggcagcagaggcctgcccggcacccccggccagcccggcagcagcggcagcaagggcgagcccggcagccccggcctggtgcacctgcccgagctgcccggcttccccggccccagaggcgagaagggcctgcccggcttccccggcctgcccggcaaggacggcctgcccggcatgatcggcagccccggcctgcccggcagcaagggcgccaccggcgacatcttcggcgccgagaacggcgcccccggcgagcagggcctgcagggcctgaccggccacaagggcttcctgggcgacagcggcctgcccggcctgaagggcgtgcacggcaagcccggcctgctgggccccaagggcgagagaggcagccccggcacccccggccaggtgggccagcccggcacccccggcagcagcggcccctacggcatcaagggcaagagcggcctgcccggcgcccccggcttccccggcatcagcggccaccccggcaagaagggcaccagaggcaagaagggcccccccggcagcatcgtgaagaagggcctgcccggcctgaagggcctgcccggcaaccccggcctggtgggcctgaagggcagccccggcagccccggcgtggccggcctgcccgccctgagcggccccaagggcgagaagggcagcgtgggcttcgtgggcttccccggcatccccggcctgcccggcatccccggcaccagaggcctgaagggcatccccggcagcaccggcaagatgggccccagcggcagagccggcacccccggcgagaagggcgacagaggcaaccccggccccgtgggcatccccagccccagaagacccatgagcaacctgtggctgaagggcgacaagggcagccagggcagcgccggcagcaacggcttccccggccccagaggcgacaagggcgaggccggcagacccggcccccccggcctgcccggcgcccccggcctgcccggcatcatcaagggcgtgagcggcaagcccggcccccccggcttcatgggcatcagaggcctgcccggcctgaagggcagcagcggcatcaccggcttccccggcatgcccggcgagagcggcagccagggcatcagaggcagccccggcctgcccggcgccagcggcctgcccggcctgaagggcgacaacggccagaccgtggagatcagcggcagccccggccccaagggccagcccggcgagagcggcttcaagggcaccaagggcagagacggcctgatcggcaacatcggcttccccggcaacaagggcgaggacggcaaggtgggcgtgagcggcgacgtgggcctgcccggcgcccccggcttccccggcgtggccggcatgagaggcgagcccggcctgcccggcagcagcggccaccagggcgccatcggccccctgggcagccccggcctgatcggccccaagggccccagcatcaccggcgtgcccggccccgccggcctgcccggccccaagggcgagaagggctaccccggcatcggcatcggcgcccccggcaagcccggcctgagaggccagaagggcgacagaggcttccccggcctgcagggccccgccggcctgcccggcgcccccggcatcagcctgcccagcctgatcgccggccagcccggcgaccccggcagacccggcctggacggcgagagaggcagacccggccccgccggcccccccggcccccccggccccagcagcaaccagggcgacaccggcgaccccggcttccccggcatccccggccccaagggccccaagggcgaccagggcatccccggcttcagcggcctgcccggcgagctgggcctgaagggcatgagaggcgagcccggcttcatgggcacccccggcaaggtgggcccccccggcgaccccggcttccccggcatgaagggcaaggccggccccagaggcagcagcggcctgcagggcgaccccggccagacccccaccgccgaggccgtgcaggtgccccccggccccctgggcctgcccggcatcgacggcatccccggcctgaccggcgaccccggcgcccagggccccgtgggcctgcagggcagcaagggcctgcccggcatccccggcaaggacggccccagcggcctgcccggcccccccggcgccctgggcgaccccggcctgcccggcctgcagggcccccccggcttcgagggcgcccccggccagcagggccccttcggcatgcccggcatgcccggccagagcatgagagtgggctacaccctggtgaagcacagccagagcgagcaggtgcccccctgccccatcggcatgagccagctgtgggtgggctacagcctgctgttcgtggagggccaggagaaggcccacaaccaggacctgggcttcgccggcagctgcctgcccagattcagcaccatgcccttcatctactgcaacatcaacgaggtgtgccactacgccagaagaaacgacaagagctactggctgagcaccaccgcccccatccccatgatgcccgtgagccagacccagatcccccagtacatcagcagatgcagcgtgtgcgaggcccccagccaggccatcgccgtgcacagccaggacatcaccatcccccagtgccccctgggctggagaagcctgtggatcggctacagcttcctgatgcacaccgccgccggcgccgagggcggcggccagagcctggtgagccccggcagctgcctggaggacttcagagccacccccttcatcgagtgcagcggcgccagaggcacctgccactacttcgccaacaagtacagcttctggctgaccaccgtggaggagagacagcagttcggcgagctgcccgtgagcgagaccctgaaggccggccagctgcacaccagagtgagcagatgccaggtgtgcatgaagagcctgtag

SEQ ID NO: 324516 - DNA, 5001 bp, Artificial Sequence
  derived and/or modified sequence
atgcacccaggcttatggctgctcctggtcaccctctgtctcactgaggagctggccgccgcgggggagaagtcctacgggaagccctgtggaggacaagactgctccgggtcatgccagtgtttcccagagaagggcgcccgcggcagaccggggcctattgggatccaagggcctacagggcctcagggcttcaccgggagcactggtctctccgggttaaagggcgaacggggctttcctggtctgctggggccttatggtcccaaaggcgataagggccccatgggggtacccggcttcttaggcattaacggcattcctgggcaccccggccagccagggccgagggggccccctgggctggatggttgcaacggcacacaaggggccgtggggtttccggggcctgatggataccctggcctccttggaccacccggcctgcctggccagaagggctccaaaggggacccagttctggcccctgggtccttcaaagggatgaaaggggatccaggtctgccaggcctggacgggatcaccggcccccagggagctcctggcttcccaggtgccgtggggccagctggcccacccggactccagggcccacctggcccccccgggccgctgggcccagatggtaacatgggtcttggatttcagggcgagaagggcgtgaaaggtgacgtggggcttcctgggcccgccggcccacctccatctactggagaactggaatttatgggattccctaagggaaagaagggttccaaaggagaacccggacccaagggatttccgggtatatcaggaccacctggttttcctggcctgggaacaacaggggaaaaaggtgagaagggcgagaaagggattcccgggcttcctggacccagagggccgatgggctccgagggagtgcagggccctccgggccagcagggcaaaaaggggactcttggtttccccggtctgaatggctttcagggcattgagggacagaaaggagatataggtctcccaggacctgacgtctttatcgatatagatggagccgtgattagcgggaacccaggggatccgggcgtgcccggactgccggggctgaagggggacgaaggaatccaaggactacggggtccatctggagtaccggggctccctgcgttatcgggagtgccgggagccttggggccccaggggttccctggattaaagggtgaccaggggaaccctggtcgcaccaccataggcgcagcggggttacctggacgcgacggcctgcccggacccccaggcccacccggccctccctctccagaattcgaaaccgagacccttcataataaagagtccggatttcctggcctgcgcggagagcagggtccaaaggggaatctcggtttaaagggaataaagggtgattccgggttttgcgcctgtgatggcggcgtccccaatactggcccaccaggggaaccggggccccccggtccatggggactgatcgggctccctggactgaagggggccaggggcgatcgcggtagcgggggggcccaaggtccagcgggagctcccggtctggtaggacctctcggccccagtggacccaaaggtaaaaagggtgagcctatcttgagcacgattcaaggaatgccgggcgatcggggcgacagcggatctcaaggattccggggggtgattggagagcccgggaaggacggcgttccgggcttgccgggacttcccggtctgcctggagatggaggccaggggtttccaggggagaaggggctcccagggttgcctggggagaaaggacaccctgggccccccgggctgccagggaacggcttgcctggtctgccaggaccgagggggttacctggcgataaagggaaggacggactgcccggacaacagggcttgcctggcagcaaaggtatcacactgccctgtattatccccggctcatacggaccatccggctttcctggtaccccgggctttcctggtcctaagggatctaggggactgcctggcacccctggccagcccggctcttcggggtcgaagggggagccgggatcccctggtctcgtccatctgccagagctgccaggctttccaggacctaggggggagaagggactccctgggttccctggactccctggcaaggacggcctccctggcatgatcggatctcccggactacccggaagtaaaggagctaccggggacatttttggagcagagaacggcgcacccggggagcaaggcctgcagggccttaccggacataagggctttctgggcgactctgggcttcctggcctcaaaggggtccatggtaaacccggtctgctcgggcccaagggggagcgcgggagcccaggtaccccgggtcaggtgggacaacctggcacacccggcagttctgggccctacgggatcaaggggaaatctggactgcccggcgcacctggatttcccggcatttctggacaccccggcaagaaaggcactaggggcaaaaagggaccccctggcagcatcgtcaagaagggcctgcccggcctcaaaggcctcccggggaatccgggactggttggattaaagggtagccccggatctccgggcgtcgccgggttgcccgcccttagtgggcctaagggtgagaagggtagcgtcggctttgttggatttccaggcattccaggactgcccgggatcccaggaactagaggactgaaagggatccccggcagcaccgggaaaatggggccctctggaagagcaggcaccccaggcgaaaagggtgaccgaggcaatccagggccagtggggattccgtcacccagacgacccatgagcaatctttggttgaagggagacaaaggctcccaaggtagcgccggctccaacggctttcccggcccaaggggagataaaggagaggctggtagacccggccctccaggactgcccggtgctccaggtcttccaggcatcattaaaggggtaagtggtaagccaggcccccccggcttcatgggaattcgcggcttgcccgggctgaagggctccagcggcatcaccgggtttcctggcatgccaggtgagtctgggtctcagggaattcggggaagcccaggtctgcctggcgcttcagggctgccagggctcaagggagataacggccagactgtcgaaatcagcggatccccaggtcctaagggacagcctggggagtcagggtttaaggggacaaagggtcgcgatggactcatagggaacataggcttccccggaaataaaggtgaggatggcaaggttggagtcagcggagacgtgggcttgcctggggcgcctggattcccaggagtggccggcatgcggggggagccaggactccctggaagctccggtcaccagggcgctatcgggcccctgggcagcccgggcctgatcggccctaaaggcccttctatcaccggagtgccggggcccgcgggattgcccggtccaaagggtgagaaggggtatcctggaatagggataggtgctccaggcaagccgggcctcaggggccagaagggcgatcggggctttcccggactgcaggggccagcgggcctaccaggagccccgggcatatctctgccctctctcatcgcgggccaacccggcgaccccggacggcccggtcttgatggcgaacgtggcaggcccggcccggctggtcctcccggtcctcctggccctagtagcaatcaaggtgatacaggtgatcccggattccctggcatcccaggccccaaaggtcctaaaggggaccaagggatcccgggcttttcagggctgccaggagagttgggcctgaagggcatgagaggagaacccggcttcatggggacaccaggaaaggtgggtcctcccggtgatcccggcttccccgggatgaaggggaaggcaggcccacgtggctcatccggattacaaggggacccagggcaaactccaaccgctgaagcagtgcaggtgcctccgggaccactcggcttgcctgggatcgatgggatccccggcctcacaggcgatccaggggcccaaggtcctgtggggctgcaagggagcaaaggactgccaggtataccaggcaaggacgggccttccggcttaccagggcctcccggggctctgggcgaccccggcctgcctggcctccagggtcccccaggcttcgagggcgcacctgggcaacagggccccttcgggatgcctggtatgccaggacagtccatgagagtaggatatacactggtgaagcactcgcagtctgagcaggtgcccccctgccccataggcatgtcccaactctgggttggatattcactcttatttgtcgaagggcaagaaaaagctcacaatcaggacttgggattcgcaggaagctgtctgccaagattcagcaccatgccatttatttactgtaacattaatgaggtgtgccattatgcgcggcgtaatgacaaatcctactggctcagtacaactgcgcctatccccatgatgcccgtatcacaaacacaaatcccccaatacatttccaggtgctccgtgtgcgaggctccctctcaggctattgcggtgcactcccaggacattaccatcccacagtgccctctgggttggcggtcgctctggattgggtatagtttcctcatgcatacagccgcaggcgcagaagggggaggtcagagcctggtcagccccgggtcctgcctcgaagatttcagagccacccctttcatcgagtgcagtggcgcaaggggcacatgtcactatttcgctaacaaatatagcttctggttgaccaccgtcgaggagagacagcagtttggggagttaccagtgtctgagacccttaaagcaggtcaactgcacacccgcgtcagcaggtgccaggtatgcatgaagtcactgtag

SEQ ID NO: 324517 - DNA, 5001 bp, Artificial Sequence
  derived and/or modified sequence
atgcaccctggcctgtggctgctgctggtgaccctgtgcctgacagaggagctggccgctgctggggagaagagctatggcaagccctgtggcggccaggactgcagcggcagctgccagtgcttccctgagaagggggcccggggccggcccggccccatcggcatccagggccccaccggcccccagggcttcaccggcagcacaggcctgagcggcctgaagggggagcggggcttccctggcctgctgggcccctacggccccaagggggacaagggccccatgggcgtgcccggcttcctgggcatcaatggcatccctggccaccctggccagcccggcccccggggccccccaggcctggatggctgcaatggcacccagggcgctgtgggcttccctggcccagatggctacccaggcctgctgggccccccaggcctgcccggccagaagggcagcaagggggaccctgtgctggcccctggcagcttcaagggcatgaagggggaccccggcctgcccggcctggatggcatcaccggcccccagggcgcccctggcttccctggagctgtgggccctgctggccccccaggcctgcagggccccccaggccccccaggccccctgggcccagatggcaacatgggcctgggcttccagggcgagaagggcgtgaagggagatgtgggcctgcccggccctgctggccccccacccagcactggagagctggagttcatgggcttccccaagggcaagaagggcagcaagggggagcccggccccaagggcttccctggcatcagcggccccccaggcttccctggcctgggcaccactggagagaagggggagaagggggagaagggcatccctggcctgcccggcccccggggccccatgggcagcgagggcgtgcagggccccccaggccagcagggcaagaagggcaccctgggcttccctggcctgaatggcttccagggcatcgagggccagaagggggacatcggcctgcccggcccagatgtgttcattgatattgatggagctgtgatcagcggcaaccctggggaccccggggtgcccggcctgcccggcctgaagggagatgagggcatccagggcctgcggggccccagcggcgtgcccggcctgcctgccctgtctggagtgcctggggccctgggcccccagggcttccctggcctgaagggggaccagggcaaccctggccgcaccaccatcggggccgccggcctgcccggcagagatggcctgcccggccccccaggccccccaggcccccccagccctgagtttgaaacagagaccctgcacaacaaggagagcggcttccctggcctgcggggggagcagggccccaagggcaacctgggcctgaagggcatcaagggggacagcggcttctgtgcctgtgatggcggcgtgcccaacacaggccccccaggagagcccggccccccaggcccctggggcctgattggcctgcccggcctgaagggggcccggggggaccggggcagcggcggggcccagggccctgctggggcccctggcctggtgggccccctgggccccagcggccccaagggcaagaagggggagcccatcctgagcaccatccagggcatgcctggggacagaggagacagcggcagccagggcttccggggcgtgattggagagcccgggaaggatggagtgcccggcctgcccggcctgcccggcctgcctggagatggcggccagggcttccctggagagaagggcctgcccggcctgcccggggagaagggccaccctggccccccaggcctgcctggaaatggcctgcccggcctgcccggcccccggggcctgcccggggacaagggcaaggatggcctgcccggccagcagggcctgcccggcagcaagggcatcaccctgccctgcatcatccctggcagctatggccccagcggcttccctggcaccccaggcttccctggccccaagggcagccggggcctgcccggcaccccaggccagcccggcagcagcggcagcaaaggagagcccggcagccctggcctggtgcacctgcctgagctgcccggcttccctggccccagaggagagaagggcctgcccggcttccctggcctgcccgggaaggatggcctgcccggcatgattggcagccctggcctgcccggcagcaagggggccactggagacatctttggagcagaaaatggagcccctggagagcagggcctgcagggcctgaccggccacaagggcttcctgggggacagcggcctgcccggcctgaagggcgtgcacggcaagccaggcctgctgggccccaagggggagcggggcagccctggcaccccaggccaggtgggccagcccggcaccccaggcagcagcggcccctacggcatcaagggcaagagcggcctgcccggggcccctggcttccctggcatcagcggccaccctgggaagaagggcacccggggcaagaagggccccccaggcagcatcgtgaagaagggcctgcccggcctgaagggcctgcccggcaaccctggcctggtgggcctgaagggcagccctggcagccctggggtggccggcctgcctgccctgagcggccccaagggggagaagggctctgtgggctttgtgggcttccctggcatccctggcctgcccggcatccctggcacccggggcctgaagggcatccctggcagcacaggcaagatgggccccagcggccgggccggcaccccaggagagaagggggaccggggcaaccctggccctgtgggcatccccagcccccggcggcccatgagcaacctgtggctgaagggggacaagggcagccagggcagcgctggcagcaatggcttccctggccccaggggggacaagggggaggccggccggcccggccccccaggcctgcccggggcccctggcctgcccggcatcatcaagggcgtgtctgggaagccaggccccccaggcttcatgggcatccggggcctgcccggcctgaagggcagcagcggcatcaccggcttccctggcatgcctggagagagcggcagccagggcatccggggcagccctggcctgcccggggccagcggcctgcccggcctgaagggggacaatggccagacagtggagatcagcggcagccctggccccaagggccagcccggggagagcggcttcaagggcaccaagggcagagatggcctgattggcaacatcggcttccctggcaacaagggggaggatggcaaggtgggcgtgtctggagatgtgggcctgcccggggcccctggcttccctggggtggccggcatgagaggagagcccggcctgcccggcagcagcggccaccagggcgccatcggccccctgggcagccctggcctgattggccccaagggccccagcatcactggagtgcccggccctgctggcctgcccggccccaagggggagaagggctacccaggcattggaattggagcccctgggaagccaggcctgcggggccagaagggggaccggggcttccctggcctgcagggccctgctggcctgcccggggcccctggcatcagcctgcccagcctgattgctggccagcccggggaccccggccggcccggcctggatggagagcggggccggcccggccctgctggccccccaggccccccaggccccagcagcaaccagggcgacaccggggaccccggcttccctggcatccctggccccaagggccccaagggggaccagggcatccctggcttcagcggcctgcctggagagctgggcctgaagggcatgagaggagagcccggcttcatgggcaccccaggcaaggtgggccccccaggggaccccggcttccctggcatgaagggcaaggccggcccccggggcagcagcggcctgcagggcgaccccggccagacccccacagctgaggccgtgcaggtgcccccaggccccctgggcctgcccggcattgatggcatccctggcctgactggagaccccggggcccagggccctgtgggcctgcagggcagcaagggcctgcccggcatccctgggaaggatggccccagcggcctgcccggccccccaggggccctgggggaccccggcctgcccggcctgcagggccccccaggctttgaaggagcccctggccagcagggccccttcggcatgcctggcatgcctggccagagcatgagggtgggctacaccctggtgaagcacagccagagcgagcaggtgcccccctgccccatcggcatgagccagctgtgggtgggctacagcctgctgtttgtggagggccaggagaaggcccacaaccaggacctgggctttgctggcagctgcctgccccgcttcagcaccatgcccttcatctactgcaacatcaatgaggtgtgccactacgccaggagaaatgacaagagctactggctgagcaccacagcccccatccccatgatgcctgtgtcccagacccagatcccccagtacatcagccgctgcagcgtgtgtgaggcccccagccaggccatcgctgtgcacagccaggacatcaccatcccccagtgccccctgggctggaggagcctgtggattggctacagcttcctgatgcacacagctgctggagctgagggcggcggccagagcctggtgtccccaggcagctgcctggaggacttccgggccacccccttcatcgagtgcagcggggcccggggcacctgccactactttgccaacaagtacagcttctggctgaccaccgtggaggagcggcagcagtttggagagctgcctgtgtctgagaccctgaaggccggccagctgcacaccagggtgagccgctgccaggtgtgcatgaagagcctgtag

SEQ ID NO: 324518 - DNA, 6086 bp, Artificial Sequence
  derived and/or modified sequence
gggccacttcgtccacctactctgttctgagtaaggaaacagcctccaagcatcagcagagcccagatgagcacgggccgcggagccgcttagcagtctcccgggacccagctccggaggagccgcaagcatgcaccctgggttgtggctgctcctggttacgttgtgcctgaccgaggaactggcagcagcgggagagaagtcttatggaaagccatgtgggggccaggactgcagtgggagctgtcagtgttttcctgagaaaggagcgagaggacgacctggaccaattggaattcaaggcccaacaggtcctcaaggattcactggctctactggtttatcgggattgaaaggagaaaggggtttcccaggccttctgggaccttatggaccaaaaggagataagggtcccatgggagttcctggctttcttggcatcaatgggattccgggccaccctggacaaccaggccccagaggcccacctggtctggatggctgtaatggaactcaaggagctgttggatttccaggccctgatggctatcctgggcttctcggaccacccgggcttcctggtcagaaaggatcaaaaggtgaccctgtccttgctccaggtagtttcaaaggaatgaagggggatcctgggctgcctggactggatggaatcactggcccacaaggagcacccggatttcctggagctgtaggacctgcaggaccaccaggattacaaggtcctccagggcctcctggtcctcttggtcctgatgggaatatggggctaggttttcaaggagagaaaggagtcaagggggatgttggcctccctggcccagcaggacctccaccatctactggagagctggaattcatgggattccccaaagggaagaaaggatccaagggtgaaccagggcctaagggttttccaggcataagtggccctccaggcttcccgggccttggaactactggagaaaagggagaaaagggagaaaagggaatccctggtttgccaggacctaggggtcccatgggttcagaaggagtccaaggccctccagggcaacagggcaagaaagggaccctgggatttcctgggcttaatggattccaaggaattgagggtcaaaagggtgacattggcctgccaggcccagatgttttcatcgatatagatggtgctgtgatctcaggtaatcctggagatcctggtgtacctggcctcccaggccttaaaggagatgaaggcatccaaggcctacgtggcccttctggtgtccctggattgccagcattatcaggtgtcccaggagccctagggcctcagggatttccagggctgaagggggaccaaggaaacccaggccgtaccacaattggagcagctggcctccctggcagagatggtttgccaggcccaccaggtccaccaggcccacctagtccagaatttgagactgaaactctacacaacaaagagtcagggttccctggtctccgaggagaacaaggtccaaaaggaaacctaggcctcaaaggaataaaaggagactcaggtttctgtgcttgtgacggtggtgttcccaacactggaccacccggggaaccaggcccacctggtccatggggtctcataggccttccaggccttaaaggagccagaggagatcgaggctctgggggtgcacagggcccagcaggggctccaggcttagttgggcctctgggtccttcaggacccaaaggaaagaagggggaaccaattctcagtacaatccaaggaatgccaggagatcggggtgattctggctcccagggcttccgtggtgtaataggagaaccaggcaaggacggagtaccaggtttaccaggtctgccaggccttccgggtgatggtggacagggcttcccaggtgaaaaggggttacctggacttcctggtgaaaaaggccatcctggtccacctggcctcccaggaaatgggttaccaggacttcctggaccccgtgggcttcctggagataaaggcaaggatggattaccgggacaacaaggccttcccggatctaagggaatcaccctgccctgtattattcctgggtcatacggtccatcaggatttccaggcactcccggattcccaggccctaaagggtctcgaggcctccctgggaccccaggccagcctgggtcaagtggaagtaaaggagagccagggagtccaggattggttcatcttcctgaattaccaggatttcctggacctcgtggggagaagggcttgcctgggtttcctgggctccctggaaaagatggcttgcctgggatgattggcagtccaggcttacctggttccaagggagccactggtgacatctttggtgctgaaaatggtgctccgggggaacaaggcctacaaggattaacagggcacaaaggatttcttggagactctggccttccaggactcaagggtgtgcacgggaagcctggcttactaggccccaaaggtgagcggggcagccctgggacaccaggacaggtgggacagccaggcaccccaggatctagtggtccatatggcatcaagggcaaatctgggctcccaggagcaccaggcttcccaggcatctcaggacatcctggaaagaaaggaacaagaggcaagaaaggtcctcctggatcaattgtaaagaaagggctgccagggctaaaaggccttcctggaaatccaggcctagtaggactgaaaggaagcccaggctctccaggggtcgctgggttgccagccctctctggacccaagggagagaaggggtctgttggattcgtaggttttccaggaataccaggtctgcctggtattcctggaacaagaggattaaaaggaattccaggatcaactggaaaaatgggaccatctggacgtgctggtactcctggtgaaaagggagacagaggcaatccggggccagtcggaatacctagtccaagacgtccaatgtcaaacctttggctcaaaggagacaaaggctctcaaggctcagccggatccaatggatttcctgggccaagaggtgacaaaggagaggctggtcgacctggaccaccaggcctacctggagctcctggcctcccaggcattatcaaaggagttagtggaaagccagggccccctggcttcatgggaatccggggcttacctggcctgaaggggtcctctgggatcacaggtttcccaggaatgccaggagaaagtggttcacaaggtatcagagggtcgcctggactcccaggagcatctggtctcccaggcctgaaaggagacaacggccagacagttgaaatttccggtagcccaggacccaagggacagcctggcgaatctggttttaaaggcacaaaaggaagagatggactaataggcaatataggcttccctggaaacaaaggtgaagatggaaaagttggtgtttctggagatgttggccttcctggagctccaggatttccaggagttgccggcatgagaggagaaccaggacttccaggttcttctggtcaccaaggggcaattgggcctctaggatcccccggattaataggacccaaaggacctagtatcaccggtgtgcctgggcctgctggtctccctggacccaaaggagaaaaaggatatccaggaattggcatcggagctccagggaagccgggcctgagagggcaaaaaggtgatcgaggtttcccaggtctccagggccctgctggtctccccggtgccccaggcatctccttgccctcactcatagcaggacagcctggtgaccccgggcgaccaggcctagatggagaacgaggccgcccaggccccgctggacccccaggtccccctgggccatcctcgaatcaaggcgacaccggagaccctggcttccctggaattcctggacctaaagggcctaagggagaccaaggaattccaggtttttctggcctccctggagagctaggactgaaaggcatgagaggtgagcctggcttcatggggactccaggcaaggttgggccacctggagacccaggatttcccggaatgaaggggaaggcagggccaagaggctcttctggcctccaaggtgatcctggacaaacaccaactgcagaagctgtccaggttcctcctggacccttgggtctaccagggatcgatggcatccctggcctcactggggaccctggggctcaaggccctgtaggcctacaaggctccaaaggtttacctggcatccccggtaaagatggccccagtgggctcccaggcccacctggggctcttggtgatcctggtctgcctggactgcaaggccctccaggatttgaaggagctccagggcagcaaggccccttcgggatgcctggaatgcctggccagagcatgagagtgggctacacgttggtaaagcacagccagtcggaacaggtgcccccgtgtcccatcgggatgagccagctgtgggtggggtacagcttactgtttgtggaggggcaagagaaagcccacaaccaggacctgggctttgctggctcctgtctgccccgcttcagcaccatgcccttcatctactgcaacatcaacgaggtgtgccactatgccaggcgcaatgataaatcttactggctctccactaccgcccctatccccatgatgcccgtcagccagacccagattccccagtacatcagccgctgctctgtgtgtgaggcaccctcgcaagccattgctgtgcacagccaggacatcaccatcccgcagtgccccctgggctggcgcagcctctggattgggtactctttcctcatgcacactgccgctggtgccgagggtggaggccagtccctggtctcacctggctcctgcctagaggactttcgggccactcctttcatcgaatgcagtggtgcccgaggcacctgccactactttgcaaacaagtacagtttctggttgaccacagtggaggagaggcagcagtttggggagttgcctgtgtctgaaacgctgaaagctgggcagctccacactcgagtcagtcgctgccaggtgtgtatgaaaagcctgtagggtggcacctgccactctgccccttgccctcccctgcccctcacaacagtcacctcacaaacctgaatggtctgaagaaggaaggcctgagcccctttgcctgtcaagttgtacattggagtctcatttgggctagactaccggacactcgtcaccccagccctcgggtccatagagatgagcccaccctgctgagatctgctgtcctgtttctgtcaagctggtgctactgtttgatttggatgattgtgtgactattcatggctacctcagaaagatttgatgggccacaactgtcttagactgctagctttctccttaccgtcttgatcggaaagctcttcctaatcgctaatcagtcatttcttcatgtacagaggtcagcacacattatttggcttaaaccagaacccagtgtttccacacttaaattctctaaccgaatattcatggatggctcaagtctgcacagagcaagtcctcactcttcaaggaggcccactgtgtctaggcaggcaagagaattgaaatgaggtgccacccagtagcccagagtgagctttagctctctctagaatgagcaagactgggccccacatggcttagagaggcttgaaggccagcagctgggttgggggtggtggtcattaatggcatatggtcctagacaaaccatctcctccttgccggctccccctccagccagagacagaggatgtggcctggttcaaagtaaagcagaggatgcaacaaatgtggccaagcctatcaaaggaaatgagaatgacagccttttttcctgggccagaagtagaggggtgggtgcgtaaggatgtgtgagttttgcttttgactccaggaacaaaaaggtaaatcccacatcccagtttctcagaagtccctgtttattccaaatgccatccagatgtgtgcaatgtggcaaactgaagctgca

SEQ ID NO: 324519 - DNA, 5001 bp, Artificial Sequence
  derived and/or modified sequence
atgcaccccggcctgtggctgctgctggtgaccctgtgcctgaccgaggaactggccgccgccggagagaagtcatatggcaaaccttgcgggggacaggactgttctgggtcctgtcagtgtttccctgagaagggcgctaggggccgtcctggaccaattgggatccaaggccccaccgggccccaggggttcaccggtagcactgggcttagcgggctcaaaggggagcgcggttttcccggcctcctgggcccgtatggaccgaaaggggataaaggccctatgggtgtgccgggattccttggaattaatggaatcccgggacacccaggacagcctggtcctcgggggccacctgggcttgatggctgcaacggcactcaaggtgccgtggggttccctgggcccgatggttatcctggcctcctcggaccgccaggcctcccgggccaaaagggcagcaagggagatcctgtcctagctcctgggtccttcaaggggatgaagggagatccaggcctgcccgggctggacgggatcacgggcccccagggcgcccctggctttccaggcgccgtcgggcctgctgggccccccggcctgcagggccctccaggaccccccggtcctctggggcccgacggcaatatggggctcgggttccaaggcgaaaagggtgttaagggagatgtgggcttgccaggccctgcaggaccccctcccagtacaggagagttggagtttatgggattccctaaaggcaagaaagggagcaaaggcgagcccggccctaaaggcttccctggaattagcggcccgcccgggttcccagggttaggaactaccggggagaaaggggagaaaggagagaaagggatccctgggctgcccggccctcgagggcccatgggctctgaaggcgttcagggtcctcccggccagcaggggaagaaaggcactctgggttttcccggactgaacggctttcagggaattgagggccagaagggagacatcggccttcctggacctgacgtatttattgacattgatggagcagtcatatctggaaaccctggcgaccctggtgtgcccgggttgcccggcctgaaaggggacgagggcatccagggcctaaggggcccctcaggagtgccaggattacctgccctgagcggcgtccccggcgccctgggcccgcagggcttccctggcctgaagggcgaccagggtaaccctggacgcactacaattggcgctgcaggccttcccggaagagacggcctcccaggccctcctggaccaccgggccctccgtcaccagaattcgagactgaaacactgcataataaggaatctggcttccccgggctgcgaggtgaacaggggccaaaaggcaacctgggacttaagggtatcaaaggcgatagtggcttttgtgcctgtgacggaggcgtacctaacaccgggccccctggggagcccggaccccccggtccatggggtctgatcggactgccgggactcaagggggcacgcggcgaccgggggtccggcggtgctcagggacctgccggtgccccaggactggtgggcccgcttggcccatcagggcctaaagggaaaaaaggggagcctattttgtctacaatacagggcatgcccggagaccgtggtgactcagggtctcaaggattccgcggcgtgattggagagcccggaaaggacggggtgccagggctccccggtctgccagggttgccaggtgatggagggcaaggctttcccggcgaaaagggattgccaggactgcccggtgagaaggggcatcctggtccgcctggcctgcccggaaacggcctccctggactgccaggcccacgaggactgcctggagacaaagggaaggatggacttccggggcagcaaggactgcccggcagcaagggaataacccttccgtgtattattccgggcagttatgggcctagtgggttcccaggcacaccagggtttcccggcccaaaaggttcccggggactcccagggaccccaggacagcccggatcaagcgggagtaagggggaacctggcagcccgggtttggtgcatctgccggagctcccagggttcccggggccacgaggcgaaaagggcctgccagggttcccaggccttccaggaaaagacggacttccaggcatgatagggtcacctgggttgccagggtctaaaggagccacgggagacatttttggcgcggagaacggcgccccaggagagcaaggactccaaggtctgaccggacataagggttttttaggggacagtgggctacccggccttaagggggtgcatgggaagcccgggctgctcggccctaagggagaaaggggcagtccggggacacccggccaggttggccagcctggcacacctggatccagcggcccctacggaatcaaaggaaagtcagggctgcctggtgcacccggctttcccggcatcagcgggcaccccggcaagaaagggacaagaggaaaaaagggccccccaggaagcatcgttaaaaagggattgcccggcctcaagggtctgccgggcaatcctgggttggttggcctcaaggggagccctgggtcaccaggcgtggccggactgcccgctctgtctggcccgaagggcgagaagggcagcgttgggttcgtcggatttccaggaattcccggcttgccaggcatacccggcacccgcggcctgaagggtattcccggcagtaccggaaagatggggccttccggaagggctggcacaccaggggagaaaggagataggggcaaccctggtcccgtagggattcccagtccccggagaccaatgtcaaacttgtggcttaagggcgataagggatcacagggaagcgctggaagtaacggcttcccgggaccacgcggagacaaaggggaagccgggcgccccggcccgccaggcctgccaggtgcccctggcctccctgggatcatcaaaggcgtgtccggaaagcctgggcctcctgggttcatgggtattcgaggcttgcctggtttgaaggggtcctccgggatcacgggcttccccggtatgccaggtgagtccggttcccaggggatcagggggagcccggggctccctggcgctagcggccttcctggactgaaaggggacaacggacagaccgttgagatctctggctcccccgggcccaaggggcagcccggggaatctggcttcaagggcacaaagggcagagatgggctgatcggaaatattggtttccccgggaacaagggcgaggacgggaaagtgggagtgtcaggagacgtcggcctacccggcgcgcctgggttccccggggtcgctggcatgaggggagagcccggcctgccaggcagctccggccaccaaggcgcaatcggcccgctgggctcccctggattgattggaccgaagggccccagtatcaccggtgttccagggcctgcaggcctgcctgggcccaagggcgagaagggttatccaggcattgggattggcgcccccgggaagcctggccttcgcgggcaaaagggcgacagggggttccccgggcttcaaggtcccgcagggctgccaggcgctcctggaatctctcttccaagtcttatagctggacagccaggtgaccccggccgcccaggcctagacggagaacgcgggaggccaggaccagctgggcccccgggtcccccggggccaagtagtaaccagggcgatacgggcgaccccggcttccctgggatcccaggccccaagggcccaaagggggatcagggaatcccaggatttagcgggcttcctggggaattgggtctcaaaggaatgagaggcgagccaggcttcatggggacccctgggaaggtgggcccccccggcgatccagggttcccagggatgaagggaaaagccggccctagaggatcctccgggctgcagggtgacccaggccagactcctaccgccgaggccgtacaggtgcctcctggacctctaggcctgccaggaatcgatggaatccccggactgaccggtgatcctggtgcccaaggcccagtgggtttgcaaggctccaaggggctgcctgggataccgggaaaggatggcccctctgggctacctgggcctcccggcgccctcggcgatccgggcctcccaggcctgcaggggccacccgggtttgaaggtgcccctgggcagcagggtccttttggtatgcccggcatgcccgggcaatccatgcgcgtaggttatacacttgtcaaacattcccagtctgaacaggtccccccctgtccaattgggatgagccagctctgggtgggctacagtttgctcttcgttgaaggtcaagagaaggctcacaatcaggacctaggctttgccggatcatgcctgcctcggttcagcactatgcccttcatctactgcaatattaacgaagtttgtcattacgccaggcgcaacgataagtcctattggctcagtaccacagcgcctattcccatgatgcccgtttctcagacgcagatcccacagtatatctctcggtgctcggtgtgtgaggccccaagccaggccatcgcagtgcacagtcaggatatcaccatcccccagtgccctctcgggtggagatccctgtggataggatacagtttcttgatgcacacggctgctggcgcagagggaggtggccagagtctcgtgagtcctgggtcgtgcttggaagacttccgcgctacacctttcattgaatgttctggcgcccgaggaacctgtcactatttcgccaataaatactctttttggctaaccaccgtggaggagcgccagcaatttggcgagctcccagtgtctgaaacactcaaggccggacaactacatactcgcgtgagtcgctgtcaggtttgcatgaaatcattatag

SEQ ID NO: 324520 - DNA, 5000 bp, Artificial Sequence
  derived and/or modified sequence
atgcaccccggactgtggctactactagtgactctgtgtcttacggaggaattagctgcagccggagaaaaaagctacggaaaaccatgcggtggtcaggactgttccggctcatgtcaatgcttccccgaaaaaggcgcacggggaaggcctggacccatcggcatccagggtcccactggaccacaggggttcacggggtctactgggttatctggtctcaaaggagaacgcggatttcccggtctcttggggccttatggtcccaaaggtgataagggacctatgggagtaccaggatttttaggaatcaacggaattccagggcacccaggccagccagggccaagaggccctcctgggttagacggctgcaacggcacgcagggcgctgtaggtttccccggacccgatggctaccctgggttattggggccaccaggactgccaggccagaaaggcagtaaaggcgacccagtgctggccccaggttctttcaagggcatgaagggcgatcccggattgcccggtctggacgggatcactggaccacagggggctcctggattccctggagcagtgggacccgctgggccacctgggctgcaggggcctccaggccctccaggacctctgggccctgacgggaacatgggactgggattccagggggagaagggagtaaaaggagacgtggggctcccaggccctgcgggtccacccccatctacaggcgaattagagtttatgggcttccccaaaggaaagaaggggagcaaaggagaacccggtccaaagggttttccaggaatttcaggccctcctgggttcccaggcctgggcaccaccggcgagaaaggcgagaagggggagaaagggatccccggacttcccggacctcgcggacctatgggctcagagggcgtgcagggacccccaggccaacaaggcaagaaaggcaccttgggctttccgggactcaacggtttccagggaatcgagggacagaaaggtgacattggtctgccaggacccgacgtctttatcgatatagacggggctgtgatttcaggaaacccgggagatcccggtgtgccaggcctcccgggattaaaaggtgatgaggggatccagggattgcggggaccatctggggttcctggcttacccgcactgagtggtgtgccaggcgcacttggaccacagggttttcccggactaaagggcgatcaaggcaatccgggtaggactaccattggggctgcagggttaccaggtagagacggcctgcccggaccacccggaccacctggacccccttcacctgaatttgaaaccgagactctacataacaaggaatctggctttcccggactccggggagaacagggtccaaaaggaaacttgggactaaaaggtattaagggggacagtggtttctgcgcttgcgacggtggagttcctaacacgggccctcccggtgagcctggccctccagggccatggggactgatcggtctgccaggcctgaagggtgctcgaggagacagggggtctggaggcgcacagggccctgctggggctcctggcctggtggggccactgggtccgagcgggcctaaaggcaagaaaggggagcctatattgtcaaccattcagggtatgcccggtgaccgcggagacagtggctcacaggggtttcgcggtgtgattggcgagcccggtaaagacggcgtaccaggcctgcccggtctgcctggcctgcctggtgatggcggtcaggggtttcccggtgagaaagggttgcccggactgccaggagagaagggacaccctggcccacctggcttgccaggaaacgggctccctggactccccggacccaggggactcccaggcgataaaggcaaggacggcctgccgggtcagcaggggcttcccggtagtaaaggaatcaccttgccctgcattattcctggtagttatggcccatcaggattcccgggtacccccggatttcccggacccaaggggtcacgcggactccccggaacaccaggtcagccaggcagctctgggtcaaaaggagagccgggaagtccgggattagttcaccttcctgaactgcccggttttccaggccctcgcggagaaaaagggcttcccggttttccaggtctgcctggcaaggacggtctcccaggcatgattggatcgcccggactgcctggctccaagggagcaactggggatattttcggcgctgagaacggagctcctggagagcagggactgcagggtttgacaggccacaagggctttctcggagactcagggctgcctgggttgaagggcgttcacggtaagccgggacttctcggcccaaaaggagaaagaggttccccgggtacacctgggcaagtaggacaaccaggcactccgggatctagcggtccttatggtattaagggaaagtccggattgcctggggctccgggatttcctggtatttctgggcatccgggtaagaagggaactcgcggaaagaaagggccaccgggaagcatcgtgaagaaaggcctgcctgggctcaaagggctccccggtaaccccggactcgtcggcctcaagggcagtccaggtagccccggtgtggctggccttccggcattgtctggccctaagggtgagaaggggagcgtggggttcgtcggcttccctgggatccccggattaccaggaattcctggaactagaggcctcaagggtatcccaggctcaaccggaaagatgggcccatccggccgagccggaactcccggagagaaaggggacaggggcaatccagggccagtgggaatcccaagcccgaggagaccgatgagcaacctttggctcaaaggggacaagggttcacagggctcggctggctccaatggctttccaggccctagaggcgacaaaggagaagccggtaggcccggtcctccgggtcttcccggtgcccctgggctccctggaatcatcaagggggtgtcagggaagcccggtccccctggcttcatgggcatccgcggactgcctggactcaagggatcgagtggcataaccggcttccccggaatgccaggagaatctggctcacaaggaatacggggatctcctggactgcctggagcctccggactgcctggcctgaagggagacaacggccagacagtggaaatcagcggatcccctggacccaaggggcagccaggggagagcgggttcaaaggaactaaggggcgagacgggctgattggtaatatcggcttcccgggtaataagggcgaggatggtaaagtgggggtgagcggggatgtcggcttgccaggagcaccaggattcccgggagtcgccggaatgcgcggtgaacccggtcttcccggtagctctggccaccagggagctatcggccctctcgggtccccaggattaattggtccaaagggacctagtattaccggggtaccagggccagccggattacctggacctaagggcgagaaaggctacccaggtatcggaatcggagctccaggcaagcccggtctgcgtggacaaaaaggggacagaggatttccgggactgcaaggtccggcaggactgccaggggctcccggtattagcttaccttccttgatcgccggacagcccggtgatcccggtcggccaggtctggacggagagcgcggacgtccaggtcctgccggtcccccaggccctcccggaccttcaagtaatcagggtgatacgggggatcccggattcccgggtatcccaggccctaagggccctaagggtgaccagggaatccccggttttagtggactgcctggggaactcggcctgaagggaatgaggggggaacctggcttcatgggaacccctgggaaggtgggtcctcccggtgatccaggcttccctggtatgaaaggtaaggctgggccaagaggttcttccggcctgcaaggcgatccgggtcagacccccaccgccgaagctgtgcaggttcccccagggccactgggacttcctgggattgacgggatcccaggcctgactggcgatccgggagcacagggccctgtgggcctgcaaggatccaaaggccttcccggtattccagggaaagacggcccatctggtctaccaggtccacccggtgccctgggcgatcctgggttgcctggactccaagggccacccggttttgaaggtgcccctggccagcagggaccattcggtatgcccggtatgcccggtcagagtatgcgggtcgggtacacattggttaaacactctcagagtgagcaggtacctccttgtcccattggcatgtcccagctgtgggttggttactctctgttgttcgtcgaaggtcaggaaaaggcccacaatcaagatttggggttcgctgggtcttgcctaccccgtttcagtacaatgcctttcatttattgcaatattaatgaggtgtgtcattatgccaggcggaacgacaaatcctattggctctccactaccgctcctatccctatgatgccggtgagtcaaacccaaatcccccagtacatcagcagatgctcagtgtgtgaggctccatctcaggccatcgccgtgcactcacaggacattacgatacctcagtgccctctcgggtggaggtccctgtggatcggctatagtttcctcatgcatacagccgcaggcgctgaggggggaggtcagagtctagtgtcacctggctcatgcctagaggactttagggctacgcctttcatcgagtgctctggcgctagaggtacgtgccactattttgccaataagtacagcttttggttgacaactgtagaagaaagacagcagttcggagaactaccagtgtctgagaccctaaaggcaggccagctgcatactagagtttcacggtgtcaagtttgtatgaaatccttgta

SEQ ID NO: 324521 - DNA, 5073 bp, Artificial Sequence
  derived and/or modified sequence
atgcaccccggcctgtggctgctgctggtgaccctgtgcctgaccgaggagctggccgccgccggcgagaagagctacggcaagccctgcggcggccaggactgcagcggcagctgccagtgcttccccgagaagggcgccagaggcagacccggccccatcggcatccagggccccaccggcccccagggcttcaccggcagcaccggcctgagcggcctgaagggcgagagaggcttccccggcctgctgggcccctacggccccaagggcgacaagggccccatgggcgtgcccggcttcctgggcatcaacggcatccccggccaccccggccagcccggccccagaggcccccccggcctggacggctgcaacggcacccagggcgccgtgggcttccccggccccgacggctaccccggcctgctgggcccccccggcctgcccggccagaagggcagcaagggcgaccccgtgctggcccccggcagcttcaagggcatgaagggcgaccccggcctgcccggcctggacggcatcaccggcccccagggcgcccccggcttccccggcgccgtgggccccgccggcccccccggcctgcagggcccccccggcccccccggccccctgggccccgacggcaacatgggcctgggcttccagggcgagaagggcgtgaagggcgacgtgggcctgcccggccccgccggccccccccccagcaccggcgagctggagttcatgggcttccccaagggcaagaagggcagcaagggcgagcccggccccaagggcttccccggcatcagcggcccccccggcttccccggcctgggcaccaccggcgagaagggcgagaagggcgagaagggcatccccggcctgcccggccccagaggccccatgggcagcgagggcgtgcagggcccccccggccagcagggcaagaagggcaccctgggcttccccggcctgaacggcttccagggcatcgagggccagaagggcgacatcggcctgcccggccccgacgtgttcatcgacatcgacggcgccgtgatcagcggcaaccccggcgaccccggcgtgcccggcctgcccggcctgaagggcgacgagggcatccagggcctgagaggccccagcggcgtgcccggcctgcccgccctgagcggcgtgcccggcgccctgggcccccagggcttccccggcctgaagggcgaccagggcaaccccggcagaaccaccatcggcgccgccggcctgcccggcagagacggcctgcccggcccccccggcccccccggcccccccagccccgagttcgagaccgagaccctgcacaacaaggagagcggcttccccggcctgagaggcgagcagggccccaagggcaacctgggcctgaagggcatcaagggcgacagcggcttctgcgcctgcgacggcggcgtgcccaacaccggcccccccggcgagcccggcccccccggcccctggggcctgatcggcctgcccggcctgaagggcgccagaggcgacagaggcagcggcggcgcccagggccccgccggcgcccccggcctggtgggccccctgggccccagcggccccaagggcaagaagggcgagcccatcctgagcaccatccagggcatgcccggcgacagaggcgacagcggcagccagggcttcagaggcgtgatcggcgagcccggcaaggacggcgtgcccggcctgcccggcctgcccggcctgcccggcgacggcggccagggcttccccggcgagaagggcctgcccggcctgcccggcgagaagggccaccccggcccccccggcctgcccggcaacggcctgcccggcctgcccggccccagaggcctgcccggcgacaagggcaaggacggcctgcccggccagcagggcctgcccggcagcaagggcatcaccctgccctgcatcatccccggcagctacggccccagcggcttccccggcacccccggcttccccggccccaagggcagcagaggcctgcccggcacccccggccagcccggcagcagcggcagcaagggcgagcccggcagccccggcctggtgcacctgcccgagctgcccggcttccccggccccagaggcgagaagggcctgcccggcttccccggcctgcccggcaaggacggcctgcccggcatgatcggcagccccggcctgcccggcagcaagggcgccaccggcgacatcttcggcgccgagaacggcgcccccggcgagcagggcctgcagggcctgaccggccacaagggcttcctgggcgacagcggcctgcccggcctgaagggcgtgcacggcaagcccggcctgctgggccccaagggcgagagaggcagccccggcacccccggccaggtgggccagcccggcacccccggcagcagcggcccctacggcatcaagggcaagagcggcctgcccggcgcccccggcttccccggcatcagcggccaccccggcaagaagggcaccagaggcaagaagggcccccccggcagcatcgtgaagaagggcctgcccggcctgaagggcctgcccggcaaccccggcctggtgggcctgaagggcagccccggcagccccggcgtggccggcctgcccgccctgagcggccccaagggcgagaagggcagcgtgggcttcgtgggcttccccggcatccccggcctgcccggcatccccggcaccagaggcctgaagggcatccccggcagcaccggcaagatgggccccagcggcagagccggcacccccggcgagaagggcgacagaggcaaccccggccccgtgggcatccccagccccagaagacccatgagcaacctgtggctgaagggcgacaagggcagccagggcagcgccggcagcaacggcttccccggccccagaggcgacaagggcgaggccggcagacccggcccccccggcctgcccggcgcccccggcctgcccggcatcatcaagggcgtgagcggcaagcccggcccccccggcttcatgggcatcagaggcctgcccggcctgaagggcagcagcggcatcaccggcttccccggcatgcccggcgagagcggcagccagggcatcagaggcagccccggcctgcccggcgccagcggcctgcccggcctgaagggcgacaacggccagaccgtggagatcagcggcagccccggccccaagggccagcccggcgagagcggcttcaagggcaccaagggcagagacggcctgatcggcaacatcggcttccccggcaacaagggcgaggacggcaaggtgggcgtgagcggcgacgtgggcctgcccggcgcccccggcttccccggcgtggccggcatgagaggcgagcccggcctgcccggcagcagcggccaccagggcgccatcggccccctgggcagccccggcctgatcggccccaagggcttccccggcttccccggcctgcacggcctgaacggcctgcccggcaccaagggcacccacggcacccccggccccagcatcaccggcgtgcccggccccgccggcctgcccggccccaagggcgagaagggctaccccggcatcggcatcggcgcccccggcaagcccggcctgagaggccagaagggcgacagaggcttccccggcctgcagggccccgccggcctgcccggcgcccccggcatcagcctgcccagcctgatcgccggccagcccggcgaccccggcagacccggcctggacggcgagagaggcagacccggccccgccggcccccccggcccccccggccccagcagcaaccagggcgacaccggcgaccccggcttccccggcatccccggccccaagggccccaagggcgaccagggcatccccggcttcagcggcctgcccggcgagctgggcctgaagggcatgagaggcgagcccggcttcatgggcacccccggcaaggtgggcccccccggcgaccccggcttccccggcatgaagggcaaggccggccccagaggcagcagcggcctgcagggcgaccccggccagacccccaccgccgaggccgtgcaggtgccccccggccccctgggcctgcccggcatcgacggcatccccggcctgaccggcgaccccggcgcccagggccccgtgggcctgcagggcagcaagggcctgcccggcatccccggcaaggacggccccagcggcctgcccggcccccccggcgccctgggcgaccccggcctgcccggcctgcagggcccccccggcttcgagggcgcccccggccagcagggccccttcggcatgcccggcatgcccggccagagcatgagagtgggctacaccctggtgaagcacagccagagcgagcaggtgcccccctgccccatcggcatgagccagctgtgggtgggctacagcctgctgttcgtggagggccaggagaaggcccacaaccaggacctgggcttcgccggcagctgcctgcccagattcagcaccatgcccttcatctactgcaacatcaacgaggtgtgccactacgccagaagaaacgacaagagctactggctgagcaccaccgcccccatccccatgatgcccgtgagccagacccagatcccccagtacatcagcagatgcagcgtgtgcgaggcccccagccaggccatcgccgtgcacagccaggacatcaccatcccccagtgccccctgggctggagaagcctgtggatcggctacagcttcctgatgcacaccgccgccggcgccgagggcggcggccagagcctggtgagccccggcagctgcctggaggacttcagagccacccccttcatcgagtgcagcggcgccagaggcacctgccactacttcgccaacaagtacagcttctggctgaccaccgtggaggagagacagcagttcggcgagctgcccgtgagcgagaccctgaaggccggccagctgcacaccagagtgagcagatgccaggtgtgcatgaagagcctgtag

SEQ ID NO: 324522 - DNA, 5076 bp, Artificial Sequence
  derived and/or modified sequence
atgctgatcaacaagctgtggctgctgctggtgaccctgtgcctgaccgaggagctggccgccgccggcgagaagagctacggcaagccctgcggcggccaggactgcagcggcagctgccagtgcttccccgagaagggcgccagaggcagacccggccccatcggcatccagggccccaccggcccccagggcttcaccggcagcaccggcctgagcggcctgaagggcgagagaggcttccccggcctgctgggcccctacggccccaagggcgacaagggccccatgggcgtgcccggcttcctgggcatcaacggcatccccggccaccccggccagcccggccccagaggcccccccggcctggacggctgcaacggcacccagggcgccgtgggcttccccggccccgacggctaccccggcctgctgggcccccccggcctgcccggccagaagggcagcaagggcgaccccgtgctggcccccggcagcttcaagggcatgaagggcgaccccggcctgcccggcctggacggcatcaccggcccccagggcgcccccggcttccccggcgccgtgggccccgccggcccccccggcctgcagggcccccccggcccccccggccccctgggccccgacggcaacatgggcctgggcttccagggcgagaagggcgtgaagggcgacgtgggcctgcccggccccgccggccccccccccagcaccggcgagctggagttcatgggcttccccaagggcaagaagggcagcaagggcgagcccggccccaagggcttccccggcatcagcggcccccccggcttccccggcctgggcaccaccggcgagaagggcgagaagggcgagaagggcatccccggcctgcccggccccagaggccccatgggcagcgagggcgtgcagggcccccccggccagcagggcaagaagggcaccctgggcttccccggcctgaacggcttccagggcatcgagggccagaagggcgacatcggcctgcccggccccgacgtgttcatcgacatcgacggcgccgtgatcagcggcaaccccggcgaccccggcgtgcccggcctgcccggcctgaagggcgacgagggcatccagggcctgagaggccccagcggcgtgcccggcctgcccgccctgagcggcgtgcccggcgccctgggcccccagggcttccccggcctgaagggcgaccagggcaaccccggcagaaccaccatcggcgccgccggcctgcccggcagagacggcctgcccggcccccccggcccccccggcccccccagccccgagttcgagaccgagaccctgcacaacaaggagagcggcttccccggcctgagaggcgagcagggccccaagggcaacctgggcctgaagggcatcaagggcgacagcggcttctgcgcctgcgacggcggcgtgcccaacaccggcccccccggcgagcccggcccccccggcccctggggcctgatcggcctgcccggcctgaagggcgccagaggcgacagaggcagcggcggcgcccagggccccgccggcgcccccggcctggtgggccccctgggccccagcggccccaagggcaagaagggcgagcccatcctgagcaccatccagggcatgcccggcgacagaggcgacagcggcagccagggcttcagaggcgtgatcggcgagcccggcaaggacggcgtgcccggcctgcccggcctgcccggcctgcccggcgacggcggccagggcttccccggcgagaagggcctgcccggcctgcccggcgagaagggccaccccggcccccccggcctgcccggcaacggcctgcccggcctgcccggccccagaggcctgcccggcgacaagggcaaggacggcctgcccggccagcagggcctgcccggcagcaagggcatcaccctgccctgcatcatccccggcagctacggccccagcggcttccccggcacccccggcttccccggccccaagggcagcagaggcctgcccggcacccccggccagcccggcagcagcggcagcaagggcgagcccggcagccccggcctggtgcacctgcccgagctgcccggcttccccggccccagaggcgagaagggcctgcccggcttccccggcctgcccggcaaggacggcctgcccggcatgatcggcagccccggcctgcccggcagcaagggcgccaccggcgacatcttcggcgccgagaacggcgcccccggcgagcagggcctgcagggcctgaccggccacaagggcttcctgggcgacagcggcctgcccggcctgaagggcgtgcacggcaagcccggcctgctgggccccaagggcgagagaggcagccccggcacccccggccaggtgggccagcccggcacccccggcagcagcggcccctacggcatcaagggcaagagcggcctgcccggcgcccccggcttccccggcatcagcggccaccccggcaagaagggcaccagaggcaagaagggcccccccggcagcatcgtgaagaagggcctgcccggcctgaagggcctgcccggcaaccccggcctggtgggcctgaagggcagccccggcagccccggcgtggccggcctgcccgccctgagcggccccaagggcgagaagggcagcgtgggcttcgtgggcttccccggcatccccggcctgcccggcatccccggcaccagaggcctgaagggcatccccggcagcaccggcaagatgggccccagcggcagagccggcacccccggcgagaagggcgacagaggcaaccccggccccgtgggcatccccagccccagaagacccatgagcaacctgtggctgaagggcgacaagggcagccagggcagcgccggcagcaacggcttccccggccccagaggcgacaagggcgaggccggcagacccggcccccccggcctgcccggcgcccccggcctgcccggcatcatcaagggcgtgagcggcaagcccggcccccccggcttcatgggcatcagaggcctgcccggcctgaagggcagcagcggcatcaccggcttccccggcatgcccggcgagagcggcagccagggcatcagaggcagccccggcctgcccggcgccagcggcctgcccggcctgaagggcgacaacggccagaccgtggagatcagcggcagccccggccccaagggccagcccggcgagagcggcttcaagggcaccaagggcagagacggcctgatcggcaacatcggcttccccggcaacaagggcgaggacggcaaggtgggcgtgagcggcgacgtgggcctgcccggcgcccccggcttccccggcgtggccggcatgagaggcgagcccggcctgcccggcagcagcggccaccagggcgccatcggccccctgggcagccccggcctgatcggccccaagggcttccccggcttccccggcctgcacggcctgaacggcctgcccggcaccaagggcacccacggcacccccggccccagcatcaccggcgtgcccggccccgccggcctgcccggccccaagggcgagaagggctaccccggcatcggcatcggcgcccccggcaagcccggcctgagaggccagaagggcgacagaggcttccccggcctgcagggccccgccggcctgcccggcgcccccggcatcagcctgcccagcctgatcgccggccagcccggcgaccccggcagacccggcctggacggcgagagaggcagacccggccccgccggcccccccggcccccccggccccagcagcaaccagggcgacaccggcgaccccggcttccccggcatccccggccccaagggccccaagggcgaccagggcatccccggcttcagcggcctgcccggcgagctgggcctgaagggcatgagaggcgagcccggcttcatgggcacccccggcaaggtgggcccccccggcgaccccggcttccccggcatgaagggcaaggccggccccagaggcagcagcggcctgcagggcgaccccggccagacccccaccgccgaggccgtgcaggtgccccccggccccctgggcctgcccggcatcgacggcatccccggcctgaccggcgaccccggcgcccagggccccgtgggcctgcagggcagcaagggcctgcccggcatccccggcaaggacggccccagcggcctgcccggcccccccggcgccctgggcgaccccggcctgcccggcctgcagggcccccccggcttcgagggcgcccccggccagcagggccccttcggcatgcccggcatgcccggccagagcatgagagtgggctacaccctggtgaagcacagccagagcgagcaggtgcccccctgccccatcggcatgagccagctgtgggtgggctacagcctgctgttcgtggagggccaggagaaggcccacaaccaggacctgggcttcgccggcagctgcctgcccagattcagcaccatgcccttcatctactgcaacatcaacgaggtgtgccactacgccagaagaaacgacaagagctactggctgagcaccaccgcccccatccccatgatgcccgtgagccagacccagatcccccagtacatcagcagatgcagcgtgtgcgaggcccccagccaggccatcgccgtgcacagccaggacatcaccatcccccagtgccccctgggctggagaagcctgtggatcggctacagcttcctgatgcacaccgccgccggcgccgagggcggcggccagagcctggtgagccccggcagctgcctggaggacttcagagccacccccttcatcgagtgcagcggcgccagaggcacctgccactacttcgccaacaagtacagcttctggctgaccaccgtggaggagagacagcagttcggcgagctgcccgtgagcgagaccctgaaggccggccagctgcacaccagagtgagcagatgccaggtgtgcatgaagagcctgtag

SEQ ID NO: 324523 - DNA, 5076 bp, Artificial Sequence
  derived and/or modified sequence
atgcaccccggcctgtggctgctgctggtgaccctgtgcctgaccgaggagctggccgccgccggcgagaagagctacggcaagccctgcggcggccaggactgcagcggcagctgccagtgcttccccgagaagggcgccagaggcagacccggccccatcggcatccagggccccaccggcccccagggcttcaccggcagcaccggcctgagcggcctgaagggcgagagaggcttccccggcctgctgggcccctacggccccaagggcgacaagaagttcagcatccccgtgctgctgatctacgacagcagacccggccaccccggccagcccggccccagaggcccccccggcctggacggctgcaacggcacccagggcgccgtgggcttccccggccccgacggctaccccggcctgctgggcccccccggcctgcccggccagaagggcagcaagggcgaccccgtgctggcccccggcagcttcaagggcatgaaggccttcatccccctgttcgagagcatcagaggcccccagggcgcccccggcttccccggcgccgtgggccccgccggcccccccggcctgcagcagggccagccccccttcctggaggtgctgttcccccactggcacgagggcgaggaggccaaggtgagagacagcctgttcggcgacgtgggcctgcccggccccgccggccccccccccagcaccggcgagctggagttcatgggcttccccaagggcaagaagggcagcaagggcgagcccggccccaagggcttccccggcatcagcggcccccccggcttccccggcctgggcaccaccggcgagaagggcgagaagggcgagaagggcatccccggcctgcccggccccagaaccctgctgtgcagccacaccttccacctggtggtgaccatgttcctgagccagggcaagaagggcaccctgggcttccccggcctgaacggcttccagggcatcgagggccagaagggcgacatcggcctgcccggccccgacgtgttcatcgacatcgacggcgccgtgatcagcggcaaccccggcgaccccggcgtgcccggcctgcccggcctgaagggcgacgagggcatccagggcctgagaggccccagcggcgtgcccggcctgcccgccctgagcggcgtgcccggcgccctgggcccccagggcttccccggcctgaagggcgaccagggcaaccccggcagaaccaccatcggcgccgccggcctgcccggcagagacggcctgcccggcccccccggcccccccggcccccccagccccgagttcgagaccgagaccctgcacaacaaggagagcggcttccccggcctgagaggcgagcagggccccaagggcaacctgggcctgaagggcatcaagggcgacagcggcttctgcgcctgcgacggcggcgtgcccaacaccggcccccccggcgagcccggcccccccggcccctggggcctgatcggcctgcccggcctgaagggcgccagaggcgacagaggcagcggcggcgcccagggccccgccggcgcccccggcctggtgggccccctgggccccagcggccccaagggcaagaagggcgagcccatcctgagcaccatccagggcatgcccggcgacagaggcgacagcggcagccagggcttcagaggcgtgatcggcgagcccggcaaggacggcgtgcccggcctgcccggcctgcccggcctgcccggcgacggcggccagggcttccccggcgagaagggcctgcccggcctgcccggcgagaagggccaccccggcccccccggcctgcccggcaacggcctgcccggcctgcccggccccagaggcctgcccggcgacaagggcaaggacggcctgcccggccagcagggcctgcccggcagcaagggcatcaccctgccctgcatcatccccggcagctacggccccagcggcttccccggcacccccggcttccccggccccaagggcagcagaggcctgcccggcacccccggccagcccggcagcagcggcagcaagggcgagcccggcagccccggcctggtgcacctgcccgagctgcccggcttccccggccccagaggcgagaagggcctgcccggcttccccggcctgcccggcaaggacggcctgcccggcatgatcggcagccccggcctgcccggcagcaagggcgccaccggcgacatcttcggcgccgagaacggcgcccccggcgagcagggcctgcagggcctgaccggccacaagggcttcctgggcgacagcggcctgcccggcctgaagggcgtgcacggcaagcccggcctgctgggccccaagggcgagagaggcagccccggcacccccggccaggtgggccagcccggcacccccggcagcagcggcccctacggcatcaagggcaagagcggcctgcccggcgcccccggcttccccggcatcagcggccaccccggcaagaagggcaccagaggcaagaagggcccccccggcagcatcgtgaagaagggcctgcccggcctgaagggcctgcccggcaaccccggcctggtgggcctgaagggcagccccggcagccccggcgtggccggcctgcccgccctgagcggccccaagggcgagaagggcagcgtgggcttcgtgggcttccccggcatccccggcctgcccggcatccccggcaccagaggcctgaagggcatccccggcagcaccggcaagatgggccccagcggcagagccggcacccccggcgagaagggcgacagaggcaaccccggccccgtgggcatccccagccccagaagacccatgagcaacctgtggctgaagggcgacaagggcagccagggcagcgccggcagcaacggcttccccggccccagaggcgacaagggcgaggccggcagacccggcccccccggcctgcccggcgcccccggcctgcccggcatcatcaagggcgtgagcggcaagcccggcccccccggcttcatgggcatcagaggcctgcccggcctgaagggcagcagcggcatcaccggcttccccggcatgcccggcgagagcggcagccagggcatcagaggcagccccggcctgcccggcgccagcggcctgcccggcctgaagggcgacaacggccagaccgtggagatcagcggcagccccggccccaagggccagcccggcgagagcggcttcaagggcaccaagggcagagacggcctgatcggcaacatcggcttccccggcaacaagggcgaggacggcaaggtgggcgtgagcggcgacgtgggcctgcccggcgcccccggcttccccggcgtggccggcatgagaggcgagcccggcctgcccggcagcagcggccaccagggcgccatcggccccctgggcagccccggcctgatcggccccaagggcttccccggcttccccggcctgcacggcctgaacggcctgcccggcaccaagggcacccacggcacccccggccccagcatcaccggcgtgcccggccccgccggcctgcccggccccaagggcgagaagggctaccccggcatcggcatcggcgcccccggcaagcccggcctgagaggccagaagggcgacagaggcttccccggcctgcagggccccgccggcctgcccggcgcccccggcatcagcctgcccagcctgatcgccggccagcccggcgaccccggcagacccggcctggacggcgagagaggcagacccggccccgccggcccccccggcccccccggccccagcagcaaccagggcgacaccggcgaccccggcttccccggcatccccggccccaagggccccaagggcgaccagggcatccccggcttcagcggcctgcccggcgagctgggcctgaagggcatgagaggcgagcccggcttcatgggcacccccggcaaggtgggcccccccggcgaccccggcttccccggcatgaagggcaaggccggccccagaggcagcagcggcctgcagggcgaccccggccagacccccaccgccgaggccgtgcaggtgccccccggccccctgggcctgcccggcatcgacggcatccccggcctgaccggcgaccccggcgcccagggccccgtgggcctgcagggcagcaagggcctgcccggcatccccggcaaggacggccccagcggcctgcccggcccccccggcgccctgggcgaccccggcctgcccggcctgcagggcccccccggcttcgagggcgcccccggccagcagggccccttcggcatgcccggcatgcccggccagagcatgagagtgggctacaccctggtgaagcacagccagagcgagcaggtgcccccctgccccatcggcatgagccagctgtgggtgggctacagcctgctgttcgtggagggccaggagaaggcccacaaccaggacctgggcttcgccggcagctgcctgcccagattcagcaccatgcccttcatctactgcaacatcaacgaggtgtgccactacgccagaagaaacgacaagagctactggctgagcaccaccgcccccatccccatgatgcccgtgagccagacccagatcccccagtacatcagcagatgcagcgtgtgcgaggcccccagccaggccatcgccgtgcacagccaggacatcaccatcccccagtgccccctgggctggagaagcctgtggatcggctacagcttcctgatgcacaccgccgccggcgccgagggcggcggccagagcctggtgagccccggcagctgcctggaggacttcagagccacccccttcatcgagtgcagcggcgccagaggcacctgccactacttcgccaacaagtacagcttctggctgaccaccgtggaggagagacagcagttcggcgagctgcccgtgagcgagaccctgaaggccggccagctgcacaccagagtgagcagatgccaggtgtgcatgaagagcctgtag

SEQ ID NO: 324524 - DNA, 5073 bp, Artificial Sequence
  derived and/or modified sequence
atgcacccgggtctgtggcttctgctcgtaactctttgcctgacagaggaattagctgccgccggtgagaagtcgtatggcaagccctgtggcggacaggattgttccggctcctgccagtgctttcctgagaagggggctcggggtcgacctgggcccatagggatccaaggcccgacagggccccagggatttacaggtagcacaggattatccggactcaaaggggagagagggtttccaggtttgctgggcccttacggcccaaaaggtgataaaggcccaatgggtgttcctggctttctggggataaacggcatcccaggacatcctggtcagccgggcccacggggcccccctggcctggacggttgcaacggcacccagggcgccgtagggtttcctgggcccgatgggtatcccggactgctgggtcctcctggcctccctggccaaaaaggctctaaaggtgaccctgtgttagccccaggcagcttcaaaggaatgaagggcgacccaggattgcccggcctggacggcataacgggcccacagggcgcccctggcttccccggagctgttggccccgctggacctcccggcctacagggcccgccagggcccccaggacctcttggcccggacggaaacatgggactgggttttcagggagagaaaggcgttaaaggggatgtgggcctgcctggaccggctggacctcctcctagtaccggcgaactggagttcatgggattccctaaggggaagaaaggatcgaaaggtgagcctggacctaaaggtttccctggaattagtggacccccaggatttccaggcctgggcactacgggggaaaagggagaaaagggcgagaaaggcatccccgggctgcccggacctcgcggtccaatggggagcgaaggcgtgcaaggtcctcctggccagcagggcaaaaagggaacactgggcttccctggcctgaatgggtttcagggcatcgagggacaaaagggggatatagggctaccaggaccagacgtgtttatcgatatcgatggagcagtaatctccggcaatccgggagatccgggagtccccggccttccaggcctgaaaggtgacgaggggatccagggactgaggggcccttcaggcgtcccaggactgccggccctaagcggagtacctggcgcccttgggccccaaggttttcccgggctgaaaggggaccaggggaatccaggccgaactacaattggtgccgctggcttaccagggagggatggcctgcccggacctcccggcccacctgggccacccagtccagagtttgaaactgagactctccataataaggagagtggattcccaggcctgcggggagagcagggcccgaagggcaatctcggtctgaaaggaataaagggcgacagtggattttgtgcttgcgatggcggtgtgccgaatacaggtcctcccggcgagcctggcccgccggggccatgggggctcattggtctgccaggtctaaagggagcccgaggggatcggggctctgggggtgcacagggtccagctggggcacctggattggtggggccattaggtccatccggtcctaagggaaaaaagggcgaacctatcctctccacaatccaggggatgccaggtgatcgaggcgattccggctcacagggttttcggggcgtgatcggcgagcccggaaaggacggcgtgccagggctgcctggcctcccaggcttgcccggagacggcggtcagggctttcccggggagaaaggtctccccggactgcccggcgaaaagggtcatcctggccctcctggccttcctggcaatggcctgcccggcctgcctggtcctagaggattgccaggagacaagggcaaggacggactacctgggcaacaggggcttcctggctctaaagggattactttaccttgcattatccctggttcctacggcccttccgggtttcctggcacccccggctttcccggccctaagggttctagaggcttaccaggtacaccaggccagcccggtagttccggcagtaaaggtgaaccaggttcgcctggactcgtacacttgccagagttgcccggatttcctggccctaggggtgagaagggactgcctggttttccggggcttccaggaaaagacgggctgcctggaatgatcggatctccaggcttgcccgggtccaaaggagctacaggagatattttcggagccgagaacggtgcccccggcgaacaggggttgcaggggctgacaggtcacaagggtttcctgggcgactccggactcccaggactcaaaggcgtccacggtaagcccggtctccttggacctaaaggggaacgaggctcaccggggaccccgggtcaggtcggccagccaggcacaccaggatcatccggtccttatggaattaaaggaaagtccggcttacctggcgccccaggctttccaggcatcagcgggcaccccggaaagaaaggcaccaggggcaagaagggtccccccggttctatagtcaaaaaggggctccctggacttaagggattgcccgggaaccctggcctggtcggtttaaaaggctctcccgggagtccaggcgtcgctgggctgccagccctgtccggccccaagggggaaaaagggagcgtaggctttgtaggcttccctggaatccctggactgccagggattcccggtacacggggtcttaaagggattcctggatcgacaggcaaaatggggcccagcggtagggctggtacccccggtgagaaaggggatcgcggcaatccggggccagtgggaatcccgtcaccaagacgacccatgagtaacctgtggctaaagggcgacaagggttctcagggatcagccggcagcaacggcttcccaggacctagaggcgacaagggagaagcaggcagaccgggcccaccaggactgcccggagccccgggacttcctggaatcattaaaggcgtgagtggaaagcccggccccccagggttcatgggcatccgtggcctccctggactgaagggctctagtgggattactggattcccagggatgccaggcgaaagcgggtctcaggggatcagggggtcgccaggtctccccggggcatctggactcccgggcctgaagggcgacaacgggcaaaccgtcgaaatatccgggtcccctgggcctaagggtcagccaggggaaagtggcttcaagggtactaagggtcgcgacgggctcataggaaacatcggttttcccgggaacaagggagaagatgggaaagttggtgtgtcgggcgatgtgggactccctggtgcccccggctttccgggcgtagcaggcatgcgtggagaaccaggtctgccaggatcatcgggccaccagggcgccatcggcccgttgggctcacccggactcatcggcccgaagggattccccggattccccggactacatggactaaatggcctgcctgggaccaaggggactcatggcactccaggcccatcaattacgggagtcccaggacctgcaggtctaccaggtccaaagggcgagaagggatatccgggaattggcatcggtgctcccggcaaaccgggtctgcgcgggcaaaagggagatcgagggttccctggtctccagggccccgccggcctgcccggtgcgcccggcataagcttacccagcctaattgcgggacagccaggcgatccagggcggcctggtttagatggcgagagaggccgccccggtccggccggaccacctggcccacccgggccttcaagtaaccaaggagatactggggatccaggattcccgggaatcccaggcccgaaaggcccaaaaggcgatcaagggatccccgggttttctggactccccggagagctgggtcttaagggcatgcgcggagaaccgggtttcatgggaacacccggtaaggtgggacctcctggcgacccggggttccctggtatgaagggcaaggcaggccccagaggatcttcgggactgcaaggggatcccgggcagactccaacagccgaggccgtgcaggttccacccggcccgttgggccttcctgggattgacggtatacccggattaacaggagatccaggcgcgcagggacccgtcggacttcaagggagcaaaggactgccaggaattccaggtaaggatggcccaagtggcctgcccggccctcctggcgcactcggtgaccctggcctgcccggcttgcagggcccgccaggcttcgagggagcaccaggacagcaggggccatttggcatgcccggcatgcccggtcagagcatgcgggtggggtacactttggtgaagcactcacagtcagaacaggtgcctccctgccccataggcatgtcccaactgtgggtgggatactccctgctgttcgtcgaaggccaggagaaggcccataatcaggacctaggctttgcgggaagttgcttaccccgattcagtaccatgccctttatctattgtaacatcaacgaagtctgtcattatgccagaaggaatgacaagtcatactggttgagtacgaccgcccctattcctatgatgcccgtgtcgcagacacagattccacagtacatcagccgttgctccgtgtgcgaggccccatctcaggcaattgccgtacattctcaggatatcaccatcccacagtgtccactgggctggaggtcgctgtggatcggatacagtttcctcatgcacacggcggccggagctgagggcggagggcagagtctggtcagtccagggagctgcctggaagacttccgcgccacaccattcatcgagtgctctggcgcccgcggaacatgtcattactttgcaaataagtattcgttttggctcactacagtggaagagcgccaacagtttggagagctgcccgtgtctgagacactgaaagcgggccagctccatacccgggtgagtagatgccaggtttgtatgaaaagtctttag

SEQ ID NO: 324525 - DNA, 5076 bp, Artificial Sequence
  derived and/or modified sequence
atgctgatcaataagctgtggctactgctggtaacactgtgtctcaccgaggagctggcagctgccggtgaaaagtcttacggcaaaccctgtggggggcaagattgctccggttcctgccagtgcttcccagaaaagggagctcgtggccggcccggaccaatcgggatccaggggcccaccggccctcaggggtttaccggctccaccgggctcagcgggttaaaaggtgaaaggggcttcccagggcttttgggcccctacggccctaagggggacaaagggccaatgggagttcctgggtttctcggcatcaatggaattcccgggcatcccggccagcctgggcctcgcgggccacctggcctggatggatgcaacggcacacaaggtgcagtcggctttcctgggccagacgggtaccctggtctcctcggaccccccggcctacccgggcagaaaggttccaaaggagaccctgtgctcgctcccggatcttttaaagggatgaagggggatccaggcctccccggactggacggaatcaccggaccgcagggagccccggggttcccaggcgccgtgggcccagccggcccccccggtcttcagggcccccccggtcctcctgggccgctgggcccggatggcaacatgggcctcggtttccagggagaaaagggggtgaaaggggatgtgggcctacctggcccagccggcccccctccttcaactggagagctggagttcatgggattccccaagggtaagaagggcagtaaaggtgaaccgggccccaaagggtttcctggaatcagcggcccccccgggtttccagggcttggtaccacgggcgagaagggcgaaaagggagaaaaaggaatcccgggactcccgggacctaggggcccgatgggcagcgagggggtccaaggtccccccgggcagcaagggaagaaaggcacgctgggttttcctggcctgaatgggttccaggggatcgaaggacaaaagggcgacattggccttccagggcccgacgttttcatcgatattgacggagctgtgatcagtggcaaccccggcgacccaggtgttcccggcctgccagggctgaagggcgatgaagggatccaggggctacgggggccttcaggggtgcccggtctgccggctctgtccggcgttcctggggcactcggcccacaaggtttccctggtctgaaaggagatcagggaaacccaggcagaaccaccattggagccgcgggcctgcccggacgcgatggattacctggccctccagggcctcccggcccacctagcccagagtttgagacagaaaccttgcataataaggagtccggtttcccgggcctacgaggcgagcagggtcctaaaggtaatttgggccttaagggcatcaaaggcgacagtggattttgcgcttgcgacggcggggttcctaacaccggcccccccggtgagcccgggccacctggtccttggggcttgatcggattacccggcttgaaaggtgcgcgcggcgacagaggttccgggggggctcaaggtccagcgggagctccaggtttagtcggcccactcggaccatcagggcctaaggggaagaaaggcgagccaatattgtccaccattcagggcatgcctggagaccgcggtgatagcggctcccaggggttccggggcgtgataggggagcccggcaaagacggagtgccaggtctaccaggcctccctggtctgcctggggacggcggccaaggatttccaggggagaaaggcctccccgggctgcctggtgaaaaagggcatcctggaccacccggcttaccgggaaatggcctgcccgggctgcccggaccccgagggctgccaggtgacaaagggaaagatgggctccctggtcaacagggcttgccggggtctaaaggaattactctaccctgcattatacctggcagttatgggccttccggctttcctggaacccctgggtttcctggacccaaaggatcacgcggcctgcccggcacccccggacagcccggctccagcgggtctaaaggcgaacccggttctcccgggctggtgcatctgccggagctgcccgggttcccggggccccgtggagaaaaaggcctacccggattccccggattgcctggcaaggatgggttgcctggaatgattggaagccctggccttccgggctccaagggcgccacgggggacatttttggggccgaaaacggcgcccctggtgaacagggtctgcaagggctcacaggccacaaaggcttcctgggggattccggattgccaggcctaaaaggggtgcatggcaagccagggctcctgggacccaaaggcgaacgcggcagcccaggcactcctgggcaggttggccagccgggaacacctggtagcagtggaccctatggtatcaaaggtaagtctgggcttccaggtgctcctggcttccctggtattagcgggcaccccggcaaaaaaggcacgcgcggcaagaagggcccccccggcagtatagtgaaaaaagggctccctggcctgaaaggcctgccagggaaccctggactcgtaggcctgaaaggaagccctggctcaccgggggtggctggtctccccgccctttctggacctaagggcgagaagggtagtgtgggctttgttggcttccctgggatacctggcctgccaggcattcccggcaccagaggtctgaagggaattccaggatctacaggaaagatgggcccatccggaagggctgggacccccggagagaagggggatcgggggaaccctggccccgtaggcattccaagcccccgcagacccatgtcgaatctctggcttaaaggagacaagggatcgcagggatccgccggaagtaacggcttccccgggcccaggggcgacaagggcgaagccggaagacctggtcccccaggcctccctggagcacctggactgccagggatcataaagggagtctccgggaagcccggccctcccggctttatggggatcaggggactcccgggactcaaaggtagcagcggaatcaccggatttcccgggatgccgggcgaatctgggagccagggaattagaggatcccccggcctgccaggggcatccggcctccctggattgaagggcgataacggccagactgtggagatatctggtagcccaggaccaaagggccaacccggagagtccggctttaagggtactaagggtagggatggcctgattggtaatatcggctttcctggtaacaagggcgaggatggaaaagtaggtgtcagcggagacgtgggcctgcccggtgcgcctggattccctggggttgctggaatgcggggggaacctggcctgccgggcagctctggccatcagggcgccatcggtccacttgggtctccgggattgatcggccctaagggttttccagggttcccaggattgcacgggctgaatggcttaccggggacaaaaggcacacacgggacaccaggcccttccataacgggagtgcctggacccgctggattaccaggacccaagggggagaagggttacccaggaatcgggatcggcgcccccggcaaaccagggctgcggggccagaagggggacagaggattccctggactccagggtcctgctggtcttcccggtgcacctggtatatcactacccagtttaatcgccggacagccaggtgaccctggaaggcctgggctggatggtgagcgtgggcgtccaggcccagcgggccctcctggacctccaggacctagtagtaatcaaggagataccggcgaccctggctttcccggaattcccggcccgaagggacccaaaggcgaccaaggaatccccggattcagcgggcttccaggcgagctgggactgaaggggatgaggggggagcccggtttcatgggaacacctggcaaagtgggccccccaggcgaccccggattccccggcatgaaaggaaaagcaggacccagaggatcatcagggctgcaaggggatcctggacagacccctacggctgaggctgtacaagtgcctcctgggcctctgggcctgcctggtattgacggcattccagggctcacaggcgatcccggcgcccagggtccagtcgggctgcagggttcaaaggggctcccaggaattcccggcaaagatggcccatccggactccccgggccccctggggctctcggtgaccctggccttccgggactccagggtcctccagggttcgagggagcccccgggcagcaaggccctttcggcatgcccggtatgccgggccagagcatgcgggttggttacacactggtgaaacattcacaatcggagcaggtccccccttgccccatcgggatgagccagctgtgggtgggttactcactacttttcgtagaggggcaggagaaggcccacaaccaggatctgggcttcgcaggctcctgcctccccaggttcagcaccatgcctttcatttattgcaatataaacgaggtctgtcattatgcccgccgaaatgataagtcctattggttgtcgacaacggcccctatccccatgatgcctgtctcccaaacccagatcccacaatatatcagtcgctgtagcgtgtgcgaagctccgagtcaggcaattgccgtgcacagtcaggatataacaataccacagtgtcccctgggctggaggtccctgtggattgggtactcctttttaatgcacacagcagccggggcagaagggggaggtcagtcactagtgagtcctggttcttgccttgaggattttagagccacaccatttatcgagtgttctggggctcgcggaacctgtcactactttgccaacaagtactcattttggctgacaacagtggaggagcgacagcagtttggggaacttcctgtgtcggaaactctgaaggctggccagctacatacccgggtgagccgttgtcaagtgtgtatgaagtccctgtag

SEQ ID NO: 324526 - DNA, 5076 bp, Artificial Sequence
  derived and/or modified sequence
atgcatccaggactatggttactgctcgtgacgctgtgcttaactgaggaactagccgcagctggcgaaaagtcatacggcaagccatgcggaggccaggattgctccggttcttgccagtgttttcccgaaaagggcgcccgcgggcggcccggcccaatcgggatccagggtccaactgggccacagggctttactggctctactgggctgagtgggctcaagggcgagcgcggattccccggactgttagggccatacggacccaagggagacaaaaaattctctatccccgtgttgttgatctatgatagccggccgggacaccccggccagccaggaccacgagggcccccggggcttgatggatgcaatgggacacaaggggctgtgggcttccccgggcccgatggttacccagggcttctgggtcccccgggccttcccggtcaaaagggctccaaaggagaccctgtgctagcgcccggatccttcaagggtatgaaggcatttatacctctcttcgagagcatcaggggcccacagggggcccccggctttcccggggccgtgggccctgctggtccccctggtctgcagcagggccaacccccctttttagaggttctctttccccattggcacgaaggcgaggaagcgaaggtacgggattccctgtttggtgacgtggggctgcccggaccggccgggcctcctcccagcactggcgagctcgaattcatgggttttcccaaaggcaagaagggtagtaaaggtgagcccggacccaaaggcttcccgggaatttcaggtccccccgggttccctggtctgggcacaactggggaaaaaggagagaaaggggaaaaaggaataccagggctccccgggcccaggaccctgctgtgctcacataccttccaccttgtggtgacgatgttcttaagtcaggggaagaagggaactttgggatttcccggcctgaacggatttcaaggcatcgaagggcagaaaggggacatcggtttgcccggtcccgacgtgtttatagatatagacggggcagtaatttcagggaatcccggggatcccggggtgcccgggctcccagggctaaaaggcgatgaaggaattcagggcctcagaggcccttccggtgttccaggactacctgcactgtctggtgtacctggagccttgggtcctcaaggtttccctggattaaagggtgatcagggcaatcctggacgtactactatcggcgctgccggcctgcccggacgcgatgggctcccaggcccacccgggccacctggcccacctagtccggagttcgagacagagaccctccacaataaagagagcggctttcctgggctgcggggagagcagggaccgaaggggaatcttggtctgaagggcattaaaggggactcaggattctgtgcctgcgacgggggagtgccaaacacgggtcccccaggggaacctggcccccctgggccctggggcttaattggcctacccgggctaaagggcgcccggggagaccggggctcggggggcgctcagggtcctgcaggggcgcctggtttagtgggcccgctcgggccatccggccctaagggaaagaaaggagaacccatcctcagcacaattcagggaatgccaggtgatagaggtgatagcgggtcccaaggtttcaggggcgtgattggcgagcccggaaaggacggagtgccaggcctgccaggcctgcccgggctgccaggcgatggaggtcagggcttccccggagagaaaggactgcccgggctccccggagaaaagggacaccctggacctcctggactcccaggaaatggtctcccaggccttcctgggccccgtggtctcccaggtgataagggaaaagacggtcttcccgggcaacaggggttacccgggagcaaaggaatcacgttgccttgtattatccccgggtcatacggcccatctgggttccccggaacacccggcttcccggggcccaagggatctcgtggtctgccgggtacccctggccagcctggctcgtcgggttcaaagggtgagcccggatcccctgggctcgtgcacctaccagaattaccgggtttcccaggccctagaggagagaagggcctcccgggttttccggggctacccggtaaggacggcctcccgggcatgatcgggtcccctggccttcccgggagcaaaggggctaccggtgacatttttggcgcagaaaatggggcgcccggagagcagggtctccaaggcctgacggggcacaagggattccttggggattccgggttacctgggctgaagggcgtacacggcaagcctgggctgctcggacccaagggagaaagggggtcacccggtacgcctggccaggttggtcagccaggcactccagggtcaagcggtccgtacggcatcaaaggcaaaagtggtctgccaggcgcaccagggtttccaggcataagcgggcatcctggcaaaaagggcactcgcggcaagaagggcccacctggaagcatcgttaaaaagggattaccaggtcttaaaggcctgcctggcaatcctggtctcgtgggtctgaaaggctcccccggttctcccggcgtggccggattacctgctttgtccgggccaaaaggtgaaaaaggttcagtagggttcgttggattccctggcatcccaggtcttcctggcatccccggcacgcgaggacttaagggaattcccggatctactggaaagatggggccgagtggcagggccggtacgccaggggagaagggtgacagaggcaatccaggtcccgttgggatcccgagtccacgcagacccatgagtaacctgtggctgaagggggacaagggatcacaaggaagtgccggttcgaacgggttccctggcccccgtggagataaaggggaggccgggaggcccggaccacccggtctccccggagcccctggcctgcctggcatcattaagggggtctccggaaagcctgggccacctggattcatgggcatccgcggactgcccgggctcaaaggcagttccggaatcacaggctttccaggcatgcctggagaaagcggcagccaggggatcaggggatccccaggcctgcctggcgctagcggcttacccggcctgaaaggggataacggacagacagtggagatttccgggagtcctggcccaaagggacagcctggcgagtctggatttaaaggcacgaagggaagagacggccttatcggcaatatcggcttcccggggaacaaaggagaggacggaaaggttggggtctctggagatgtgggcctccctggcgcaccggggttccctggggttgctgggatgaggggtgagcctggcctgccgggaagttctgggcatcaaggcgccattggcccgctcggctccccgggactgatcggccctaagggcttccctgggtttccgggccttcatgggctcaatgggttgcctggtacaaaggggacacatggtactcctggaccgtcaatcaccggcgttccggggcccgccgggctgccaggtccgaagggggaaaaaggctatccaggaatcgggatcggggcacccggcaagcccgggctgagagggcagaagggcgacaggggatttccgggtctacaaggccctgcagggttgcctggcgcacccggaattagcctgccttcccttatcgcaggccagcctggcgatcccggacggccgggcctagacggagaacggggcagacctggacctgcgggcccgccaggcccaccaggtccatctagcaaccaaggggacacgggagaccccggcttccccggcatccctggcccaaaagggccgaaaggcgaccaaggcatccctggttttagcggtctgcctggcgagctgggtctgaaaggcatgcgaggtgaaccaggtttcatgggaacccccggaaaagttgggcccccaggagatcccggtttccctggaatgaagggtaaagcagggcctaggggctcaagcggactccaaggtgatcctggacagactccaaccgcagaagcggtgcaggtgccccctggccctttaggcttacctggtatcgatggcatccctggactgaccggagatcctggcgcacaaggtccagtcggcctgcaagggtcaaaaggattacctggcatccccggaaaggacggtccatccggcctgcccggtcccccgggggcgctgggcgatccggggcttcctggattgcagggacctccaggctttgagggggcacctggacaacaggggccatttggaatgcctggaatgcccggtcagagcatgcgcgtgggttacactctggtgaagcatagtcagtctgagcaggtgcccccatgcccgatcggaatgagtcagctgtgggtgggttactccctcctcttcgttgaggggcaggagaaggcccataatcaggatcttggcttcgctggatcctgcttgccgcgctttagcactatgccattcatttattgtaatataaatgaagtgtgtcactacgccagacgcaacgacaaaagttattggctgtctacaactgcgcctatacccatgatgcctgtatcacaaacgcagatcccccagtatatcagcaggtgtagtgtctgcgaggccccctctcaggccatagccgttcacagccaagatataaccatcccccagtgccctttaggatggagaagcctgtggatagggtactcatttctgatgcacacagccgcaggggcagagggagggggacagtcattggtgtcgcccgggtcctgcctcgaggattttagagccactccctttattgaatgcagcggcgccagaggaacctgtcactattttgccaacaagtattccttctggcttaccacagtcgaagaacggcagcaattcggggagcttccagtatccgaaacattgaaagcaggtcaattgcatacgagggtcagcagatgtcaggtgtgcatgaaaagcctgtag

SEQ ID NO: 324527 - DNA, 6700 bp, Artificial Sequence
  derived and/or modified sequence
atggaactatctcctgagtgctgcaagttgtaacgggcaccgctgagcctgtttccctttggagcacttcttatctagaagcagtgtttagtttcttccaaactgggccacttcgtccacctactctgttctgagtaaggaaacagcctccaagcatcagcagagcccagatgagcacgggccgcggagccgcttagcagtctcccgggacccagctccggaggagccgcaagcatgcaccctgggttgtggctgctcctggttacgttgtgcctgaccgaggaactggcagcagcgggagagaagtcttatggaaagccatgtgggggccaggactgcagtgggagctgtcagtgttttcctgagaaaggagcgagaggacgacctggaccaattggaattcaaggcccaacaggtcctcaaggattcactggctctactggtttatcgggattgaaaggagaaaggggtttcccaggccttctgggaccttatggaccaaaaggagataagggtcccatgggagttcctggctttcttggcatcaatgggattccgggccaccctggacaaccaggccccagaggcccacctggtctggatggctgtaatggaactcaaggagctgttggatttccaggccctgatggctatcctgggcttctcggaccacccgggcttcctggtcagaaaggatcaaaaggtgaccctgtccttgctccaggtagtttcaaaggaatgaagggggatcctgggctgcctggactggatggaatcactggcccacaaggagcacccggatttcctggagctgtaggacctgcaggaccaccaggattacaaggtcctccagggcctcctggtcctcttggtcctgatgggaatatggggctaggttttcaaggagagaaaggagtcaagggggatgttggcctccctggcccagcaggacctccaccatctactggagagctggaattcatgggattccccaaagggaagaaaggatccaagggtgaaccagggcctaagggttttccaggcataagtggccctccaggcttcccgggccttggaactactggagaaaagggagaaaagggagaaaagggaatccctggtttgccaggacctaggggtcccatgggttcagaaggagtccaaggccctccagggcaacagggcaagaaagggaccctgggatttcctgggcttaatggattccaaggaattgagggtcaaaagggtgacattggcctgccaggcccagatgttttcatcgatatagatggtgctgtgatctcaggtaatcctggagatcctggtgtacctggcctcccaggccttaaaggagatgaaggcatccaaggcctacgtggcccttctggtgtccctggattgccagcattatcaggtgtcccaggagccctagggcctcagggatttccagggctgaagggggaccaaggaaacccaggccgtaccacaattggagcagctggcctccctggcagagatggtttgccaggcccaccaggtccaccaggcccacctagtccagaatttgagactgaaactctacacaacaaagagtcagggttccctggtctccgaggagaacaaggtccaaaaggaaacctaggcctcaaaggaataaaaggagactcaggtttctgtgcttgtgacggtggtgttcccaacactggaccacccggggaaccaggcccacctggtccatggggtctcataggccttccaggccttaaaggagccagaggagatcgaggctctgggggtgcacagggcccagcaggggctccaggcttagttgggcctctgggtccttcaggacccaaaggaaagaagggggaaccaattctcagtacaatccaaggaatgccaggagatcggggtgattctggctcccagggcttccgtggtgtaataggagaaccaggcaaggacggagtaccaggtttaccaggtctgccaggccttccgggtgatggtggacagggcttcccaggtgaaaaggggttacctggacttcctggtgaaaaaggccatcctggtccacctggcctcccaggaaatgggttaccaggacttcctggaccccgtgggcttcctggagataaaggcaaggatggattaccgggacaacaaggccttcccggatctaagggaatcaccctgccctgtattattcctgggtcatacggtccatcaggatttccaggcactcccggattcccaggccctaaagggtctcgaggcctccctgggaccccaggccagcctgggtcaagtggaagtaaaggagagccagggagtccaggattggttcatcttcctgaattaccaggatttcctggacctcgtggggagaagggcttgcctgggtttcctgggctccctggaaaagatggcttgcctgggatgattggcagtccaggcttacctggttccaagggagccactggtgacatctttggtgctgaaaatggtgctccgggggaacaaggcctacaaggattaacagggcacaaaggatttcttggagactctggccttccaggactcaagggtgtgcacgggaagcctggcttactaggccccaaaggtgagcggggcagccctgggacaccaggacaggtgggacagccaggcaccccaggatctagtggtccatatggcatcaagggcaaatctgggctcccaggagcaccaggcttcccaggcatctcaggacatcctggaaagaaaggaacaagaggcaagaaaggtcctcctggatcaattgtaaagaaagggctgccagggctaaaaggccttcctggaaatccaggcctagtaggactgaaaggaagcccaggctctccaggggtcgctgggttgccagccctctctggacccaagggagagaaggggtctgttggattcgtaggttttccaggaataccaggtctgcctggtattcctggaacaagaggattaaaaggaattccaggatcaactggaaaaatgggaccatctggacgtgctggtactcctggtgaaaagggagacagaggcaatccggggccagtcggaatacctagtccaagacgtccaatgtcaaacctttggctcaaaggagacaaaggctctcaaggctcagccggatccaatggatttcctgggccaagaggtgacaaaggagaggctggtcgacctggaccaccaggcctacctggagctcctggcctcccaggcattatcaaaggagttagtggaaagccagggccccctggcttcatgggaatccggggcttacctggcctgaaggggtcctctgggatcacaggtttcccaggaatgccaggagaaagtggttcacaaggtatcagagggtcgcctggactcccaggagcatctggtctcccaggcctgaaaggagacaacggccagacagttgaaatttccggtagcccaggacccaagggacagcctggcgaatctggttttaaaggcacaaaaggaagagatggactaataggcaatataggcttccctggaaacaaaggtgaagatggaaaagttggtgtttctggagatgttggccttcctggagctccaggatttccaggagttgccggcatgagaggagaaccaggacttccaggttcttctggtcaccaaggggcaattgggcctctaggatcccccggattaataggacccaaaggcttccctggatttcctggtttacatggactgaatgggcttccgggcaccaagggtacccatggcactccaggacctagtatcaccggtgtgcctgggcctgctggtctccctggacccaaaggagaaaaaggatatccaggaattggcatcggagctccagggaagccgggcctgagagggcaaaaaggtgatcgaggtttcccaggtctccagggccctgctggtctccccggtgccccaggcatctccttgccctcactcatagcaggacagcctggtgaccccgggcgaccaggcctagatggagaacgaggccgcccaggccccgctggacccccaggtccccctgggccatcctcgaatcaaggcgacaccggagaccctggcttccctggaattcctggacctaaagggcctaagggagaccaaggaattccaggtttttctggcctccctggagagctaggactgaaaggcatgagaggtgagcctggcttcatggggactccaggcaaggttgggccacctggagacccaggatttcccggaatgaaggggaaggcagggccaagaggctcttctggcctccaaggtgatcctggacaaacaccaactgcagaagctgtccaggttcctcctggacccttgggtctaccagggatcgatggcatccctggcctcactggggaccctggggctcaaggccctgtaggcctacaaggctccaaaggtttacctggcatccccggtaaagatggccccagtgggctcccaggcccacctggggctcttggtgatcctggtctgcctggactgcaaggccctccaggatttgaaggagctccagggcagcaaggccccttcgggatgcctggaatgcctggccagagcatgagagtgggctacacgttggtaaagcacagccagtcggaacaggtgcccccgtgtcccatcgggatgagccagctgtgggtggggtacagcttactgtttgtggaggggcaagagaaagcccacaaccaggacctgggctttgctggctcctgtctgccccgcttcagcaccatgcccttcatctactgcaacatcaacgaggtgtgccactatgccaggcgcaatgataaatcttactggctctccactaccgcccctatccccatgatgcccgtcagccagacccagattccccagtacatcagccgctgctctgtgtgtgaggcaccctcgcaagccattgctgtgcacagccaggacatcaccatcccgcagtgccccctgggctggcgcagcctctggattgggtactctttcctcatgcacactgccgctggtgccgagggtggaggccagtccctggtctcacctggctcctgcctagaggactttcgggccactcctttcatcgaatgcagtggtgcccgaggcacctgccactactttgcaaacaagtacagtttctggttgaccacagtggaggagaggcagcagtttggggagttgcctgtgtctgaaacgctgaaagctgggcagctccacactcgagtcagtcgctgccaggtgtgtatgaaaagcctgtagggtggcacctgccactctgccccttgccctcccctgcccctcacaacagtcacctcacaaacctgaatggtctgaagaaggaaggcctgagcccctttgcctgtcaagttgtacattggagtctcatttgggctagactaccggacactcgtcaccccagccctcgggtccatagagatgagcccaccctgctgagatctgctgtcctgtttctgtcaagctggtgctactgtttgatttggatgattgtgtgactattcatggctacctcagaaagatttgatgggccacaactgtcttagactgctagctttctccttaccgtcttgatcggaaagctcttcctaatcgctaatcagtcatttcttcatgtacagaggtcagcacacattatttggcttaaaccagaacccagtgtttccacacttaaattctctaaccgaatattcatggatggctcaagtctgcacagagcaagtcctcactcttcaaggaggcccactgtgtctaggcaggcaagagaattgaaatgaggtgccacccagtagcccagagtgagctttagctctctctagaatgagcaagactgggccccacatggcttagagaggcttgaaggccagcagctgggttgggggtggtggtcattaatggcatatggtcctagacaaaccatctcctccttgccggctccccctccagccagagacagaggatgtggcctggttcaaagtaaagcagaggatgcaacaaatgtggccaagcctatcaaaggaaatgagaatgacagccttttttcctgggccagaagtagaggggtgggtgcgtaaggatgtgtgagttttgcttttgactccaggaacaaaaaggtaaatcccacatcccagtttctcagaagtccctgtttattccaaatgccatccagatgtgtgcaatgtggcaaactgaagctgcacagtgttggtttccttgtattctgaggatgttaaagactttgttaaatggttatccaattgctctttcacaggtagcctattaaactattttaatatgtttttttaaacctcataaaaatctagcacactcttctcttgagcagttagcagacctaaagcaagcctgaattggctatgcagtacattgtattctgtttgggggaatttgttttagccattttctttaattaccagttttccagaacactcttagctatgttgacatgaggcagttccttccaggtgattctgtttccttaagtattatataaactgtgccaatacagacaaagcataatcaatataatctgaattattgttatctttacctcctgagtaataagcatggtgtcagttttgtacatagcaaataaaataaatgaaatctgaacatgtga

SEQ ID NO: 324528 - DNA, 6570 bp, Artificial Sequence
  derived and/or modified sequence
tccctgggctgctggtcttctttaccttccagctgctcacagaacagagagtttctacatacaagcagaagatgtgaaaatattgggaataaataaagtatatgcttataaacaagttgtggctgctcctggttacgttgtgcctgaccgaggaactggcagcagcgggagagaagtcttatggaaagccatgtgggggccaggactgcagtgggagctgtcagtgttttcctgagaaaggagcgagaggacgacctggaccaattggaattcaaggcccaacaggtcctcaaggattcactggctctactggtttatcgggattgaaaggagaaaggggtttcccaggccttctgggaccttatggaccaaaaggagataagggtcccatgggagttcctggctttcttggcatcaatgggattccgggccaccctggacaaccaggccccagaggcccacctggtctggatggctgtaatggaactcaaggagctgttggatttccaggccctgatggctatcctgggcttctcggaccacccgggcttcctggtcagaaaggatcaaaaggtgaccctgtccttgctccaggtagtttcaaaggaatgaagggggatcctgggctgcctggactggatggaatcactggcccacaaggagcacccggatttcctggagctgtaggacctgcaggaccaccaggattacaaggtcctccagggcctcctggtcctcttggtcctgatgggaatatggggctaggttttcaaggagagaaaggagtcaagggggatgttggcctccctggcccagcaggacctccaccatctactggagagctggaattcatgggattccccaaagggaagaaaggatccaagggtgaaccagggcctaagggttttccaggcataagtggccctccaggcttcccgggccttggaactactggagaaaagggagaaaagggagaaaagggaatccctggtttgccaggacctaggggtcccatgggttcagaaggagtccaaggccctccagggcaacagggcaagaaagggaccctgggatttcctgggcttaatggattccaaggaattgagggtcaaaagggtgacattggcctgccaggcccagatgttttcatcgatatagatggtgctgtgatctcaggtaatcctggagatcctggtgtacctggcctcccaggccttaaaggagatgaaggcatccaaggcctacgtggcccttctggtgtccctggattgccagcattatcaggtgtcccaggagccctagggcctcagggatttccagggctgaagggggaccaaggaaacccaggccgtaccacaattggagcagctggcctccctggcagagatggtttgccaggcccaccaggtccaccaggcccacctagtccagaatttgagactgaaactctacacaacaaagagtcagggttccctggtctccgaggagaacaaggtccaaaaggaaacctaggcctcaaaggaataaaaggagactcaggtttctgtgcttgtgacggtggtgttcccaacactggaccacccggggaaccaggcccacctggtccatggggtctcataggccttccaggccttaaaggagccagaggagatcgaggctctgggggtgcacagggcccagcaggggctccaggcttagttgggcctctgggtccttcaggacccaaaggaaagaagggggaaccaattctcagtacaatccaaggaatgccaggagatcggggtgattctggctcccagggcttccgtggtgtaataggagaaccaggcaaggacggagtaccaggtttaccaggtctgccaggccttccgggtgatggtggacagggcttcccaggtgaaaaggggttacctggacttcctggtgaaaaaggccatcctggtccacctggcctcccaggaaatgggttaccaggacttcctggaccccgtgggcttcctggagataaaggcaaggatggattaccgggacaacaaggccttcccggatctaagggaatcaccctgccctgtattattcctgggtcatacggtccatcaggatttccaggcactcccggattcccaggccctaaagggtctcgaggcctccctgggaccccaggccagcctgggtcaagtggaagtaaaggagagccagggagtccaggattggttcatcttcctgaattaccaggatttcctggacctcgtggggagaagggcttgcctgggtttcctgggctccctggaaaagatggcttgcctgggatgattggcagtccaggcttacctggttccaagggagccactggtgacatctttggtgctgaaaatggtgctccgggggaacaaggcctacaaggattaacagggcacaaaggatttcttggagactctggccttccaggactcaagggtgtgcacgggaagcctggcttactaggccccaaaggtgagcggggcagccctgggacaccaggacaggtgggacagccaggcaccccaggatctagtggtccatatggcatcaagggcaaatctgggctcccaggagcaccaggcttcccaggcatctcaggacatcctggaaagaaaggaacaagaggcaagaaaggtcctcctggatcaattgtaaagaaagggctgccagggctaaaaggccttcctggaaatccaggcctagtaggactgaaaggaagcccaggctctccaggggtcgctgggttgccagccctctctggacccaagggagagaaggggtctgttggattcgtaggttttccaggaataccaggtctgcctggtattcctggaacaagaggattaaaaggaattccaggatcaactggaaaaatgggaccatctggacgtgctggtactcctggtgaaaagggagacagaggcaatccggggccagtcggaatacctagtccaagacgtccaatgtcaaacctttggctcaaaggagacaaaggctctcaaggctcagccggatccaatggatttcctgggccaagaggtgacaaaggagaggctggtcgacctggaccaccaggcctacctggagctcctggcctcccaggcattatcaaaggagttagtggaaagccagggccccctggcttcatgggaatccggggcttacctggcctgaaggggtcctctgggatcacaggtttcccaggaatgccaggagaaagtggttcacaaggtatcagagggtcgcctggactcccaggagcatctggtctcccaggcctgaaaggagacaacggccagacagttgaaatttccggtagcccaggacccaagggacagcctggcgaatctggttttaaaggcacaaaaggaagagatggactaataggcaatataggcttccctggaaacaaaggtgaagatggaaaagttggtgtttctggagatgttggccttcctggagctccaggatttccaggagttgccggcatgagaggagaaccaggacttccaggttcttctggtcaccaaggggcaattgggcctctaggatcccccggattaataggacccaaaggcttccctggatttcctggtttacatggactgaatgggcttccgggcaccaagggtacccatggcactccaggacctagtatcaccggtgtgcctgggcctgctggtctccctggacccaaaggagaaaaaggatatccaggaattggcatcggagctccagggaagccgggcctgagagggcaaaaaggtgatcgaggtttcccaggtctccagggccctgctggtctccccggtgccccaggcatctccttgccctcactcatagcaggacagcctggtgaccccgggcgaccaggcctagatggagaacgaggccgcccaggccccgctggacccccaggtccccctgggccatcctcgaatcaaggcgacaccggagaccctggcttccctggaattcctggacctaaagggcctaagggagaccaaggaattccaggtttttctggcctccctggagagctaggactgaaaggcatgagaggtgagcctggcttcatggggactccaggcaaggttgggccacctggagacccaggatttcccggaatgaaggggaaggcagggccaagaggctcttctggcctccaaggtgatcctggacaaacaccaactgcagaagctgtccaggttcctcctggacccttgggtctaccagggatcgatggcatccctggcctcactggggaccctggggctcaaggccctgtaggcctacaaggctccaaaggtttacctggcatccccggtaaagatggccccagtgggctcccaggcccacctggggctcttggtgatcctggtctgcctggactgcaaggccctccaggatttgaaggagctccagggcagcaaggccccttcgggatgcctggaatgcctggccagagcatgagagtgggctacacgttggtaaagcacagccagtcggaacaggtgcccccgtgtcccatcgggatgagccagctgtgggtggggtacagcttactgtttgtggaggggcaagagaaagcccacaaccaggacctgggctttgctggctcctgtctgccccgcttcagcaccatgcccttcatctactgcaacatcaacgaggtgtgccactatgccaggcgcaatgataaatcttactggctctccactaccgcccctatccccatgatgcccgtcagccagacccagattccccagtacatcagccgctgctctgtgtgtgaggcaccctcgcaagccattgctgtgcacagccaggacatcaccatcccgcagtgccccctgggctggcgcagcctctggattgggtactctttcctcatgcacactgccgctggtgccgagggtggaggccagtccctggtctcacctggctcctgcctagaggactttcgggccactcctttcatcgaatgcagtggtgcccgaggcacctgccactactttgcaaacaagtacagtttctggttgaccacagtggaggagaggcagcagtttggggagttgcctgtgtctgaaacgctgaaagctgggcagctccacactcgagtcagtcgctgccaggtgtgtatgaaaagcctgtagggtggcacctgccactctgccccttgccctcccctgcccctcacaacagtcacctcacaaacctgaatggtctgaagaaggaaggcctgagcccctttgcctgtcaagttgtacattggagtctcatttgggctagactaccggacactcgtcaccccagccctcgggtccatagagatgagcccaccctgctgagatctgctgtcctgtttctgtcaagctggtgctactgtttgatttggatgattgtgtgactattcatggctacctcagaaagatttgatgggccacaactgtcttagactgctagctttctccttaccgtcttgatcggaaagctcttcctaatcgctaatcagtcatttcttcatgtacagaggtcagcacacattatttggcttaaaccagaacccagtgtttccacacttaaattctctaaccgaatattcatggatggctcaagtctgcacagagcaagtcctcactcttcaaggaggcccactgtgtctaggcaggcaagagaattgaaatgaggtgccacccagtagcccagagtgagctttagctctctctagaatgagcaagactgggccccacatggcttagagaggcttgaaggccagcagctgggttgggggtggtggtcattaatggcatatggtcctagacaaaccatctcctccttgccggctccccctccagccagagacagaggatgtggcctggttcaaagtaaagcagaggatgcaacaaatgtggccaagcctatcaaaggaaatgagaatgacagccttttttcctgggccagaagtagaggggtgggtgcgtaaggatgtgtgagttttgcttttgactccaggaacaaaaaggtaaatcccacatcccagtttctcagaagtccctgtttattccaaatgccatccagatgtgtgcaatgtggcaaactgaagctgcacagtgttggtttccttgtattctgaggatgttaaagactttgttaaatggttatccaattgctctttcacaggtagcctattaaactattttaatatgtttttttaaacctcataaaaatctagcacactcttctcttgagcagttagcagacctaaagcaagcctgaattggctatgcagtacattgtattctgtttgggggaatttgttttagccattttctttaattaccagttttccagaacactcttagctatgttgacatgaggcagttccttccaggtgattctgtttccttaagtattatataaactgtgccaatacagacaaagcataatcaatataatctgaattattgttatctttacctcctgagtaataagcatggtgtcagttttgtacatagcaaataaaataaatgaaatctgaacatgtga

SEQ ID NO: 324529 - DNA, 5073 bp, Artificial Sequence
  derived and/or modified sequence
atgcaccctggcctgtggctgctgctggtgaccctgtgcctgacagaggagctggccgctgctggggagaagagctatggcaagccctgtggcggccaggactgcagcggcagctgccagtgcttccctgagaagggggcccggggccggcccggccccatcggcatccagggccccaccggcccccagggcttcaccggcagcacaggcctgagcggcctgaagggggagcggggcttccctggcctgctgggcccctacggccccaagggggacaagggccccatgggcgtgcccggcttcctgggcatcaatggcatccctggccaccctggccagcccggcccccggggccccccaggcctggatggctgcaatggcacccagggcgctgtgggcttccctggcccagatggctacccaggcctgctgggccccccaggcctgcccggccagaagggcagcaagggggaccctgtgctggcccctggcagcttcaagggcatgaagggggaccccggcctgcccggcctggatggcatcaccggcccccagggcgcccctggcttccctggagctgtgggccctgctggccccccaggcctgcagggccccccaggccccccaggccccctgggcccagatggcaacatgggcctgggcttccagggcgagaagggcgtgaagggagatgtgggcctgcccggccctgctggccccccacccagcactggagagctggagttcatgggcttccccaagggcaagaagggcagcaagggggagcccggccccaagggcttccctggcatcagcggccccccaggcttccctggcctgggcaccactggagagaagggggagaagggggagaagggcatccctggcctgcccggcccccggggccccatgggcagcgagggcgtgcagggccccccaggccagcagggcaagaagggcaccctgggcttccctggcctgaatggcttccagggcatcgagggccagaagggggacatcggcctgcccggcccagatgtgttcattgatattgatggagctgtgatcagcggcaaccctggggaccccggggtgcccggcctgcccggcctgaagggagatgagggcatccagggcctgcggggccccagcggcgtgcccggcctgcctgccctgtctggagtgcctggggccctgggcccccagggcttccctggcctgaagggggaccagggcaaccctggccgcaccaccatcggggccgccggcctgcccggcagagatggcctgcccggccccccaggccccccaggcccccccagccctgagtttgaaacagagaccctgcacaacaaggagagcggcttccctggcctgcggggggagcagggccccaagggcaacctgggcctgaagggcatcaagggggacagcggcttctgtgcctgtgatggcggcgtgcccaacacaggccccccaggagagcccggccccccaggcccctggggcctgattggcctgcccggcctgaagggggcccggggggaccggggcagcggcggggcccagggccctgctggggcccctggcctggtgggccccctgggccccagcggccccaagggcaagaagggggagcccatcctgagcaccatccagggcatgcctggggacagaggagacagcggcagccagggcttccggggcgtgattggagagcccgggaaggatggagtgcccggcctgcccggcctgcccggcctgcctggagatggcggccagggcttccctggagagaagggcctgcccggcctgcccggggagaagggccaccctggccccccaggcctgcctggaaatggcctgcccggcctgcccggcccccggggcctgcccggggacaagggcaaggatggcctgcccggccagcagggcctgcccggcagcaagggcatcaccctgccctgcatcatccctggcagctatggccccagcggcttccctggcaccccaggcttccctggccccaagggcagccggggcctgcccggcaccccaggccagcccggcagcagcggcagcaaaggagagcccggcagccctggcctggtgcacctgcctgagctgcccggcttccctggccccagaggagagaagggcctgcccggcttccctggcctgcccgggaaggatggcctgcccggcatgattggcagccctggcctgcccggcagcaagggggccactggagacatctttggagcagaaaatggagcccctggagagcagggcctgcagggcctgaccggccacaagggcttcctgggggacagcggcctgcccggcctgaagggcgtgcacggcaagccaggcctgctgggccccaagggggagcggggcagccctggcaccccaggccaggtgggccagcccggcaccccaggcagcagcggcccctacggcatcaagggcaagagcggcctgcccggggcccctggcttccctggcatcagcggccaccctgggaagaagggcacccggggcaagaagggccccccaggcagcatcgtgaagaagggcctgcccggcctgaagggcctgcccggcaaccctggcctggtgggcctgaagggcagccctggcagccctggggtggccggcctgcctgccctgagcggccccaagggggagaagggctctgtgggctttgtgggcttccctggcatccctggcctgcccggcatccctggcacccggggcctgaagggcatccctggcagcacaggcaagatgggccccagcggccgggccggcaccccaggagagaagggggaccggggcaaccctggccctgtgggcatccccagcccccggcggcccatgagcaacctgtggctgaagggggacaagggcagccagggcagcgctggcagcaatggcttccctggccccaggggggacaagggggaggccggccggcccggccccccaggcctgcccggggcccctggcctgcccggcatcatcaagggcgtgtctgggaagccaggccccccaggcttcatgggcatccggggcctgcccggcctgaagggcagcagcggcatcaccggcttccctggcatgcctggagagagcggcagccagggcatccggggcagccctggcctgcccggggccagcggcctgcccggcctgaagggggacaatggccagacagtggagatcagcggcagccctggccccaagggccagcccggggagagcggcttcaagggcaccaagggcagagatggcctgattggcaacatcggcttccctggcaacaagggggaggatggcaaggtgggcgtgtctggagatgtgggcctgcccggggcccctggcttccctggggtggccggcatgagaggagagcccggcctgcccggcagcagcggccaccagggcgccatcggccccctgggcagccctggcctgattggccccaagggcttccctggcttccctggcctgcacggcctgaatggcctgcccggcaccaagggcacccacggcaccccaggccccagcatcactggagtgcccggccctgctggcctgcccggccccaagggggagaagggctacccaggcattggaattggagcccctgggaagccaggcctgcggggccagaagggggaccggggcttccctggcctgcagggccctgctggcctgcccggggcccctggcatcagcctgcccagcctgattgctggccagcccggggaccccggccggcccggcctggatggagagcggggccggcccggccctgctggccccccaggccccccaggccccagcagcaaccagggcgacaccggggaccccggcttccctggcatccctggccccaagggccccaagggggaccagggcatccctggcttcagcggcctgcctggagagctgggcctgaagggcatgagaggagagcccggcttcatgggcaccccaggcaaggtgggccccccaggggaccccggcttccctggcatgaagggcaaggccggcccccggggcagcagcggcctgcagggcgaccccggccagacccccacagctgaggccgtgcaggtgcccccaggccccctgggcctgcccggcattgatggcatccctggcctgactggagaccccggggcccagggccctgtgggcctgcagggcagcaagggcctgcccggcatccctgggaaggatggccccagcggcctgcccggccccccaggggccctgggggaccccggcctgcccggcctgcagggccccccaggctttgaaggagcccctggccagcagggccccttcggcatgcctggcatgcctggccagagcatgagggtgggctacaccctggtgaagcacagccagagcgagcaggtgcccccctgccccatcggcatgagccagctgtgggtgggctacagcctgctgtttgtggagggccaggagaaggcccacaaccaggacctgggctttgctggcagctgcctgccccgcttcagcaccatgcccttcatctactgcaacatcaatgaggtgtgccactacgccaggagaaatgacaagagctactggctgagcaccacagcccccatccccatgatgcctgtgtcccagacccagatcccccagtacatcagccgctgcagcgtgtgtgaggcccccagccaggccatcgctgtgcacagccaggacatcaccatcccccagtgccccctgggctggaggagcctgtggattggctacagcttcctgatgcacacagctgctggagctgagggcggcggccagagcctggtgtccccaggcagctgcctggaggacttccgggccacccccttcatcgagtgcagcggggcccggggcacctgccactactttgccaacaagtacagcttctggctgaccaccgtggaggagcggcagcagtttggagagctgcctgtgtctgagaccctgaaggccggccagctgcacaccagggtgagccgctgccaggtgtgcatgaagagcctgtag

SEQ ID NO: 324530 - DNA, 5076 bp, Artificial Sequence
  derived and/or modified sequence
atgctgatcaacaagctgtggctgctgctggtgaccctgtgcctgacagaggagctggccgccgccggggagaagagctatggcaagccctgtggcggccaggactgcagcggcagctgccagtgcttccctgagaagggggcccggggccggcccggccccatcggcatccagggccccaccggcccccagggcttcaccggcagcacaggcctgagcggcctgaagggggagcggggcttccctggcctgctgggcccctacggccccaagggggacaagggccccatgggcgtgcccggcttcctgggcatcaatggcatccctggccaccctggccagcccggcccccggggccccccaggcctggatggctgcaatggcacccagggcgctgtgggcttccctggcccagatggctacccaggcctgctgggccccccaggcctgcccggccagaagggcagcaaaggagaccctgtgctggcccctggcagcttcaagggcatgaagggggaccccggcctgcccggcctggatggcatcaccggcccccagggcgcccctggcttccctggagctgtgggccctgctggccccccaggcctgcagggccccccaggccccccaggccccctgggcccagatggcaacatgggcctgggcttccagggcgagaagggcgtgaagggagatgtgggcctgcccggccctgctggccccccacccagcactggagagctggagttcatgggcttccccaagggcaagaagggcagcaaaggagagcccggccccaagggcttccctggcatcagcggccccccaggcttccctggcctgggcaccaccggggagaagggggagaagggggagaagggcatccctggcctgcccggcccccggggccccatgggcagcgagggcgtgcagggccccccaggccagcagggcaagaagggcaccctgggcttccctggcctgaatggcttccagggcatcgagggccagaagggggacatcggcctgcccggcccagatgtgttcatcgacattgatggagctgtgatcagcggcaaccctggggaccccggggtgcccggcctgcccggcctgaagggagatgagggcatccagggcctgcggggccccagcggcgtgcccggcctgcctgccctgagcggcgtgcctggggccctgggcccccagggcttccctggcctgaagggggaccagggcaaccctggccgcaccaccatcggggctgctggcctgcccggcagagatggcctgcccggccccccaggccccccaggcccccccagccctgagtttgaaacagagaccctgcacaacaaggagagcggcttccctggcctgcggggggagcagggccccaagggcaacctgggcctgaagggcatcaagggggacagcggcttctgtgcctgtgatggaggagtgcccaacacaggccccccaggagagcccggccccccaggcccctggggcctcatcggcctgcccggcctgaagggggcccggggggaccggggcagcggcggggcccagggccctgctggggcccctggcctggtgggccccctgggccccagcggccccaagggcaagaagggggagcccatcctgagcaccatccagggcatgcctggggacagaggagacagcggcagccagggcttccggggcgtcatcggggagcccgggaaggatggagtgcccggcctgcccggcctgcccggcctgcctggagatggcggccagggcttccctggagagaagggcctgcccggcctgcctggagagaagggccaccctggccccccaggcctgcctggaaatggcctgcccggcctgcccggcccccggggcctgcccggggacaagggcaaggatggcctgcccggccagcagggcctgcccggcagcaagggcatcaccctgccctgcatcatccctggcagctatggccccagcggcttccctggcaccccaggcttccctggccccaagggcagccggggcctgcccggcaccccaggccagcccggcagcagcggcagcaagggggagcccggcagccctggcctggtgcacctgcctgagctgcccggcttccctggccccagaggagagaagggcctgcccggcttccctggcctgcccgggaaggatggcctgcccggcatgattggcagccctggcctgcccggcagcaaaggagccaccggggacatctttggagcagaaaatggagcccctggagagcagggcctgcagggcctgaccggccacaagggcttcctgggggacagcggcctgcccggcctgaagggcgtgcacggcaagccaggcctgctgggccccaagggggagcggggcagccctggcaccccaggccaggtgggccagcccggcaccccaggcagcagcggcccctacggcatcaagggcaagagcggcctgcccggggcccctggcttccctggcatcagcggccaccctgggaagaagggcacccggggcaagaagggccccccaggcagcatcgtgaagaagggcctgcccggcctgaagggcctgcccggcaaccctggcctggtgggcctgaagggcagccctggcagccctggggtggccggcctgcctgccctgagcggccccaagggggagaagggctctgtgggctttgtgggcttccctggcatccctggcctgcccggcatccctggcacccggggcctgaagggcatccctggcagcacaggcaagatgggccccagcggccgggccggcaccccaggagagaagggggaccggggcaaccctggccctgtgggcatccccagcccccggcggcccatgagcaacctgtggctgaagggggacaagggcagccagggcagcgctggcagcaatggcttccctggccccaggggggacaagggggaggccggccggcccggccccccaggcctgcccggggcccctggcctgcccggcatcatcaagggcgtgtctgggaagccaggccccccaggcttcatgggcatccggggcctgcccggcctgaagggcagcagcggcatcaccggcttccctggcatgcctggagagagcggcagccagggcatccggggcagccctggcctgcccggggccagcggcctgcccggcctgaagggggacaatggccagacagtggagatcagcggcagccctggccccaagggccagcctggagagagcggcttcaagggcaccaagggcagagatggcctcatcggcaacatcggcttccctggcaacaagggagaagatggcaaggtgggcgtgtctggagatgtgggcctgcccggggcccctggcttccctggggtggccggcatgagaggagagcccggcctgcccggcagcagcggccaccagggcgccatcggccccctgggcagccctggcctcatcggccccaagggcttccctggcttccctggcctgcacggcctgaatggcctgcccggcaccaagggcacccacggcaccccaggccccagcatcaccggggtgcccggccctgctggcctgcccggccccaagggggagaagggctacccaggcatcggcatcggggcccctgggaagccaggcctgcggggccagaagggggaccggggcttccctggcctgcagggccctgctggcctgcccggggcccctggcatcagcctgcccagcctgattgctggccagcccggggaccccggccggcccggcctggatggagagcggggccggcccggccctgctggccccccaggccccccaggccccagcagcaaccagggcgacacaggagaccccggcttccctggcatccctggccccaagggccccaagggggaccagggcatccctggcttcagcggcctgcccggggagctgggcctgaagggcatgagaggagagcccggcttcatgggcacccctgggaaggtgggccccccaggggaccccggcttccctggcatgaagggcaaggccggcccccggggcagcagcggcctgcagggcgaccccggccagacccccacagctgaggccgtgcaggtgcccccaggccccctgggcctgcccggcattgatggcatccctggcctgaccggggaccccggggcccagggccctgtgggcctgcagggcagcaagggcctgcccggcatccctgggaaggatggccccagcggcctgcccggccccccaggggccctgggggaccccggcctgcccggcctgcagggccccccaggctttgagggcgcccctggccagcagggccccttcggcatgcctggcatgcctggccagagcatgagggtgggctacaccctggtgaagcacagccagagcgagcaggtgcccccctgccccatcggcatgagccagctgtgggtgggctacagcctgctgtttgtggagggccaggagaaggcccacaaccaggacctgggctttgctggcagctgcctgccccgcttcagcaccatgcccttcatctactgcaacatcaatgaggtgtgccactacgccaggagaaatgacaagagctactggctgagcaccacagcccccatccccatgatgcctgtgtcccagacccagatcccccagtacatcagccgctgcagcgtgtgtgaggcccccagccaggccatcgctgtgcacagccaggacatcaccatcccccagtgccccctgggctggaggagcctgtggattggctacagcttcctgatgcacacagctgctggagctgagggcggcggccagagcctggtgtccccaggcagctgcctggaggacttccgggccacccccttcattgaatgttctggggcccggggcacctgccactactttgccaacaagtacagcttctggctgaccaccgtggaggagcggcagcagtttggagagctgcctgtgtctgagaccctgaaggccggccagctgcacaccagggtgagccgctgccaggtgtgcatgaagagcctgtag

SEQ ID NO: 324531 - DNA, 5076 bp, Artificial Sequence
  derived and/or modified sequence
atgcaccctggcctgtggctgctgctggtgaccctgtgcctgacagaggagctggccgctgctggggagaagagctatggcaagccctgtggcggccaggactgcagcggcagctgccagtgcttccctgagaagggggcccggggccggcccggccccatcggcatccagggccccaccggcccccagggcttcaccggcagcacaggcctgagcggcctgaagggggagcggggcttccctggcctgctgggcccctacggccccaagggggacaagaagttcagcatccctgtgctgctgatctatgacagcaggcctggccaccctggccagcccggcccccggggccccccaggcctggatggctgcaatggcacccagggcgctgtgggcttccctggcccagatggctacccaggcctgctgggccccccaggcctgcccggccagaagggcagcaaaggagaccctgtgctggcccctggcagcttcaagggcatgaaggccttcatccccctgtttgagagcatccggggcccccagggcgcccctggcttccctggagctgtgggccctgctggccccccaggcctgcagcagggccagccccccttcctggaggtgctcttcccccactggcatgaaggagaggaggccaaggtgcgggacagcctgtttggagatgtgggcctgcccggccctgctggccccccacccagcactggagagctggagttcatgggcttccccaagggcaagaagggcagcaagggggagcccggccccaagggcttccctggcatcagcggccccccaggcttccctggcctgggcaccactggagagaagggggagaagggggagaagggcatccctggcctgcccggccccaggaccctgctgtgcagccacaccttccacctggtggtgaccatgttcctgagccagggcaagaagggcaccctgggcttccctggcctgaatggcttccagggcatcgagggccagaagggggacatcggcctgcccggcccagatgtgttcatcgacattgatggagctgtgatcagcggcaaccctggggaccccggggtgcccggcctgcccggcctgaagggagatgagggcatccagggcctgcggggccccagcggcgtgcccggcctgcctgccctgagcggcgtgcctggggccctgggcccccagggcttccctggcctgaagggggaccagggcaaccctggccgcaccaccatcggggctgctggcctgcccggcagagatggcctgcccggccccccaggccccccaggcccccccagccctgagtttgaaacagagaccctgcacaacaaggagagcggcttccctggcctgcggggggagcagggccccaagggcaacctgggcctgaagggcatcaagggggacagcggcttctgtgcctgtgatggaggagtgcccaacacaggccccccaggagagcccggccccccaggcccctggggcctcatcggcctgcccggcctgaagggggcccggggggaccggggcagcggcggggcccagggccctgctggggcccctggcctggtgggccccctgggccccagcggccccaagggcaagaagggggagcccatcctgagcaccatccagggcatgcctggggacagaggagacagcggcagccagggcttccggggcgtcatcggggagcccgggaaggatggagtgcccggcctgcccggcctgcccggcctgcctggagatggcggccagggcttccctggagagaagggcctgcccggcctgcctggagagaagggccaccctggccccccaggcctgcctggaaatggcctgcccggcctgcccggcccccggggcctgcccggggacaagggcaaggatggcctgcccggccagcagggcctgcccggcagcaagggcatcaccctgccctgcatcatccctggcagctatggccccagcggcttccctggcaccccaggcttccctggccccaagggcagccggggcctgcccggcaccccaggccagcccggcagcagcggcagcaagggggagcccggcagccctggcctggtgcacctgcctgagctgcccggcttccctggccccagaggagagaagggcctgcccggcttccctggcctgcccgggaaggatggcctgcccggcatgattggcagccctggcctgcccggcagcaaaggagccaccggggacatctttggagcagaaaatggagcccctggagagcagggcctgcagggcctgaccggccacaagggcttcctgggggacagcggcctgcccggcctgaagggcgtgcacggcaagccaggcctgctgggccccaagggggagcggggcagccctggcaccccaggccaggtgggccagcccggcaccccaggcagcagcggcccctacggcatcaagggcaagagcggcctgcccggggcccctggcttccctggcatcagcggccaccctgggaagaagggcacccggggcaagaagggccccccaggcagcatcgtgaagaagggcctgcccggcctgaagggcctgcccggcaaccctggcctggtgggcctgaagggcagccctggcagccctggggtggccggcctgcctgccctgagcggccccaagggggagaagggctctgtgggctttgtgggcttccctggcatccctggcctgcccggcatccctggcacccggggcctgaagggcatccctggcagcacaggcaagatgggccccagcggccgggccggcaccccaggagagaagggggaccggggcaaccctggccctgtgggcatccccagcccccggcggcccatgagcaacctgtggctgaagggggacaagggcagccagggcagcgctggcagcaatggcttccctggccccaggggggacaagggggaggccggccggcccggccccccaggcctgcccggggcccctggcctgcccggcatcatcaagggcgtgtctgggaagccaggccccccaggcttcatgggcatccggggcctgcccggcctgaagggcagcagcggcatcaccggcttccctggcatgcctggagagagcggcagccagggcatccggggcagccctggcctgcccggggccagcggcctgcccggcctgaagggggacaatggccagacagtggagatcagcggcagccctggccccaagggccagcctggagagagcggcttcaagggcaccaagggcagagatggcctcatcggcaacatcggcttccctggcaacaagggagaagatggcaaggtgggcgtgtctggagatgtgggcctgcccggggcccctggcttccctggggtggccggcatgagaggagagcccggcctgcccggcagcagcggccaccagggcgccatcggccccctgggcagccctggcctcatcggccccaagggcttccctggcttccctggcctgcacggcctgaatggcctgcccggcaccaagggcacccacggcaccccaggccccagcatcaccggggtgcccggccctgctggcctgcccggccccaagggggagaagggctacccaggcatcggcatcggggcccctgggaagccaggcctgcggggccagaagggggaccggggcttccctggcctgcagggccctgctggcctgcccggggcccctggcatcagcctgcccagcctgattgctggccagcccggggaccccggccggcccggcctggatggagagcggggccggcccggccctgctggccccccaggccccccaggccccagcagcaaccagggcgacacaggagaccccggcttccctggcatccctggccccaagggccccaagggggaccagggcatccctggcttcagcggcctgcccggggagctgggcctgaagggcatgagaggagagcccggcttcatgggcacccctgggaaggtgggccccccaggggaccccggcttccctggcatgaagggcaaggccggcccccggggcagcagcggcctgcagggcgaccccggccagacccccacagctgaggccgtgcaggtgcccccaggccccctgggcctgcccggcattgatggcatccctggcctgaccggggaccccggggcccagggccctgtgggcctgcagggcagcaagggcctgcccggcatccctgggaaggatggccccagcggcctgcccggccccccaggggccctgggggaccccggcctgcccggcctgcagggccccccaggctttgagggcgcccctggccagcagggccccttcggcatgcctggcatgcctggccagagcatgagggtgggctacaccctggtgaagcacagccagagcgagcaggtgcccccctgccccatcggcatgagccagctgtgggtgggctacagcctgctgtttgtggagggccaggagaaggcccacaaccaggacctgggctttgctggcagctgcctgccccgcttcagcaccatgcccttcatctactgcaacatcaatgaggtgtgccactacgccaggagaaatgacaagagctactggctgagcaccacagcccccatccccatgatgcctgtgtcccagacccagatcccccagtacatcagccgctgcagcgtgtgtgaggcccccagccaggccatcgctgtgcacagccaggacatcaccatcccccagtgccccctgggctggaggagcctgtggattggctacagcttcctgatgcacacagctgctggagctgagggcggcggccagagcctggtgtccccaggcagctgcctggaggacttccgggccacccccttcattgaatgttctggggcccggggcacctgccactactttgccaacaagtacagcttctggctgaccaccgtggaggagcggcagcagtttggagagctgcctgtgtctgagaccctgaaggccggccagctgcacaccagggtgagccgctgccaggtgtgcatgaagagcctgtag

SEQ ID NO: 324532 - DNA, 6700 bp, Artificial Sequence
  derived and/or modified sequence
ggaactatctcctgagtgctgcaagttgtaacgggcaccgctgagcctgtttccctttggagcacttcttatctagaagcagtgtttagtttcttccaaactgggccacttcgtccacctactctgttctgagtaaggaaacagcctccaagcatcagcagagcccagatgagcacgggccgcggagccgcttagcagtctcccgggacccagctccggaggagccgcaagcatgcaccctgggttgtggctgctcctggttacgttgtgcctgaccgaggaactggcagcagcgggagagaagtcttatggaaagccatgtgggggccaggactgcagtgggagctgtcagtgttttcctgagaaaggagcgagaggacgacctggaccaattggaattcaaggcccaacaggtcctcaaggattcactggctctactggtttatcgggattgaaaggagaaaggggtttcccaggccttctgggaccttatggaccaaaaggagataagaagttctccatcccagttctgctcatttatgattctcgccctggccaccctggacaaccaggccccagaggcccacctggtctggatggctgtaatggaactcaaggagctgttggatttccaggccctgatggctatcctgggcttctcggaccacccgggcttcctggtcagaaaggatcaaaaggtgaccctgtccttgctccaggtagtttcaaaggaatgaaggcatttattccactgtttgaatctatcagaggcccacaaggagcacccggatttcctggagctgtaggacctgcaggaccaccaggattacaacaagggcaacctccattcttggaggttttgtttcctcattggcatgagggtgaagaggccaaagtaagagacagtttatttggggatgttggcctccctggcccagcaggacctccaccatctactggagagctggaattcatgggattccccaaagggaagaaaggatccaagggtgaaccagggcctaagggttttccaggcataagtggccctccaggcttcccgggccttggaactactggagaaaagggagaaaagggagaaaagggaatccctggtttgccaggacctaggactctcttatgctctcatactttccacttagtggtaactatgtttctgtcacagggcaagaaagggaccctgggatttcctgggcttaatggattccaaggaattgagggtcaaaagggtgacattggcctgccaggcccagatgttttcatcgatatagatggtgctgtgatctcaggtaatcctggagatcctggtgtacctggcctcccaggccttaaaggagatgaaggcatccaaggcctacgtggcccttctggtgtccctggattgccagcattatcaggtgtcccaggagccctagggcctcagggatttccagggctgaagggggaccaaggaaacccaggccgtaccacaattggagcagctggcctccctggcagagatggtttgccaggcccaccaggtccaccaggcccacctagtccagaatttgagactgaaactctacacaacaaagagtcagggttccctggtctccgaggagaacaaggtccaaaaggaaacctaggcctcaaaggaataaaaggagactcaggtttctgtgcttgtgacggtggtgttcccaacactggaccacccggggaaccaggcccacctggtccatggggtctcataggccttccaggccttaaaggagccagaggagatcgaggctctgggggtgcacagggcccagcaggggctccaggcttagttgggcctctgggtccttcaggacccaaaggaaagaagggggaaccaattctcagtacaatccaaggaatgccaggagatcggggtgattctggctcccagggcttccgtggtgtaataggagaaccaggcaaggacggagtaccaggtttaccaggtctgccaggccttccgggtgatggtggacagggcttcccaggtgaaaaggggttacctggacttcctggtgaaaaaggccatcctggtccacctggcctcccaggaaatgggttaccaggacttcctggaccccgtgggcttcctggagataaaggcaaggatggattaccgggacaacaaggccttcccggatctaagggaatcaccctgccctgtattattcctgggtcatacggtccatcaggatttccaggcactcccggattcccaggccctaaagggtctcgaggcctccctgggaccccaggccagcctgggtcaagtggaagtaaaggagagccagggagtccaggattggttcatcttcctgaattaccaggatttcctggacctcgtggggagaagggcttgcctgggtttcctgggctccctggaaaagatggcttgcctgggatgattggcagtccaggcttacctggttccaagggagccactggtgacatctttggtgctgaaaatggtgctccgggggaacaaggcctacaaggattaacagggcacaaaggatttcttggagactctggccttccaggactcaagggtgtgcacgggaagcctggcttactaggccccaaaggtgagcggggcagccctgggacaccaggacaggtgggacagccaggcaccccaggatctagtggtccatatggcatcaagggcaaatctgggctcccaggagcaccaggcttcccaggcatctcaggacatcctggaaagaaaggaacaagaggcaagaaaggtcctcctggatcaattgtaaagaaagggctgccagggctaaaaggccttcctggaaatccaggcctagtaggactgaaaggaagcccaggctctccaggggtcgctgggttgccagccctctctggacccaagggagagaaggggtctgttggattcgtaggttttccaggaataccaggtctgcctggtattcctggaacaagaggattaaaaggaattccaggatcaactggaaaaatgggaccatctggacgtgctggtactcctggtgaaaagggagacagaggcaatccggggccagtcggaatacctagtccaagacgtccaatgtcaaacctttggctcaaaggagacaaaggctctcaaggctcagccggatccaatggatttcctgggccaagaggtgacaaaggagaggctggtcgacctggaccaccaggcctacctggagctcctggcctcccaggcattatcaaaggagttagtggaaagccagggccccctggcttcatgggaatccggggcttacctggcctgaaggggtcctctgggatcacaggtttcccaggaatgccaggagaaagtggttcacaaggtatcagagggtcgcctggactcccaggagcatctggtctcccaggcctgaaaggagacaacggccagacagttgaaatttccggtagcccaggacccaagggacagcctggcgaatctggttttaaaggcacaaaaggaagagatggactaataggcaatataggcttccctggaaacaaaggtgaagatggaaaagttggtgtttctggagatgttggccttcctggagctccaggatttccaggagttgccggcatgagaggagaaccaggacttccaggttcttctggtcaccaaggggcaattgggcctctaggatcccccggattaataggacccaaaggcttccctggatttcctggtttacatggactgaatgggcttccgggcaccaagggtacccatggcactccaggacctagtatcaccggtgtgcctgggcctgctggtctccctggacccaaaggagaaaaaggatatccaggaattggcatcggagctccagggaagccgggcctgagagggcaaaaaggtgatcgaggtttcccaggtctccagggccctgctggtctccccggtgccccaggcatctccttgccctcactcatagcaggacagcctggtgaccccgggcgaccaggcctagatggagaacgaggccgcccaggccccgctggacccccaggtccccctgggccatcctcgaatcaaggcgacaccggagaccctggcttccctggaattcctggacctaaagggcctaagggagaccaaggaattccaggtttttctggcctccctggagagctaggactgaaaggcatgagaggtgagcctggcttcatggggactccaggcaaggttgggccacctggagacccaggatttcccggaatgaaggggaaggcagggccaagaggctcttctggcctccaaggtgatcctggacaaacaccaactgcagaagctgtccaggttcctcctggacccttgggtctaccagggatcgatggcatccctggcctcactggggaccctggggctcaaggccctgtaggcctacaaggctccaaaggtttacctggcatccccggtaaagatggccccagtgggctcccaggcccacctggggctcttggtgatcctggtctgcctggactgcaaggccctccaggatttgaaggagctccagggcagcaaggccccttcgggatgcctggaatgcctggccagagcatgagagtgggctacacgttggtaaagcacagccagtcggaacaggtgcccccgtgtcccatcgggatgagccagctgtgggtggggtacagcttactgtttgtggaggggcaagagaaagcccacaaccaggacctgggctttgctggctcctgtctgccccgcttcagcaccatgcccttcatctactgcaacatcaacgaggtgtgccactatgccaggcgcaatgataaatcttactggctctccactaccgcccctatccccatgatgcccgtcagccagacccagattccccagtacatcagccgctgctctgtgtgtgaggcaccctcgcaagccattgctgtgcacagccaggacatcaccatcccgcagtgccccctgggctggcgcagcctctggattgggtactctttcctcatgcacactgccgctggtgccgagggtggaggccagtccctggtctcacctggctcctgcctagaggactttcgggccactcctttcatcgaatgcagtggtgcccgaggcacctgccactactttgcaaacaagtacagtttctggttgaccacagtggaggagaggcagcagtttggggagttgcctgtgtctgaaacgctgaaagctgggcagctccacactcgagtcagtcgctgccaggtgtgtatgaaaagcctgtagggtggcacctgccactctgccccttgccctcccctgcccctcacaacagtcacctcacaaacctgaatggtctgaagaaggaaggcctgagcccctttgcctgtcaagttgtacattggagtctcatttgggctagactaccggacactcgtcaccccagccctcgggtccatagagatgagcccaccctgctgagatctgctgtcctgtttctgtcaagctggtgctactgtttgatttggatgattgtgtgactattcatggctacctcagaaagatttgatgggccacaactgtcttagactgctagctttctccttaccgtcttgatcggaaagctcttcctaatcgctaatcagtcatttcttcatgtacagaggtcagcacacattatttggcttaaaccagaacccagtgtttccacacttaaattctctaaccgaatattcatggatggctcaagtctgcacagagcaagtcctcactcttcaaggaggcccactgtgtctaggcaggcaagagaattgaaatgaggtgccacccagtagcccagagtgagctttagctctctctagaatgagcaagactgggccccacatggcttagagaggcttgaaggccagcagctgggttgggggtggtggtcattaatggcatatggtcctagacaaaccatctcctccttgccggctccccctccagccagagacagaggatgtggcctggttcaaagtaaagcagaggatgcaacaaatgtggccaagcctatcaaaggaaatgagaatgacagccttttttcctgggccagaagtagaggggtgggtgcgtaaggatgtgtgagttttgcttttgactccaggaacaaaaaggtaaatcccacatcccagtttctcagaagtccctgtttattccaaatgccatccagatgtgtgcaatgtggcaaactgaagctgcacagtgttggtttccttgtattctgaggatgttaaagactttgttaaatggttatccaattgctctttcacaggtagcctattaaactattttaatatgtttttttaaacctcataaaaatctagcacactcttctcttgagcagttagcagacctaaagcaagcctgaattggctatgcagtacattgtattctgtttgggggaatttgttttagccattttctttaattaccagttttccagaacactcttagctatgttgacatgaggcagttccttccaggtgattctgtttccttaagtattatataaactgtgccaatacagacaaagcataatcaatataatctgaattattgttatctttacctcctgagtaataagcatggtgtcagttttgtacatagcaaataaaataaatgaaatctgaacatgtg

SEQ ID NO: 324533 - DNA, 5073 bp, Artificial Sequence
  derived and/or modified sequence
atgcaccccggcctgtggctgctgctggtgaccctgtgcctgaccgaggagctggcagcagcaggggagaagagttacgggaagccttgtggcgggcaggactgcagcggcagttgtcagtgctttcctgaaaagggagctagaggtcgccccggaccaatcggcatccagggcccaacaggtccccagggttttactggctctactgggctgtcaggactaaagggtgagagaggatttcccgggctcctggggccttatgggcccaagggagataaaggccctatgggagtgcctggattcctgggaattaacggcattcccggtcatcctgggcagcctggccctagaggccctccaggcctggatggatgcaatgggacgcagggggccgtggggtttcccggaccagacggctatcccgggctgctcggtccccccgggctccccggccagaagggttccaaaggagaccccgttttggccccagggtccttcaaaggaatgaagggggatcctggactccccggcttggatgggatcacagggccacaaggggccccagggttcccaggtgctgtgggcccagccggacccccaggtttacaggggccaccaggtcctcccggacctctcggcccagacgggaatatgggccttggtttccaaggggaaaaaggagtgaagggcgatgtggggctccctgggcctgcaggacctccaccctctacaggcgagttggagttcatgggattcccaaaaggcaaaaaggggagcaagggagaacccgggcccaagggtttccctgggatcagcggccctccgggttttcctggtcttggtaccacgggagagaaaggtgaaaagggcgaaaagggcattcccgggctgcccggcccacggggccctatgggcagtgaaggcgttcaggggccacccggccagcagggcaagaagggcactctgggattcccaggcctcaatggattccagggtatcgaaggtcagaaaggagacatcggactccctgggcccgacgtgtttattgatatcgacggcgcggttatcagtgggaatcctggggatcccggtgtgccaggcctgccaggcttgaaaggtgatgaggggatccaaggcctgcgagggccctcaggggtccccggcttacccgccttaagcggggtgcctggagcactgggtccccagggatttcccgggctcaagggtgatcagggaaatcctggaagaacaacaatcggtgctgccggactgcccggaagagacggactgcccggcccccctggcccccccggacctccttctccggaattcgagactgaaactcttcacaacaaagagtcaggttttcccggtctgcggggcgagcagggtcctaagggcaacctgggactcaaaggcatcaagggtgactctggattctgcgcttgcgatggcggagtccccaacactggtcctcctggggagcctgggcctcccgggccttgggggctcatcggcctgcccggactgaaaggagccaggggggatcgagggtcagggggggcacaaggccctgcaggcgccccaggactcgtggggccactcggcccttcgggtcctaaaggcaaaaagggcgagcctatcctgtccaccatccaggggatgcctggagacaggggcgatagcggctcacagggttttcggggcgtaataggagagcctggtaaggatggtgtaccgggcctgccaggtctccctggactacctggagatgggggtcagggctttcccggagaaaagggcctgcccgggcttcctggggaaaagggccaccccggcccccctgggctgccaggaaatggcctgccaggtctgcctgggcctcgcggactccctggcgataaaggaaaagacggtctgcctggtcaacagggtttaccagggtcaaagggtatcacgctgccgtgcatcatccctgggtcttatgggcctagcgggtttcccggtacacccggattcccaggcccgaaaggaagccggggactccccggtacccccggccaacctgggtcgtcagggtccaagggcgagcctgggtctcctgggctggtacacctgcccgaactgccaggttttccgggacctcgcggcgaaaaaggtttacctggattccccggactcccaggaaaggacggtttgcctggaatgatcggctcaccaggcctgcccggaagcaaaggcgctacaggggacattttcggcgccgaaaatggggctcccggggagcaaggtctgcagggcctgaccggccacaagggatttttaggggatagcgggctccccggcctgaaaggcgtgcacggaaaacctggattgctgggccccaaaggcgagagaggctctcccggaaccccagggcaggtcggacagccagggacccccggcagctccgggccatatggcatcaagggcaagtccggactgcccggggcgccaggcttccccggaatctcaggccaccctggtaaaaaaggcacgcggggcaagaagggaccgccgggctcaatcgttaaaaagggacttcctggacttaagggattgcccggcaatcctggtctggtgggcctcaagggcagccccggtagtccaggagtcgcaggattgcctgcacttagcggacctaagggggagaagggtagcgttggctttgtgggattcccaggtattcccggactcccagggatcccaggtactagaggactgaagggcatccctgggtctactggcaagatgggaccctctggccgggccggcactcctggtgagaaaggcgacagagggaatcccgggcccgtgggaattcctagtcctcgacgacctatgagcaatctgtggctgaaaggcgacaagggttcgcaaggctccgcgggcagtaatggattcccaggaccccgaggcgataagggcgaggccggaagacctggacccccaggactgccaggagcccccggcctgccaggcatcatcaaaggggtctctgggaaaccaggaccccctggatttatggggataagaggactcccaggcctcaaaggctcttccgggattaccggatttcctggaatgcccggagagtcaggctcccagggaataagagggagtccaggtctgcctggcgcgagcggcctccctgggctcaaaggggacaacggccaaacagtggagatcagcgggtctcctggaccgaaagggcagcccggggaatccgggtttaagggaaccaagggacgagacggattaattggtaatatcggttttccggggaataaaggagaggacggcaaggtgggagtgagtggcgatgtagggcttcctggagcccctgggttcccaggtgttgccggcatgcgtggcgagcccggcctgcctggctcttccggccaccagggcgccatcgggccacttggttcccccggattaattggtcccaaaggttttccaggttttcctgggcttcatggattgaatggacttccaggaacaaagggaacccatggaacgcctgggccttctattactggagtcccaggcccggccggcttgcctgggcctaaaggggaaaaagggtacccgggaatcgggatcggagcccctggaaaacccgggttacgggggcagaagggagacaggggcttccctggtctgcaagggccagctgggctgccaggggcccccggaatctctcttccctcactcattgccggccagcctggcgaccccggcaggccagggctcgacggagagcggggccgaccgggtcccgcggggcctccagggccgcctgggccaagctccaaccagggagatacaggggatcccggatttccaggaatacccggcccgaaaggacccaagggcgatcagggtattcccggcttttcaggactgccgggggaactgggcctgaaaggtatgcgaggtgaacctggcttcatggggacgccaggcaaggtgggtccacccggtgatccgggtttcccagggatgaaaggtaaggctggccccaggggctcgtcaggcttgcagggcgacccaggacagacccccacagccgaggccgtgcaggttccaccaggaccccttggcctgcccggcatagatggaatccctgggctaaccggcgatcctggagctcaaggacctgtgggcctccagggttctaaggggctcccagggatacccggaaaggatgggccaagtgggctccccggtccacccggagccctcggagaccctggcctgccgggtcttcaggggcctcctggatttgaaggggcacccggtcagcagggccccttcggtatgcctgggatgcctggccagtcaatgcgcgttggttatacgctggtgaagcactcacagagtgagcaggtccctccctgtccaataggcatgtctcagctttgggtgggctattctctgttatttgttgagggtcaagagaaggcgcacaatcaagaccttggcttcgctggttcctgcctgcccagattttctactatgcctttcatctattgtaacattaacgaggtgtgtcattacgctcgccggaatgacaagtcgtattggctgagtactaccgctcccatccccatgatgccagtaagccaaactcagataccacagtacattagtcggtgcagcgtgtgtgaggcccccagccaggctatcgctgttcatagccaggacatcacaatcccccagtgtcctctgggctggagatccctttggatcggctactcgtttttgatgcacacagctgccggcgctgagggaggggggcagagcctggtgagccctggttcttgtttggaggactttcgggctacgccctttatcgaatgcagcggcgcgcgcggcacctgtcattacttcgccaacaagtattcgttctggctgacaaccgtggaagaacggcagcagtttggcgagcttccagtatctgaaacactgaaagcagggcagctgcacacacgtgtaagtaggtgtcaggtgtgcatgaaatccctctag

SEQ ID NO: 324534 - DNA, 5076 bp, Artificial Sequence
  derived and/or modified sequence
atgctgatcaacaagctgtggctgctgctggtgaccctgtgcctgaccgaggagcttgcagcggccggtgagaagtcgtatggaaaaccatgcggaggccaagactgttctggatcatgccaatgcttccctgaaaagggcgccagaggacgtccagggcccattggcatacaggggcctaccggcccccaggggttcactggaagcacaggactgtcaggacttaaaggcgaacgagggtttcctggcctgctcggtccctacggtcctaagggcgacaagggccctatgggagttccaggattcctgggaatcaacggtattccagggcaccccggacaaccgggcccgcgcggtccccccggcttggacgggtgcaatggcactcagggtgccgtagggttcccaggccccgacgggtatccaggcttgcttggcccgccaggattgcctggacagaaaggtagcaaaggagatccagtgctggctcccggctccttcaaggggatgaaaggtgacccaggcctcccaggtctagatggtattaccggcccgcaaggcgcccccggcttcccaggggcagtggggccggcgggacctcctggtctccagggacctccaggcccgccaggacctctgggcccggacggcaatatgggactcggattccagggcgaaaagggtgtcaagggagacgttggtttgcccgggccggcgggccctcctccctcaactggcgaactcgaattcatggggttcccaaaaggcaagaagggctctaaaggagagcccggccccaagggctttccgggaataagcggccctccaggattcccaggattgggaactacgggcgagaagggtgagaagggggaaaagggcattcctggcctgccgggaccacgcggcccaatgggaagcgagggggtccaggggcccccgggacaacaagggaagaaaggtacactgggattccccggcttaaatgggttccaagggattgaggggcaaaagggggacatcggtctgcctggccccgatgttttcattgatatagacggtgctgttatcagcggaaatcctggtgacccaggagttccagggctgcccggcctgaagggtgatgaagggattcaaggactcagaggcccctccggtgtcccggggcttccagccctgtcaggggtgcctggagcgcttggacctcaggggttccctggcctgaagggggaccaagggaaccccgggagaacaaccatcggcgccgcagggctgccagggcgagacggactgcctgggccacctggcccacctggaccccccagtccggagttcgaaacagaaacactccataacaaagagtcaggctttcccggcttaagaggggaacagggcccaaaggggaatctcgggttgaagggaatcaaaggcgattcgggtttctgcgcctgtgacggcggagttccgaatacaggacctccgggcgaacccggcccacccggtccctgggggttgataggacttcctgggctcaagggggcaaggggcgacagaggtagtggaggcgcgcagggccccgctggagcacctggactcgttgggccgttgggcccttccggacctaagggaaagaaaggcgagccaatattgagcaccatccaaggtatgccaggcgataggggtgattccggcagccagggcttcaggggcgtcatcggtgagcctgggaaagacggcgtgccaggtctgccaggcctcccggggttgccaggcgacggcggccaagggtttccaggagaaaagggcctgcccggcctaccaggggaaaaaggccacccgggtcccccaggcttgcctggtaatggcctgccagggctgcctggccctcgtggcctccctggggacaaaggaaaggacggccttcccgggcagcaaggtttaccaggtagcaagggcatcacacttccgtgtatcattcctggatcatacggaccctcgggcttcccagggacacccggttttccaggaccaaagggcagcagaggcctgccaggaaccccaggccagcctggtagcagcggttccaagggcgaacctggctccccgggtctggtgcatctgcccgagctgcctggtttcccaggtccacgtggagagaagggactgccaggatttcccgggctgccaggaaaagatgggctgccagggatgattggcagccccggcctgcctgggtcaaagggcgctactggggacatattcggcgccgagaatggagccccaggcgagcaaggtctgcaggggcttacagggcacaagggatttctgggcgatagtggacttcccggactgaagggggtccatggaaagcctggactcctcggccctaaaggcgaaagaggctcgccagggacccccggacaggtaggccagccgggaacccctggatctagcggtccatacggcatcaagggcaaatctggcctaccgggcgcacccggcttcccgggaatttcaggtcaccccggtaaaaaaggaaccagaggcaaaaagggtccccctggtagcatagtcaaaaaagggttgccggggctcaaaggactgcccggcaacccggggctggtgggcctgaaggggtccccaggctcgcctggagttgctggtctccctgcgctttctggaccaaagggggaaaaggggtcagtagggttcgtcgggttccccggaatccccgggcttcccggaatccccgggacccgtggtttgaaaggtatacctgggtccacaggcaagatgggacccagcggccgggccgggacgcctggggagaaaggagatcgaggtaatccgggtcccgtgggcattccaagcccccgtcggccaatgagtaatctgtggctgaaaggcgacaaggggagccagggctcagccggatccaacgggtttccaggccctcggggtgacaaaggtgaggcagggagaccaggcccccctggtctgcccggtgcacctgggcttcctggcattatcaagggcgtgtcaggcaagccagggccccctggtttcatggggattagaggtttgccgggattgaaaggatccagtggaataacggggtttcctggcatgccaggcgaatctgggagtcagggcattaggggcagcccaggattacccggcgcgagcggcctcccaggcctgaaaggcgacaacggccagacggtggagatctcaggctctcccggacctaaaggtcaacctggagaatctggttttaaaggaactaaagggcgcgacggtctgataggaaacatcggcttccctgggaacaaaggggaagatgggaaggtcggagtctctggagatgtgggtctcccaggagcgcctggattccctggagtggcgggtatgcgcggcgagccgggactgcccggcagctccgggcatcagggtgcaatcggacctttaggttctccaggactaattggccctaagggtttcccgggatttccagggctgcacgggctcaacggcctgccgggcactaagggaacgcacggaacccctggccccagcattaccggagtaccgggccccgcagggttacccggaccgaagggcgaaaaagggtaccccggcatcggcatcggcgccccagggaagccaggcctgcgcggccagaagggggatagagggtttccagggctgcagggccccgccgggcttccaggcgcacccgggatttcacttcctagccttattgcaggccagcctggagaccctgggagacccggcctcgacggggagcgcgggcgcccaggtcccgcaggcccacccggacctcccggccccagctccaatcagggcgataccggggaccccggcttcccaggtatacctggcccaaaagggcctaaaggagaccaagggataccaggcttcagtggcctaccaggagaacttggtctgaagggaatgcgaggcgagcccgggttcatggggactcccggcaaagtaggaccacccggtgaccccggcttccctggcatgaaagggaaggcaggccccagaggctcctctggcctgcagggcgatcccggccaaactcctacagcagaagcagtgcaggtccccccaggccctctgggccttcctggcattgatggaattccaggtcttaccggggatccgggcgcccaaggtcctgtgggattgcagggctcaaagggtctgccaggaatacccggaaaggacgggccatccggcctgcctggtccaccaggagcactgggcgaccctgggttaccggggcttcagggacctccaggtttcgaaggggccccaggccagcaagggccttttggcatgcccgggatgcctggccaaagtatgcgcgtgggatacacgttggtgaagcactctcagagcgaacaggtcccaccttgccccatcggaatgagccagctgtgggtgggctactctctgctgtttgtcgaaggacaagagaaggcccacaatcaagacctggggttcgccggctcttgtctcccaagattttctacgatgcccttcatctattgcaatataaacgaggtgtgccactatgccaggaggaacgacaagtcttactggttgagtaccactgctcctatacccatgatgcccgtgagtcaaacacagattccccaatacatcagcagatgctctgtgtgtgaagcaccatcgcaggccatcgcagttcacagtcaagatatcaccattcctcagtgcccgctagggtggaggtcgctgtggattgggtacagctttctcatgcacacggcagccggtgcagagggaggaggacagtccctggtttcccctgggagctgtcttgaagacttccgggccaccccgttcatcgaatgtagtggggcccgtggaacctgccactacttcgcaaataaatacagcttttggttgaccaccgttgaggagcgccagcagttcggagagctgcctgtcagtgagacccttaaagctgggcagctccacacaagggttagtcggtgccaagtctgtatgaaatctctatag

SEQ ID NO: 324535 - DNA, 5076 bp, Artificial Sequence
  derived and/or modified sequence
atgcaccccggcctgtggctgctgctggtgaccctgtgcctgaccgaggaattagctgctgccggggagaaatcatacgggaagccttgtgggggtcaggattgctcagggtcctgccaatgtttccccgagaagggggcgcggggccggccgggtccaattggtatacagggcccgacaggaccccagggatttaccgggagcactgggctctctggactaaagggcgagcgcggcttcccaggactgctcggaccgtatggcccgaagggcgacaaaaagttttccatcccggttttgttgatctacgactctcgacctggacatcccggccagccgggccccagaggtccgcccggccttgatgggtgtaatggcactcagggtgcagtgggctttccagggcccgacggatatcccgggctacttggtcctcctggcctgcccggacagaaaggtagcaagggtgaccccgtcttggctccagggagctttaaaggcatgaaggcattcatcccactgttcgagtcgatacgcggtccacaaggtgctcccggatttccaggggccgtgggacccgccggccctcccggcctccagcagggccagcctccatttttggaggtgctgtttcctcactggcacgagggcgaggaggcgaaggtcagggacagcctgttcggggacgtgggcttgcctggtccggccggacccccgccgtcaaccggcgagctggagttcatgggctttcccaagggcaaaaagggcagcaaaggggagccaggacccaaaggcttcccaggaatatctggtccacccggcttccccggtctggggaccactggcgagaaaggcgaaaagggagagaaagggattccaggcctgccggggccgcgtaccctcctttgttctcacacgtttcatctagtcgtcacaatgttcctaagccagggaaagaagggcaccctcggtttccccgggctgaacgggtttcaggggatcgagggccagaaaggcgacatcggactgcctggccccgatgtgttcatcgatatcgacggagcagtcatcagcggaaaccccggggaccccggagtgcccggactaccaggcctaaagggagacgaagggatccagggccttcggggtccctccggcgttcctgggctcccagccctgtctggcgtaccaggggctctgggcccgcaggggttccccgggcttaaaggagatcaggggaatccaggcagaactaccattggggctgccggactccctggcagagacggccttcccggtcctccagggccgcctggtccaccctctcccgagttcgaaactgaaacactgcataacaaggagtctggattccctggtcttcgcggggaacaagggccaaagggtaatttaggattgaaaggtattaagggggatagcggattttgtgcctgtgacggaggagtgccaaatacaggacctcctggagaacctggcccccctggtccctggggacttattggtctcccaggactgaagggggccaggggcgaccgcggctccggcggggcccaaggacccgccggagcccctgggctggtcggccctttgggaccctcaggccctaagggtaaaaagggcgaacccattctgtccacaatccagggtatgccaggggatagaggagactcaggaagccagggattcaggggtgttatcggcgagcctggcaaagacggcgtcccgggacttccaggcctcccgggactacccggggatggagggcagggctttcctggtgagaagggactgccaggcctgcccggggaaaagggccaccctggcccgccgggtctacccggcaatggtttgcccgggctccctggccctcgggggctccccggcgataaggggaaggatggactgccagggcagcaagggctcccaggctcaaaaggcatcaccctcccctgcattataccaggttcttacggtccctcaggctttccgggcacccctgggtttcccgggccaaagggcagtcgtgggctgccaggtacacctggtcagcccggtagtagcggatccaagggagaacccggcagccccggtttggtgcatctgcccgagctccccgggttccctggccctcggggtgaaaaaggccttcccgggtttcctgggctgccgggcaaagacggactaccaggtatgattgggagccccgggcttcccgggagcaaaggggcaacgggagacattttcggggctgaaaatggcgcccccggagagcaaggtctccagggcctaaccgggcacaaaggattcctcggggatagtggactgcctgggctgaagggagttcacggtaaaccaggcctgctggggccaaagggcgagcggggtagtcccggaacccccggacaagtgggtcaaccaggcacacccggcagttcaggaccctatggcatcaaaggaaagtccggcctccccggggcgcccggctttcccgggattagtggtcatcccggcaaaaaaggaacaagaggtaaaaaaggacctcctgggtcgatcgttaagaagggcctgccagggttgaaaggcttaccgggaaaccccggactggtcggtctgaaaggaagtcccgggtcaccaggggtcgcgggactaccagccttatcaggtccaaaaggggagaaaggaagtgtggggtttgtggggttcccaggtattccaggactgccaggaatccctggcactagaggccttaagggcatcccgggatctactggtaaaatgggaccctccgggcgggctggaaccccaggcgagaagggggaccggggtaacccagggcctgtaggaatcccctctccccgaagacccatgagcaacctttggctcaagggagataaaggcagccagggctctgctggtagtaatggatttccggggccccggggtgataaaggagaggccggccggccagggccgcctggactgcctggcgcgccaggtctgcccggtatcattaaaggggtgtcaggcaagcccggaccacccggattcatgggcattaggggactccctgggttgaaaggtagctcgggcattaccggatttcccggtatgcctggcgagagtggctcgcaagggatccggggcagtcccggcctgcctggggccagcggcctgccgggtctgaaaggcgataatggccaaactgtggagatttccggatctcccgggcctaaaggacaacctggtgaatcgggcttcaagggtaccaagggtcgggacgggttgatcggcaacattgggtttcctggtaacaagggggaggacggcaaggtcggggtgtcaggcgacgtgggtctgccaggcgcgcctggatttcccggcgtggctgggatgcggggggagccggggctgcctggaagctccggacatcagggcgccatcggccctctgggctctccaggcctgatcggacctaagggatttccagggtttccaggactccacggtcttaacggcctccctgggaccaagggtactcacggcacccccggcccttcgattactggagtccctggccctgctgggctaccggggccaaaaggcgaaaaggggtaccccggcatcggcatcggggccccgggtaaacccggcctccgtgggcagaagggggacagggggttccccggcttacagggtcccgccggcctacccggggcacctgggataagccttcccagtttaatcgctggccagcctggcgatcctggccgcccaggcctcgacggagagcgcggaagacctggacctgctgggcctcctggccccccgggcccaagcagcaatcaaggcgacactggagaccccgggttcccaggcattcccggccccaaggggcctaaaggggaccagggcataccaggcttctctggattaccaggtgagctgggactgaagggaatgagaggcgagccgggattcatggggactccgggaaaggtggggcctcccggggatccaggtttccctggaatgaagggcaaggcagggccccgcggttcgagtggcctccagggcgaccctggacagacccctacagccgaagctgtccaagttccccccggaccccttgggttgcctgggattgacggaattccgggcctgaccggggatcctggcgctcagggcccggtaggcctccaaggcagtaagggactaccaggaatccctggaaaggatggcccgagcggtctgcccggccccccaggagcacttggtgaccctgggctccccggcttacagggcccacctggcttcgagggcgcacctggccaacagggcccttttggtatgccgggtatgccaggccaatcgatgagggtaggctatacactagtgaagcatagtcagtccgagcaggttccgccgtgcccaatcggtatgtcacaattgtgggtagggtactctttgctcttcgtggagggacaggagaaagcccacaaccaggacttaggattcgctgggtcttgcttacccaggttcagcactatgccctttatctattgtaatattaacgaagtctgtcactatgccaggcggaatgacaagtcatattggctttccaccaccgctcccatcccgatgatgcccgtgagccagactcaaatcccacaatacatttctcggtgttcagtttgtgaagccccatcgcaagctatcgcagtgcattcacaagatatcactattccccaatgcccactgggttggcgctcactatggatcgggtacagctttctcatgcacaccgcagccggggctgaaggcggcggtcaatccctggtctctcctggatcatgccttgaggacttccgagccactcccttcatcgagtgttcgggcgccagaggtacttgccactacttcgcaaataagtacagcttttggctgacaacagtggaagaaagacagcaatttggcgagctgcccgtctccgagacattaaaggcgggccaactccatacccgtgtgtcacggtgtcaggtgtgtatgaagagcctgtag

SEQ ID NO: 324536 - DNA, 5072 bp, Artificial Sequence
  derived and/or modified sequence
atgcatcctggcctttggctgttgctggtgacactgtgtttgaccgaggaacttgccgctgccggagaaaaatcctatgggaaaccatgcggaggtcaggactgctctggttcatgtcaatgtttccccgagaaaggagcgagaggacgccctggacccataggaattcaaggacccactgggccacagggcttcactggctccacggggttgtcaggcttaaagggagaacggggtttccccggtcttctggggccatatggtcccaaaggggataaagggcctatgggggtccctgggttcctggggattaatggcattccaggacatcctgggcaacccggtcctcggggaccccctggcctggatggctgtaacggaacccaaggcgctgtcgggtttccaggacctgacgggtatccaggcctgctcggcccacctggactccctggccagaagggctctaagggcgaccctgtgctcgctccaggctcctttaagggaatgaagggcgaccccggattgccaggactggacggcattaccggaccccagggagccccagggtttcctggagctgtgggcccagctggcccaccaggcctgcagggcccacccggaccccctggccctctcgggccagatggaaacatgggactgggttttcaaggcgagaaaggagtcaaaggggatgtgggcctgcctggacctgcaggacctcctccctctacaggagagcttgaattcatgggattccccaagggaaagaaggggagcaaaggcgaaccaggacccaaaggctttccaggtatatccgggccacccggattccccggacttgggactactggtgagaagggggagaaaggcgagaaaggtattccgggacttcccggaccgcgagggccaatggggagcgagggcgtccaggggcctccagggcagcagggcaagaagggaactttaggattcccaggcctgaacgggtttcagggcatcgaggggcaaaagggagatattggtctgccaggcccagacgtgttcatcgatattgacggcgcagtgatttctggcaacccaggcgatcctggggtaccgggtctccctggcctaaaaggcgacgagggtatccagggactacgtggtccttccggagtgcctggcctgccagctctgtcgggtgttccaggcgctcttggccctcagggtttccccggactaaagggagaccagggcaatcccggtcgaaccacaattggtgctgccggactgccaggccgagatggactacccggtcccccaggcccacccggaccgccttccccagagttcgagactgaaactctgcataataaggagtccggatttccaggcctgcgaggggaacagggaccaaagggcaatctgggcctgaagggcataaaaggggatagcggattctgcgcatgcgacgggggagtgcctaataccggccctcccggtgagcccggtccaccgggaccttggggcctgattgggttaccaggtctgaagggagctcgtggcgacagggggagtggaggggctcagggcccagcaggtgctcccggactggtaggccctctgggaccgtccggacccaaggggaaaaagggggaacctatcttgtcaacgattcagggaatgcctggagaccgcggagactcaggatcccagggcttccgcggagtaataggagagccaggaaaggatggagtacctgggcttcccggtttgccgggtcttcccggagatgggggacaggggttccccggagagaaagggctgcccggtcttccaggcgagaaaggacatcctggtccaccgggtctcccagggaatgggctgcctggtctgcccggaccgaggggcctgccgggtgataagggcaaagatggtttgccgggtcaacagggtcttccgggtagcaaagggatcacactgccttgtatcatcccaggctcctatggacctagcggctttcccggaaccccaggcttccctggccctaaggggtctagaggcctaccaggaacacctggtcagcctggctcatcaggcagtaagggggaaccaggatcacctggcctggtccatttgccagagctacccggattcccagggccaaggggcgagaagggccttccaggattcccgggtctgcctggcaaagacggtcttcctgggatgatagggtccccgggactgccaggaagcaaaggggcaaccggcgacatcttcggtgcagagaatggagctccgggagagcaggggctccagggactgaccggacataaaggtttcctgggggattccggcttgccgggactcaaaggggtgcacggtaagcccggtctgcttggacctaagggcgagagaggctcacctgggacacctggacaggtgggacagccaggaacgcctggatcgagtggcccatacggaatcaaaggcaaatccggcctccccggagcacccggattccctgggataagcggccaccctgggaaaaaagggactcgcggaaagaagggccctcccggatccattgtgaagaagggactgcctgggttgaaggggctgcctggcaatcctggccttgttgggttgaagggcagcccaggatcacccggagtggccggacttcctgcgctgagtggacctaagggagaaaagggctcggtagggtttgtgggatttcccggaatccctggattacctggaatcccaggcactcggggattgaaagggattcccggttcgaccggcaagatgggaccatctgggagagccggaacacccggagagaagggggaccgaggaaaccctggtcccgttggcatccctagcccgcgacgaccaatgagcaatctttggttaaaaggcgataaagggtcacaaggctctgctggctcgaatggatttcctggtccccgtggggataagggtgaagctggcaggcccggaccacccggactgccaggcgcaccgggactaccaggaataattaaaggagtctccgggaagcctggccctccgggtttcatgggaatcagaggcctccccggacttaaaggcagctctgggatcacgggatttcctggtatgccaggggagtctggtagccaggggatccgcggatctccaggccttccaggggctagtggcctgcctggtctcaaaggcgacaacggccaaacagttgaaatcagcgggtctcccggtccaaaaggccagcctggggagtccggcttcaagggtaccaagggtagggacggcctcattgggaatataggcttccccggaaataagggcgaggatggcaaggtcggtgtgagtggagacgtcggacttcctggggctccaggcttccctggagttgctgggatgaggggggagccagggctgccagggtcctccggccatcagggcgcaattggtcctctaggctcaccaggcctcattggtccaaagggttttccaggatttcctggcctgcatggtcttaacggtttacccggaactaaaggcacccacggcacgcccggaccaagcattactggagtgcctgggccagctggtctgcccggaccaaagggagaaaaagggtacccaggcataggtattggagctccagggaagccgggactgcggggacaaaagggcgacaggggctttcccggtttacagggcccagccggactcccaggggctccaggcatctctttgccgagtctaatcgccggtcagcctggagaccccggacgcccagggctggacggcgagcgtgggagacccggacccgctggacctcctggtcctcccggacctagcagtaatcagggggacaccggagatcctgggttccctgggattccgggacccaagggcccaaagggagatcagggcattcccggatttagcggcctccccggagagctgggactgaagggaatgaggggcgagccaggattcatgggtacccctggcaaggtcgggcctccaggcgaccccggtttccccggaatgaagggaaaggcaggtcctcgaggcagctctggactgcagggtgacccaggacagacccctaccgcagaagctgtgcaggtcccaccaggccctctgggtttgcctggaatcgatggaataccaggactgacaggcgacccaggcgctcagggaccagtagggcttcagggatcaaaaggtctgcccggtatccctggcaaagatggacctagtggtttgcccggaccaccaggcgctttaggggatccaggcctgcccggtctgcagggcccacctgggttcgaaggcgcaccaggtcagcaggggcctttcgggatgcccggaatgcccggacagagcatgagggtcgggtatacactggtaaagcattctcagagtgagcaagtgcctccatgtccaatcggcatgtcccagctgtgggtcggctactctctactcttcgtggaaggtcaggagaaggcgcataaccaggaccttggttttgccggatcatgtctgcctcggttctctaccatgcctttcatttactgcaatataaacgaggtgtgtcactacgccagacggaatgacaaatcctactggttgtccaccaccgcacctattccaatgatgccggtgagccagacacagatcccgcagtacataagccggtgcagcgtctgcgaggcaccatctcaggctattgcagtgcattcccaggacataaccatcccacagtgcccactgggctggcgtagcctctggatcggatacagtttcttaatgcacactgccgctggggcagaaggtggaggtcagagcctcgtgtctccagggagctgtttagaggactttagggccacacccttcatagaatgcagcggtgccaggggcacctgtcattactttgctaacaaatactcattctggcttacaaccgttgaggagaggcagcagttcggggagctccccgtgtctgaaactcttaaggccggtcagctgcacacacgcgttagtaggtgtcaggtgtgtatgaagagcctgta

SEQ ID NO: 324537 - DNA, 5075 bp, Artificial Sequence
  derived and/or modified sequence
atgctgatcaataagttgtggcttcttctggtcactttgtgcctgaccgaagagctcgccgctgccggtgagaaatcttatgggaagccttgcggaggacaggattgctctggaagctgccagtgcttcccggaaaaaggggcacgtgggaggccaggtccaatcggaatacaaggcccaacaggacctcaggggtttaccgggtccactggcctctcaggtctgaagggagaacgtggtttcccgggactcttggggccatacggcccaaaaggggacaaaggacccatgggcgtgcccggatttttggggatcaatggcatccccggtcatccaggccagcccggacctcgcggacccccaggcctggacggttgtaatggcacacagggcgctgtaggttttccaggcccagacggttacccaggactgttaggtccgccaggtctgcccggtcagaaggggagcaaaggagatccagtcctggccccagggtccttcaaaggcatgaagggagaccctggcctcccgggattggatggcatcacgggccctcagggggcaccgggattccccggagccgttggtccagccggacccccagggctgcaagggcctcctggcccaccaggtccacttgggcctgacggcaacatgggacttggctttcaaggagagaaaggcgtaaagggcgatgtcggtcttcctggcccagccggaccacccccttctacaggcgaactggagttcatgggattccctaaaggcaaaaagggttctaaaggcgaaccaggccctaagggcttcccaggtatatcaggccctcctggtttccccggtctcggcaccacaggtgaaaagggagagaagggcgaaaaaggaattccgggtttaccagggccacggggacccatgggcagtgaaggcgtccagggcccaccaggacagcaggggaaaaaggggacactgggctttcctggtctgaatggatttcaaggcattgagggtcaaaaaggagatattggcctcccaggtcccgacgtgtttatagacatagacggcgctgtaatatccggcaaccctggcgacccgggagtaccagggctccctggcttgaagggtgacgagggcatccaaggtctcaggggcccttccggagtccctggcttgccagcactctccggagttccaggcgctctgggtccccagggtttccctggcctcaaaggcgaccagggaaaccccggaaggactacaattggggctgcgggattgcctgggagagatgggctccccggtccacccggacctccaggcccacccagccctgagtttgaaacagaaactttgcataacaaagagagcggtttccccggactgaggggagaacagggcccaaaggggaacctgggactcaaaggaatcaaaggcgactccgggttttgtgcctgtgatggtggcgtgccaaatactggtccacccggagaaccaggccctcctggcccttggggactcatcggcctccctggcctgaagggtgctagaggcgatcggggttccggcggtgcgcaggggccagctggcgctccgggacttgtcggcccacttggtccgtctgggccaaaggggaaaaagggtgaacccatactgtctactatacaggggatgccaggggatcgaggcgacagtgggagtcagggtttccgaggtgttatcggagaacctggaaaggatggggtgcccggtttacctggactgcccggactgcctggagacggcggacagggatttcccggtgaaaaggggcttccaggcctgccaggcgaaaagggccaccctggacctcccggtcttccagggaacgggttgcccggactgcccggtcctcgaggcctgcctggagacaaaggaaaggacgggttgcctggccagcaaggcctgccaggctcaaaaggtattacccttccatgcatcattcctggtagctacggaccttccggcttccctgggacccccggttttcccggaccaaaggggtcccgtggcctgcccggaacacccggtcagccgggttcaagcggtagtaaaggagagccaggaagcccagggctcgttcatcttcccgagttgccaggatttcctggcccaagaggggagaaagggctgccaggattccccggactccctgggaaggacggtctccctggcatgatcggttctccaggacttccagggtcaaagggagccacaggcgatatcttcggcgctgaaaacggagctcctggggagcaaggcttacagggcctgacgggtcacaagggtttcctgggcgactccgggctgcctggactgaaaggcgtgcatggcaaaccgggactcctggggccaaagggtgagaggggcagtcctgggacccccggacaggttggccaacctggtactccaggaagtagtgggccttacggaatcaaaggcaaatcggggctcccaggagcaccaggcttccctggaatatctggccatcccggaaaaaagggcaccagaggtaagaagggacccccaggaagcatcgtgaaaaaaggccttcctggtctgaaggggctacccggaaaccctgggctggtgggccttaagggcagtccagggtctcctggcgtggcagggctccctgccctctcgggtccaaagggggaaaaagggtccgtagggtttgtcggattcccgggtatccccggtctgcccggtatccctggcactcggggattaaaagggattcccggttccaccggcaaaatgggcccaagtggaagagcagggactcctggcgagaagggggatcggggaaatccaggtccggtgggcattccctcgcctagacggcctatgagcaacctctggctcaaaggagacaagggaagccaaggttccgccggttctaacggattccctggacctaggggtgacaagggagaagccggacggcctgggcctccaggcctgccaggagcccctggtctgccaggaatcattaaaggcgtgtcagggaagcctggcccaccaggttttatgggaatccggggactccccggtttgaagggctcctctggaataactgggttccccggtatgcctggcgagagtggctcacagggcattcgcggatcaccgggtcttcccggtgcttcagggctgccaggactgaagggagacaacgggcagactgtcgagataagtggatcaccaggaccgaaagggcagcctggcgagtccggatttaagggaacgaagggtagggacgggcttattggcaatataggattccccggtaataagggggaggatgggaaagtcggcgtgtccggcgacgtcggcctgccgggagctcccggtttccccggagtggcaggaatgcgtggcgagcccggtctgccaggatccagcggtcatcagggtgcaatcggacctctgggatctcctggactgatcggccctaaaggctttccaggcttccctggcctacatggacttaacggattaccaggaaccaagggcacccacgggacacccggaccgtctattaccggcgtgcccggacctgctgggctccccggacctaagggggaaaaaggttacccaggtatcggcatcggtgcgcctggcaaacctgggctgcgtggacagaagggagatcggggttttcctggactccagggcccagctggtctgccaggcgctcctggtatctccctgccgagcttgattgcaggacagcctggagacccaggtaggccaggcctggatggggagcgaggcagacctgggccagccggaccgccagggccaccgggtccgagcagcaaccagggtgacaccggggatcccggatttccgggtatccccggtcctaaagggccaaagggggatcagggcattcctggcttctcggggttgccaggcgaacttgggcttaaaggcatgaggggggagcctggatttatgggaactccgggaaaagtaggcccaccaggggacccgggtttccccggtatgaaagggaaggcgggtccacgcggatcgtccggcttgcaaggggatcctggccagacacctacggctgaagcagtacaagtgcctcccggaccgcttggtctgccaggtatcgacggcatccctggtctgaccggagatccaggcgcacaaggtcccgtaggccttcagggatccaaaggcctgcctggaatccccggtaaggatggcccttctggactccctggcccacccggtgcactgggcgatccaggcctcccagggctccagggaccccctgggttcgaaggggctcctggccaacagggaccattcggcatgccagggatgcccggtcaaagtatgcgcgtcggttacacgctagtgaaacatagccagtcggagcaggtgcccccatgtcccatcggaatgtctcagttgtgggtcggatattccctgctgttcgtggagggacaggagaaggctcataaccaagatctcggatttgccggatcatgcctgccacgcttctcaacaatgccttttatttactgcaacatcaatgaagtgtgccattatgcacgcagaaatgacaaatcatattggctgagtaccacggcccctatccccatgatgccagtaagccagacacagatccctcagtatattagccggtgttccgtttgcgaagccccttcccaggctatcgccgtgcatagccaggatattactattccccagtgtcctctaggctggaggtccctctggatcggatactcttttcttatgcacaccgccgcaggagcagaggggggaggtcagagcctggtgagtccagggtcttgcttggaagacttccgcgctacccctttcatcgagtgttcgggcgcaagagggacatgccactatttcgctaacaagtatagcttctggctcacaaccgtggaggaaaggcaacagtttggggagttaccagtttcagaaacacttaaagccggtcagctccacaccagggtgagtcgttgccaggtttgcatgaaatccctgta

SEQ ID NO: 324538 - DNA, 5075 bp, Artificial Sequence
  derived and/or modified sequence
atgcacccagggttatggctacttctcgtcactttgtgtctcacggaagagctggcagccgcaggtgaaaagagttacggaaaaccgtgcggcggacaggattgcagcgggagctgtcagtgctttccagaaaagggagccaggggacggcctggacctataggaattcagggccctacgggaccccagggcttcaccggtagtaccggattgtcaggtctcaaaggagaaagaggctttccgggtttgctggggccttacggcccaaagggcgacaaaaaattcagcattcctgtactcctgatttacgattcccgcccagggcatccagggcagcctggtcccaggggtccccctggactcgatgggtgcaatggcacccaaggtgccgttgggttccctggtccggacgggtaccccggtctcttagggcctcccggattacctggacagaagggctcaaaaggtgaccccgtgctcgctccgggatccttcaaaggaatgaaagccttcatcccactgttcgagtcaatccgtggaccgcagggggcacctggatttccaggcgctgtgggacccgcaggccctccgggtttgcagcagggtcagcctccttttctcgaggtcctattccctcactggcacgagggggaggaggctaaagtcagagatagcctgtttggcgatgtgggattgccaggaccagcaggccctcccccaagcacaggcgagctcgaatttatgggcttccccaagggcaagaagggatctaagggcgagcctggaccaaagggcttccccggaatttcaggtcctccaggatttcctggcttggggaccaccggcgaaaaaggggaaaagggtgaaaaaggaatccctggactgcccggacccaggaccctcctgtgctcacataccttccatctggtcgttactatgtttctcagccagggaaagaaaggaaccctgggtttcccgggactgaacggcttccaaggcatcgaggggcagaagggtgacataggcctgcccggacctgacgtctttatcgacatagacggcgcagtgatctcgggtaatcccggtgaccccggtgtgcccggacttcctgggctaaaaggcgacgagggcatccaaggactgagagggccttccggcgtccccggtctgcccgctctgtcaggcgtccccggagcactgggaccccagggctttccagggctaaagggggaccaagggaatcctggcagaaccacaatcggagccgctggcctacccggtcgggacggactccccggacccccaggccctcctggcccaccaagtcctgagttcgagacagagacacttcataacaaggagagcggctttcccggtctccggggtgagcagggaccaaaggggaacctgggcctgaaaggcatcaaaggggacagcggcttctgcgcttgtgacggaggagttcccaatacaggccctcccggtgaaccaggccctccaggcccttggggcttgattggtctgcctggcctcaaaggagcacggggagatcgcggtagcgggggtgcccaagggccagcaggagcaccaggcttggtaggtccattaggaccttccggacccaaggggaagaagggtgaaccgattttaagcactatacaaggcatgcctggggacaggggggattctggttcccagggtttcaggggcgttatcggagagccaggtaaagatggcgtgccaggcctgccagggttgcccggactcccaggagatggcggacaaggcttccctggtgagaaaggtctgcccggactgcccggtgagaaagggcacccagggccaccagggctgcccggaaacggcctccccggattgcctggcccaagggggctcccaggagataaaggcaaggatgggctccctggtcagcaaggcctccccggttcaaaggggataacactgccatgtatcatcccagggagctatggaccttctggcttccctgggaccccaggttttcccggtcccaaaggaagtcgaggcctccctggtactccgggacaaccaggatcatctggttctaagggggagcctggatcacccggtttggtgcatctcccggagttacctggtttcccaggccctcggggtgaaaagggtctgcctggcttccccggtctgccaggaaaggacggcttgccagggatgattggaagccccggactgcctgggagcaagggagcgacgggagatattttcggggcagagaatggagccccaggcgaacagggactccagggtctcacgggccataagggattcctgggggactctggccttcccggtctgaagggagtccatggaaaaccaggactgttagggccaaaaggggaacggggatcccctggtacccccggacaggtgggacaacccggaactccgggaagttccggcccttatgggatcaagggaaagagcggccttcccggagccccaggcttccccggaatttctggtcaccccggtaaaaaaggcacccgtgggaagaagggaccgccaggctccatcgtgaagaagggcctgccaggattaaaggggctgcctggtaacccaggcctggtgggactaaaaggctctccagggtctcccggagtcgctggcctccccgcactgagcggtcctaaaggcgagaagggctcagtgggcttcgtgggcttcccagggattcctggattgccagggataccaggcactcggggactgaaggggatacctggatctacaggcaagatgggaccatcagggagggctgggactccaggcgagaagggcgatcgtggtaaccctggaccagtgggtattccatcaccgcgaaggcccatgtctaatctgtggcttaaaggggacaaaggttctcagggctctgccggatctaatggttttcctgggcctcgaggggataaaggcgaagctggacgaccagggcctcctggcctccctggtgctcccggtctgccaggcattatcaaaggggtgtctggaaaaccaggccctccagggtttatggggattcggggactgcctgggctcaagggctcctctggcattaccgggtttcctggaatgcccggtgaaagcgggagccaggggataaggggatctcctggcctgccgggagcctccggcctgcctgggttaaagggcgacaatggccaaaccgtcgaaatcagtggcagtcctggcccaaagggtcagcctggggagagcggattcaagggcacaaaaggcagagacggtctgattggcaatatcggcttccctggtaacaagggagaggacgggaaagtgggggtaagtggagatgtcggccttcctggggcaccaggctttcccggagttgctggaatgagaggagagccagggctacctggatcctctggccaccagggagctatcggacctttgggttctccaggactgattggtccaaaaggctttcctgggttccctggtcttcacgggttgaatggattgcccggaaccaagggcacacacggtaccccaggcccttccatcaccggggtcccaggtcctgcaggcctgccagggcctaagggcgagaaggggtaccctggcattgggataggtgcgcctggaaagcccggactcagaggtcagaagggagatcggggatttccagggctccaaggcccagctgggttgccaggggcaccgggaattagcctgcccagtctcatcgccggtcagcccggtgatccgggacgtcccggtttggatggcgaaaggggaagaccagggcctgccggacctcccggtcctccaggaccttcctctaatcagggggatacaggcgaccctggatttcccggtatcccgggacccaagggcccaaagggcgaccagggaattcctggtttcagcggcttaccaggcgaattaggcctgaaagggatgagaggagagcccggtttcatgggcacgccagggaaagttggccctcctggtgaccctggcttcccaggtatgaaaggaaaagccggaccaagaggaagttctggtctgcagggggatcccggtcagacccctacggctgaagcagtccaagtgccacctggtccactgggcctccctggcattgacgggatcccaggtctgacaggcgatcctggggcacagggacctgtcggtttgcagggctctaaagggctgccaggcattcctgggaaagacggcccttccgggctccctggacctcccggagcccttggggatcccggtctccctggccttcagggcccacctgggtttgagggtgcccctgggcagcagggccctttcgggatgcctggaatgcctggtcagagtatgcgagtcgggtacactctcgtcaaacattctcagagcgagcaggtgcccccatgcccaatcggtatgagtcagctatgggtaggatattcactgttgtttgtagaaggccaggaaaaagctcacaatcaggacttgggcttcgcgggttcgtgtttgcctaggttttctactatgccatttatttactgcaacatcaacgaggtctgccattatgcgaggaggaacgataaatcttactggctctcgacaacagctccgattcctatgatgccagtgagtcagacccagattccccaatacatcagcagatgcagcgtgtgtgaggcccctagccaagccatagccgttcattcacaagatattaccatccctcagtgcccgctcggctggagatcactgtggattggttacagttttctcatgcacaccgcagctggcgcagaggggggaggacagagccttgtgagtccgggaagttgcctggaagacttccgagcaaccccatttatcgagtgtagcggagctagagggacttgccactattttgctaataagtattcgttctggctgacaaccgtagaagaaagacagcagtttggcgaacttcccgtgtctgaaacgctgaaggccggacagctacacaccagagtgagtcggtgccaggtctgtatgaaaagcctgta

SEQ ID NO: 324539 - DNA, 375 bp, Artificial Sequence
  derived and/or modified sequence
atgaccccccagggccggggcaccgtggccgctgctgctgtggccgccacagccagcattgctggggcccccacccagtacccacctggccggggcaccccacctcctcctgtgggccgggccaccccacctcctggcatcatggcccctcctcctggcatgaggcctcccatgggcccccccatcggcctgcccccagcccggggcacccccatcggcatgcctcctcctggcatgaggcctcctcctcctggcatccggggggaggccttcctgctggccctggtgtgctggtacggctggcccctggactttggcatgtctgactatgctgcctacctgaagaagacctgcttccaggacctcttcaactag

SEQ ID NO: 324540 - DNA, 5037 bp, Artificial Sequence
  derived and/or modified sequence
atgcacccgggactttggctactgctggtgactctgtgtctaacagaagagctggccgctgctggggagaagtcctatggtaagccttgtggcggccaggattgctctggaagctgccagtgtttccctgagaaaggagcacgaggaagacccggccccataggtatacagggccccacgggtccgcaaggctttaccggcagcaccgggctgagcgggctgaaaggcgagcggggatttccaggtctattgggcccttacgggccaaagggtgataagggacccatgggagttcccgggttcctcgggataaacggaattcccggtcatcctggacagcctgggcccagaggtccacctggcttagacggttgcaacggtacccagggcgccgttggatttcctgggccagatggatatccggggctgctaggcccccccggactgcccggacagaagggatccaagggagatcccgttctggcacctggtagctttaaagggatgaaaggcgacccggggctgccaggtctcgacggtattaccggacctcagggagcacctggcttcccaggcgcagtcggtcccgccggccctccagggcttcaaggtccacctggacccccaggcccactcggcccagacgggaacatgggacttggcttccagggtgaaaagggagtgaaaggggatgtgggcctgccaggtccggccgggccaccacccagcacgggtgaattagaatttatgggattccccaagggcaaaaaggggtctaaaggggaaccgggaccaaaaggttttcctgggatttctggacctcctggcttccccggcctgggcaccaccggcgaaaagggggagaaaggagagaagggaatacctgggctcccaggccccagggggccgatgggatcagagggcgtgcaaggcccaccgggtcagcaaggcaagaagggaacccttgggttccccggactcaatggattccagggaattgaagggcaaaagggtgacattggcctgccggggccagacgtattcattgatatcgacggcgccgtaatctctggcaacccaggcgaccctggcgtccctggcctccctggattgaagggggacgaagggatacagggactgcgcggtccatccggagtgcctggtctgccggccttgtctggcgtgccaggcgccctcgggccccagggattccccggcctcaagggggatcagggaaatcctgggaggaccaccatcggcgccgctgggctacctggccgcgacggactgcccgggccaccaggaccacccgggccacccagccccgagttcgaaactgagacacttcataacaaggagtctggcttccctggacttcgcggggaacagggacccaaaggtaaccttggtctgaagggtatcaaaggcgacagcggattctgcgcttgcgatggtggtgtgcccaatactggacctccaggcgagccaggtccccccggcccgtggggactgatcggcctgccaggcctaaaaggcgccaggggagatagaggttccgggggggcacaggggcccgcgggtgcaccagggctggtgggcccactcggcccgtctggcccaaagggaaaaaaaggagagccaatactgagcaccattcagggcatgccaggcgacaggggagactcaggaagccagggattccggggagtgattggggagccagggaaagacggtgtgcccgggctgcctggattgccaggactccccggcgatggtgggcagggattcccaggggaaaaaggtctgcccgggctgcccggcgaaaaaggccatccaggacctcccggcttaccgggcaacggtttgcccggcctgccaggacctcgaggacttcctggcgacaaggggaaagatggccttccaggccaacaggggctgccgggaagcaaaggcataacactgccatgcatcattccggggtcatatgggccctcggggtttcctggaactccaggcttccccggacccaaaggatccaggggtttgccaggcaccccaggccagcctggcagcagtgggtccaagggcgagcccggatcacccgggctggtccatctccccgagctgcccggttttcctggaccgaggggtgagaaaggcctgcctgggttcccaggcctccccgggaaagacgggctgcctgggatgatcggcagccctgggctgcccgggagtaagggtgccactggagacatcttcggagccgagaatggcgcacctggtgagcagggacttcaggggcttaccggccacaagggcttcctcggagactcggggctgccgggcctgaaaggggtgcacgggaaaccaggtctgttgggccccaaaggagagagaggctccccgggcacccctggacaggtcggtcaaccagggactcctggctcctcaggaccatatgggattaagggcaaaagtggcctccctggagcccctggtttccctggaatctcaggccacccaggaaaaaagggaactcgcggcaagaagggccctcccgggtccattgtcaagaaagggctgccgggactgaagggcctccccggaaatcccggtttagtgggactgaagggaagccctgggagcccaggagtggcaggactgccagcactgagtggcccaaagggcgaaaagggatctgtgggctttgtcggcttccctggaattcctggccttccaggcatcccaggcaccagggggctgaagggaattccgggaagcacaggaaagatgggcccttcaggaagagcggggacccctggggaaaaaggagaccgcggtaacccaggtccagtcggtatccccagtccacggagaccgatgagtaacctgtggttgaagggcgacaaaggatcgcaggggtctgctggaagcaacggtttcccaggtcccaggggagataaaggcgaagccggccgacccggccccccaggactgccgggagcaccaggcctgcccggtataattaagggagtgtctgggaaaccaggcccaccagggttcatgggcattcggggcctccctggtctcaagggatcgtcgggaattactggattccccggcatgccaggcgagagcggaagccagggcatcagaggttcccccgggttgccgggcgcatcaggtctgcccggcttaaagggagataatggacaaaccgtagagatcagtggcagcccaggacccaagggccagcccggagaatcggggttcaagggtactaagggacgggacggactgattgggaatattggattccccggtaacaagggagaggatgggaaagtcggtgtgagtggagacgtgggcctgcccggggcccccggcttccctggagtggctggtatgaggggagaaccagggctcccgggatcctcgggccaccagggggccataggtcctctcgggagcccaggactcatcgggcccaagggcttcccaggcttccctggactccatggcttgaacggcctgccggggacaaaaggaacacacggcacacctggtcctagtataacaggtgttcctggacccgctgggctgcccggacccaaaggagaaaaaggatatccaggcatcggcatcggtgcaccgggtaaacctggccttcgcggccaaaagggagatcggggcttccctgggctccaaggccccgctggtctaccaggcgccccagggatcagtttgccttcactcatcgcagggcagcccggcgacccaggccggcccgggctggatggtgagagaggtcgtcctggcccagccgggccccccgggccgcccggtccttccagcaatcagggcgatacaggcgatcccggcttcccaggaattccaggattctcagggctgcccggcgagctagggctcaaaggtatgcggggggagcccggatttatgggaacgccaggtaaagtaggcccaccaggtgacccagggttccccgggatgaaggggaaggccgggccccggggaagttctggcttgcagggcgaccccggtcagacgcccacagctgaagccgtacaggtgccaccaggcccattgggcctgcccggcattgatggaatccccggactgaccggcgatcctggagcgcaggggcctgtggggctccaggggtctaaggggttgcctgggatacccggaaaagacgggccctctggccttcccggccccccaggcgctctgggtgacccaggcctgcccggacttcagggcccgccaggttttgagggagcccccgggcagcagggaccttttgggatgccaggcatgcccgggcaaagtatgagggtcggttacaccctcgtgaaacactcacaaagcgaacaggtccctccatgccccatcgggatgtctcagctgtgggtgggttactccctgctcttcgtcgaaggacaggaaaaagctcacaatcaggatcttgggttcgccggatcctgcttaccacgcttttctacaatgcccttcatttattgtaacattaacgaggtgtgccactacgctagacgcaatgataagtcctactggctgtccaccaccgctccaatacccatgatgccagtttcccagacacaaattccacagtatatttccaggtgttctgtttgtgaggctccttctcaggccattgccgtgcacagccaggatatcacgattcctcaatgccccctgggttggagatcattgtggattggttattcctttttaatgcatactgctgccggtgccgaaggagggggccaatccctcgtgtcccccggaagctgtttggaggactttcgcgctaccccattcattgagtgtagtggtgctcgcggaacttgccattattttgccaacaaatactctttttggctcaccactgttgaggaaagacagcaatttggggagctccccgtctcagagactcttaaggcaggacaactccacacacgggtgagtcggtgccaggtgtgcatgaaatcattgtag

SEQ ID NO: 324541 - DNA, 5037 bp, Artificial Sequence
  derived and/or modified sequence
atgcaccctggcctgtggctgctgctggtgaccctgtgcctgacagaggagctggccgctgctggggagaagagctatggcaagccctgtggcggccaggactgcagcggcagctgccagtgcttccctgagaagggggcccggggccggcccggccccatcggcatccagggccccaccggcccccagggcttcaccggcagcacaggcctgagcggcctgaagggggagcggggcttccctggcctgctgggcccctacggccccaagggggacaagggccccatgggcgtgcccggcttcctgggcatcaatggcatccctggccaccctggccagcccggcccccggggccccccaggcctggatggctgcaatggcacccagggcgctgtgggcttccctggcccagatggctacccaggcctgctgggccccccaggcctgcccggccagaagggcagcaagggggaccctgtgctggcccctggcagcttcaagggcatgaagggggaccccggcctgcccggcctggatggcatcaccggcccccagggcgcccctggcttccctggagctgtgggccctgctggccccccaggcctgcagggccccccaggccccccaggccccctgggcccagatggcaacatgggcctgggcttccagggcgagaagggcgtgaagggagatgtgggcctgcccggccctgctggccccccacccagcactggagagctggagttcatgggcttccccaagggcaagaagggcagcaagggggagcccggccccaagggcttccctggcatcagcggccccccaggcttccctggcctgggcaccactggagagaagggggagaagggggagaagggcatccctggcctgcccggcccccggggccccatgggcagcgagggcgtgcagggccccccaggccagcagggcaagaagggcaccctgggcttccctggcctgaatggcttccagggcatcgagggccagaagggggacatcggcctgcccggcccagatgtgttcattgatattgatggagctgtgatcagcggcaaccctggggaccccggggtgcccggcctgcccggcctgaagggagatgagggcatccagggcctgcggggccccagcggcgtgcccggcctgcctgccctgtctggagtgcctggggccctgggcccccagggcttccctggcctgaagggggaccagggcaaccctggccgcaccaccatcggggccgccggcctgcccggcagagatggcctgcccggccccccaggccccccaggcccccccagccctgagtttgaaacagagaccctgcacaacaaggagagcggcttccctggcctgcggggggagcagggccccaagggcaacctgggcctgaagggcatcaagggggacagcggcttctgtgcctgtgatggcggcgtgcccaacacaggccccccaggagagcccggccccccaggcccctggggcctgattggcctgcccggcctgaagggggcccggggggaccggggcagcggcggggcccagggccctgctggggcccctggcctggtgggccccctgggccccagcggccccaagggcaagaagggggagcccatcctgagcaccatccagggcatgcctggggacagaggagacagcggcagccagggcttccggggcgtgattggagagcccgggaaggatggagtgcccggcctgcccggcctgcccggcctgcctggagatggcggccagggcttccctggagagaagggcctgcccggcctgcccggggagaagggccaccctggccccccaggcctgcctggaaatggcctgcccggcctgcccggcccccggggcctgcccggggacaagggcaaggatggcctgcccggccagcagggcctgcccggcagcaagggcatcaccctgccctgcatcatccctggcagctatggccccagcggcttccctggcaccccaggcttccctggccccaagggcagccggggcctgcccggcaccccaggccagcccggcagcagcggcagcaaaggagagcccggcagccctggcctggtgcacctgcctgagctgcccggcttccctggccccagaggagagaagggcctgcccggcttccctggcctgcccgggaaggatggcctgcccggcatgattggcagccctggcctgcccggcagcaagggggccactggagacatctttggagcagaaaatggagcccctggagagcagggcctgcagggcctgaccggccacaagggcttcctgggggacagcggcctgcccggcctgaagggcgtgcacggcaagccaggcctgctgggccccaagggggagcggggcagccctggcaccccaggccaggtgggccagcccggcaccccaggcagcagcggcccctacggcatcaagggcaagagcggcctgcccggggcccctggcttccctggcatcagcggccaccctgggaagaagggcacccggggcaagaagggccccccaggcagcatcgtgaagaagggcctgcccggcctgaagggcctgcccggcaaccctggcctggtgggcctgaagggcagccctggcagccctggggtggccggcctgcctgccctgagcggccccaagggggagaagggctctgtgggctttgtgggcttccctggcatccctggcctgcccggcatccctggcacccggggcctgaagggcatccctggcagcacaggcaagatgggccccagcggccgggccggcaccccaggagagaagggggaccggggcaaccctggccctgtgggcatccccagcccccggcggcccatgagcaacctgtggctgaagggggacaagggcagccagggcagcgctggcagcaatggcttccctggccccaggggggacaagggggaggccggccggcccggccccccaggcctgcccggggcccctggcctgcccggcatcatcaagggcgtgtctgggaagccaggccccccaggcttcatgggcatccggggcctgcccggcctgaagggcagcagcggcatcaccggcttccctggcatgcctggagagagcggcagccagggcatccggggcagccctggcctgcccggggccagcggcctgcccggcctgaagggggacaatggccagacagtggagatcagcggcagccctggccccaagggccagcccggggagagcggcttcaagggcaccaagggcagagatggcctgattggcaacatcggcttccctggcaacaagggggaggatggcaaggtgggcgtgtctggagatgtgggcctgcccggggcccctggcttccctggggtggccggcatgagaggagagcccggcctgcccggcagcagcggccaccagggcgccatcggccccctgggcagccctggcctgattggccccaagggcttccctggcttccctggcctgcacggcctgaatggcctgcccggcaccaagggcacccacggcaccccaggccccagcatcactggagtgcccggccctgctggcctgcccggccccaagggggagaagggctacccaggcattggaattggagcccctgggaagccaggcctgcggggccagaagggggaccggggcttccctggcctgcagggccctgctggcctgcccggggcccctggcatcagcctgcccagcctgattgctggccagcccggggaccccggccggcccggcctggatggagagcggggccggcccggccctgctggccccccaggccccccaggccccagcagcaaccagggcgacaccggggaccccggcttccctggcatccctggcttcagcggcctgcctggagagctgggcctgaagggcatgagaggagagcccggcttcatgggcaccccaggcaaggtgggccccccaggggaccccggcttccctggcatgaagggcaaggccggcccccggggcagcagcggcctgcagggcgaccccggccagacccccacagctgaggccgtgcaggtgcccccaggccccctgggcctgcccggcattgatggcatccctggcctgactggagaccccggggcccagggccctgtgggcctgcagggcagcaagggcctgcccggcatccctgggaaggatggccccagcggcctgcccggccccccaggggccctgggggaccccggcctgcccggcctgcagggccccccaggctttgaaggagcccctggccagcagggccccttcggcatgcctggcatgcctggccagagcatgagggtgggctacaccctggtgaagcacagccagagcgagcaggtgcccccctgccccatcggcatgagccagctgtgggtgggctacagcctgctgtttgtggagggccaggagaaggcccacaaccaggacctgggctttgctggcagctgcctgccccgcttcagcaccatgcccttcatctactgcaacatcaatgaggtgtgccactacgccaggagaaatgacaagagctactggctgagcaccacagcccccatccccatgatgcctgtgtcccagacccagatcccccagtacatcagccgctgcagcgtgtgtgaggcccccagccaggccatcgctgtgcacagccaggacatcaccatcccccagtgccccctgggctggaggagcctgtggattggctacagcttcctgatgcacacagctgctggagctgagggcggcggccagagcctggtgtccccaggcagctgcctggaggacttccgggccacccccttcatcgagtgcagcggggcccggggcacctgccactactttgccaacaagtacagcttctggctgaccaccgtggaggagcggcagcagtttggagagctgcctgtgtctgagaccctgaaggccggccagctgcacaccagggtgagccgctgccaggtgtgcatgaagagcctgtag

SEQ ID NO: 324542 - DNA, 5037 bp, Artificial Sequence
  derived and/or modified sequence
atgcaccccggcctgtggctgctgctggtgaccctgtgcctgaccgaggagctggctgctgctggggagaaatcttacggcaaaccctgcggcggtcaggattgcagtggttcttgccaatgctttccggaaaagggagctcgaggacggccaggacctattggcatccaaggcccaacgggaccacagggctttacagggtctaccggtttatcagggcttaaaggcgagaggggcttccccgggcttctgggtccctatggtcctaaaggtgacaagggtcccatgggagtccctggtttcttggggatcaacggtattcccggccatcccggtcaacccggccccagaggcccacccggattggacgggtgtaatggtacccagggcgcagttggctttcctggccccgacggctatccaggtctgcttggcccacctggactgcccggccagaaaggttccaagggcgatcccgtgttggctcccggatcctttaagggaatgaagggagatcccggcctgcctggcctggacggcatcaccggaccccagggagcccctgggttccccggcgccgtgggaccagctggccctccggggctccagggacctcctggccccccgggcccactggggcctgatgggaatatgggccttggttttcagggcgagaagggggtgaagggcgatgtaggactccccgggcctgcgggccccccccctagcaccggggaattggagttcatgggatttcctaaagggaaaaaagggagcaagggcgagcctggccccaaaggattcccgggaatctcgggcccaccaggcttccctggactcggcacaaccggagagaaaggcgaaaaaggggagaaagggatccccggattacccggcccccgggggccaatgggttcggaaggtgttcagggccctccaggccagcagggtaagaaagggacacttgggttcccaggattgaacggctttcaaggaattgagggtcaaaaaggtgacattggtctccccggtcccgatgtgtttatcgatattgatggggcagtgatctccggtaatccaggtgatcccggtgtgccaggccttccgggactcaagggcgatgagggaatccaaggcctccgggggccctctggtgtgcctggacttccggccctgagcggagtgcccggagccttaggaccacaagggtttccaggacttaaaggagatcagggcaaccctggcagaaccacaatcggagctgcaggactccccgggagggacggcctgcctggcccacccgggcctcccgggccaccctctcctgaattcgaaaccgagactcttcataataaggaatctggctttcctggactcagaggtgaacaggggcccaagggaaacttgggtctgaaaggaattaagggggatagtgggttctgtgcgtgtgacggcggagttcctaataccggtccccccggcgagccaggcccaccaggtccctgggggcttattggcctgcctggcctcaaaggcgcaagaggggaccgcgggagtggaggggctcagggcccagcgggggcacctggtttggtcggaccacttgggcctagcggccctaaaggcaaaaaaggtgaacccatactgagcaccatacaaggaatgccaggagatcgcggcgattctggcagtcaaggcttcaggggggttattggagagcctggaaaagacggggtccccgggcttcctgggctgccaggcttgcccggagacggtggacaaggatttcccggggaaaagggcttacccggactgcccggtgaaaagggccatcctgggccccctggcctgcctgggaatggcctccccggcctgcccggacccagaggcctgcccggcgacaaagggaaagatgggctccccgggcagcagggactgccaggttccaagggcatcactctgccttgcattatcccaggatcctacgggccaagcggattccctgggaccccagggtttccaggaccaaaagggtcacgggggctccccgggacgccaggacagcccggcagcagcgggtctaaaggggagcctggctccccaggcctggtacacctgccagaattgccaggtttcccgggaccacgcggggagaaaggacttcctggattccccggcctcccaggtaaggacggattaccaggcatgatcgggtcaccagggttgccagggagtaagggcgcaactggggacattttcggtgcagagaacggtgccccaggggagcaaggactccagggccttactggccataaaggattcctgggcgactctggcctgccaggcttgaaaggagtgcacggaaagcccgggctgctgggacctaagggtgagagggggagccccgggaccccaggccaggtcggccaaccagggaccccagggagcagcggtccatacggaatcaaaggaaaaagtggtctgcctggggctccaggattccctgggatctctggccacccagggaagaagggtaccagaggcaagaaggggccacctgggtcaatcgtgaaaaagggcctaccagggttgaaaggcctgcctggcaaccctggcttagtaggcctgaaggggtcccccggatcccccggagtcgctgggctccccgcgttgagtggtcccaaaggagagaagggcagtgtgggctttgtggggtttcccggtatccctgggctgccaggaataccgggcaccaggggtctgaagggcatccccgggagcacaggaaagatgggaccgagcgggagagctggcactccaggcgagaagggggatcgcggaaaccccggccctgtcggcatcccctctccccggagacccatgtcaaatctttggcttaaaggggacaaagggtctcaggggtccgcaggcagcaatggattccctggtccaaggggggacaaaggggaggctgggcgccctgggcccccgggactacctggtgctcccggtttacctggtattataaaaggagtctcagggaagcctggtcctccaggttttatgggcatccgcggattacctggactgaagggaagtagcggaatcaccggcttccccggcatgcccggggaatctggatcccagggcatcaggggttctcctggcctccccggtgcttctgggctgcctggcctgaaaggcgacaatggccaaactgtggaaatttctggaagccccggtcctaagggccagccgggagagagcgggttcaaggggactaagggtcgagatggtctgatcggaaacattggctttcccggcaataagggtgaggacggtaaagtcggtgtgtcaggtgacgttgggttgccaggcgctcccggattccccggtgtcgccgggatgcggggagaaccgggactccccggatcctctgggcatcagggcgcaatcgggcccctcgggagccctggtctgataggaccgaaagggttcccaggattccctggactgcacggcctcaatggactgcccggcacaaagggcacacacggtacccctggaccatccatcacaggggtgccaggcccagctggattacccggaccaaagggcgagaagggctatcctggaatcggaattggggcccctggcaaacccgggcttagggggcaaaaaggggaccgaggattccccggactgcagggtccagccgggctacccggcgccccagggattagcctcccctctctgatcgcaggccaaccgggcgatcccggtagaccaggattagatggtgagagaggccgcccaggcccggctggaccacccggcccccctgggccaagtagtaaccagggcgacacaggagatcccgggttccctggtatacctggattcagcgggcttccaggtgagctaggactgaaaggcatgagaggcgagccgggcttcatggggacccctggcaaagtcggccctcccggggatcccggcttccccggtatgaaaggcaaagcgggcccgagaggctctagtgggttgcagggagaccccggacagaccccgaccgccgaggccgtacaggtacctcccggccctctgggacttcccggcattgatggaatccctggcctaaccggagatcctggggctcaaggccctgtaggcctgcagggcagcaaaggcctccccgggattcccggaaaggatggccctagcggtctaccaggtccacccggcgcccttggggaccctggcctccccgggctgcaggggccccctggattcgagggcgcaccaggccaacaaggaccatttggcatgccaggcatgccgggccaatccatgcgagtgggctacactctggtgaagcattcacagtcagaacaggtgcctccttgtcccatcgggatgtcgcagctgtgggtggggtactccctcttgtttgtcgagggccaagaaaaggcccacaaccaagatctgggctttgccggctcttgcctacccaggttcagtaccatgccttttatctattgcaacatcaatgaggtgtgccactacgcgagaaggaatgataagtcttattggctttcaacgactgcacctattcctatgatgccagtgagtcaaactcagataccgcagtacatctcaaggtgtagtgtgtgcgaggccccctcacaagccattgcggtgcattctcaggacatcacaatcccccaatgcccactaggatggcggtccctgtggatcggatatagctttctcatgcacacggcggcaggagccgaaggaggcggccaatctttggtgagcccggggtcctgcctggaggattttcgagccacaccttttatcgagtgttccggtgcaagaggaacatgccactactttgctaacaagtattcgttttggctgacaactgttgaagagcgccaacagttcggggaactgcctgtgtctgagacactcaaagctggtcaacttcatacccgggtgtccagatgtcaggtttgcatgaaatcgctttag

SEQ ID NO: 324543 - DNA, 5036 bp, Artificial Sequence
  derived and/or modified sequence
atgcatccaggtttgtggctgctgctggtcacgctctgtctcacggaggagttggcagctgctggagaaaaaagctacggcaagccatgcggagggcaggactgctccgggagttgccaatgcttccccgaaaagggcgcacgaggtcgcccaggccctatcggtatccagggacctactggccctcagggcttcactgggagcacagggctgtcaggtttgaagggggagcggggtttcccaggtttgctggggccttatggtcccaaaggggacaaaggacccatgggggtacccggattcctgggcattaatgggatccctggccacccgggacagccagggcctagaggaccacccggtctcgatggatgcaacggaacccaaggcgctgtcgggtttccaggccctgatgggtatcctggtctgctcggacctccaggattgccgggacagaagggcagcaaaggggaccctgtgctggcccctggaagcttcaagggcatgaagggggatcctgggctgcccggattggacggaatcaccgggcctcagggcgctcctggttttccaggcgctgtgggcccagctggtcccccaggactccagggacccccagggccaccaggcccattgggacctgatggtaatatggggttgggatttcagggcgaaaaaggagtcaagggggatgtgggcttgccaggtccagcaggacctcccccaagtacgggagaattagagtttatggggttcccaaaaggtaaaaaaggatctaaaggggagcccggtccgaagggctttcccggaatcagcggcccaccaggctttcccggacttggaacaaccggtgaaaaaggcgagaagggtgagaaaggcatcccaggactcccgggacccagaggacctatgggcagtgagggcgtgcaaggcccacccggacagcaggggaagaagggcactttaggattccccggtctgaatggcttccaggggatcgaggggcagaaaggcgatattggcttgcctggacccgacgttttcatcgacatcgatggcgcagtgattagcggaaaccccggtgatcctggagttccaggcctacccggactgaaaggagacgaggggatacagggcctgaggggaccctctggcgtcccagggctgcccgcactgtccggagtccccggagcactgggccctcagggatttcctggcctaaaaggcgatcaaggaaaccctggcagaactacgattggtgcggctggtctgccaggacgagatggcctcccaggcccacctggacccccagggccacctagccctgagttcgagactgagacgctccacaataaggagtccggttttcccggtctcaggggagagcagggccctaaagggaacttggggttaaaaggcatcaaaggggattcgggcttctgcgcctgtgatgggggagtgccaaacacaggccctcccggagaacccggacctcccggtccttggggtctgatcgggctacctgggttaaaaggtgccaggggcgaccggggaagcggcggtgcacagggcccagctggagcccctgggttggtgggcccactggggccttccggacctaaggggaagaagggagaacctatcctctcaactattcaaggaatgccaggagaccgtggcgattctggctcccagggatttaggggcgtgatcggcgagcccggaaaagatggagttcctggcctccctggcctccctggcctccctggcgatggcggtcaaggctttcccggagaaaaaggactgccgggactaccaggggagaaagggcacccaggtccgccaggattgccaggaaatggcctgcctggcttgcccggacccagaggcctccctggggacaaagggaaagatggactcccaggtcaacagggcctgccaggaagtaaaggtatcaccctaccctgtattattccaggaagctatggaccctccgggtttcccggaacacccggattcccgggtcctaagggaagtcgcggattgccagggaccccgggtcagccgggatcttctgggtcaaaaggcgaacctggcagccccggtctggtgcaccttcccgagctccctggatttcctgggcctagaggcgagaaaggtctccctggctttccaggcctgcctgggaaggacggcctgcccggaatgatcggctctcccggactgcccggaagcaaaggagccactggagatattttcggggcagaaaatggagcccctggagagcagggcctgcaaggcctgaccgggcacaaaggctttctgggtgactctgggctgcccggactgaagggggtgcatggaaagcccggtctgcttgggcctaagggtgaaagaggttcaccgggtactcccggacaagttgggcaaccgggaacccctgggtcatctggtccctacggcattaagggcaagtcaggccttcccggagctcccggatttcctggcatcagcggccatccaggcaagaagggaaccaggggaaagaaagggcctcccggatccattgtgaaaaaaggcctaccgggtctgaagggactcccaggcaacccagggttggtgggtctgaaaggctctcctggctcacccggagtggccggtctacctgcgttgtctggacctaaaggcgaaaagggcagcgtaggatttgtggggttccccggtattcccggactgccaggtattcctggcacaagaggtctcaagggcataccagggagcactggaaagatgggcccttccggacgtgccggaacgcctggcgagaagggtgataggggtaatcctggtcccgtggggattccctccccccgaaggccaatgagtaatctgtggctgaagggggacaagggatcgcagggttccgctggcagcaacgggttccccggacctcgcggagacaagggagaagctggaagacctggaccaccaggcctgcctggggctcccggactgcctgggataatcaagggagtctccggaaagcccggtcctccgggattcatgggcatccggggacttccaggactgaagggctcttcaggaattaccggcttccccggaatgccaggcgagtcgggatcccagggcatccggggaagcccaggcctaccgggagcttctggcctgccaggtctgaagggtgataacggacagactgtggagatctccggcagtccaggacctaagggacaaccgggtgagagcggctttaaagggaccaaggggagagatggactcatcgggaatatcggcttccctggtaacaaaggtgaggatggtaaagtcggcgtgagcggcgatgtgggactgccgggagcccctggatttccaggcgtggctggcatgcggggtgaacccggactgccgggatcatctgggcaccagggagccattgggcctctgggaagtccaggactgattggaccaaaagggttccccggtttccccggtctgcatggcttgaatggacttccaggaacaaagggcacacatggaacacctgggcctagtatcacaggtgtgccaggacctgccggactgccaggaccaaagggggagaaaggctaccctgggatcggcatcggcgctcccggaaagcccggactccgagggcagaaaggtgataggggctttcctggcctgcaagggcctgcaggtctacccggtgccccaggaatttccctgcccagtcttatagcgggacaacccggagatcctggacggccaggcttagacggcgagcggggtaggcccggacccgcagggccacctggcccacctggtcctagttccaaccaaggcgacaccggagaccccggtttccccggaatacccggatttagcggactgcctggagaactcggcctgaagggaatgagaggagaaccgggatttatgggcaccccgggaaaggtggggccaccaggagaccccggatttcctggaatgaaaggaaaggcgggacccagaggcagctccggactgcagggagatccgggtcagacaccgactgctgaagcagtacaggttcccccaggcccactaggcctgcctggaatcgatgggatccctggactgaccggagacccaggggctcaaggtccagtgggacttcagggaagcaaggggctacccggaatcccgggtaaggacggcccatcaggcttacctggccctcctggagccctcggagacccaggtctccccggattgcaaggccctcccggattcgagggtgcccctggtcagcaggggccttttggcatgcccggaatgcctgggcaatccatgagagtcggatatacccttgtcaagcattcccagtccgaacaagtgcctccttgtccgatcgggatgagccagctctgggtcgggtatagtctgttgttcgtggagggacaggagaaggcacataatcaagatctgggatttgctggaagctgtctccctaggttttccacaatgccttttatctattgtaacatcaacgaggtctgccactacgcacggcgaaacgacaagtcctactggttatccaccacagcccctatccctatgatgcctgttagccagacacagatccctcaatacatcagtagatgttccgtgtgcgaggctccgagtcaagcaatcgccgtacattctcaagatatcacaattcctcagtgcccgctgggttggagatcactgtggatcggctacagctttcttatgcacaccgcagccggtgcagagggcggtggtcagtcgctagtgagccccggatcttgtctggaggatttccgggctacaccctttatcgagtgtagcggagccagagggacatgccactacttcgccaataagtatagcttctggctgacaaccgttgaggagcgtcagcaattcggagagctcccagtttctgagactttgaaagccggtcagctgcacactcgggtatccagatgccaggtatgtatgaaaagtcttta

SEQ ID NO: 324544 - DNA, 6380 bp, Artificial Sequence
  derived and/or modified sequence
atggaactatctcctgagtgctgcaagttgtaacgggcaccgctgagcctgtttccctttggagcacttcttatctagaagcagtgtttagtttcttccaaactgggccacttcgtccacctactctgttctgagtaaggaaacagcctccaagcatcagcagagcccagatgagcacgggccgcggagccgcttagcagtctcccgggacccagctccggaggagccgcaagcatgcaccctgggttgtggctgctcctggttacgttgtgcctgaccgaggaactggcagcagcgggagagaagtcttatggaaagccatgtgggggccaggactgcagtgggagctgtcagtgttttcctgagaaaggagcgagaggacgacctggaccaattggaattcaaggcccaacaggtcctcaaggattcactggctctactggtttatcgggattgaaaggagaaaggggtttcccaggccttctgggaccttatggaccaaaaggagataagggtcccatgggagttcctggctttcttggcatcaatgggattccgggccaccctggacaaccaggccccagaggcccacctggtctggatggctgtaatggaactcaaggagctgttggatttccaggccctgatggctatcctgggcttctcggaccacccgggcttcctggtcagaaaggatcaaaaggtgaccctgtccttgctccaggtagtttcaaaggaatgaagggggatcctgggctgcctggactggatggaatcactggcccacaaggagcacccggatttcctggagctgtaggacctgcaggaccaccaggattacaaggtcctccagggcctcctggtcctcttggtcctgatgggaatatggggctaggttttcaaggagagaaaggagtcaagggggatgttggcctccctggcccagcaggacctccaccatctactggagagctggaattcatgggattccccaaagggaagaaaggatccaagggtgaaccagggcctaagggttttccaggcataagtggccctccaggcttcccgggccttggaactactggagaaaagggagaaaagggagaaaagggaatccctggtttgccaggacctaggggtcccatgggttcagaaggagtccaaggccctccagggcaacagggcaagaaagggaccctgggatttcctgggcttaatggattccaaggaattgagggtcaaaagggtgacattggcctgccaggcccagatgttttcatcgatatagatggtgctgtgatctcaggtaatcctggagatcctggtgtacctggcctcccaggccttaaaggagatgaaggcatccaaggcctacgtggcccttctggtgtccctggattgccagcattatcaggtgtcccaggagccctagggcctcagggatttccagggctgaagggggaccaaggaaacccaggccgtaccacaattggagcagctggcctccctggcagagatggtttgccaggcccaccaggtccaccaggcccacctagtccagaatttgagactgaaactctacacaacaaagagtcagggttccctggtctccgaggagaacaaggtccaaaaggaaacctaggcctcaaaggaataaaaggagactcaggtttctgtgcttgtgacggtggtgttcccaacactggaccacccggggaaccaggcccacctggtccatggggtctcataggccttccaggccttaaaggagccagaggagatcgaggctctgggggtgcacagggcccagcaggggctccaggcttagttgggcctctgggtccttcaggacccaaaggaaagaagggggaaccaattctcagtacaatccaaggaatgccaggagatcggggtgattctggctcccagggcttccgtggtgtaataggagaaccaggcaaggacggagtaccaggtttaccaggtctgccaggccttccgggtgatggtggacagggcttcccaggtgaaaaggggttacctggacttcctggtgaaaaaggccatcctggtccacctggcctcccaggaaatgggttaccaggacttcctggaccccgtgggcttcctggagataaaggcaaggatggattaccgggacaacaaggccttcccggatctaagggaatcaccctgccctgtattattcctgggtcatacggtccatcaggatttccaggcactcccggattcccaggccctaaagggtctcgaggcctccctgggaccccaggccagcctgggtcaagtggaagtaaaggagagccagggagtccaggattggttcatcttcctgaattaccaggatttcctggacctcgtggggagaagggcttgcctgggtttcctgggctccctggaaaagatggcttgcctgggatgattggcagtccaggcttacctggttccaagggagccactggtgacatctttggtgctgaaaatggtgctccgggggaacaaggcctacaaggattaacagggcacaaaggatttcttggagactctggccttccaggactcaagggtgtgcacgggaagcctggcttactaggccccaaaggtgagcggggcagccctgggacaccaggacaggtgggacagccaggcaccccaggatctagtggtccatatggcatcaagggcaaatctgggctcccaggagcaccaggcttcccaggcatctcaggacatcctggaaagaaaggaacaagaggcaagaaaggtcctcctggatcaattgtaaagaaagggctgccagggctaaaaggccttcctggaaatccaggcctagtaggactgaaaggaagcccaggctctccaggggtcgctgggttgccagccctctctggacccaagggagagaaggggtctgttggattcgtaggttttccaggaataccaggtctgcctggtattcctggaacaagaggattaaaaggaattccaggatcaactggaaaaatgggaccatctggacgtgctggtactcctggtgaaaagggagacagaggcaatccggggccagtcggaatacctagtccaagacgtccaatgtcaaacctttggctcaaaggagacaaaggctctcaaggctcagccggatccaatggatttcctgggccaagaggtgacaaaggagaggctggtcgacctggaccaccaggcctacctggagctcctggcctcccaggcattatcaaaggagttagtggaaagccagggccccctggcttcatgggaatccggggcttacctggcctgaaggggtcctctgggatcacaggtttcccaggaatgccaggagaaagtggttcacaaggtatcagagggtcgcctggactcccaggagcatctggtctcccaggcctgaaaggagacaacggccagacagttgaaatttccggtagcccaggacccaagggacagcctggcgaatctggttttaaaggcacaaaaggaagagatggactaataggcaatataggcttccctggaaacaaaggtgaagatggaaaagttggtgtttctggagatgttggccttcctggagctccaggatttccaggagttgccggcatgagaggagaaccaggacttccaggttcttctggtcaccaaggggcaattgggcctctaggatcccccggattaataggacccaaaggcttccctggatttcctggtttacatggactgaatgggcttccgggcaccaagggtacccatggcactccaggacctagtatcaccggtgtgcctgggcctgctggtctccctggacccaaaggagaaaaaggatatccaggaattggcatcggagctccagggaagccgggcctgagagggcaaaaaggtgatcgaggtttcccaggtctccagggccctgctggtctccccggtgccccaggcatctccttgccctcactcatagcaggacagcctggtgaccccgggcgaccaggcctagatggagaacgaggccgcccaggccccgctggacccccaggtccccctgggccatcctcgaatcaaggcgacaccggagaccctggcttccctggaattccaggtttttctggcctccctggagagctaggactgaaaggcatgagaggtgagcctggcttcatggggactccaggcaaggttgggccacctggagacccaggatttcccggaatgaaggggaaggcagggccaagaggctcttctggcctccaaggtgatcctggacaaacaccaactgcagaagctgtccaggttcctcctggacccttgggtctaccagggatcgatggcatccctggcctcactggggaccctggggctcaaggccctgtaggcctacaaggctccaaaggtttacctggcatccccggtaaagatggccccagtgggctcccaggcccacctggggctcttggtgatcctggtctgcctggactgcaaggccctccaggatttgaaggagctccagggcagcaaggccccttcgggatgcctggaatgcctggccagagcatgagagtgggctacacgttggtaaagcacagccagtcggaacaggtgcccccgtgtcccatcgggatgagccagctgtgggtggggtacagcttactgtttgtggaggggcaagagaaagcccacaaccaggacctgggctttgctggctcctgtctgccccgcttcagcaccatgcccttcatctactgcaacatcaacgaggtgtgccactatgccaggcgcaatgataaatcttactggctctccactaccgcccctatccccatgatgcccgtcagccagacccagattccccagtacatcagccgctgctctgtgtgtgaggcaccctcgcaagccattgctgtgcacagccaggacatcaccatcccgcagtgccccctgggctggcgcagcctctggattgggtactctttcctcatgcacactgccgctggtgccgagggtggaggccagtccctggtctcacctggctcctgcctagaggactttcgggccactcctttcatcgaatgcagtggtgcccgaggcacctgccactactttgcaaacaagtacagtttctggttgaccacagtggaggagaggcagcagtttggggagttgcctgtgtctgaaacgctgaaagctgggcagctccacactcgagtcagtcgctgccaggtgtgtatgaaaagcctgtagggtggcacctgccactctgccccttgccctcccctgcccctcacaacagtcacctcacaaacctgaatggtctgaagaaggaaggcctgagcccctttgcctgtcaagttgtacattggagtctcatttgggctagactaccggacactcgtcaccccagccctcgggtccatagagatgagcccaccctgctgagatctgctgtcctgtttctgtcaagctggtgctactgtttgatttggatgattgtgtgactattcatggctacctcagaaagatttgatgggccacaactgtcttagactgctagctttctccttaccgtcttgatcggaaagctcttcctaatcgctaatcagtcatttcttcatgtacagaggtcagcacacattatttggcttaaaccagaacccagtgtttccacacttaaattctctaaccgaatattcatggatggctcaagtctgcacagagcaagtcctcactcttcaaggaggcccactgtgtctaggcaggcaagagaattgaaatgaggtgccacccagtagcccagagtgagctttagctctctctagaatgagcaagactgggccccacatggcttagagaggcttgaaggccagcagctgggttgggggtggtggtcattaatggcatatggtcctagacaaaccatctcctccttgccggctccccctccagccagagacagaggatgtggcctggttcaaagtaaagcagaggatgcaacaaatgtggccaagcctatcaaaggaaatgagaatgacagccttttttcctgggccagaagtagaggggtgggtgcgtaaggatgtgtgagttttgcttttgactccaggaacaaaaaggtaaatcccacatcccagtttctcagaagtccctgtttattccaaatgccatccagatgtgtgcaatgtggcaaactgaagctgcacagtgttggtttccttgtattctgaggatgttaaagactttgttaaatggttatccaattgctctttcacaggtagcctattaaactattttaatatgtttttttaaacctcataaaaatctagcacactcttctcttgagcagttagcagacc

SEQ ID NO: 324545 - DNA, 5037 bp, Artificial Sequence
  derived and/or modified sequence
atgcaccccggcctgtggctgctgctggtgaccctgtgcctgaccgaggagctggccgccgccggcgagaagagctacggcaagccctgcggcggccaggactgcagcggcagctgccagtgcttccccgagaagggcgccagaggcagacccggccccatcggcatccagggccccaccggcccccagggcttcaccggcagcaccggcctgagcggcctgaagggcgagagaggcttccccggcctgctgggcccctacggccccaagggcgacaagggccccatgggcgtgcccggcttcctgggcatcaacggcatccccggccaccccggccagcccggccccagaggcccccccggcctggacggctgcaacggcacccagggcgccgtgggcttccccggccccgacggctaccccggcctgctgggcccccccggcctgcccggccagaagggcagcaagggcgaccccgtgctggcccccggcagcttcaagggcatgaagggcgaccccggcctgcccggcctggacggcatcaccggcccccagggcgcccccggcttccccggcgccgtgggccccgccggcccccccggcctgcagggcccccccggcccccccggccccctgggccccgacggcaacatgggcctgggcttccagggcgagaagggcgtgaagggcgacgtgggcctgcccggccccgccggccccccccccagcaccggcgagctggagttcatgggcttccccaagggcaagaagggcagcaagggcgagcccggccccaagggcttccccggcatcagcggcccccccggcttccccggcctgggcaccaccggcgagaagggcgagaagggcgagaagggcatccccggcctgcccggccccagaggccccatgggcagcgagggcgtgcagggcccccccggccagcagggcaagaagggcaccctgggcttccccggcctgaacggcttccagggcatcgagggccagaagggcgacatcggcctgcccggccccgacgtgttcatcgacatcgacggcgccgtgatcagcggcaaccccggcgaccccggcgtgcccggcctgcccggcctgaagggcgacgagggcatccagggcctgagaggccccagcggcgtgcccggcctgcccgccctgagcggcgtgcccggcgccctgggcccccagggcttccccggcctgaagggcgaccagggcaaccccggcagaaccaccatcggcgccgccggcctgcccggcagagacggcctgcccggcccccccggcccccccggcccccccagccccgagttcgagaccgagaccctgcacaacaaggagagcggcttccccggcctgagaggcgagcagggccccaagggcaacctgggcctgaagggcatcaagggcgacagcggcttctgcgcctgcgacggcggcgtgcccaacaccggcccccccggcgagcccggcccccccggcccctggggcctgatcggcctgcccggcctgaagggcgccagaggcgacagaggcagcggcggcgcccagggccccgccggcgcccccggcctggtgggccccctgggccccagcggccccaagggcaagaagggcgagcccatcctgagcaccatccagggcatgcccggcgacagaggcgacagcggcagccagggcttcagaggcgtgatcggcgagcccggcaaggacggcgtgcccggcctgcccggcctgcccggcctgcccggcgacggcggccagggcttccccggcgagaagggcctgcccggcctgcccggcgagaagggccaccccggcccccccggcctgcccggcaacggcctgcccggcctgcccggccccagaggcctgcccggcgacaagggcaaggacggcctgcccggccagcagggcctgcccggcagcaagggcatcaccctgccctgcatcatccccggcagctacggccccagcggcttccccggcacccccggcttccccggccccaagggcagcagaggcctgcccggcacccccggccagcccggcagcagcggcagcaagggcgagcccggcagccccggcctggtgcacctgcccgagctgcccggcttccccggccccagaggcgagaagggcctgcccggcttccccggcctgcccggcaaggacggcctgcccggcatgatcggcagccccggcctgcccggcagcaagggcgccaccggcgacatcttcggcgccgagaacggcgcccccggcgagcagggcctgcagggcctgaccggccacaagggcttcctgggcgacagcggcctgcccggcctgaagggcgtgcacggcaagcccggcctgctgggccccaagggcgagagaggcagccccggcacccccggccaggtgggccagcccggcacccccggcagcagcggcccctacggcatcaagggcaagagcggcctgcccggcgcccccggcttccccggcatcagcggccaccccggcaagaagggcaccagaggcaagaagggcccccccggcagcatcgtgaagaagggcctgcccggcctgaagggcctgcccggcaaccccggcctggtgggcctgaagggcagccccggcagccccggcgtggccggcctgcccgccctgagcggccccaagggcgagaagggcagcgtgggcttcgtgggcttccccggcatccccggcctgcccggcatccccggcaccagaggcctgaagggcatccccggcagcaccggcaagatgggccccagcggcagagccggcacccccggcgagaagggcgacagaggcaaccccggccccgtgggcatccccagccccagaagacccatgagcaacctgtggctgaagggcgacaagggcagccagggcagcgccggcagcaacggcttccccggccccagaggcgacaagggcgaggccggcagacccggcccccccggcctgcccggcgcccccggcctgcccggcatcatcaagggcgtgagcggcaagcccggcccccccggcttcatgggcatcagaggcctgcccggcctgaagggcagcagcggcatcaccggcttccccggcatgcccggcgagagcggcagccagggcatcagaggcagccccggcctgcccggcgccagcggcctgcccggcctgaagggcgacaacggccagaccgtggagatcagcggcagccccggccccaagggccagcccggcgagagcggcttcaagggcaccaagggcagagacggcctgatcggcaacatcggcttccccggcaacaagggcgaggacggcaaggtgggcgtgagcggcgacgtgggcctgcccggcgcccccggcttccccggcgtggccggcatgagaggcgagcccggcctgcccggcagcagcggccaccagggcgccatcggccccctgggcagccccggcctgatcggccccaagggcttccccggcttccccggcctgcacggcctgaacggcctgcccggcaccaagggcacccacggcacccccggccccagcatcaccggcgtgcccggccccgccggcctgcccggccccaagggcgagaagggctaccccggcatcggcatcggcgcccccggcaagcccggcctgagaggccagaagggcgacagaggcttccccggcctgcagggccccgccggcctgcccggcgcccccggcatcagcctgcccagcctgatcgccggccagcccggcgaccccggcagacccggcctggacggcgagagaggcagacccggccccgccggcccccccggcccccccggccccagcagcaaccagggcgacaccggcgaccccggcttccccggcatccccggcttcagcggcctgcccggcgagctgggcctgaagggcatgagaggcgagcccggcttcatgggcacccccggcaaggtgggcccccccggcgaccccggcttccccggcatgaagggcaaggccggccccagaggcagcagcggcctgcagggcgaccccggccagacccccaccgccgaggccgtgcaggtgccccccggccccctgggcctgcccggcatcgacggcatccccggcctgaccggcgaccccggcgcccagggccccgtgggcctgcagggcagcaagggcctgcccggcatccccggcaaggacggccccagcggcctgcccggcccccccggcgccctgggcgaccccggcctgcccggcctgcagggcccccccggcttcgagggcgcccccggccagcagggccccttcggcatgcccggcatgcccggccagagcatgagagtgggctacaccctggtgaagcacagccagagcgagcaggtgcccccctgccccatcggcatgagccagctgtgggtgggctacagcctgctgttcgtggagggccaggagaaggcccacaaccaggacctgggcttcgccggcagctgcctgcccagattcagcaccatgcccttcatctactgcaacatcaacgaggtgtgccactacgccagaagaaacgacaagagctactggctgagcaccaccgcccccatccccatgatgcccgtgagccagacccagatcccccagtacatcagcagatgcagcgtgtgcgaggcccccagccaggccatcgccgtgcacagccaggacatcaccatcccccagtgccccctgggctggagaagcctgtggatcggctacagcttcctgatgcacaccgccgccggcgccgagggcggcggccagagcctggtgagccccggcagctgcctggaggacttcagagccacccccttcatcgagtgcagcggcgccagaggcacctgccactacttcgccaacaagtacagcttctggctgaccaccgtggaggagagacagcagttcggcgagctgcccgtgagcgagaccctgaaggccggccagctgcacaccagagtgagcagatgccaggtgtgcatgaagagcctgtag

SEQ ID NO: 324546 - DNA, 342 bp, Artificial Sequence
  derived and/or modified sequence
atgggctcccctttctattgcaacgggggctactggcttcagagaacagagtgctggcgtaccatgaatgagttccatttcaggagtgcccagctggcggttccaggaagacagcctcaggaattgtttaggagacaccgcgcgaccagcgcgtggtcttctcgccgtcgctcggccttggtggtcggcactatagggcctggacatggacggctgcaggacccctcctgcaccaagctaccctccccacccgcttggttcccattctttatgaatcgttctatgggtcacagccaggtgggaatgcacgtgttccatcggatgggtactacttccagctag

SEQ ID NO: 324547 - DNA, 678 bp, Artificial Sequence
  derived and/or modified sequence
atgagcaaggagatcttccccttctgcagagtgggcaacatcccctacgaggccaccgaggagcagctgaaggacatcttcagcgaggtgggccccgtggtgagcttcagactggtgtacgacagagagaccggcaagcccaagggctacggcttctgcgagtaccaggaccaggagaccgccctgagcgccatgagaaacctgaacggcagagagttcagcggcagagccctgagagtggacaacgccgccagcgagaagaacaaggaggagctgaagagcctgggcaccggcgcccccgtgatcgagagcccctacggcgagaccatcagccccgaggacgcccccgagagcatcagcaaggccgtggccagcctgccccccgagcagatgttcgagctgatgaagcagatgaagctgtgcgtgcagaacagcccccaggaggccagaaacatgctgctgcagaacccccagctggcctacgccctgctgcaggcccaggtggtgatgagaatcgtggaccccgagatcgccctgaagatcctgcacagacagaccaacatccccaccctgatcgccggcaacccccagcccgtgcacggcgccggccccggcagcggcagcaacgtgagcatgaaccagcagaacccccaggccccccaggcccagagcctgtag

SEQ ID NO: 324548 - DNA, 757 bp, Artificial Sequence
  derived and/or modified sequence
atgaatcgctaccggagccgctgacggttcggacgtgcagttctccctgcttatcctgtagggcgtccaacctggtggactcatgagcaaagagatattcccattctgccgagtggggaacattccttatgaagctactgaagagcagttgaaggacatcttttctgaggttggacctgttgttagtttcagattggtatacgatagagagacaggaaagccaaagggttatggcttctgtgaataccaagaccaagagacagcacttagtgccatgcggaacctgaatgggcgcgaattcagtgggagagcacttcgagtggacaatgctgccagtgaaaagaacaaagaagagctgaagagccttggcactggtgcccctgtcattgagtcaccttatggagagaccatcagtcctgaggatgcccctgagtccattagcaaagcagttgccagccttccaccagagcagatgtttgagctgatgaaacaaatgaagctctgtgtccagaatagtccccaggaggcacggaacatgttacttcagaaccctcaactggcttatgctttgctgcaagcacaggtagtgatgagaattgtggatccggaaattgccctgaaaattctgcatcgccagacaaatatcccaacgctgattgcaggcaaccctcagccagtccatggtgctgggcctggctcaggatccaatgtgtcaatgaaccagcagaatcctcaggcccctcaggcccagtctttg

SEQ ID NO: 324549 - DNA, 678 bp, Artificial Sequence
  derived and/or modified sequence
atgtccaaggagatttttcccttttgcagagtcgggaacatcccctacgaagccaccgaggagcagttgaaggacattttctccgaagtagggcccgtcgtctccttccgcctggtgtacgatcgggagaccggaaagccaaaagggtatggcttttgtgaataccaggatcaggagaccgccttgtctgcaatgcgcaatttaaacgggcgggagttcagtggccgcgccctacgagtcgataatgccgcttccgagaagaataaagaagagctcaaatcccttggaaccggagcccccgtcatcgagagtccatacggtgagaccatttcacccgaggatgcccctgagtcaataagcaaagcagtcgcctctctgccccctgagcaaatgttcgagctgatgaagcagatgaaattatgcgtgcagaactcaccccaggaagccaggaatatgctcctgcagaaccctcagcttgcgtacgcgctactgcaggcacaagtggttatgagaatcgtggaccccgaaatcgcgctgaaaattctgcataggcagacaaacatacccaccttaatagcaggtaatccccaacctgtacatggggccggcccgggaagcggtagcaacgtatccatgaatcagcagaatccccaggccccgcaagcccagtccctctag

SEQ ID NO: 324550 - DNA, 678 bp, Artificial Sequence
  derived and/or modified sequence
atgagcaaggagatcttccccttctgccgggtgggcaacatcccctatgaggccacagaggagcagctgaaggacatcttcagcgaggtgggccctgtggtgtccttccggctggtgtatgaccgggagaccgggaagcccaagggctacggcttctgtgagtaccaggaccaggagacagccctgagcgccatgaggaacctgaatggccgggagttcagcggccgggccctgcgggtggacaatgctgccagcgagaagaacaaggaggagctgaagagcctgggcactggagcccctgtgattgagagcccctacggggagaccatcagcccagaagatgcccctgagagcatcagcaaggctgtggccagcctgcccccagagcagatgtttgagctgatgaagcagatgaagctgtgtgtgcagaacagcccccaggaggccaggaacatgctgctgcagaacccccagctggcctatgccctgctgcaggcccaggtggtgatgagaattgtggaccctgagatcgccctgaagatcctgcaccggcagaccaacatccccaccctgattgctggcaacccccagcctgtgcacggggccggccctggcagcggcagcaatgtgtccatgaaccagcagaacccccaggccccccaggcccagagcctgtag

SEQ ID NO: 324551 - DNA, 678 bp, Artificial Sequence
  derived and/or modified sequence
atgagcaaggagatcttccccttctgccgggtgggcaacatcccctacgaagccacagaggagcagctgaaggatattttttctgaagtgggccctgtggttagcttcagattagtgtatgatagagaaaccggcaagccgaagggatatgggttttgcgagtatcaagatcaggaaactgccctatccgcgatgaggaatctgaacgggagggaattctccggcagagcacttagggtcgataatgccgcctccgaaaagaataaggaggaattaaaatcactgggcacgggcgctccagtgatcgagagcccctacggcgaaacgatcagcccagaagatgctcctgagagcatttcaaaagcagtcgcctccctgcctcctgagcagatgtttgaactgatgaagcaaatgaagctgtgtgtccagaattctccccaggaagcgagaaatatgcttctgcagaacccccagctggcctacgcactgctccaagcgcaggttgtgatgaggattgtcgaccccgagatcgcgctcaaaattcttcataggcaaaccaatatcccaaccctcattgctggtaacccccagcccgtgcacggcgctggacctggctccggcagtaatgtgagcatgaatcagcaaaaccctcaggcccctcaggctcaatccctgtag

SEQ ID NO: 324552 - DNA, 678 bp, Artificial Sequence
  derived and/or modified sequence
atgagcaaagagatctttcccttctgcagggtgggcaatattccatacgaggcaactgaggaacaactgaaagatattttcagcgaggttggccctgtagtcagctttaggttggtctacgaccgggagacagggaaaccaaagggttacgggttctgcgagtaccaagatcaagagacggctctgtctgctatgcggaaccttaacggccgtgagttttccgggcgagctctgagagtggataatgcggcaagcgaaaagaacaaggaggagttaaagagtctgggaactggcgctcccgtcattgagtccccttatggggaaacgatctctcccgaagatgcccctgagtcaataagcaaggcagtagcttctttaccacccgagcagatgttcgaactcatgaagcagatgaagctgtgcgttcagaattccccgcaagaggcccgaaatatgctcttgcagaaccctcagcttgcatacgcattgctgcaagctcaggttgttatgcgcatcgtggaccctgaaattgccctgaaaattctccaccggcagacgaatatccctaccctcatagccggaaatccccagcccgttcacggcgcaggccctggatcagggtcgaatgtgagcatgaaccagcagaatcctcaggcccctcaggcccaatccctgtag

SEQ ID NO: 324553 - protein, 597 aa, Artificial Sequence
  derived and/or modified sequence
MEHRGPPPEYPFKGMPPQSVVCKPQEPGHFYSEHRLNQPGRTEGQLMRYQHPPEYGAARPAQDISLPLSARNSQPHSPTSSLTSGGSLPLLQSPPSTRLSPARHPLVPNQGDHSAHLPRPQQHFLPNQAHQGDHYRLSQPGLSQQQQQQQQQHHHHHHHQQQQQQQPQQQPGEAYSAMPRAQPSSASYQPVPADPFAIVSRAQQMVEILSDENRNLRQELEGCYEKVARLQKVETEIQRVSEAYENLVKSSSKREALEKAMRNKLEGEIRRMHDFNRDLRERLETANKQLAEKEYEGSEDTRKTISQLFAKNKESQREKEKLEAELATARSTNEDQRRHIEIRDQALSNAQAKVVKLEEELKKKQVYVDKVEKMQQALVQLQAACEKREQLEHRLRTRLERELESLRIQQRQGNCQPTNVSEYNAAALMELLREKEERILALEADMTKWEQKYLEENVMRHFALDAAATVAAQRDTTVISHSPNTSYDTALEARIQKEEEEILMANKRCLDMEGRIKTLHAQIIEKDAMIKVLQQRSRKEPSKTEQLSCMRPAKSLMSISNAGSGLLSHSSTLTGSPIMEEKRDDKSWKGSLGNDSK

SEQ ID NO: 324554 - protein, 1084 aa, Artificial Sequence
  derived and/or modified sequence
MRNSEEQPSGGTTVLQRLLQEQLRYGNPSENRSLLAIHQQATGNGPPFPSGSGNPGPQSDVLSPQDHHQQLVAHAARQEPQGQEIQSENLIMEKQLSPRMQNNEELPTYEEAKVQSQYFRGQQHASVGAAFYVTGVTNQKMRTEGRPSVQRLNPGKMHQDEGLRDLKQGHVRSLSERLMQMSLATSGVKAHPPVTSAPLSPPQPNDLYKNPTSSSEFYKAQGPLPNQHSLKGMEHRGPPPEYPFKGMPPQSVVCKPQEPGHFYSEHRLNQPGRTEGQLMRYQHPPEYGAARPAQDISLPLSARNSQPHSPTSSLTSGGSLPLLQSPPSTRLSPARHPLVPNQGDHSAHLPRPQQHFLPNQAHQGDHYRLSQPGLSQQQQQQQQQHHHHHHHQQQQQQQPQQQPGEAYSAMPRAQPSSASYQPVPADPFAIVSRAQQMVEILSDENRNLRQELEGCYEKVARLQKVETEIQRVSEAYENLVKSSSKREALEKAMRNKLEGEIRRMHDFNRDLRERLETANKQLAEKEYEGSEDTRKTISQLFAKNKESQREKEKLEAELATARSTNEDQRRHIEIRDQALSNAQAKVVKLEEELKKKQVYVDKVEKMQQALVQLQAACEKREQLEHRLRTRLERELESLRIQQRQGNCQPTNVSEYNAAALMELLREKEERILALEADMTKWEQKYLEENVMRHFALDAAATVAAQRDTTVISHSPNTSYDTALEARIQKEEEEILMANKRCLDMEGRIKTLHAQIIEKDAMIKVLQQRSRKEPSKTEQLSCMRPAKSLMSISNAGSGLLSHSSTLTGSPIMEEKRDDKSWKGSLGILLGGDYRAEYVPSTPSPVPPSTPLLSAHSKTGSRDCSTQTERGTESNKTAAVAPISVPAPVAAAATAAAITATAATITTTMVAAAPVAVAAAAAPAAAAAPSPATAAATAAAVSPAAAGQIPAAASVASAAAVAPSAAAAAAVQVAPAAPAPVPAPALVPVPAPAAAQASAPAQTQAPTSAPAVAPTPAPTPTPAVAQAEVPASPATGPGPHRLSIPSLTCNPDKTDGPVFHSNTLERKTPIQILGQEPDAEMVEYLI

SEQ ID NO: 324555 - protein, 852 aa, Artificial Sequence
  derived and/or modified sequence
MEHRGPPPEYPFKGMPPQSVVCKPQEPGHFYSEHRLNQPGRTEGQLMRYQHPPEYGAARPAQDISLPLSARNSQPHSPTSSLTSGGSLPLLQSPPSTRLSPARHPLVPNQGDHSAHLPRPQQHFLPNQAHQGDHYRLSQPGLSQQQQQQQQQHHHHHHHQQQQQQQPQQQPGEAYSAMPRAQPSSASYQPVPADPFAIVSRAQQMVEILSDENRNLRQELEGCYEKVARLQKVETEIQRVSEAYENLVKSSSKREALEKAMRNKLEGEIRRMHDFNRDLRERLETANKQLAEKEYEGSEDTRKTISQLFAKNKESQREKEKLEAELATARSTNEDQRRHIEIRDQALSNAQAKVVKLEEELKKKQVYVDKVEKMQQALVQLQAACEKREQLEHRLRTRLERELESLRIQQRQGNCQPTNVSEYNAAALMELLREKEERILALEADMTKWEQKYLEENVMRHFALDAAATVAAQRDTTVISHSPNTSYDTALEARIQKEEEEILMANKRCLDMEGRIKTLHAQIIEKDAMIKVLQQRSRKEPSKTEQLSCMRPAKSLMSISNAGSGLLSHSSTLTGSPIMEEKRDDKSWKGSLGILLGGDYRAEYVPSTPSPVPPSTPLLSAHSKTGSRDCSTQTERGTESNKTAAVAPISVPAPVAAAATAAAITATAATITTTMVAAAPVAVAAAAAPAAAAAPSPATAAATAAAVSPAAAGQIPAAASVASAAAVAPSAAAAAAVQVAPAAPAPVPAPALVPVPAPAAAQASAPAQTQAPTSAPAVAPTPAPTPTPAVAQAEVPASPATGPGPHRLSIPSLTCNPDKTDGPVFHSNTLERKTPIQILGQEPDAEMVEYLI

SEQ ID NO: 324556 - DNA, 1794 bp, Artificial Sequence
  derived and/or modified sequence
atggagcacagaggtccgccgcctgagtatccttttaaaggcatgcctccccagagcgtggtgtgcaagccccaggagcctggacacttctactctgaacaccgactaaaccagcctgggagaaccgagggacagttgatgcgctatcaacacccccctgaatacggcgccgcgcgcccagcccaagatatatccctaccgcttagcgcaagaaactctcagccccattccccaaccagcagcttgacatctggaggtagtctcccccttctacagtcacctccttccactagactgagcccagctcgccaccccttggttcctaaccagggggaccactctgctcacttgcctcgcccacagcagcactttctccctaaccaagcccatcagggggatcactaccgcctctcccagccagggctgtcccagcagcagcaacagcagcagcagcagcatcaccaccaccaccaccatcagcagcaacagcagcaacaaccacagcaacagcccggcgaagcatatagtgcgatgccgcgcgcccagccaagctccgccagttatcagcccgtgccggcagatcctttcgcgatcgttagcagggcgcaacaaatggtggaaattttgagcgacgaaaaccggaacctccgccaggagcttgaaggttgctacgagaaggtggcccggctccaaaaggtagagaccgagatccaacgtgtgtctgaggcctacgaaaatctggtaaagagcagtagcaagcgggaggcactcgagaaagcaatgcggaacaaactggaaggggaaatccgtcgcatgcatgatttcaacagggacttgcgtgagagacttgagacagctaacaaacaactggccgaaaaggaatatgagggcagcgaagatacaagaaaaacgatctctcagctgtttgccaagaacaaagagtctcaacgcgaaaaagaaaaattggaagcggaattagccactgccagaagtacaaatgaggatcagcggagacacatcgaaattcgagatcaggccttaagtaacgcgcaggcaaaggtggtgaagttagaggaggaactgaagaaaaagcaagtgtatgtggacaaagtcgagaagatgcaacaggcgctggttcagctgcaggcagcatgtgaaaagagggagcagctggagcatcggctgagaactcgcttggaaagggaactcgagagtctgcgcattcagcagaggcaaggaaactgtcagcccaccaatgtgtcagagtacaacgccgcggctcttatggaactactgagggaaaaagaggaaaggatcctggccctcgaggccgacatgaccaagtgggaacagaagtatctagaagagaatgtcatgcgtcattttgccctggacgctgctgccaccgttgctgcccaacgcgacactacagtcatctcccattctcccaacacctcctatgacacagccctggaggctcgaattcagaaggaagaggaagagatcttgatggctaacaaacgctgcttggacatggagggacgcatcaagaccttgcacgcgcagattatcgagaaggatgctatgattaaggtcctgcaacagcgaagccgaaaagagccctcaaaaacagagcagctctcctgtatgagaccggccaagtctctgatgtctatttcaaacgctgggtcaggcctgctgtcccattcctccactctgaccggctcccctatcatggaagagaagcgggacgacaagagttggaaggggtccctagggaatgactctaaatag

SEQ ID NO: 324557 - DNA, 3255 bp, Artificial Sequence
  derived and/or modified sequence
atgcgcaacagcgaggaacagccttctggaggaactactgtgctgcaacggctgctgcaggaacagctcagatacggaaatccttcagaaaaccgttctctgctggcaattcaccagcaggctaccgggaacggccccccctttccatcaggctcgggcaaccctggcccacaaagtgacgtgctaagcccacaggaccatcatcagcagttggtggctcacgctgcgcgacaagagcctcaaggtcaggagatccagagcgaaaatctgatcatggaaaagcagctgagtcctaggatgcagaataacgaggagctgcctacctacgaggaggccaaggtgcagtcccaatacttccgagggcagcagcacgcctccgttggggcggcgttctatgtgaccggcgtcactaaccagaagatgaggacagagggtagaccttcagtgcagcgcctgaaccccggtaagatgcaccaggacgagggcttacgagacctcaaacagggtcacgtccggtcactgagcgagaggttaatgcagatgtctcttgcaacaagcggcgtgaaggcacatccaccagttacatcagcaccactgagtcctccacagcctaacgacctgtataagaacccaactagctctagtgagttctacaaggcccagggacctctgccaaaccaacacagtttaaagggaatggaacacaggggccctcctccggaatacccgttcaaagggatgcctccccagtccgtggtctgtaaaccccaagagccagggcacttctattccgagcatcgactgaatcagcctgggcgaacggagggtcagcttatgcgttatcaacatcctcctgagtacggcgctgctagacccgcgcaggacatatcccttcctctctccgctcgcaacagtcagccccactcacccacctccagtctcacatccggaggctccttgcccctgctccaatctcctccttctacacggctttcccccgctcgacatcctttggtccctaaccaaggcgatcactcagcccacttgcccaggccccagcaacactttttgccgaaccaggcgcatcagggagaccattatcgtttgtctcagcccggcttaagccaacagcagcagcagcaacagcagcagcaccaccaccaccaccaccatcagcaacagcaacagcaacagccccagcagcaaccgggcgaagcctatagcgcaatgccccgcgcacagccttctagcgcctcatatcagcccgtccctgccgatccattcgctattgtttcacgggcccagcagatggtggaaatcctcagtgatgaaaatcgtaatttgcgacaagagctggaaggatgctacgaaaaagtggcacggctgcagaaagtggagaccgaaatccaacgcgtctccgaagcgtacgaaaacctggttaagagtagctctaagcgggaggcccttgagaaagctatgaggaataaactggaaggagaaatcaggcgcatgcacgacttcaacagggatctccgggagcgtctggaaaccgcaaataagcagctggccgagaaggagtacgaaggctcagaggatacccgcaagaccatttcacagttattcgctaaaaataaagaatcccagagggaaaaggagaaattggaggctgagctggcaacagccaggagtaccaatgaggatcaaagaaggcatattgaaatccgagaccaggcattatccaacgcgcaggccaaggtagtcaagttagaggaggaactgaagaagaagcaggtttacgtagataaggtagagaagatgcagcaggctttggtgcagttacaggcagcctgtgagaagcgagagcaactggagcatcgcctgaggactaggctggagcgcgagttagagagtctacggattcagcaacgacagggcaattgccagcccacaaacgtctctgaatataatgccgcagcattaatggagcttcttcgcgaaaaggaggagcgcatcctggctttggaggccgatatgactaaatgggagcaaaaatacctggaagaaaacgtgatgcggcactttgctctcgatgcggctgcgacagtggctgcccagcgggatacgaccgtcatctcccactcacccaacacctcctacgatacagcacttgaggcccgaattcaaaaagaagaagaagaaatcctgatggccaacaagcgttgcctggacatggaaggaaggataaagacactacacgcccagataattgaaaaagacgcaatgatcaaagtactgcagcagaggagcaggaaggagcctagcaagacggaacagcttagttgtatgaggcccgcgaagtctctgatgagtatctctaacgccgggagtggacttttgtcccacagctctaccctgacaggcagtccgatcatggaggagaagcgcgacgacaaatcctggaagggttcactgggcatactgctcgggggggactatagagcagagtatgttccctcaacaccgagtcccgtgcccccctccacacccctcctgagcgcgcactcaaaaacaggatcacgggattgttccactcaaactgaacgcgggacagagtcaaacaaaacagccgcagtggcacctattagtgtcccagcacccgtcgctgccgcggctactgccgcagcgattacggcaacggcagctaccatcaccacaactatggtcgctgcagcccctgtcgcagtggcagccgctgccgctcccgctgccgctgctgccccgtctcccgcgacggcagcagctactgccgccgctgtgagccccgcagccgcgggacagatacccgctgccgctagcgtggcttctgctgcagccgtcgccccatctgctgccgccgccgccgccgtacaggtggcacctgctgctccagcaccagtgccagcccccgcattggttccagtgcccgcccccgcagcggcccaggcctccgcgcctgctcagactcaggctcctacgagcgcacctgcagtggcacctacaccagctccaacaccaactcccgcagtggcacaagccgaggttcccgcctctcctgcaactggacccggtcctcatcggctgagtattccctcgctgacttgtaacccagacaagacggatgggcccgtgttccatagtaacactctcgagagaaaaactcccatccagatcctagggcaggagcctgatgcagaaatggtcgagtacttgatctag

SEQ ID NO: 324558 - DNA, 2559 bp, Artificial Sequence
  derived and/or modified sequence
atggaacatcggggacctccccccgaatacccattcaagggcatgcctcctcaaagcgtagtgtgcaaaccacaggagcctggacatttctactcagaacaccggcttaatcagcccgggcgcacagagggccagctcatgcggtatcagcaccctccagagtatggcgctgccaggccggcacaagacattagcctgccactcagcgccaggaattcccagccacactctcccacctctagtcttacttccggtgggtctctacccttgttacagtcgcctccaagcacacgcctgtctcccgcccgccatcccctggttcctaatcagggcgaccactccgcacatctgccccgacctcagcaacacttcttaccaaaccaagcccatcagggggaccactacagattgtcccaaccagggttgagccagcagcaacagcaacagcaacagcagcatcaccatcatcatcaccatcagcaacagcagcagcagcagccacagcagcagcccggcgaggcctattccgcgatgccccgtgcacagcctagtagcgccagttatcaaccagtgcccgccgacccgttcgcaatagtgtcccgggcacagcagatggtagaaattttgagcgatgagaatagaaatctgcgccaggaattggagggctgctatgaaaaggttgcacgcctgcagaaggttgaaacagagatccagagagtgagcgaagcctatgagaatctcgtgaagtcgtcctctaagcgtgaagctttggagaaggcgatgcggaacaaactggaaggggaaatccggagaatgcacgattttaaccgcgatttacgggaacgcctggagacagcaaataagcaactggctgagaaggagtatgaaggcagcgaagatacccggaagacaatctctcaattgtttgcaaaaaacaaggagtctcaaagagagaaagaaaaactggaggcagaactcgccacggcccggagtactaatgaagaccaaaggcggcacatagaaattagagaccaggctctgtcaaacgcccaggccaaagtggtcaagctggaagaagaactgaagaagaaacaggtctatgtggataaggttgagaagatgcagcaggccctggttcagctgcaggccgcatgcgagaagcgcgagcagctagaacataggctgaggactcgccttgaacgcgagctggagagcctgcgaattcagcagcgtcagggaaactgtcagcctaccaacgttagtgaatacaatgctgccgcgctcatggagttgttgagagaaaaggaagaacgaatattggcactggaggcagacatgaccaaatgggagcagaagtaccttgaagagaatgtgatgcgacatttcgctctcgacgctgcggccacagtggctgcacagcgagataccaccgtgataagccacagcccaaacacatcatatgatactgccttagaggcccgaatacagaaggaggaggaggaaattctgatggcgaacaagaggtgcctcgatatggaaggacgaattaaaactctacatgcccaaattatagaaaaggacgcaatgataaaggtgctgcagcagcgatcccggaaagagccgagcaagacagaacagctttcctgcatgaggcccgccaaaagcctgatgagcatctcaaacgcagggtccggcctactgtcccactcgtctactctgacaggctcaccaatcatggaagaaaaacgggacgacaagtcctggaaggggagtctgggtatactgcttggcggagactacagagctgagtatgtgccctcgacaccaagtcccgttcctccgagcacacccctgctgagtgcccattctaaaaccggttcacgcgactgttccacccaaactgagcgtggtactgagagtaataaaactgctgcggtggccccaatttccgtgcctgcaccagtggctgccgcagccaccgccgcggccatcacagctacggctgccactatcacaaccacgatggtggccgcggccccagtcgcggtcgctgccgccgctgcacccgccgccgcagctgctccaagtcctgccaccgctgcagctaccgccgcggcagtctcgcctgctgccgctggccagattcctgctgcagccagcgtagcaagcgccgctgccgtggccccatcggccgccgctgctgctgcggtccaggttgctccagcagctccagcccctgtgcccgctcccgctctggtcccggtgccagccccggccgcggctcaggcctccgcccctgctcagacccaggcgcccacatctgcgcctgctgttgcgcctacaccagctcctacaccaacaccagctgttgcccaggccgaggtcccagcttcacccgccacaggacccggcccccaccgactcagtattcctagccttacctgcaaccctgacaaaacggacggccccgttttccatagcaataccttagagcggaagactccaattcagattctcggccaagagccagatgcagagatggtggaatatctgatttag

SEQ ID NO: 324559 - DNA, 3255 bp, Artificial Sequence
  derived and/or modified sequence
atgagaaattctgaagagcagccgtcaggagggaccacggtgttgcagagactattgcaggagcagttgagatacgggaacccctccgagaatagaagccttctggcgatccatcagcaggccacaggaaacggcccgccgtttccctcaggctcaggtaacccggggcctcagagcgatgtgctctcccctcaggatcaccatcagcagcttgtggcacatgcagcacggcaagagccacaagggcaggaaattcagagcgaaaatctgatcatggagaagcagctgtcacccagaatgcagaacaacgaggaactgccaacgtatgaagaagccaaggtacaatctcagtatttcaggggacagcaacacgcctctgtcggtgcagcattctacgtcacaggcgtaactaaccagaagatgcggaccgagggcagaccatcagtgcagcgtcttaaccccggtaagatgcaccaggacgaaggcctgcgggatttaaaacaaggccatgtcagaagcttgagcgagagactcatgcagatgagcctggcaacaagcggtgtcaaagctcacccccccgtcacgtctgcgccattatctccaccgcaacctaacgacctttataagaacccaaccagttcatctgagttctataaggcccaggggcccctccctaaccagcactcactgaaagggatggaacaccgcggcccccctccagagtaccctttcaagggcatgccaccccagtccgttgtctgcaagccacaagagcctggtcacttctattcagagcaccgcttgaaccagccaggacgtaccgaaggccagctcatgaggtatcaacacccccctgaatacggagctgctagacccgctcaggatattagccttccactatccgccaggaactctcaaccacattcccccacctcatccctgacatccggtggttcattgcccttactgcaaagccccccctctacccgcctttcccctgcccgccacccattagtaccgaaccagggcgaccactccgcgcatttgccgagaccacagcagcacttcctgcctaaccaggctcaccaaggcgatcactatcgtctgagtcagcccggcctctctcagcagcaacagcagcaacagcagcagcatcatcaccatcatcaccaccaacaacagcagcaacaacagcctcagcagcagcccggggaggcctattcagcaatgccaagggcgcagcccagttctgcctcatatcagccggtgccagccgatccctttgcgatcgtatcacgcgcacaacaaatggtcgagatcctgtctgatgagaatcgaaatctacgacaggaactggaaggctgttatgagaaggtcgccaggctgcaaaaggtggaaacggagatacagcgtgtaagtgaggcctacgagaatctggtgaaatcctcatcaaagcgagaagccttggagaaggcgatgcgtaataagctcgagggggagatcagacgcatgcacgacttcaatagagacttacgagagaggcttgaaactgctaacaagcaactcgccgagaaagagtatgaggggtccgaagatactcgcaaaactatcagccagctgttcgccaagaacaaggaatcccagagagaaaaggaaaagctcgaggccgagctagcaacggcaaggtccaccaatgaggaccagcggagacacatcgagatccgggaccaagctctgtccaacgcacaagcaaaagtggtcaagctggaggaggagctcaaaaagaaacaggtgtacgttgacaaggtagagaaaatgcaacaggcgcttgtgcagctccaggctgcatgcgaaaaaagagaacaacttgagcaccgactccgtacacggctggagagagaattagaatccctcaggattcaacagcgccaggggaattgccagcctaccaacgtctccgagtacaatgctgccgctctgatggaattgctgagagagaaagaggagcggattttagccctcgaagccgacatgaccaagtgggagcagaagtatcttgaagaaaacgtcatgcgtcactttgcactcgatgccgcggcaactgttgctgcccagcgcgatacaactgtaatttctcactctcctaacacaagttatgacaccgcactcgaggcacggatccagaaggaggaagaggaaatactcatggcaaataaacgatgcctggatatggaaggccggatcaaaaccctgcatgcccagatcatcgaaaaagacgccatgatcaaggtactgcagcagaggtcgcgtaaagaacccagcaagactgaacagctgtcttgtatgaggcccgctaagtccctgatgtcaatctctaacgcagggtctggcctgttatctcattcgtcaacactgaccggaagccctatcatggaagaaaaacgtgatgataaatcgtggaagggttccctgggtatccttctgggaggagattatagagccgagtatgtgccttccactcccagtccagttccacctagtacaccgctgttgagcgctcattcaaagacaggttcgcgcgactgctcaacccagaccgagcgaggaacggaatccaacaaaaccgcagcagtagcccctatcagcgtccccgcccctgtcgcagctgccgcgacggcagctgcaattaccgctaccgccgcgactatcacgacgaccatggtggcggcggccccggtggccgtagccgccgccgctgcacccgctgcagctgcagccccctcacccgctaccgcagcagcgaccgctgcagcggtgtccccagcagctgcaggccagatacctgctgccgcttctgttgccagcgccgcggcagtggctccatccgccgctgccgcagccgccgtacaggttgcccctgcagccccagctccagtacctgcccccgcgctagtgcccgtccctgctccagccgctgcacaggcctctgcgcctgcccagacccaggcccctacatcagcgccggccgtcgcccccacccctgcccctacgcctactccggccgttgcccaggcagaggtgcctgcttcccctgcgaccgggccagggcctcatagactctccatcccaagcttgacctgcaatcccgataaaaccgatggacccgtctttcactccaatacactcgaacggaaaacaccaattcagattctgggccaggagccggacgccgagatggtggagtacctgatctag

SEQ ID NO: 324560 - DNA, 1794 bp, Artificial Sequence
  derived and/or modified sequence
atggagcaccggggccccccacctgagtaccccttcaagggcatgccaccccagagcgtggtgtgcaagccccaggagcccggccacttctacagcgagcaccggctgaaccagcccggccgcacagagggccagctgatgagataccagcaccccccagaatatggagctgcccggcctgcccaggacatcagcctgcccctgagcgccaggaacagccagccccacagccccaccagcagcctgaccagcggcggcagcctgcccctgctgcagagcccccccagcacccggctgagccctgcccggcaccccctggtgcccaaccagggcgaccacagcgcccacctgccccggccccagcagcacttcctgcccaaccaggcccaccagggcgaccactaccgcctgagccagcccggcctgagccagcagcagcagcagcagcagcagcagcaccaccaccaccaccaccaccagcagcagcagcagcagcagccccagcagcagcctggagaggcctacagcgccatgccccgggcccagcccagcagcgccagctaccagcctgtgcctgctgacccctttgccatcgtgtcccgggcccagcagatggtggagatcctgagtgatgagaacagaaacctgcggcaggagctggagggctgctatgagaaggtggcccggctgcagaaggtggagacagagatccagagggtgtctgaggcctatgagaacctggtgaagagcagcagcaagcgggaggccctggagaaggccatgaggaacaagctggagggggagatccggaggatgcatgacttcaacagagacctgcgggagcggctggagacagccaacaagcagctggccgagaaggagtatgagggcagcgaggacaccaggaagaccatcagccagctgtttgccaagaacaaggagagccagcgggagaaggagaagctggaggccgagctggccacagcccggagcaccaatgaagaccagaggaggcacatcgagatccgggaccaggccctgagcaatgcccaggccaaggtggtgaagctggaggaggagctgaagaagaagcaggtgtatgtggacaaggtggagaagatgcagcaggccctggtgcagctgcaggccgcctgtgagaagcgggagcagctggagcaccggctgcggacccggctggagcgggagctggagagcctgcgcatccagcagaggcagggcaactgccagcccaccaacgtgtctgagtacaatgctgctgccctgatggagctgctgcgggagaaggaggagcgcatcctggccctggaggccgacatgaccaagtgggagcagaagtacctggaggagaatgtgatgaggcactttgccctggatgctgctgccaccgtggccgcccagagggacaccaccgtcatcagccacagccccaacaccagctatgacacagccctggaggcccgcatccagaaggaggaggaggagatcctgatggccaacaagcgctgcctggacatggagggccgcatcaagaccctgcacgcccagatcatcgagaaggatgccatgatcaaggtgctgcagcagaggagcaggaaggagcccagcaagacagagcagctgagctgcatgaggcctgccaagagcctgatgagcatcagcaatgccggcagcggcctgctgagccacagcagcaccctgaccggcagccccatcatggaggagaagagagatgacaagtcctggaagggcagcctgggcaatgacagcaagtag

SEQ ID NO: 324561 - DNA, 3255 bp, Artificial Sequence
  derived and/or modified sequence
atgaggaacagcgaggagcagcccagcggcggcaccaccgtgctgcagaggctgctgcaggagcagctgcgctatggcaaccccagcgagaacagaagcctgctggccatccaccagcaggccactggaaatggcccccccttccccagcggcagcggcaaccctggcccccagagtgatgtgctgagcccccaggaccaccaccagcagctggtggcccatgctgcccggcaggagccccagggccaggagatccagagcgagaacctgatcatggagaagcagctgagccccaggatgcagaacaatgaggagctgcccacctatgaggaggccaaggtgcagagccagtacttccggggccagcagcacgcctctgtgggcgccgccttctacgtgactggagtgaccaaccagaagatgaggacagagggccggcccagcgtgcagaggctgaaccctgggaagatgcaccaggatgagggcctgcgggacctgaagcagggccacgtgcgcagcctgtctgagcggctgatgcagatgagcctggccaccagcggcgtgaaggcccacccccctgtgaccagcgcccccctgagccccccccagcccaatgacctgtacaagaaccccaccagcagcagcgagttctacaaggcccagggccccctgcccaaccagcacagcctgaagggcatggagcaccggggccccccacctgagtaccccttcaagggcatgccaccccagagcgtggtgtgcaagccccaggagcccggccacttctacagcgagcaccggctgaaccagcccggccgcacagagggccagctgatgagataccagcaccccccagaatatggagctgcccggcctgcccaggacatcagcctgcccctgagcgccaggaacagccagccccacagccccaccagcagcctgaccagcggcggcagcctgcccctgctgcagagcccccccagcacccggctgagccctgcccggcaccccctggtgcccaaccagggcgaccacagcgcccacctgccccggccccagcagcacttcctgcccaaccaggcccaccagggcgaccactaccgcctgagccagcccggcctgagccagcagcagcagcagcagcagcagcagcaccaccaccaccaccaccaccagcagcagcagcagcagcagccccagcagcagcctggagaggcctacagcgccatgccccgggcccagcccagcagcgccagctaccagcctgtgcctgctgacccctttgccatcgtgtcccgggcccagcagatggtggagatcctgagtgatgagaacagaaacctgcggcaggagctggagggctgctatgagaaggtggcccggctgcagaaggtggagacagagatccagagggtgtctgaggcctatgagaacctggtgaagagcagcagcaagcgggaggccctggagaaggccatgaggaacaagctggagggggagatccggaggatgcatgacttcaacagagacctgcgggagcggctggagacagccaacaagcagctggccgagaaggagtatgagggcagcgaggacaccaggaagaccatcagccagctgtttgccaagaacaaggagagccagcgggagaaggagaagctggaggccgagctggccacagcccggagcaccaatgaagaccagaggaggcacatcgagatccgggaccaggccctgagcaatgcccaggccaaggtggtgaagctggaggaggagctgaagaagaagcaggtgtatgtggacaaggtggagaagatgcagcaggccctggtgcagctgcaggccgcctgtgagaagcgggagcagctggagcaccggctgcggacccggctggagcgggagctggagagcctgcgcatccagcagaggcagggcaactgccagcccaccaacgtgtctgagtacaatgctgctgccctgatggagctgctgcgggagaaggaggagcgcatcctggccctggaggccgacatgaccaagtgggagcagaagtacctggaggagaatgtgatgaggcactttgccctggatgctgctgccaccgtggccgcccagagggacaccaccgtcatcagccacagccccaacaccagctatgacacagccctggaggcccgcatccagaaggaggaggaggagatcctgatggccaacaagcgctgcctggacatggagggccgcatcaagaccctgcacgcccagatcatcgagaaggatgccatgatcaaggtgctgcagcagaggagcaggaaggagcccagcaagacagagcagctgagctgcatgaggcctgccaagagcctgatgagcatcagcaatgccggcagcggcctgctgagccacagcagcaccctgaccggcagccccatcatggaggagaagagagatgacaagtcctggaagggcagcctgggcatcctgctgggcggggactacagagcagaatatgtgcccagcacccccagccctgtgccccccagcacccccctgctgagcgcccacagcaagacaggcagccgggactgcagcacccagacagagcggggcacagagagcaacaagacagctgctgtggcccccatctctgtgcctgcccctgtggccgccgccgccacagctgctgccatcacagccacagctgccaccatcaccaccaccatggtggccgccgcccctgtggccgtggccgctgctgctgccccagctgctgctgctgcccccagccctgccacagctgctgccacagctgctgctgtgtccccagctgctgctggccagatcccagctgctgcctctgtggccagcgctgctgctgtggcccccagcgctgctgctgctgctgctgtgcaggtggccccagctgccccagcccctgtgcctgccccagccctggtgcctgtgcctgccccagctgctgcccaggccagcgccccagcccagacccaggcccccaccagcgccccagctgtggcccccaccccagcccccacccccaccccagctgtggcccaggccgaggtgcctgccagccctgccactggacctggcccccaccggctgagcatccccagcctgacctgcaacccagacaagacagatggccctgtgttccacagcaacaccctggagaggaagacccccatccagatcctgggccaggagccagatgctgagatggtggagtacctgatctag

SEQ ID NO: 324562 - DNA, 2559 bp, Artificial Sequence
  derived and/or modified sequence
atggagcaccggggccccccacctgagtaccccttcaagggcatgccaccccagagcgtggtgtgcaagccccaggagcccggccacttctacagcgagcaccggctgaaccagcccggccgcacagagggccagctgatgagataccagcaccccccagaatatggagctgcccggcctgcccaggacatcagcctgcccctgagcgccaggaacagccagccccacagccccaccagcagcctgaccagcggcggcagcctgcccctgctgcagagcccccccagcacccggctgagccctgcccggcaccccctggtgcccaaccagggcgaccacagcgcccacctgccccggccccagcagcacttcctgcccaaccaggcccaccagggcgaccactaccgcctgagccagcccggcctgagccagcagcagcagcagcagcagcagcagcaccaccaccaccaccaccaccagcagcagcagcagcagcagccccagcagcagcctggagaggcctacagcgccatgccccgggcccagcccagcagcgccagctaccagcctgtgcctgctgacccctttgccatcgtgtcccgggcccagcagatggtggagatcctgagtgatgagaacagaaacctgcggcaggagctggagggctgctatgagaaggtggcccggctgcagaaggtggagacagagatccagagggtgtctgaggcctatgagaacctggtgaagagcagcagcaagcgggaggccctggagaaggccatgaggaacaagctggagggggagatccggaggatgcatgacttcaacagagacctgcgggagcggctggagacagccaacaagcagctggccgagaaggagtatgagggcagcgaggacaccaggaagaccatcagccagctgtttgccaagaacaaggagagccagcgggagaaggagaagctggaggccgagctggccacagcccggagcaccaatgaagaccagaggaggcacatcgagatccgggaccaggccctgagcaatgcccaggccaaggtggtgaagctggaggaggagctgaagaagaagcaggtgtatgtggacaaggtggagaagatgcagcaggccctggtgcagctgcaggccgcctgtgagaagcgggagcagctggagcaccggctgcggacccggctggagcgggagctggagagcctgcgcatccagcagaggcagggcaactgccagcccaccaacgtgtctgagtacaatgctgctgccctgatggagctgctgcgggagaaggaggagcgcatcctggccctggaggccgacatgaccaagtgggagcagaagtacctggaggagaatgtgatgaggcactttgccctggatgctgctgccaccgtggccgcccagagggacaccaccgtcatcagccacagccccaacaccagctatgacacagccctggaggcccgcatccagaaggaggaggaggagatcctgatggccaacaagcgctgcctggacatggagggccgcatcaagaccctgcacgcccagatcatcgagaaggatgccatgatcaaggtgctgcagcagaggagcaggaaggagcccagcaagacagagcagctgagctgcatgaggcctgccaagagcctgatgagcatcagcaatgccggcagcggcctgctgagccacagcagcaccctgaccggcagccccatcatggaggagaagagagatgacaagtcctggaagggcagcctgggcatcctgctgggcggggactacagagcagaatatgtgcccagcacccccagccctgtgccccccagcacccccctgctgagcgcccacagcaagacaggcagccgggactgcagcacccagacagagcggggcacagagagcaacaagacagctgctgtggcccccatctctgtgcctgcccctgtggccgccgccgccacagctgctgccatcacagccacagctgccaccatcaccaccaccatggtggccgccgcccctgtggccgtggccgctgctgctgccccagctgctgctgctgcccccagccctgccacagctgctgccacagctgctgctgtgtccccagctgctgctggccagatcccagctgctgcctctgtggccagcgctgctgctgtggcccccagcgctgctgctgctgctgctgtgcaggtggccccagctgccccagcccctgtgcctgccccagccctggtgcctgtgcctgccccagctgctgcccaggccagcgccccagcccagacccaggcccccaccagcgccccagctgtggcccccaccccagcccccacccccaccccagctgtggcccaggccgaggtgcctgccagccctgccactggacctggcccccaccggctgagcatccccagcctgacctgcaacccagacaagacagatggccctgtgttccacagcaacaccctggagaggaagacccccatccagatcctgggccaggagccagatgctgagatggtggagtacctgatctag

SEQ ID NO: 324563 - DNA, 1794 bp, Artificial Sequence
  derived and/or modified sequence
atggagcaccggggccccccccccgagtaccccttcaagggcatgccgccacaaagtgtggtatgtaagccccaagagccggggcacttctacagcgagcaccgactgaaccaaccagggcgtacagaaggacagttaatgcggtaccagcatccgcctgaatatggcgctgccagacctgcccaggacattagcctcccactctctgcccggaactctcagcctcattctccgacatctagcctgactagcgggggatctcttccactgttgcagtctcctccctctacacgtttgtccccagccaggcatcccctggtccctaatcaaggggaccactcagcccacttacctcggccccagcaacatttcctgcccaaccaagcacatcagggcgatcattaccgcctaagccagcctgggctgagccagcagcaacagcagcagcagcagcagcaccaccaccatcatcatcaccagcagcagcagcaacaacagccacagcagcagccgggggaggcatactcagctatgccacgggcacagcccagtagcgcctcataccagcccgttcccgctgatcccttcgccattgtctcgcgtgcacaacagatggtggagatcctgagcgatgaaaacaggaacctcaggcaggagcttgagggttgttacgagaaggtggcaaggttgcagaaggttgaaacagaaattcagagagtcagcgaggcgtatgagaacctagttaagtcatcaagtaagagggaggccctcgagaaagccatgcgaaataaacttgagggagagataagacgaatgcatgactttaatcgggacttgcgggaacgtctcgaaactgcaaataagcaactggcggagaaagaatatgaaggctctgaggataccaggaagactatcagccagctgttcgcaaaaaataaggagtcccagcgggaaaaagagaagctggaggccgagctggccacagctcggagcaccaacgaagatcagcggcggcatattgagattagggaccaggctctctccaacgcacaggccaaggttgtcaaactcgaggaagaattaaaaaagaagcaggtctatgtggacaaggttgaaaaaatgcagcaggcccttgtgcagcttcaggccgcctgtgaaaaacgggaacaactcgaacataggctgcggacacggctggagcgcgaactggaaagccttcgcatccagcagaggcaggggaattgccagcctaccaatgtgagcgagtacaatgccgcagccctcatggagctactgcgggagaaggaagagcgaatcctcgcactggaagccgacatgacaaagtgggagcagaagtatctggaggagaatgttatgaggcatttcgccctggacgcggccgccaccgtggccgcgcagcgggacaccactgtgatcagtcattctccaaacacctcctatgataccgccctggaggccagaattcaaaaagaggaggaggaaatactaatggccaataaacgctgtctcgatatggaggggaggattaagacgctgcacgctcagataatcgaaaaggacgctatgatcaaggtcctgcagcaacgctcgcggaaggaacctagcaaaactgaacagctctcatgtatgcgacccgccaagtctctgatgtctatttctaacgccgggtctgggcttctgtcacactcctctaccctgaccggaagccccatcatggaggaaaagagagacgataagtcttggaaaggaagcctgggaaacgactccaaatag

SEQ ID NO: 324564 - DNA, 3255 bp, Artificial Sequence
  derived and/or modified sequence
atgcggaacagcgaggagcagcccagcggcggcaccaccgtgctgcaacgactgctccaggagcagctcagatacgggaatccgtccgaaaaccggagtctgcttgccattcatcagcaagctactgggaatggtcccccttttccaagtggctccggcaacccgggtccacagtctgacgtgttgagccctcaggatcatcaccaacaactggtggcacatgctgctaggcaggaacctcagggacaagagattcagagcgaaaatctgatcatggagaaacagctgtccccaagaatgcagaacaacgaggagctccccacctatgaggaggctaaagtgcagtctcagtattttcgcggacagcagcacgctagcgtcggcgccgcattctacgttaccggcgtcaccaatcagaaaatgcggacagagggaaggccttcagttcaaaggctgaatccaggtaagatgcatcaggacgaaggactgagagatctgaagcagggccatgtacgatctcttagtgaacgcctaatgcagatgtccctcgccactagcggcgtcaaggctcacccacctgtcacctcggctcctctctcccctccccagcctaacgatctgtataagaacccaacgagttcatcggagttctacaaagcccagggaccactccccaatcagcatagtctgaaaggcatggaacataggggtcctccacccgagtatccctttaagggaatgccaccccagtcagtagtgtgcaaaccccaggagcccgggcatttctattcagagcataggcttaatcagccaggcaggaccgagggccaattgatgcgttaccagcaccccccagaatacggagccgcccgcccagctcaggacatttcactgccactgagcgccagaaactctcagccccatagcccaacaagctccctcacaagtgggggcagcttacccctgcttcaatcgccacccagtactagacttagccctgctcgccatcctcttgtgccgaaccagggcgatcattcagcgcacctaccacgacctcaacagcattttttgcccaaccaagcacaccagggagatcactatcggctatcacaacccggtctgagccagcagcagcagcagcagcagcagcagcaccaccaccaccaccaccatcaacagcaacaacagcagcagcctcagcagcagccaggagaggcttactccgctatgccccgggcccagccatcctccgcctcttatcagcccgttccagctgacccttttgcaattgtgtcccgcgctcaacagatggtggaaattctctcggacgaaaatagaaatctgcgtcaggaactggagggctgctatgagaaagtagcaaggctgcaaaaggtcgagaccgagatccagcgggtatctgaagcttacgagaatctcgtgaaatcaagttcaaaacgcgaggctctcgaaaaggccatgaggaacaagcttgaaggggagattaggagaatgcatgactttaaccgtgacctgcgcgaacggctcgaaaccgctaacaagcagcttgcagagaaggaatacgagggcagcgaagacaccaggaagactatcagtcagctgttcgccaaaaacaaagagtctcagcgcgaaaaagagaaattggaagccgagcttgcgacagcccggagcacgaacgaggatcagcgtaggcacatcgagatccgggatcaggccctgagcaatgcccaagcaaaggtcgtgaaattggaagaggagctgaaaaaaaaacaggtctatgtcgacaaagtggaaaagatgcagcaagctctggtgcagttacaggcagcctgcgagaaaagggaacagcttgagcaccgcttgagaactcgcctcgaacgagaattggagagcctgcgtatacaacagaggcagggaaactgtcagcctaccaatgtgagcgaatataacgcagcagcactcatggagctgcttcgcgagaaagaagagagaattctcgctctggaggcagacatgaccaagtgggaacagaaatatctggaggagaacgttatgcggcatttcgcccttgatgcagcggcgactgtggcagctcagagagacactactgtgattagccatagccctaatacaagctatgatacagcattggaagctcgaatacagaaggaagaggaggaaatcctcatggcaaacaaaagatgcctggacatggaagggcggatcaaaacacttcacgcccagataattgagaaggatgccatgatcaaggtgctacaacagaggagtaggaaggagccttcaaaaacagagcagctgtcttgcatgcggcccgcaaagagtctgatgtctatttctaacgctggcagcgggctgctatcccactcaagcacgctgactgggtctcccatcatggaggaaaagagagacgacaaaagttggaaaggatccctagggatccttcttggtggcgattacagagcggaatatgtgcccagcaccccgagccctgtgcctccctccactccactgctttctgctcacagtaagaccggctctcgggactgttccacccagacagagcgaggaaccgagtctaacaagactgccgccgtcgcccctatctccgttcccgcaccagtggccgccgcagccacagctgctgccataactgccaccgccgctaccatcaccacgacaatggtggccgccgcaccagtggcagtggctgcagcagcagcccccgcagccgcggctgcaccctcccccgccactgccgccgcaaccgctgccgccgtgtcacctgctgctgccggccagattcccgctgctgcatcagtagcttccgccgcggccgtagccccctccgccgctgctgcagctgctgttcaggtggccccagccgcacctgcccccgtgccggctcctgcattagtgcctgtgccggccccagctgcggcacaagccagcgctcccgcccagacccaggcacctacttccgctcctgcagtagcaccaactcctgcgcctacaccgactcctgctgtggctcaggctgaggtgcctgctagccctgccaccggcccgggaccacacagactgtcaattccctctcttacttgtaatcccgataaaacggacgggcccgttttccactccaacacgctggagcgaaaaactccgatccaaattttgggacaggagccagacgctgaaatggttgaatatcttatctag

SEQ ID NO: 324565 - DNA, 2559 bp, Artificial Sequence
  derived and/or modified sequence
atggagcaccggggccccccccccgagtaccccttcaagggcatgccaccacagagcgttgtctgcaagcctcaggagccagggcacttctacagcgaacacagacttaatcaacccggcagaaccgaggggcaactgatgcggtaccagcacccacctgagtacggagcagctaggccagcgcaggacatctctctgcccttatcagcacgcaacagtcaaccccattctccaacttcatccctcacgtcaggtggctctctgccattgttgcaaagcccaccctcaactagattgtccccagcccgccacccactcgtcccaaatcaaggtgaccactccgctcatctgcccaggccacagcaacacttccttccaaaccaggctcaccagggggatcactataggctgagtcaacctggccttagccagcagcagcagcagcagcaacaacagcaccaccatcatcatcaccatcaacagcagcagcagcagcaaccacagcagcagcccggtgaggcctacagcgccatgcccagggcccagcctagcagtgcaagttatcagcccgtccccgccgatccgtttgccatcgtgagccgtgcccagcagatggtcgagattctgtccgacgaaaatcgcaatctgcgccaggagctcgagggttgctacgagaaggtggcccgcttacagaaggtggaaacagaaattcagagggtgtcggaagcgtatgagaatcttgtgaagtcttccagtaagagagaggcgcttgagaaggcgatgcggaataagctcgagggcgaaattcgccgcatgcatgatttcaatagagacctgagggagcggttagagaccgcaaacaagcaacttgccgagaaggagtatgagggcagtgaggatactcgcaaaacgattagccagctctttgcaaaaaataaggaatcccaaagagaaaaggagaaactggaggcagaacttgcaaccgcaaggtctaccaatgaagaccagcggcggcatatcgaaataagggaccaggctcttagtaatgctcaggcaaaagtcgtgaaactggaagaggagctgaaaaagaagcaagtctacgtcgacaaagtggagaagatgcaacaagcgctcgttcagctgcaggccgcctgtgaaaagagagagcagctggaacaccgcttgcggacaagactcgagcgggagttggaatcccttaggatccagcagcgacagggtaattgtcaacccactaacgtgagtgagtacaacgcggctgcactcatggagcttctgcgagaaaaggaggagagaattttggccctggaggccgacatgaccaagtgggagcagaagtatttagaagaaaacgtcatgcgacatttcgctctggacgcagcagccacggttgccgcccaacgagacaccaccgtgatctcacactcacctaacacctcctacgacaccgcacttgaagcacggattcagaaggaagaggaggaaatactaatggccaacaagaggtgtttggacatggagggaaggatcaagacccttcatgctcaaattattgagaaagatgccatgataaaggtgttacagcaacggagccgcaaagagccctctaaaacagaacaactttcctgtatgcgcccagccaagtcccttatgtctatatcgaatgccggctctggtcttttatcacattcaagcactcttactggtagcccaatcatggaggagaaaagagatgacaagtcctggaagggctcacttggtatcctgcttggtggagattatcgcgcagaatacgtgccgtctacaccctcccccgtcccgccaagtactcctctcctctcggcccatagtaaaactggctccagggattgctcaacacagactgaacgcgggaccgaatcaaataagaccgctgctgtggcccccatctccgttccggcccccgtggcggcagccgccactgccgcggccatcacggctaccgctgcaaccataacaacaacaatggtcgcagctgcgcccgtggcagtggcggctgctgctgctcctgccgcggcagcagccccttccccagccacagcggcagccactgcagccgcagtctctccggccgcggccggacagatccctgccgccgcaagtgtggcctcagctgcggccgttgcaccatcagccgcggctgccgcagccgtccaggttgcgccagccgcccccgccccagtgcctgccccggccctggtgcccgtgccggccccagccgccgcccaggcctctgcccccgcacaaactcaggcaccaacgagtgcgccagccgtagcgcccacacctgcgcccacccctacccctgctgtggcacaagctgaagtccccgccagtccagccaccggtccaggcccccatcggctatccatcccttcacttacttgcaaccccgacaaaacagacggcccagtatttcactctaacactcttgaacggaagacacccatccagattctcggccaggagcccgatgctgagatggtcgagtacctaatctag

SEQ ID NO: 324566 - DNA, 3255 bp, Artificial Sequence
  derived and/or modified sequence
atgcggaacagcgaggagcagcccagcggcggcaccaccgtgctgcagcgtttgctgcaagagcagttaaggtatggcaatccttctgagaatcggtccttactggctattcaccaacaagccaccggtaatggacccccattcccctcaggctccggtaaccccggaccgcagtcagacgtgttgagccctcaggaccaccatcagcagctggtggcgcacgccgctagacaagaacctcaagggcaggaaattcagtccgagaatctgataatggagaaacaactgtcccccaggatgcagaacaacgaggagctccctacctacgaagaggccaaagtccaaagtcaatatttccggggccagcagcatgcctctgtcggcgccgccttttacgtgaccggcgtgacaaatcagaagatgcgcacagaaggccgccccagcgtgcagcgcctcaatcccggtaaaatgcatcaggatgaaggtcttagggacctgaaacagggccacgtaagatctctctccgagaggctcatgcaaatgtcacttgccacatctggtgtcaaagcacacccccctgtcacttccgcacccctgagcccgcctcaacctaatgacctgtacaagaacccaaccagcagttctgagttctacaaggcacagggaccactccctaatcagcactctctgaaaggcatggaacaccggggaccacccccagagtacccgttcaaaggtatgcccccacagtcagttgtatgcaaaccccaggagccgggacatttctattctgagcatagacttaatcaacctgggcggacagaaggacagttaatgagatatcagcacccccccgagtacggcgcggcccgccctgcccaggacatttcacttcccctttccgcgcgaaacagccaacctcattcccccacgagtagcctgacaagcggtggatccctgccacttttgcaaagcccaccatctacccgcctgtcccccgcaaggcaccccctggtccctaatcagggcgaccacagcgcgcacctgccccgcccacaacaacactttctacctaaccaggcccatcaaggggatcattacaggctttctcagccaggactgagtcagcaacaacagcagcagcagcagcagcaccatcaccaccatcaccaccagcagcagcagcagcaacagccacaacaacagcctggcgaggcctactctgcaatgcctcgggctcagccctcaagcgcaagctatcaacccgtccccgcagacccgttcgccatagttagtcgggctcaacagatggtcgaaatcctttctgacgagaacaggaacttacggcaagagctggaggggtgttatgagaaagttgccagattgcagaaagttgagactgagatccaaagagtgtcagaggcttacgagaatcttgtgaaatcctctagcaagagagaggcactggaaaaggcaatgcggaataaactggagggggagattaggcgcatgcacgacttcaaccgcgacctgagggagcgattggaaaccgccaacaagcagttggctgaaaaggagtacgaaggttcagaagatacgaggaagaccataagtcagctttttgccaagaataaagagagccagagggagaaagagaagcttgaagccgaactggccacagcacgcagtacgaacgaggatcagagacgacatatcgagatacgcgaccaagctctgagcaatgcccaggccaaagtcgtcaaattggaagaagaactaaagaagaagcaggtgtatgtggataaagtggaaaagatgcagcaggctctcgtgcagctacaagctgcctgcgagaagcgtgagcaactggagcaccgccttagaacacggctggagcgcgagttggagtccctgaggatccagcagaggcagggtaactgtcaacccactaatgtaagcgagtacaatgcagctgctttaatggagcttctgcgggagaaggaagagcggatcctggccctagaggccgatatgactaagtgggagcaaaaatatcttgaagagaatgtcatgcgacatttcgcactggacgccgcagctacagttgccgcacaacgggatacaacggtgattagccatagtcctaacacaagctacgacacagcactcgaagctaggatccagaaagaagaagaagagatccttatggcgaacaagcgatgcctcgacatggagggaaggattaaaaccttgcacgctcagattatcgagaaagatgccatgataaaagtactccagcagcggtcccgcaaagagcctagcaaaaccgagcagttgtcgtgcatgaggcccgccaagtccctgatgtctatatctaacgccggaagcgggctcctgagccattcaagcacattaaccgggagccccataatggaagagaaaagggatgacaagagttggaaaggcagtctgggtattttgcttggtggtgattacagggccgaatacgtgccatcaacaccctctccggtgcctccctccacaccactccttagcgcacacagcaagaccggctcccgagactgtagcacccaaacagaacgaggtaccgaatcaaacaaaaccgctgcagtggccccgatcagcgtgcctgccccagtcgctgccgctgccactgccgccgctattacggctacagccgcaacgatcacaaccactatggttgccgctgccccagtcgctgtggccgcagctgccgcaccagccgccgcggctgctcccagcccagctactgccgccgccacagccgctgcagtctcacctgccgccgccggtcagatcccagcggccgcttctgttgcgtcggcagccgccgttgctccatcagcagctgctgcagccgctgtgcaggtcgccccagcagctcccgcccctgtgcccgccccggctttggtgcccgtgcctgctcctgccgcagctcaggcttcggctccagcccagacacaggccccaacttcggcccctgcagtggcgcccactcctgcaccaactcctactccggccgtggcccaggcagaagtgcccgcatctccggcaaccggtccaggcccccaccgactttccataccctctctgacatgtaatcccgacaagacagatggaccagttttccactccaacactctggagcggaagaccccaattcagattctcggccaggaaccagacgccgaaatggtggaatacctgatatag

SEQ ID NO: 324567 - DNA, 6888 bp, Artificial Sequence
  derived and/or modified sequence
ccaggagctgccttggcagtcacgccccttccttccgaggagctttctggctgcctaaactggtagaccccctgaattactcctccatctccgctctctttcgcctcctcttctcttagttctctccgcctccccctcaactaccaccacctccagtcagtctcgcctccggctatccgctgctccaccctctggcccggtatcctgcctgtccgctgccaccaaggagagcccggacggagcagcgaggaggggagcagccgggagttggggcttcccccctgcccatccctggccgctggcccgggaccgaagccacttgagcgagcagagagtcgtcaccttgtcttctttgccttcagggagctgctaagaaggacaaataagatagcagagtgaaagagcttttgtctccttagaaggaaggctgagaaactaaaggccagcgcaggacatctcattgccattgtcagccaggaactcgcagcctcacagccctacttcttctctgacctctggggggtccttgcccttgctacaatctccaccatccactagattgtctcctgcccgacaccccttggtcccaaaccagggagaccattcagctcacctgcctaggccgcagcagcatttccttcctaatcaggctcaccagggggatcattaccgtctctcccaacctggcctgagtcagcagcagcagcaacagcagcagcagcaccatcatcaccatcaccaccaacaacagcagcagcagcagccacagcagcagccaggagaagcctattcagctatgcctcgggctcagccatcctctgcttcttatcagccagtgccagcagacccttttgccattgtttccagagcccagcagatggttgagatcctctcagacgagaaccggaacttgaggcaagagttggaaggatgctatgagaaggtggcaagactgcagaaggtggagacagaaatccagcgcgtctcggaggcatatgagaacctcgtgaagtcatcctccaaaagagaggccctagagaaagccatgagaaacaagctagagggcgagattcggaggatgcatgatttcaacagggatctgagagagcgtctagagactgccaacaagcagcttgcagagaaggaatatgaggggtcagaggacaccagaaaaaccatctcgcagctctttgcaaaaaataaagaaagccagcgtgagaaggagaagctggaagcggagctggccactgcccgttctaccaatgaggaccaaagacgacacatcgaaatccgagatcaggccctgagtaatgcccaggccaaggtggtaaagctggaagaagagctgaaaaagaagcaagtgtacgttgacaaggtggagaagatgcagcaggcccttgtacagctccaggcagcatgtgaaaaacgtgagcagctagagcaccgtctccggacacgactggagagggaactggaatccctgagaatccagcagcgtcagggcaactgtcagcccaccaacgtttcagaatacaatgctgctgcactgatggagctccttcgggagaaagaggagaggattctggctctggaagctgatatgacaaagtgggagcagaaatatttggaggagaatgtgatgagacattttgctctggatgctgctgcaactgtggctgctcagagggacacaacagtcatcagtcactctcctaacaccagctatgacacagctctagaagctcgcatccagaaagaggaggaagaaatcttgatggccaataagcgttgccttgacatggagggcaggattaagaccctccatgcccagattattgagaaggatgccatgatcaaagtactccagcagcgttcccggaaggagccgagcaagacagagcagctgtcgtgcatgcggccagcgaagtctctgatgtccatttccaatgctggatcaggcttgctctcccactcatccaccctgactggctcccccatcatggaagaaaagcgagacgacaagagctggaaggggagcctaggcattctcctgggtggagactaccgtgctgaatatgtcccttccacaccctcgcctgtgccaccctcgactcccctgctctcggctcactccaagacaggcagccgagactgcagtacccaaactgaacgtgggacggaatcgaacaaaactgcagctgttgctcccatctctgttcctgctccagttgctgctgccgccactgctgccgccatcactgccactgctgccaccatcaccaccaccatggtagctgctgctccagttgctgttgctgctgctgctgctccagctgctgctgctgccccgtctccagccactgccgctgctactgctgctgctgtttctccagctgctgctggtcagattccagctgctgcctctgttgcctcagctgctgccgttgctccttctgctgctgctgctgctgctgttcaggttgctccagctgctccggctccagttccagctccggctctggttccggttccagctccagcagcggctcaggcttctgctcctgctcagactcaggcaccaacttcagctccggctgtggctccaactccagctccaactccaactccagctgtggctcaggctgaggttcctgcaagtccagctaccggtcctggaccacatcgtttgtctataccaagtttgacctgcaatccagacaaaacagatgggcctgtgttccactccaatactctggaaagaaaaactcccattcagatcctgggacaagagcctgatgcagagatggtggaatatctcatctaaacggccaaatcaagagctgcagattatcagcaaaaatgcttttaatcattttcccccttttattggttcttgttttgagggtgaggacaagggttgtggggaggggatgttttttaacaggactttttattggaacaatgtactacttgagtaataccatgtgaacaccagtctattttggtatgcttagggagtacctctaaagacagattaatcagaatgtgctctaaagcttattgtttgaatttatacgaatactgggactgttaacaggtggctatacatcgacgttttcaatgtgcttaaatttgtttaaattttccatattctagatcattttttattgaagagcacagtatgtgtggaagacagtgtataacacgtagtttggaagtgggaagctagagagaattgagtgtgtgctgttttgtatagttactatcctgtgcagcagctggagaaagcactcacctcaggcttacaaaagggaatagtttcaggagctatgtaagctggaaaaaaggtagggagttttggggtgcagaagggtactggagctaattttttcttccagtttcccagctaccctgccccagggaattgtgtttgtcttcatttcagtggtgctttggaaatggattcttttggttccctcctggaggttcatacattcatatatatgctctggagtaatttatgcatttggataattaatatattgctttcagatgctgggagagtacattaactgagtgatgcgcaacttcctctctcttagggaattagaccatcagaggccttgatggagagttgcatggggtgctatatgcagacttccatggtttgtgtgtagccatgaacacagcttgcttgcatttagtaagaccaatcagcttagtgtttatttcttctacagcacagattcactggctgggtctccagtctcaaattgccaatcatttgcaaagtgaggaaggatctttgttgacaggttgaatgctttgaatttctggtgactactttgaaataacttgttttgtttgtcaaattctaagcatatgtcttaaaaggcatttttgactatcacctccaagggaatagcttgagaaacccaaagtactatgctgcagtcgggggagaggtggattgcagcagtatcctcaactacctcttctcactgtcagtgacaccatcttggaatacctttgggaagcagcaggaaatgtgcatgtgggtagagatcaaaggaggcaatggctccaagccttgccatagggctgcctccaaggacacagaaggatgccagttgccacaggtccctgccctgtgtcacctgtctgcccttcattaaggtgagaaatctgcagatagcatcattaagatcagttttaaggggtatagggagggtgagggaagtggggggtgttaggtaagggttgggggtagaggttttgggatgtcttagttagaaaccagattaatagaagagtaggcctgatatattacatcatgagccatagtggtgggaaagaactttagcaatatagccctacctcctcattttagtgatgaggaatctgagaactggagaggttcagtgactttttgaaagtcatacaacacagctaaccattatgccaatcaccatgcttattttgggaaactctttatcttttttaaattccattttatgaaaaggcatcttcatggtccagggaatatgtatcttgtaaaatgtacctggttggagtagcttgtccagtcttgacaaactactgaatttctgtcttgcctctccttcagtgccttttaaaaggttttcccttttctgatctgcatttcaacatagagtcacataaatgtccccctgagaaaccaatcccacttctttctaggagattgggtatcttagataatcttttggggttcctctgtgagtataggaatggtatccttcctaattatcttccaaaggaattattttgtgtgtgtgcctgtgtgtgtgtagagacataaaggagggtgatgtgattttcagctagtcctttcacattttcaataatgaggtaatcatgttacatacacattagtcctcagttataaagtgaatctcagatagaaattaaaagtgcagttgtgttaagactctttcatactaccctttagtcataaggagaaaaaaacactcaaatagtagaagcagcaagtagcaaacttcaggagagctactttctatccaaataatttaaaaaacacttttcacctactcctttcatggttataacacattggcagactttttgctggctctgggagccatgattttaatcacattctgcaaggtgacaaatgtcatacattccacattgtgtggtagccatctctttagactcatgtgttttggggaaaggaagaagttcttggctgagtactattttgaactttccagaaccctctcacaccagagacagttcttctctgttcagtttccaatccccgataatttgctaaaataacattgtacatccaagagagggaagaagagtatgtcagtatattatgcagaagatagatacagccttttcagaagatctccactagtttttgttccaaaaattcaagtttatgggagaaatctcaattagccaccttttcacagttgtgtggatataacatttgggggatctttctggactcctacctatctgtgcattttaccggcacctcaggaaaggagggtgaccaggttgtcttagcttgtactgcttggtgatctctgaggaccttctaattcagttgtaccccagtgttccatgtatagaaaaacttcattagaacaaactttacttgatatgaaactcctattaacagtctttttttgaaataaaaagtagcttgagctttcttttaaaatcatgtatcttgattgttgatttaatgaaggatttccttttaatgctgcttttgagcttcaaggtaataggacagcaggaacctaaaatatctgccatcatctgccataggaaagatacccagagacccatcatgttctctttttgttgttacactgttgggtgggtataacaattggaaaatgaacaaactgattgattgtgcaaactactttttatgacaagcctaaaccctcataatgcggcagcttaaagtgtatacatatgcactaactttgatcaattatattctcatatctgttagctacacagtctcctattatctcaattgcttatgtgcatatggaatatgttacttaaaacgtgtgcattcttactgaaaatgttttcaaaggaaggtatcagctgtgggctaattgccaccaatttcagcctgccacgattcttggaaatatgtcttccaagtgccatccatcatcagtaggacaagtgtcgggagtttgtttatttttttccagtagcaacgatgggttacatggagccatgaaacctccttctggcctcccttgtgattaatggcatgtgtttgtaaaatggatagctggggttggcagatggctagagaagaatcgcctttggtttaaaatgtatgtggtcccctaatgattgtgaccccattctgtaatcaactgagctagttccaataaagttaagcaggtttaaatccactttgtgcctatcttttcactgacaataaagttagctattttaaaatgcagtaccgtgtggaaaatgctttggtgtttacccgacagaggctttatttgtgctgtatcagtgattactttcaattcagtatgcagtgaaattgcctttcaagggcagcgtgcagcagaatttgcatttgcttgaagtatggaatgtgattatagattataaagtattaagacaacaccacaggccgcatgctctaatcggtctctttatatactcaggcagcatatattaaaagctttgcatctttttatcttctggtttctagggataaaatgatggccacccaaagcagagaatttatcctttggttagcattttggaaggccccttgatattccttttgtacccttgttctgatgccaattcatcagtttt

SEQ ID NO: 324568 - DNA, 2462 bp, Artificial Sequence
  derived and/or modified sequence
gtcactggccaccagtggagttaaggcccatccacctgttaccagtgctcccctctccccaccacaacccaatgacctctacaagaatcccacaagttccagtgaattctacaaggcccaagggccacttcctaaccagcatagcctgaagggcatggaacaccgaggccccccaccagaatatcccttcaagggcatgccaccccaatctgtagtgtgcaagccccaagagccagggcacttctatagtgagcatcgcctgaaccagccagggagaacagaggggcaactgatgaggtatcagcatccccctgagtatggagcagccaggccagcgcaggacatctcattgccattgtcagccaggaactcgcagcctcacagccctacttcttctctgacctctggggggtccttgcccttgctacaatctccaccatccactagattgtctcctgcccgacaccccttggtcccaaaccagggagaccattcagctcacctgcctaggccgcagcagcatttccttcctaatcaggctcaccagggggatcattaccgtctctcccaacctggcctgagtcagcagcagcagcaacagcagcagcagcaccatcatcaccatcaccaccaacaacagcagcagcagcagccacagcagcagccaggagaagcctattcagctatgcctcgggctcagccatcctctgcttcttatcagccagtgccagcagacccttttgccattgtttccagagcccagcagatggttgagatcctctcagacgagaaccggaacttgaggcaagagttggaaggatgctatgagaaggtggcaagactgcagaaggtggagacagaaatccagcgcgtctcggaggcatatgagaacctcgtgaagtcatcctccaaaagagaggccctagagaaagccatgagaaacaagctagagggcgagattcggaggatgcatgatttcaacagggatctgagagagcgtctagagactgccaacaagcagcttgcagagaaggaatatgaggggtcagaggacaccagaaaaaccatctcgcagctctttgcaaaaaataaagaaagccagcgtgagaaggagaagctggaagcggagctggccactgcccgttctaccaatgaggaccaaagacgacacatcgaaatccgagatcaggccctgagtaatgcccaggccaaggtggtaaagctggaagaagagctgaaaaagaagcaagtgtacgttgacaaggtggagaagatgcagcaggcccttgtacagctccaggcagcatgtgaaaaacgtgagcagctagagcaccgtctccggacacgactggagagggaactggaatccctgagaatccagcagcgtcagggcaactgtcagcccaccaacgtttcagaatacaatgctgctgcactgatggagctccttcgggagaaagaggagaggattctggctctggaagctgatatgacaaagtgggagcagaaatatttggaggagaatgtgatgagacattttgctctggatgctgctgcaactgtggctgctcagagggacacaacagtcatcagtcactctcctaacaccagctatgacacagctctagaagctcgcatccagaaagaggaggaagaaatcttgatggccaataagcgttgccttgacatggagggcaggattaagaccctccatgcccagattattgagaaggatgccatgatcaaagtactccagcagcgttcccggaaggagccgagcaagacagagcagctgtcgtgcatgcggccagcgaagtctctgatgtccatttccaatgctggatcaggcttgctctcccactcatccaccctgactggctcccccatcatggaagaaaagcgagacgacaagagctggaaggggagcctaggtaatgacagtaaataaggaagattatagtcacgtgttcaaagagagccctgagataagcacccatgcttaaggaaaagggatgatggtccaggttctagagaggaaggtgtaccagggttttggagtttttttttcctcctgagaccctagttccacattctggagctcctccacactttgaagtctcccggtgagaataccgattgaggccaaggcttagaggacaagaatcttgagtttcatttgggtgtcaaggaagataactctaatttcctctaaactattctcagatttggcctttgccatgtggcacctttatctttctccaaagcccatgtggcctttgtgtcgttccaaatgtcaaaattccggcatttctgtgttccttcctcctctataataggagaacccagagttttagttacactaaatcgtttgggtagcaggttttgttcccacagtgttgtgagatgagaacagaatgtactttttcattccgttcctgtccattccctcccctctaatcaaa

SEQ ID NO: 324569 - DNA, 6945 bp, Artificial Sequence
  derived and/or modified sequence
atgagaaattctgaagaacagccaagtggagggaccacggtattgcagcgtttgctacaagagcagcttcgctatggcaatcctagtgagaatcgcagcctgcttgccatacaccagcaagccacagggaatggccctcctttccccagtggcagtgggaacccgggccctcagagtgatgtgttgagtccccaagaccaccaccaacagcttgtggctcatgctgctcgacaagaaccccaggggcaggaaatccagtcagaaaacctcatcatggagaagcagctgtctcctcgaatgcaaaataatgaagaactcccgacctatgaagaagccaaggtccagtcccagtactttcggggccaacagcatgccagtgttggagctgccttctatgtcactggagtcaccaaccagaagatgaggactgagggacgcccatcagttcagcggctcaatcctggaaagatgcaccaagatgagggactcagagaccttaagcaagggcatgtccgttccttgagtgaacgactaatgcagatgtcactggccaccagtggagttaaggcccatccacctgttaccagtgctcccctctccccaccacaacccaatgacctctacaagaatcccacaagttccagtgaattctacaaggcccaagggccacttcctaaccagcatagcctgaagggcatggaacaccgaggccccccaccagaatatcccttcaagggcatgccaccccaatctgtagtgtgcaagccccaagagccagggcacttctatagtgagcatcgcctgaaccagccagggagaacagaggggcaactgatgaggtatcagcatccccctgagtatggagcagccaggccagcgcaggacatctcattgccattgtcagccaggaactcgcagcctcacagccctacttcttctctgacctctggggggtccttgcccttgctacaatctccaccatccactagattgtctcctgcccgacaccccttggtcccaaaccagggagaccattcagctcacctgcctaggccgcagcagcatttccttcctaatcaggctcaccagggggatcattaccgtctctcccaacctggcctgagtcagcagcagcagcaacagcagcagcagcaccatcatcaccatcaccaccaacaacagcagcagcagcagccacagcagcagccaggagaagcctattcagctatgcctcgggctcagccatcctctgcttcttatcagccagtgccagcagacccttttgccattgtttccagagcccagcagatggttgagatcctctcagacgagaaccggaacttgaggcaagagttggaaggatgctatgagaaggtggcaagactgcagaaggtggagacagaaatccagcgcgtctcggaggcatatgagaacctcgtgaagtcatcctccaaaagagaggccctagagaaagccatgagaaacaagctagagggcgagattcggaggatgcatgatttcaacagggatctgagagagcgtctagagactgccaacaagcagcttgcagagaaggaatatgaggggtcagaggacaccagaaaaaccatctcgcagctctttgcaaaaaataaagaaagccagcgtgagaaggagaagctggaagcggagctggccactgcccgttctaccaatgaggaccaaagacgacacatcgaaatccgagatcaggccctgagtaatgcccaggccaaggtggtaaagctggaagaagagctgaaaaagaagcaagtgtacgttgacaaggtggagaagatgcagcaggcccttgtacagctccaggcagcatgtgaaaaacgtgagcagctagagcaccgtctccggacacgactggagagggaactggaatccctgagaatccagcagcgtcagggcaactgtcagcccaccaacgtttcagaatacaatgctgctgcactgatggagctccttcgggagaaagaggagaggattctggctctggaagctgatatgacaaagtgggagcagaaatatttggaggagaatgtgatgagacattttgctctggatgctgctgcaactgtggctgctcagagggacacaacagtcatcagtcactctcctaacaccagctatgacacagctctagaagctcgcatccagaaagaggaggaagaaatcttgatggccaataagcgttgccttgacatggagggcaggattaagaccctccatgcccagattattgagaaggatgccatgatcaaagtactccagcagcgttcccggaaggagccgagcaagacagagcagctgtcgtgcatgcggccagcgaagtctctgatgtccatttccaatgctggatcaggcttgctctcccactcatccaccctgactggctcccccatcatggaagaaaagcgagacgacaagagctggaaggggagcctaggcattctcctgggtggagactaccgtgctgaatatgtcccttccacaccctcgcctgtgccaccctcgactcccctgctctcggctcactccaagacaggcagccgagactgcagtacccaaactgaacgtgggacggaatcgaacaaaactgcagctgttgctcccatctctgttcctgctccagttgctgctgccgccactgctgccgccatcactgccactgctgccaccatcaccaccaccatggtagctgctgctccagttgctgttgctgctgctgctgctccagctgctgctgctgccccgtctccagccactgccgctgctactgctgctgctgtttctccagctgctgctggtcagattccagctgctgcctctgttgcctcagctgctgccgttgctccttctgctgctgctgctgctgctgttcaggttgctccagctgctccggctccagttccagctccggctctggttccggttccagctccagcagcggctcaggcttctgctcctgctcagactcaggcaccaacttcagctccggctgtggctccaactccagctccaactccaactccagctgtggctcaggctgaggttcctgcaagtccagctaccggtcctggaccacatcgtttgtctataccaagtttgacctgcaatccagacaaaacagatgggcctgtgttccactccaatactctggaaagaaaaactcccattcagatcctgggacaagagcctgatgcagagatggtggaatatctcatctaaacggccaaatcaagagctgcagattatcagcaaaaatgcttttaatcattttcccccttttattggttcttgttttgagggtgaggacaagggttgtggggaggggatgttttttaacaggactttttattggaacaatgtactacttgagtaataccatgtgaacaccagtctattttggtatgcttagggagtacctctaaagacagattaatcagaatgtgctctaaagcttattgtttgaatttatacgaatactgggactgttaacaggtggctatacatcgacgttttcaatgtgcttaaatttgtttaaattttccatattctagatcattttttattgaagagcacagtatgtgtggaagacagtgtataacacgtagtttggaagtgggaagctagagagaattgagtgtgtgctgttttgtatagttactatcctgtgcagcagctggagaaagcactcacctcaggcttacaaaagggaatagtttcaggagctatgtaagctggaaaaaaggtagggagttttggggtgcagaagggtactggagctaattttttcttccagtttcccagctaccctgccccagggaattgtgtttgtcttcatttcagtggtgctttggaaatggattcttttggttccctcctggaggttcatacattcatatatatgctctggagtaatttatgcatttggataattaatatattgctttcagatgctgggagagtacattaactgagtgatgcgcaacttcctctctcttagggaattagaccatcagaggccttgatggagagttgcatggggtgctatatgcagacttccatggtttgtgtgtagccatgaacacagcttgcttgcatttagtaagaccaatcagcttagtgtttatttcttctacagcacagattcactggctgggtctccagtctcaaattgccaatcatttgcaaagtgaggaaggatctttgttgacaggttgaatgctttgaatttctggtgactactttgaaataacttgttttgtttgtcaaattctaagcatatgtcttaaaaggcatttttgactatcacctccaagggaatagcttgagaaacccaaagtactatgctgcagtcgggggagaggtggattgcagcagtatcctcaactacctcttctcactgtcagtgacaccatcttggaatacctttgggaagcagcaggaaatgtgcatgtgggtagagatcaaaggaggcaatggctccaagccttgccatagggctgcctccaaggacacagaaggatgccagttgccacaggtccctgccctgtgtcacctgtctgcccttcattaaggtgagaaatctgcagatagcatcattaagatcagttttaaggggtatagggagggtgagggaagtggggggtgttaggtaagggttgggggtagaggttttgggatgtcttagttagaaaccagattaatagaagagtaggcctgatatattacatcatgagccatagtggtgggaaagaactttagcaatatagccctacctcctcattttagtgatgaggaatctgagaactggagaggttcagtgactttttgaaagtcatacaacacagctaaccattatgccaatcaccatgcttattttgggaaactctttatcttttttaaattccattttatgaaaaggcatcttcatggtccagggaatatgtatcttgtaaaatgtacctggttggagtagcttgtccagtcttgacaaactactgaatttctgtcttgcctctccttcagtgccttttaaaaggttttcccttttctgatctgcatttcaacatagagtcacataaatgtccccctgagaaaccaatcccacttctttctaggagattgggtatcttagataatcttttggggttcctctgtgagtataggaatggtatccttcctaattatcttccaaaggaattattttgtgtgtgtgcctgtgtgtgtgtagagacataaaggagggtgatgtgattttcagctagtcctttcacattttcaataatgaggtaatcatgttacatacacattagtcctcagttataaagtgaatctcagatagaaattaaaagtgcagttgtgttaagactctttcatactaccctttagtcataaggagaaaaaaacactcaaatagtagaagcagcaagtagcaaacttcaggagagctactttctatccaaataatttaaaaaacacttttcacctactcctttcatggttataacacattggcagactttttgctggctctgggagccatgattttaatcacattctgcaaggtgacaaatgtcatacattccacattgtgtggtagccatctctttagactcatgtgttttggggaaaggaagaagttcttggctgagtactattttgaactttccagaaccctctcacaccagagacagttcttctctgttcagtttccaatccccgataatttgctaaaataacattgtacatccaagagagggaagaagagtatgtcagtatattatgcagaagatagatacagccttttcagaagatctccactagtttttgttccaaaaattcaagtttatgggagaaatctcaattagccaccttttcacagttgtgtggatataacatttgggggatctttctggactcctacctatctgtgcattttaccggcacctcaggaaaggagggtgaccaggttgtcttagcttgtactgcttggtgatctctgaggaccttctaattcagttgtaccccagtgttccatgtatagaaaaacttcattagaacaaactttacttgatatgaaactcctattaacagtctttttttgaaataaaaagtagcttgagctttcttttaaaatcatgtatcttgattgttgatttaatgaaggatttccttttaatgctgcttttgagcttcaaggtaataggacagcaggaacctaaaatatctgccatcatctgccataggaaagatacccagagacccatcatgttctctttttgttgttacactgttgggtgggtataacaattggaaaatgaacaaactgattgattgtgcaaactactttttatgacaagcctaaaccctcataatgcggcagcttaaagtgtatacatatgcactaactttgatcaattatattctcatatctgttagctacacagtctcctattatctcaattgcttatgtgcatatggaatatgttacttaaaacgtgtgcattcttactgaaaatgttttcaaaggaaggtatcagctgtgggctaattgccaccaatttcagcctgccacgattcttggaaatatgtcttccaagtgccatccatcatcagtaggacaagtgtcgggagtttgtttatttttttccagtagcaacgatgggttacatggagccatgaaacctccttctggcctcccttgtgattaatggcatgtgtttgtaaaatggatagctggggttggcagatggctagagaagaatcgcctttggtttaaaatgtatgtggtcccctaatgattgtgaccccattctgtaatcaactgagctagttccaataaagttaagcaggtttaaatccactttgtgcctatcttttcactgacaataaagttagctattttaaaatgca

SEQ ID NO: 324570 - DNA, 2720 bp, Artificial Sequence
  derived and/or modified sequence
tcccctctccccaccacaacccaatgacctctacaagaatcccacaagttccagtgaattctacaaggcccaagggccacttcctaaccagcatagcctgaagggcatggaacaccgaggccccccaccagaatatcccttcaagggcatgccaccccaatctgtagtgtgcaagccccaagagccagggcacttctatagtgagcatcgcctgaaccagccagggagaacagaggggcaactgatgaggtatcagcatccccctgagtatggagcagccaggccagcgcaggacatctcattgccattgtcagccaggaactcgcagcctcacagccctacttcttctctgacctctggggggtccttgcccttgctacaatctccaccatccactagattgtctcctgcccgacaccccttggtcccaaaccagggagaccattcagctcacctgcctaggccgcagcagcatttccttcctaatcaggctcaccagggggatcattaccgtctctcccaacctggcctgagtcagcagcagcagcaacagcagcagcagcaccatcatcaccatcaccaccaacaacagcagcagcagcagccacagcagcagccaggagaagcctattcagctatgcctcgggctcagccatcctctgcttcttatcagccagtgccagcagacccttttgccattgtttccagagcccagcagatggttgagatcctctcagacgagaaccggaacttgaggcaagagttggaaggatgctatgagaaggtggcaagactgcagaaggtggagacagaaatccagcgcgtctcggaggcatatgagaacctcgtgaagtcatcctccaaaagagaggccctagagaaagccatgagaaacaagctagagggcgagattcggaggatgcatgatttcaacagggatctgagagagcgtctagagactgccaacaagcagcttgcagagaaggaatatgaggggtcagaggacaccagaaaaaccatctcgcagctctttgcaaaaaataaagaaagccagcgtgagaaggagaagctggaagcggagctggccactgcccgttctaccaatgaggaccaaagacgacacatcgaaatccgagatcaggccctgagtaatgcccaggccaaggtggtaaagctggaagaagagctgaaaaagaagcaagtgtacgttgacaaggtggagaagatgcagcaggcccttgtacagctccaggcagcatgtgaaaaacgtgagcagctagagcaccgtctccggacacgactggagagggaactggaatccctgagaatccagcagcgtcagggcaactgtcagcccaccaacgtttcagaatacaatgctgctgcactgatggagctccttcgggagaaagaggagaggattctggctctggaagctgatatgacaaagtgggagcagaaatatttggaggagaatgtgatgagacattttgctctggatgctgctgcaactgtggctgctcagagggacacaacagtcatcagtcactctcctaacaccagctatgacacagctctagaagctcgcatccagaaagaggaggaagaaatcttgatggccaataagcgttgccttgacatggagggcaggattaagaccctccatgcccagattattgagaaggatgccatgatcaaagtactccagcagcgttcccggaaggagccgagcaagacagagcagctgtcgtgcatgcggccagcgaagtctctgatgtccatttccaatgctggatcaggcttgctctcccactcatccaccctgactggctcccccatcatggaagaaaagcgagacgacaagagctggaaggggagcctaggcattctcctgggtggagactaccgtgctgaatatgtcccttccacaccctcgcctgtgccaccctcgactcccctgctctcggctcactccaagacaggcagccgagactgcagtacccaaactgaacgtgggacggaatcgaacaaaactgcagctgttgctcccatctctgttcctgctccagttgctgctgccgccactgctgccgccatcactgccactgctgccaccatcaccaccaccatggtagctgctgctccagttgctgttgctgctgctgctgctccagctgctgctgctgccccgtctccagccactgccgctgctactgctgctgctgtttctccagctgctgctggtcagattccagctgctgcctctgttgcctcagctgctgccgttgctccttctgctgctgctgctgctgctgttcaggttgctccagctgctccggctccagttccagctccggctctggttccggttccagctccagcagcggctcaggcttctgctcctgctcagactcaggcaccaacttcagctccggctgtggctccaactccagctccaactccaactccagctgtggctcaggctgaggttcctgcaagtccagctaccggtcctggaccacatcgtttgtctataccaagtttgacctgcaatccagacaaaacagatgggcctgtgttccactccaatactctggaaagaaaaactcccattcagatcctgggacaagagcctgatgcagagatggtggaatatctcatctaaacggccaaatcaagagctgcagattatcagcaaaaatgcttttaatcattttccc

SEQ ID NO: 324571 - DNA, 1816 bp, Artificial Sequence
  derived and/or modified sequence
cttggtcccaaaccagggagaccattcagctcacctgcctaggccgcagcagcatttccttcctaatcaggctcaccagggggatcattaccgtctctcccaacctggcctgagtcagcagcagcagcaacagcagcagcagcaccatcatcaccatcaccaccaacaacagcagcagcagcagccacagcagcagccaggagaagcctattcagctatgcctcgggctcagccatcctctgcttcttatcagccagtgccagcagacccttttgccattgtttccagagcccagcagatggttgagatcctctcagacgagaaccggaacttgaggcaagagttggaaggatgctatgagaaggtggcaagactgcagaaggtggagacagaaatccagcgcgtctcggaggcatatgagaacctcgtgaagtcatcctccaaaagagaggccctagagaaagccatgagaaacaagctagagggcgagattcggaggatgcatgatttcaacagggatctgagagagcgtctagagactgccaacaagcagcttgcagagaaggaatatgaggggtcagaggacaccagaaaaaccatctcgcagctctttgcaaaaaataaagaaagccagcgtgagaaggagaagctggaagcggagctggccactgcccgttctaccaatgaggaccaaagacgacacatcgaaatccgagatcaggccctgagtaatgcccaggccaaggtggtaaagctggaagaagagctgaaaaagaagcaagtgtacgttgacaaggtggagaagatgcagcaggcccttgtacagctccaggcagcatgtgaaaaacgtgagcagctagagcaccgtctccggacacgactggagagggaactggaatccctgagaatccagcagcgtcagggcaactgtcagcccaccaacgtttcagaatacaatgctgctgcactgatggagctccttcgggagaaagaggagaggattctggctctggaagctgatatgacaaagtgggagcagaaatatttggaggagaatgtgatgagacattttgctctggatgctgctgcaactgtggctgctcagagggacacaacagtcatcagtcactctcctaacaccagctatgacacagctctagaagctcgcatccagaaagaggaggaagaaatcttgatggccaataagcgttgccttgacatggagggcaggattaagaccctccatgcccagattattgagaaggatgccatgatcaaagtactccagcagcgttcccggaaggagccgagcaagacagagcagctgtcgtgcatgcggccagcgaagtctctgatgtccatttccaatgctggatcaggcttgctctcccactcatccaccctgactggctcccccatcatggaagaaaagcgagacgacaagagctggaaggggagcctaggcattctcctgggtggagactaccgtgctgaatatgtcccttccacaccctcgcctgtgccaccctcgactcccctgctctcggctcactccaagacaggcagccgagactgcagtacccaaactgaacgtgggacggaatcgaacaaaactgcagctgttgctcccatctctgttcctgctccagttgctgctgccgccactgctgccgccatcactgccactgctgccaccatcaccaccaccatggctgctgctgctgccccgtctccagccactgccgctgctactgctgctgctgtttctccagctgctgctggtcagattccagctgctgcctctgttgcctcagct

SEQ ID NO: 324572 - DNA, 3330 bp, Artificial Sequence
  derived and/or modified sequence
taagcaagaattccctatcctgatcaaggctttaagcctaaaagaaagcagaaataggcaccaccagcaatagagatgagaaattctgaagaacagccaagtggagggaccacggtattgcagcgtttgctacaagagcagcttcgctatggcaatcctagtgagaatcgcagcctgcttgccatacaccagcaagccacagggaatggccctcctttccccagtggcagtgggaacccgggccctcagagtgatgtgttgagtccccaagaccaccaccaacagcttgtggctcatgctgctcgacaagaaccccaggggcaggaaatccagtcagaaaacctcatcatggagaagcagctgtctcctcgaatgcaaaataatgaagaactcccgacctatgaagaagccaaggtccagtcccagtactttcggggccaacagcatgccagtgttggagctgccttctatgtcactggagtcaccaaccagaagatgaggactgagggacgcccatcagttcagcggctcaatcctggaaagatgcaccaagatgagggactcagagaccttaagcaagggcatgtccgttccttgagtgaacgactaatgcagatgtcactggccaccagtggagttaaggcccatccacctgttaccagtgctcccctctccccaccacaacccaatgacctctacaagaatcccacaagttccagtgaattctacaaggcccaagggccacttcctaaccagcatagcctgaagggcatggaacaccgaggccccccaccagaatatcccttcaagggcatgccaccccaatctgtagtgtgcaagccccaagagccagggcacttctatagtgagcatcgcctgaaccagccagggagaacagaggggcaactgatgaggtatcagcatccccctgagtatggagcagccaggccagcgcaggacatctcattgccattgtcagccaggaactcgcagcctcacagccctacttcttctctgacctctggggggtccttgcccttgctacaatctccaccatccactagattgtctcctgcccgacaccccttggtcccaaaccagggagaccattcagctcacctgcctaggccgcagcagcatttccttcctaatcaggctcaccagggggatcattaccgtctctcccaacctggcctgagtcagcagcagcagcaacagcagcagcagcaccatcatcaccatcaccaccaacaacagcagcagcagcagccacagcagcagccaggagaagcctattcagctatgcctcgggctcagccatcctctgcttcttatcagccagtgccagcagacccttttgccattgtttccagagcccagcagatggttgagatcctctcagacgagaaccggaacttgaggcaagagttggaaggatgctatgagaaggtggcaagactgcagaaggtggagacagaaatccagcgcgtctcggaggcatatgagaacctcgtgaagtcatcctccaaaagagaggccctagagaaagccatgagaaacaagctagagggcgagattcggaggatgcatgatttcaacagggatctgagagagcgtctagagactgccaacaagcagcttgcagagaaggaatatgaggggtcagaggacaccagaaaaaccatctcgcagctctttgcaaaaaataaagaaagccagcgtgagaaggagaagctggaagcggagctggccactgcccgttctaccaatgaggaccaaagacgacacatcgaaatccgagatcaggccctgagtaatgcccaggccaaggtggtaaagctggaagaagagctgaaaaagaagcaagtgtacgttgacaaggtggagaagatgcagcaggcccttgtacagctccaggcagcatgtgaaaaacgtgagcagctagagcaccgtctccggacacgactggagagggaactggaatccctgagaatccagcagcgtcagggcaactgtcagcccaccaacgtttcagaatacaatgctgctgcactgatggagctccttcgggagaaagaggagaggattctggctctggaagctgatatgacaaagtgggagcagaaatatttggaggagaatgtgatgagacattttgctctggatgctgctgcaactgtggctgctcagagggacacaacagtcatcagtcactctcctaacaccagctatgacacagctctagaagctcgcatccagaaagaggaggaagaaatcttgatggccaataagcgttgccttgacatggagggcaggattaagaccctccatgcccagattattgagaaggatgccatgatcaaagtactccagcagcgttcccggaaggagccgagcaagacagagcagctgtcgtgcatgcggccagcgaagtctctgatgtccatttccaatgctggatcaggcttgctctcccactcatccaccctgactggctcccccatcatggaagaaaagcgagacgacaagagctggaaggggagcctaggcattctcctgggtggagactaccgtgctgaatatgtcccttccacaccctcgcctgtgccaccctcgactcccctgctctcggctcactccaagacaggcagccgagactgcagtacccaaactgaacgtgggacggaatcgaacaaaactgcagctgttgctcccatctctgttcctgctccagttgctgctgccgccactgctgccgccatcactgccactgctgccaccatcaccaccaccatggtagctgctgctccagttgctgttgctgctgctgctgctccagctgctgctgctgccccgtctccagccactgccgctgctactgctgctgctgtttctccagctgctgctggtcagattccagctgctgcctctgttgcctcagctgctgccgttgctccttctgctgctgctgctgctgctgttcaggttgctccagctgctccggctccagttccagctccggctctggttccggttccagctccagcagcggctcaggcttctgctcctgctcagactcaggcaccaacttcagctccggctgtggctccaactccagctccaactccaactccagctgtggctcaggctgaggttcctgcaagtccagctaccggtcctggaccacatcgtttgtctataccaagtttgacctgcaatccagacaaaacagatgggcctgtgttccactccaatactctggaaagaaaaactcccattcagatcctgggacaagagcctgatgcagagatggtggaatatctcatctaa

SEQ ID NO: 324573 - DNA, 1794 bp, Artificial Sequence
  derived and/or modified sequence
atggagcatcgcggtcctccccctgagtacccatttaaaggcatgccccctcagtcagttgtctgcaagccccaggagccaggacacttctattctgagcatcggctgaaccagcctggcagaaccgaggggcagctcatgagataccagcatcctcctgaatatggcgcagcgcgaccggcacaggatatctcgctgcctctgagcgcacgtaacagccagcctcactctcccacttcttcgcttacatccggcggttctttgcctctgcttcagagccccccaagcacaaggctgtcaccagcacgtcatcccctagtgcctaatcaaggggaccatagcgcgcaccttcccaggccccagcagcactttcttcccaatcaagctcaccagggagatcactaccgtctgagccaaccagggctctcccagcagcaacagcaacagcagcagcagcatcaccatcaccaccatcatcagcagcagcagcaacaacagccacagcaacagccaggggaggcgtactcggcaatgccaagagcacagccatcatccgctagttaccagcctgtaccggcagacccatttgccatcgtgagcagagcccaacagatggtagaaattctttccgacgaaaatcggaaccttcggcaggaactggaaggatgctacgaaaaggtggcaaggctgcagaaggtggagaccgaaattcaacgagtttctgaggcgtacgagaatctcgtcaagtcaagcagcaaacgagaggctcttgagaaggcgatgaggaataaactagaaggtgagatcaggaggatgcacgattttaacagagacctgagggagcgcctggaaaccgccaataaacaactcgcggagaaagaatacgagggctccgaagatactcgaaagactatcagccagctttttgctaagaacaaagaatcccagagggaaaaggaaaaactggaggcagaattagcaacagcaaggagcaccaatgaggaccagcgcagacacattgaaattcgggatcaggcgttgagcaatgcccaggctaaggtggttaagctggaagaggagctaaaaaaaaagcaggtgtacgtggataaggtggaaaagatgcagcaggcgcttgtacaactccaggctgcctgcgaaaagcgtgagcagctggagcatagactcagaactagactggagcgggaactggaatcattgaggattcagcagaggcaaggaaattgtcagcccaccaacgtgagcgaatacaatgctgccgcattaatggagctgcttcgtgagaaagaagagaggatcctcgctctggaagccgacatgacaaaatgggaacaaaaatatttggaggagaatgtgatgaggcacttcgctctggatgctgccgctaccgtggcagctcagagagacaccaccgtcattagccactcccctaacacctcgtacgataccgccctcgaagcaagaatccagaaagaagaagaggagatcctgatggcaaacaaacgatgcctggatatggagggacggattaaaaccctccacgcccagattatagaaaaggacgctatgatcaaggtgttacagcagcggagtaggaaggaaccgtccaaaaccgagcaactctcatgtatgaggcccgctaagagcttgatgtccatctccaatgccggatcgggtcttctgtcgcactcctccaccctgacgggaagtcctattatggaggagaagcgagatgataagagttggaagggatccttaggtaacgacagtaagtag

SEQ ID NO: 324574 - DNA, 3255 bp, Artificial Sequence
  derived and/or modified sequence
atgaggaactccgaggagcagccatctggtgggactaccgtgttgcaacgcctgctgcaggaacagctgcgctacggaaacccctctgaaaatcgctccctgcttgccattcaccagcaggccacaggaaatggaccgcctttcccttctggctccgggaacccagggcctcagtctgatgttctctccccacaagaccatcatcaacagctggtagctcacgccgcacgccaggaacctcagggccaggagatacaatccgagaacttgataatggaaaagcagctgtcaccgagaatgcagaacaacgaggaattaccgacttacgaggaagcaaaggtgcaatcccaatacttcaggggacaacaacacgcatcagtcggggcagcattttatgtgacaggtgtcaccaaccagaagatgcgtactgaaggtaggccttcagttcagcgcctgaacccgggaaagatgcaccaggacgaaggtctgagggacctgaagcagggacacgtgaggtcgctttctgagcgattaatgcaaatgagcttggcaacctcaggggtcaaagcccatccccctgtcactagtgcgccactgtccccccctcaacctaacgacctctataagaaccccactagcagctctgagttctataaagcacaaggtccactgccaaatcagcactcactcaagggcatggagcataggggcccacccccagaatatcccttcaagggcatgcccccacagtccgtggtgtgcaagccacaggaacctgggcacttctacagcgaacacagactgaatcagccgggtcggaccgaaggtcagctgatgaggtatcaacatccacccgagtatggcgctgctagacccgctcaggacatctccctgcccctatccgccagaaactcacagcctcactcccctacaagcagtctgacgagcggcggtagcctccccctactgcagtcacctcccagcactagactgtcccccgcaagacacccactagtccctaatcagggggatcatagcgctcacctgccccgtccccagcagcacttcctccctaaccaggcccatcaaggcgatcattacaggctttcccagcctggcctgtctcagcagcagcagcagcaacagcaacaacatcaccaccatcaccaccaccaacagcagcagcagcagcagcctcagcagcagcctggtgaagcctatagcgcaatgccccgagcccaaccgtcttccgcctcctaccaaccggtgcccgctgatccatttgccattgtttccagagctcagcagatggtcgaaatcctgtccgacgagaaccgtaacttgaggcaggagttggagggctgttatgagaaggtggctcggctacagaaggtggagaccgaaattcagagagtgagcgaggcctacgagaatctggtcaaaagctcttccaagcgggaggcactggagaaagctatgcgaaataaactggaaggcgaaatcagaaggatgcatgacttcaatagggatctccgtgagagactcgagacagctaacaaacagcttgccgagaaagagtatgagggctctgaggatactagaaaaactattagtcagctgttcgcaaaaaataaagaatcccagagagaaaaagagaaactggaagccgaactggccactgccagatcaacgaatgaggaccagcgccgacatatcgaaattagggaccaggccttatccaacgcccaagctaaagttgttaagctggaagaggagttgaaaaagaaacaggtatatgtggataaggtcgagaagatgcaacaggccctggtacaattacaagccgcttgtgaaaaacgagagcagctggagcatcggctgagaacgagacttgaaagggagctggagagcctgcggatccaacaacgccagggcaactgtcagcccaccaatgtcagcgagtataacgctgcagctcttatggagttactgagagaaaaagaggaacggatccttgctctcgaagctgatatgactaagtgggaacagaagtaccttgaggagaacgtcatgcgccacttcgctctcgatgctgccgctactgtggccgcacagcgggataccaccgtgatttcgcattcacccaatacctcctacgacaccgcactcgaggcgagaattcagaaggaggaggaggaaattttgatggccaataaaaggtgccttgacatggaggggagaataaagacactgcacgcgcaaattattgaaaaagatgccatgattaaagtcctgcagcagagatcgcgtaaggagccgagcaagactgaacagctgtcctgcatgcggccagccaaatcactgatgtctatcagcaatgcaggctcaggacttctgtcacattcttctacattgacaggctctcctatcatggaggagaaacgggatgacaagagctggaaaggcagcttaggcattctgctgggaggggattatcgcgctgagtacgtcccctcgacaccttcacccgtgccacccagcaccccgctcctgtcagcccactccaagacagggagccgggattgttcaacccagactgaacgtgggaccgaaagcaataagacagccgcagttgccccaatatcagttccagcgccagtcgcagcagccgctacagcagccgctattacggcaactgcagccactatcactaccactatggtcgccgcagcccctgtggctgtggctgctgctgccgctcccgctgcagccgctgctcctagccccgctacggccgctgcaactgctgcagcagtgtcaccggcagccgcagggcaaattcccgcagctgcgtctgtagcgtcagctgcagccgtggccccaagcgccgcagcagccgctgcggtgcaggtcgcccctgctgcccctgccccagtgccagctccggctcttgtgcctgtgcccgcaccagccgctgcccaggcatcggcccctgcgcagacacaggcacccacaagtgcccctgcagttgcaccaactccagccccaaccccaactcccgctgtcgctcaggcggaagtccccgcatcaccggctaccggacctgggccacaccggctctccattccaagcctcacgtgtaacccagacaaaacggatggtccggtgtttcacagtaatacattggagcgtaagacgccgatccaaatcttggggcaggagcccgacgctgagatggtcgagtatcttatatag

SEQ ID NO: 324575 - DNA, 2559 bp, Artificial Sequence
  derived and/or modified sequence
atggaacaccgcggaccccctccggagtatccattcaagggcatgcccccacagagtgtggtctgcaagccacaggaaccgggacacttttactcggagcaccggttaaatcaacctggacgtacagaggggcagctgatgcgctatcagcatccaccagagtatggggcagctcggcctgcccaggacattagccttccattgtcggctcgtaacagccagccacactcccctaccagctcactgacgtccgggggaagccttccactgctccagagccccccaagcactaggctttccccagccaggcatccgttggtccccaaccagggtgaccactctgcccaccttccgaggccacagcagcacttcttgccaaaccaggcccaccaaggagatcactaccgcctctctcaaccgggtctcagtcagcagcagcaacagcagcagcaacagcaccatcaccaccatcatcatcaacagcagcagcaacagcagcctcagcagcagcctggagaagcctattcagctatgcctcgcgctcaacctagcagcgctagctatcagcctgtgccagccgatccttttgccatcgtgagtcgcgcacagcagatggtcgagatcctgtcggacgaaaaccgcaacctgcggcaggaactggagggatgttatgagaaggttgccagactgcagaaggtcgagacagagatccagcgggtctctgaggcctacgagaatctcgtgaagtcgtcaagcaaacgcgaagcactcgaaaaggctatgcggaacaaacttgagggcgaaatcaggcgaatgcacgacttcaaccgggaccttagggaacgcctcgaaaccgctaataaacagttagccgagaaagagtatgaaggctccgaagacacccgcaagaccatttctcagctgttcgccaagaataaggagtcgcaaagggagaaggaaaaattagaagcagaactggccaccgcccgttccaccaatgaagaccaacgcaggcatatcgaaattcgagaccaagctttgtccaatgcgcaagcaaaagttgttaaactagaggaggaactaaaaaagaagcaggtttacgtggataaggtggagaaaatgcagcaggccctagtgcagcttcaggcggcatgcgagaagcgcgaacagctggagcataggctgagaacaagactcgaacgggaactggaatcactgcgcattcagcaacgacagggaaattgccaaccgacaaacgtcagcgaatataatgccgctgctttgatggaacttcttcgcgaaaaagaggaacgtatcttggccctcgaggccgacatgaccaaatgggagcagaaatatctcgaagagaatgtgatgagacacttcgccctggacgcggctgcgaccgttgcagcacagcgcgatacaacggtaattagccactctcctaacacaagttacgacacggctctggaggcgcgaatccagaaagaagaagaagagatactgatggccaacaaacgttgtttggacatggagggaaggattaaaactctgcatgcccaaatcattgaaaaggatgcgatgatcaaggtccttcagcaacgttctcgaaaggaaccaagcaagacagagcaactgtcatgcatgcggcctgctaaatctctgatgagtatatccaacgccggatccggtctactttcccattcctccacattaaccggttcccctattatggaggaaaaacgggatgacaaaagctggaagggatcgctgggcattctccttggaggcgactaccgcgcagaatatgttccctcaaccccttcacccgttcccccaagcacccctctcctgtctgcacatagcaagacaggaagtagagactgctccacccaaaccgagcgcggaacagagtccaataagaccgcggcagtggcccctatcagtgtgccagcccctgtggctgcagcagcaacagccgctgcaatcaccgctacagcagccacaatcacgaccacaatggttgctgccgctcccgtggccgtcgcagctgcggctgctccagctgctgctgctgctccttccccagcaacagccgctgctaccgccgctgccgtttcaccagccgcagccggtcaaatccccgcagcagcctctgtcgcctcagccgctgccgtagccccaagtgccgctgcagccgcagctgtgcaagtcgccccagccgcacccgctcccgtccccgctcctgcactggtgccagtaccagcccctgcagctgctcaagcatctgcccctgcacagactcaggccccaacgtctgcacccgcagtggcacccacccctgctcctacccccacgcccgctgttgcacaagctgaagtgccagcttctcctgcaacaggccctgggccacacaggctgtcgatcccttccttaacttgtaaccctgacaaaacggatggacctgtattccacagcaatactctcgaaaggaaaactcccatccagatcttagggcaggagccggacgctgagatggtcgagtatctgatttag

SEQ ID NO: 324576 - DNA, 3255 bp, Artificial Sequence
  derived and/or modified sequence
atgcggaatagtgaggaacaaccctccggcggaaccactgtcttacaacgattgttacaagagcagctgcgttacgggaacccctcagagaatcggtcactgctcgctattcaccaacaggccaccggcaatggacctcccttccctagtggctccggcaacccagggccacagtccgacgtgttatccccgcaagatcaccatcaacagcttgtggctcatgctgctcggcaggagccccaaggtcaggaaattcagagcgagaatctaataatggagaagcaattgtccccacgcatgcagaacaacgaagaactcccaacctacgaggaggccaaggttcagtcccagtatttcaggggccagcaacacgcatctgttggcgcagccttctacgtaacaggagtcacgaatcaaaaaatgcgaaccgaggggaggccgtccgtccaaagattgaacccaggcaaaatgcaccaagacgagggcctcagggatctgaagcagggtcacgtccgctccctgagcgagcgactgatgcagatgtccctcgccacatccggcgtgaaggcccacccaccggttacatctgccccactttccccaccacaacccaatgatttgtataagaacccgacgtcgagtagcgaattctataaagcgcagggcccactgccaaaccaacacagtcttaagggcatggaacataggggccctcctccagagtaccccttcaagggcatgcccccacaatctgttgtctgtaagccccaagagccaggccacttctattcagagcacaggttgaatcaacccggaagaacggagggacagctgatgaggtaccagcaccccccagagtatggggcagcccgtcccgcacaagatatcagtttaccgctgtctgcgaggaattcccagccccactcaccgacatccagtctcactagcggtgggtctctgccactgctgcagagtcctccgtcaacacgtctctcccctgctcgccatccactagtgcccaaccagggggatcattccgcccatctgccaagaccacagcagcatttcctgcccaaccaggcccaccagggcgaccactatcgactgtcgcagcccggactctcccaacagcaacaacagcagcagcagcagcatcaccaccatcaccaccaccagcagcagcagcagcagcagccgcagcagcagcccggagaagcatatagcgccatgcctcgcgctcagccgtccagtgcttcataccagcctgtcccagccgatcccttcgcaattgtcagtcgggcacagcaaatggtggagatactctctgacgagaatcggaacctgaggcaggagctagagggctgctacgagaaggtggcccgtctgcagaaggtggagactgaaattcagagagtgagcgaagcatacgagaatcttgtgaaatcgtcttcaaaacgggaggcattggagaaggccatgagaaataagttggagggcgagatccgtcggatgcatgatttcaacagagatctgcgcgagcggttagaaaccgccaataagcagctagccgagaaggaatatgaagggagtgaggacacaaggaagactatctcccagctgtttgccaaaaacaaggaatctcaacgcgagaaagagaaactggaagcagagctggccacggctagaagtacgaatgaggaccagcgaagacatatcgagatacgcgaccaggctctctccaacgcacaggctaaagtggtaaaactcgaggaggagcttaaaaagaagcaggtatacgtcgacaaagtggaaaagatgcagcaagcgctcgtacagctgcaggcagcttgcgagaaacgggagcagttggaacaccgcctgcgcacccgactggagcgcgagctcgaatcacttaggattcagcagcgccagggcaactgtcagcctaccaatgtgagcgagtataacgctgctgctctgatggagctgcttcgcgagaaggaggaaagaatactagcccttgaggctgatatgaccaaatgggagcagaagtaccttgaggagaatgtaatgaggcacttcgcattggacgcagcagccacggttgcagcccaacgagacactaccgtcataagtcattcgcctaacacgtcttacgacaccgcactggaagccaggatccaaaaggaggaggaagaaatactcatggctaacaaaagatgcctcgatatggaagggcgaataaaaacgctgcacgcacagattattgagaaagacgccatgattaaagtgcttcagcagcgtagccgcaaagaaccctctaaaactgaacagctgtcatgcatgaggcccgcaaagagcttgatgagcatttccaacgctggctctggactgctgagtcactcgagcactctcacagggtcacccatcatggaagagaaacgggacgacaaatcatggaaaggctccttgggtattctcctggggggtgattaccgagccgagtacgttccatcaacccccagcccagtacccccatccactcctctgctgtcagcccatagtaagaccggcagcagagactgcagcacgcagacagagcgcggaacagagtctaacaaaacggccgcagtggcaccaatttcggtgcccgctcccgtggccgctgctgctactgcagccgcaattaccgccaccgcagcgactattactacaaccatggtggctgccgctccggttgcagtcgcagcagcagccgcacccgcagccgctgctgctccttccccagctacagccgctgcaaccgctgccgcagtctcccccgctgcagccggtcagatccctgcagccgctagcgtggcttctgcagccgcagtggccccatccgccgctgcagcagccgcagtgcaggtggcaccagcagcccctgctccagttccagcaccagccctcgtgcccgtgcctgctcccgcagccgcacaggctagcgcccctgcacagacccaagcacccacctcagccccagcggtcgctccgacacctgccccaacacccactcccgctgtagcccaggccgaagtacctgccagtcccgcaaccggaccgggaccacacagattgtcaatcccaagcctaacctgtaacccagacaagaccgacgggccagtctttcatagcaataccctggagaggaagacgcccatccagatcctgggccaggaacctgatgcagagatggttgagtatctgatatag

SEQ ID NO: 324577 - DNA, 1794 bp, Artificial Sequence
  derived and/or modified sequence
atggagcacagaggccccccccccgagtaccccttcaagggcatgcccccccagagcgtggtgtgcaagccccaggagcccggccacttctacagcgagcacagactgaaccagcccggcagaaccgagggccagctgatgagataccagcacccccccgagtacggcgccgccagacccgcccaggacatcagcctgcccctgagcgccagaaacagccagccccacagccccaccagcagcctgaccagcggcggcagcctgcccctgctgcagagcccccccagcaccagactgagccccgccagacaccccctggtgcccaaccagggcgaccacagcgcccacctgcccagaccccagcagcacttcctgcccaaccaggcccaccagggcgaccactacagactgagccagcccggcctgagccagcagcagcagcagcagcagcagcagcaccaccaccaccaccaccaccagcagcagcagcagcagcagccccagcagcagcccggcgaggcctacagcgccatgcccagagcccagcccagcagcgccagctaccagcccgtgcccgccgaccccttcgccatcgtgagcagagcccagcagatggtggagatcctgagcgacgagaacagaaacctgagacaggagctggagggctgctacgagaaggtggccagactgcagaaggtggagaccgagatccagagagtgagcgaggcctacgagaacctggtgaagagcagcagcaagagagaggccctggagaaggccatgagaaacaagctggagggcgagatcagaagaatgcacgacttcaacagagacctgagagagagactggagaccgccaacaagcagctggccgagaaggagtacgagggcagcgaggacaccagaaagaccatcagccagctgttcgccaagaacaaggagagccagagagagaaggagaagctggaggccgagctggccaccgccagaagcaccaacgaggaccagagaagacacatcgagatcagagaccaggccctgagcaacgcccaggccaaggtggtgaagctggaggaggagctgaagaagaagcaggtgtacgtggacaaggtggagaagatgcagcaggccctggtgcagctgcaggccgcctgcgagaagagagagcagctggagcacagactgagaaccagactggagagagagctggagagcctgagaatccagcagagacagggcaactgccagcccaccaacgtgagcgagtacaacgccgccgccctgatggagctgctgagagagaaggaggagagaatcctggccctggaggccgacatgaccaagtgggagcagaagtacctggaggagaacgtgatgagacacttcgccctggacgccgccgccaccgtggccgcccagagagacaccaccgtgatcagccacagccccaacaccagctacgacaccgccctggaggccagaatccagaaggaggaggaggagatcctgatggccaacaagagatgcctggacatggagggcagaatcaagaccctgcacgcccagatcatcgagaaggacgccatgatcaaggtgctgcagcagagaagcagaaaggagcccagcaagaccgagcagctgagctgcatgagacccgccaagagcctgatgagcatcagcaacgccggcagcggcctgctgagccacagcagcaccctgaccggcagccccatcatggaggagaagagagacgacaagagctggaagggcagcctgggcaacgacagcaagtag

SEQ ID NO: 324578 - DNA, 3255 bp, Artificial Sequence
  derived and/or modified sequence
atgagaaacagcgaggagcagcccagcggcggcaccaccgtgctgcagagactgctgcaggagcagctgagatacggcaaccccagcgagaacagaagcctgctggccatccaccagcaggccaccggcaacggcccccccttccccagcggcagcggcaaccccggcccccagagcgacgtgctgagcccccaggaccaccaccagcagctggtggcccacgccgccagacaggagccccagggccaggagatccagagcgagaacctgatcatggagaagcagctgagccccagaatgcagaacaacgaggagctgcccacctacgaggaggccaaggtgcagagccagtacttcagaggccagcagcacgccagcgtgggcgccgccttctacgtgaccggcgtgaccaaccagaagatgagaaccgagggcagacccagcgtgcagagactgaaccccggcaagatgcaccaggacgagggcctgagagacctgaagcagggccacgtgagaagcctgagcgagagactgatgcagatgagcctggccaccagcggcgtgaaggcccacccccccgtgaccagcgcccccctgagccccccccagcccaacgacctgtacaagaaccccaccagcagcagcgagttctacaaggcccagggccccctgcccaaccagcacagcctgaagggcatggagcacagaggccccccccccgagtaccccttcaagggcatgcccccccagagcgtggtgtgcaagccccaggagcccggccacttctacagcgagcacagactgaaccagcccggcagaaccgagggccagctgatgagataccagcacccccccgagtacggcgccgccagacccgcccaggacatcagcctgcccctgagcgccagaaacagccagccccacagccccaccagcagcctgaccagcggcggcagcctgcccctgctgcagagcccccccagcaccagactgagccccgccagacaccccctggtgcccaaccagggcgaccacagcgcccacctgcccagaccccagcagcacttcctgcccaaccaggcccaccagggcgaccactacagactgagccagcccggcctgagccagcagcagcagcagcagcagcagcagcaccaccaccaccaccaccaccagcagcagcagcagcagcagccccagcagcagcccggcgaggcctacagcgccatgcccagagcccagcccagcagcgccagctaccagcccgtgcccgccgaccccttcgccatcgtgagcagagcccagcagatggtggagatcctgagcgacgagaacagaaacctgagacaggagctggagggctgctacgagaaggtggccagactgcagaaggtggagaccgagatccagagagtgagcgaggcctacgagaacctggtgaagagcagcagcaagagagaggccctggagaaggccatgagaaacaagctggagggcgagatcagaagaatgcacgacttcaacagagacctgagagagagactggagaccgccaacaagcagctggccgagaaggagtacgagggcagcgaggacaccagaaagaccatcagccagctgttcgccaagaacaaggagagccagagagagaaggagaagctggaggccgagctggccaccgccagaagcaccaacgaggaccagagaagacacatcgagatcagagaccaggccctgagcaacgcccaggccaaggtggtgaagctggaggaggagctgaagaagaagcaggtgtacgtggacaaggtggagaagatgcagcaggccctggtgcagctgcaggccgcctgcgagaagagagagcagctggagcacagactgagaaccagactggagagagagctggagagcctgagaatccagcagagacagggcaactgccagcccaccaacgtgagcgagtacaacgccgccgccctgatggagctgctgagagagaaggaggagagaatcctggccctggaggccgacatgaccaagtgggagcagaagtacctggaggagaacgtgatgagacacttcgccctggacgccgccgccaccgtggccgcccagagagacaccaccgtgatcagccacagccccaacaccagctacgacaccgccctggaggccagaatccagaaggaggaggaggagatcctgatggccaacaagagatgcctggacatggagggcagaatcaagaccctgcacgcccagatcatcgagaaggacgccatgatcaaggtgctgcagcagagaagcagaaaggagcccagcaagaccgagcagctgagctgcatgagacccgccaagagcctgatgagcatcagcaacgccggcagcggcctgctgagccacagcagcaccctgaccggcagccccatcatggaggagaagagagacgacaagagctggaagggcagcctgggcatcctgctgggcggcgactacagagccgagtacgtgcccagcacccccagccccgtgccccccagcacccccctgctgagcgcccacagcaagaccggcagcagagactgcagcacccagaccgagagaggcaccgagagcaacaagaccgccgccgtggcccccatcagcgtgcccgcccccgtggccgccgccgccaccgccgccgccatcaccgccaccgccgccaccatcaccaccaccatggtggccgccgcccccgtggccgtggccgccgccgccgcccccgccgccgccgccgcccccagccccgccaccgccgccgccaccgccgccgccgtgagccccgccgccgccggccagatccccgccgccgccagcgtggccagcgccgccgccgtggcccccagcgccgccgccgccgccgccgtgcaggtggcccccgccgcccccgcccccgtgcccgcccccgccctggtgcccgtgcccgcccccgccgccgcccaggccagcgcccccgcccagacccaggcccccaccagcgcccccgccgtggcccccacccccgcccccacccccacccccgccgtggcccaggccgaggtgcccgccagccccgccaccggccccggcccccacagactgagcatccccagcctgacctgcaaccccgacaagaccgacggccccgtgttccacagcaacaccctggagagaaagacccccatccagatcctgggccaggagcccgacgccgagatggtggagtacctgatctag

SEQ ID NO: 324579 - DNA, 2559 bp, Artificial Sequence
  derived and/or modified sequence
atggagcacagaggccccccccccgagtaccccttcaagggcatgcccccccagagcgtggtgtgcaagccccaggagcccggccacttctacagcgagcacagactgaaccagcccggcagaaccgagggccagctgatgagataccagcacccccccgagtacggcgccgccagacccgcccaggacatcagcctgcccctgagcgccagaaacagccagccccacagccccaccagcagcctgaccagcggcggcagcctgcccctgctgcagagcccccccagcaccagactgagccccgccagacaccccctggtgcccaaccagggcgaccacagcgcccacctgcccagaccccagcagcacttcctgcccaaccaggcccaccagggcgaccactacagactgagccagcccggcctgagccagcagcagcagcagcagcagcagcagcaccaccaccaccaccaccaccagcagcagcagcagcagcagccccagcagcagcccggcgaggcctacagcgccatgcccagagcccagcccagcagcgccagctaccagcccgtgcccgccgaccccttcgccatcgtgagcagagcccagcagatggtggagatcctgagcgacgagaacagaaacctgagacaggagctggagggctgctacgagaaggtggccagactgcagaaggtggagaccgagatccagagagtgagcgaggcctacgagaacctggtgaagagcagcagcaagagagaggccctggagaaggccatgagaaacaagctggagggcgagatcagaagaatgcacgacttcaacagagacctgagagagagactggagaccgccaacaagcagctggccgagaaggagtacgagggcagcgaggacaccagaaagaccatcagccagctgttcgccaagaacaaggagagccagagagagaaggagaagctggaggccgagctggccaccgccagaagcaccaacgaggaccagagaagacacatcgagatcagagaccaggccctgagcaacgcccaggccaaggtggtgaagctggaggaggagctgaagaagaagcaggtgtacgtggacaaggtggagaagatgcagcaggccctggtgcagctgcaggccgcctgcgagaagagagagcagctggagcacagactgagaaccagactggagagagagctggagagcctgagaatccagcagagacagggcaactgccagcccaccaacgtgagcgagtacaacgccgccgccctgatggagctgctgagagagaaggaggagagaatcctggccctggaggccgacatgaccaagtgggagcagaagtacctggaggagaacgtgatgagacacttcgccctggacgccgccgccaccgtggccgcccagagagacaccaccgtgatcagccacagccccaacaccagctacgacaccgccctggaggccagaatccagaaggaggaggaggagatcctgatggccaacaagagatgcctggacatggagggcagaatcaagaccctgcacgcccagatcatcgagaaggacgccatgatcaaggtgctgcagcagagaagcagaaaggagcccagcaagaccgagcagctgagctgcatgagacccgccaagagcctgatgagcatcagcaacgccggcagcggcctgctgagccacagcagcaccctgaccggcagccccatcatggaggagaagagagacgacaagagctggaagggcagcctgggcatcctgctgggcggcgactacagagccgagtacgtgcccagcacccccagccccgtgccccccagcacccccctgctgagcgcccacagcaagaccggcagcagagactgcagcacccagaccgagagaggcaccgagagcaacaagaccgccgccgtggcccccatcagcgtgcccgcccccgtggccgccgccgccaccgccgccgccatcaccgccaccgccgccaccatcaccaccaccatggtggccgccgcccccgtggccgtggccgccgccgccgcccccgccgccgccgccgcccccagccccgccaccgccgccgccaccgccgccgccgtgagccccgccgccgccggccagatccccgccgccgccagcgtggccagcgccgccgccgtggcccccagcgccgccgccgccgccgccgtgcaggtggcccccgccgcccccgcccccgtgcccgcccccgccctggtgcccgtgcccgcccccgccgccgcccaggccagcgcccccgcccagacccaggcccccaccagcgcccccgccgtggcccccacccccgcccccacccccacccccgccgtggcccaggccgaggtgcccgccagccccgccaccggccccggcccccacagactgagcatccccagcctgacctgcaaccccgacaagaccgacggccccgtgttccacagcaacaccctggagagaaagacccccatccagatcctgggccaggagcccgacgccgagatggtggagtacctgatctag

SEQ ID NO: 324580 - protein, 187 aa, Artificial Sequence
  derived and/or modified sequence
MRRGWKMALSGGLRCCRRVLSWVPVLVIVLVVLWSYYAYVFELCLVTVLSPAEKVIYLILYHAIFVFFTWTYWKSIFTLPQQPNQKFHLSYTDKERYENEERPEVQKQMLVDMAKKLPVYTRTGSGAVRFCDRCHLIKPDRCHHCSVCAMCVLKMDHHCPWGNYPVFALSSMSFFFSLWPACFLSAL

SEQ ID NO: 324581 - DNA, 564 bp, Artificial Sequence
  derived and/or modified sequence
atgagaagaggctggaagatggccctgagcggcggcctgagatgctgcagaagagtgctgagctgggtgcccgtgctggtgatcgtgctggtggtgctgtggagctactacgcctacgtgttcgagctgtgcctggtgaccgtgctgagccccgccgagaaggtgatctacctgatcctgtaccacgccatcttcgtgttcttcacctggacctactggaagagcatcttcaccctgccccagcagcccaaccagaagttccacctgagctacaccgacaaggagagatacgagaacgaggagagacccgaggtgcagaagcagatgctggtggacatggccaagaagctgcccgtgtacaccagaaccggcagcggcgccgtgagattctgcgacagatgccacctgatcaagcccgacagatgccaccactgcagcgtgtgcgccatgtgcgtgctgaagatggaccaccactgcccctggggcaactaccccgtgttcgccctgagcagcatgagcttcttcttcagcctgtggcccgcctgcttcctgagcgccctgtag

SEQ ID NO: 324582 - DNA, 564 bp, Artificial Sequence
  derived and/or modified sequence
atgaggagaggctggaagatggcccttagcggcggtctaagatgctgtaggcgggttctgtcttgggtgcccgtgctggtgattgtcctggtagtgctatggtcttactatgcctacgttttcgagctttgcctagtcaccgtgctgtccccagccgagaaagttatttacctgatcctataccacgccatttttgtgttttttacgtggacgtactggaaaagcattttcacattaccacaacagccgaatcagaagtttcatctttcatataccgacaaggaaagatacgagaacgaggaaagaccagaggttcaaaagcaaatgctggtcgacatggcgaagaagctgcctgtgtatacccggacggggtctggggcagtgcgcttctgtgaccgctgtcacttgatcaaacctgataggtgccaccattgttcagtgtgcgccatgtgtgtgttgaagatggatcatcactgcccgtggggaaattatcccgtattcgctctgtcttccatgagcttcttctttagcctctggcccgcctgttttctctcggccctatag

SEQ ID NO: 324583 - DNA, 564 bp, Artificial Sequence
  derived and/or modified sequence
atgaggcggggctggaagatggccctgagcggcggcctgcgctgctgcagaagagtgctgtcctgggtgcctgtgctggtgattgtgctggtggtgctgtggagctactatgcctacgtgtttgagctgtgcctggtgacagtgctgagccctgctgagaaggtgatctacctgatcctgtaccacgccatctttgtgttcttcacctggacctactggaagagcatcttcaccctgccccagcagcccaaccagaagttccacctgagctacacagacaaggagagatatgaaaatgaggagaggcctgaggtgcagaagcagatgctggtggacatggccaagaagctgcctgtgtacaccaggactggaagtggagctgtgcgcttctgtgaccgctgccacctgatcaagccagaccgctgccaccactgcagcgtgtgtgccatgtgtgtgctgaagatggaccaccactgcccctggggcaactaccctgtgtttgccctgagctccatgtccttcttcttcagcctgtggccagcctgcttcctgagcgccctgtag

SEQ ID NO: 324584 - DNA, 564 bp, Artificial Sequence
  derived and/or modified sequence
atgcggcggggctggaagatggccctgagcggcggcctgcggtgctgcaggagagttctgtcgtgggtgcctgttctcgtcattgtcctggtggtcctgtggagctattatgcctacgtctttgagctttgtctggtgacagtgctctctcctgccgaaaaggttatttatctgattctatatcatgcaatttttgtttttttcacatggacctattggaaatcaatatttactcttccacagcagccaaaccagaaatttcacctgtcatatacagacaaggaaaggtacgaaaacgaggagagaccagaagtccagaaacagatgttggtggacatggccaaaaaactaccggtgtataccagaactgggagcggtgccgtacgtttttgcgacagatgccatctcattaagcccgacaggtgtcaccattgttcagtgtgcgcgatgtgcgtgctgaagatggatcatcactgcccctggggaaattaccccgtgtttgctttatcctctatgtccttcttcttcagcctttggccggcgtgcttcctctctgcgctttag

SEQ ID NO: 324585 - DNA, 564 bp, Artificial Sequence
  derived and/or modified sequence
atgcgaaggggttggaagatggcgctgagcggtgggctgcggtgttgccggagagttctgagctgggtgccagttttggtaattgtactcgtggtgctgtggtcttactatgcttatgtgtttgagctgtgtcttgtgacagtactcagtcccgctgagaaggtcatatatctgatactgtatcacgccatcttcgtgttttttacttggacgtactggaagtctatctttaccctcccgcagcagccaaatcaaaagttccacctgtcttacaccgataaagaacgctatgaaaacgaagagcgcccagaggtccaaaaacaaatgctcgtggacatggccaagaaactacccgtgtacaccaggacagggtccggggcagtgaggttctgtgacaggtgccatttgatcaaacctgaccggtgtcaccattgtagtgtgtgcgctatgtgcgtgctgaagatggaccaccattgtccctggggaaattacccagtcttcgctctgagttctatgtcattctttttctcactgtggccagcatgcttcctaagcgcactgtag

SEQ ID NO: 324586 - DNA, 342 bp, Artificial Sequence
  derived and/or modified sequence
atggagctcgactttggtcattttgacgaacgggacaagacctctcgtaacatgcggggctcccgcatgaacggattgcccagccccactcactccgctcattgctccttctaccgcaccagaacgttacaagcactgagtaatgaaaaaaaggccaaaaaagtgagattttacagaaacggcgacaggtactttaagggaattgtgtatgcggtatcctctgacagattcaggtccttcgacgcactcctggctgacttgacacgcagcttatccgataacatcaacctaccgcagggcgtccgatacatctatacaatagatggctctaggaaaatatag

SEQ ID NO: 324587 - DNA, 342 bp, Artificial Sequence
  derived and/or modified sequence
atggagctggactttggccactttgatgagcgggacaagaccagcaggaacatgaggggcagcaggatgaatggcctgcccagccccacccacagcgcccactgcagcttctaccgcaccaggaccctgcaggccctgagcaatgagaagaaggccaagaaggtgcgcttctacagaaatggagaccgctacttcaagggcatcgtgtatgctgtgtccagtgaccgcttccgcagctttgatgccctgctggccgacctgaccaggagcctgagtgacaacatcaacctgccccagggcgtgcgctacatctacaccattgatggcagcaggaagatctag

SEQ ID NO: 324588 - DNA, 342 bp, Artificial Sequence
  derived and/or modified sequence
atggagctggacttcggccacttcgacgagcgggacaagaccagcagaaacatgaggggttcacgcatgaacggtctaccctcgcccactcactcggctcattgctctttctatcgcacaagaaccttgcaagccctgtctaatgagaagaaggccaagaaggtcaggttctacagaaatggggaccggtacttcaagggcatagtttacgcagtaagctcagacagatttcgcagctttgatgcgttactagccgaccttacacggagcctgtccgacaacattaacttaccacaaggagtgagatacatctatacgatagacggatcaaggaagatctag

SEQ ID NO: 324589 - DNA, 342 bp, Artificial Sequence
  derived and/or modified sequence
atggagctggactttggccactttgatgagcgtgacaagacaagtagaaacatgcggggatccaggatgaatggtttgccctcccctacccactcagcgcattgttccttttaccgcacaagaactctgcaggctcttagcaatgaaaagaaagccaagaaagtacggttctatcgaaacggcgaccgatactttaagggtattgtttacgctgtgtcttccgacagatttcggtcgtttgacgccttgctcgccgatttgacaagaagcctgtccgacaatattaacctcccgcagggcgtgaggtacatctacactatcgacggttctcggaagatttag

SEQ ID NO: 324590 - DNA, 342 bp, Artificial Sequence
  derived and/or modified sequence
atggagctggacttcggccacttcgacgagagagacaagaccagcagaaacatgagaggcagcagaatgaacggcctgcccagccccacccacagcgcccactgcagcttctacagaaccagaaccctgcaggccctgagcaacgagaagaaggccaagaaggtgagattctacagaaacggcgacagatacttcaagggcatcgtgtacgccgtgagcagcgacagattcagaagcttcgacgccctgctggccgacctgaccagaagcctgagcgacaacatcaacctgccccagggcgtgagatacatctacaccatcgacggcagcagaaagatctag

SEQ ID NO: 324591 - protein, 13 aa, Artificial Sequence
  derived and/or modified sequence
NDLSGGVLNDWSR

SEQ ID NO: 324592 - DNA, 1687 bp, Artificial Sequence
  derived and/or modified sequence
attacaaaagctgtaatgatacaagggaaccatgtgtgctaaagaatatctagttacttcaggaatcatctgagaagcatctgaggctgtatggatttgcagcagtccagtttttttctaaacagattttattaagacaaccttctttcctgcaatttcttttactctcttcctttatcttttttttctgattcaattgctcatgcaagtgcccagggaacgcattaaaattgcttttcgtctctggatccccattttagttataaggattgttgttgctgggacatggcctcaagcacctggcctgagtacgctgggtttgaatatcatcattttacctgattgcttgggaattggcatgatgctcaccttcaatgctgaagccctctctgtggaagcaaatgaacaactcttcaagaagatccttgaaatgtggaaagacataccatcttctatagcttttgaatgtacacagcgaaccacaggatggggccaaaaggccattgaagtgcgctctttgcaatccagggttctggaaagtgagctgaagcgcaggtcaattaagaagctgagattcctgtgcacccggggtgacaagctgttctttacctctaccctgcgcaatcaccacagccgggtttacttcatgacacttggaaaacttgaagagctccaaagcaattatgatgtctaaaagtttccagtgatttattaccacattataaacatcatgtataggcagtctgcatcttcagatttcagagattaaatgagtattcagttttatttttagtaaagattaaatccaaaactttacttttaatgtagcacagaatagttttaatgagaaatgcagctttatgtataaaattaactatagcaagctctaggtactccaatggtgtacaatgtcttttgcacaaactttgtaacttttgttactgtgaattcaaacattactctttggacagtttggacagtatctgtattcagattttacaacatggagtaaagaaacctgttatgaattagattacaagcagccttcaaaagaattggcactgggataagatttttcagaaaaagaaaaacatcggcaaactgtgtgtgatttttccaaagctatataaagaaccaaaggtttagtcaagaaacaaaaatcttaaagattattataacccagactaaggttgaacaacctgcatgcccagagaaaactatggcgacaaaggggaaaaggccaccactcgttttctcactgattcatgccaattaagcctacagttaaagaccagttttgttcttttcacccatttttaagctggttttctcctgataagaagaaaggaagaaagccccagacgcttggtttttctcagaacccccaaaagatgtgcaatagctgttgttacaaaccaccaaataatacagttgtgagcctgaatacaggactgaactcctatacacgtgtactgtagaatgagtattttttaataccttaaggtaggcgtcaaattctactccccaaagcagagatagattgatttatcaaaattattatctggccaacagtgtgactatcagacagcatcaaatatttgcccaatccaagattagactacacaaaagcttccttccagtattaaacaaaaagaattaaacataactatgaaaaaactttgctaat

SEQ ID NO: 324593 - protein, 495 aa, Artificial Sequence
  derived and/or modified sequence
MANRELAFKAGDVIKVLDASNKDWWWGQIDDEEGWFPASFVRLWVNQEDEVEEGPSDVQNGHLDPNSDCLCLGRPLQNRDQMRANVINEIMSTERHYIKHLKDICEGYLKQCRKRRDMFSDEQLKVIFGNIEDIYRFQMGFVRDLEKQYNNDDPHLSEIGPCFLEHQDGFWIYSEYCNNHLDACMELSKLMKDSRYQHFFEACRLLQQMIDIAIDGFLLTPVQKICKYPLQLAELLKYTAQDHSDYRYVAAALAVMRNVTQQINERKRRLENIDKIAQWQASVLDWEGEDILDRSSELIYTGEMAWIYQPYGRNQQRVFFLFDHQMVLCKKDLIRRDILYYKGRIDMDKYEVVDIEDGRDDDFNVSMKNAFKLHNKETEEIHLFFAKKLEEKIRWLRAFREERKMVQEDEKIGFEISENQKRQAAMTVRKVPKQKGVNSARSVPPSYPPPQDPLNHGQYLVPDGIAQSQVFEFTEPKRSQSPFWQNFSRLTPFKK

SEQ ID NO: 324594 - protein, 243 aa, Artificial Sequence
  derived and/or modified sequence
MIDIAIDGFLLTPVQKICKYPLQLAELLKYTAQDHSDYRYVAAALAVMRNVTQQINERKRRLENIDKIAQWQASVLDWEDLIRRDILYYKGRIDMDKYEVVDIEDGRDDDFNVSMKNAFKLHNKETEEIHLFFAKKLEEKIRWLRAFREERKMVQEDEKIGFEISENQKRQAAMTVRKVPKQKGVNSARSVPPSYPPPQDPLNHGQYLVPDGIAQSQVFEFTEPKRSQSPFWQNFSRLTPFKK

SEQ ID NO: 324595 - DNA, 732 bp, Artificial Sequence
  derived and/or modified sequence
atgatcgacattgctatagatgggtttctgctgacaccagtgcaaaaaatttgtaagtacccattgcaactcgctgagctgcttaagtatactgcccaagatcattcggattatagatacgttgctgcggccctcgccgttatgagaaacgtaactcagcagatcaatgagcgaaagcggaggctcgagaacattgacaagatcgctcagtggcaggcttctgttctggactgggaggatctgattaggcgggatattctctattataagggtcgcatcgatatggataagtacgaagtggtggatatagaagatgggagagacgacgactttaatgtgtccatgaaaaacgcatttaaattgcataacaaagaaaccgaagaaatccatctctttttcgccaaaaagctggaggagaagatcaggtggcttcgggcctttcgagaagagagaaaaatggttcaggaggacgagaagatagggtttgaaatttctgagaatcagaagcgccaggcagctatgactgtgcgcaaagtgcccaagcagaaaggggtgaacagcgcacggagcgttcctccctcctacccaccaccccaggaccccctcaaccatggtcagtatctggtgccagacggcatcgctcagagtcaagtctttgagtttacggagccaaagcggagccagtcgcctttttggcagaattttagcagactcacaccttttaagaaatag

SEQ ID NO: 324596 - DNA, 732 bp, Artificial Sequence
  derived and/or modified sequence
atgattgacatcgccattgatggcttcctgctgacccctgtgcagaagatctgcaagtaccccctgcagctggccgagctgctgaagtacacagcccaggaccacagcgactaccgctacgtggccgccgccctggccgtgatgagaaatgtgacccagcagatcaatgaaaggaagaggcggctggagaacatcgacaagatcgcccagtggcaggcctctgtgctggactgggaggacctgatcagaagagacatcctgtactacaagggcagaattgacatggacaagtatgaggtggtggacattgaagatggaagagatgatgacttcaacgtgtccatgaagaatgccttcaagctgcacaacaaggagacagaggagatccacctgttctttgccaagaagctggaggagaagatccgctggctgcgggccttccgggaggagaggaagatggtgcaggaggatgagaagattggatttgagatcagcgagaaccagaagaggcaggccgccatgacagtgaggaaggtgcccaagcagaagggcgtgaacagcgcccggtctgtgccccccagctaccccccaccccaggaccccctgaaccacggccagtacctggtgcctgatggcatcgcccagagccaggtgtttgagttcacagagcccaagaggagccagagccccttctggcagaacttcagccggctgacccccttcaagaagtag

SEQ ID NO: 324597 - DNA, 732 bp, Artificial Sequence
  derived and/or modified sequence
atgatcgacatcgccatcgacggcttcctgctgacccccgtgcagaaaatatgcaagtatcctctgcagctggccgagctactgaagtataccgcccaagatcactcggattataggtatgtcgccgctgccctcgccgttatgcgcaacgtaacacagcagatcaatgagcgtaagaggcggctggaaaacattgacaaaattgctcagtggcaggcttcggtgctcgattgggaggatctgatcagacgggacattctctattataaggggaggatagacatggacaagtacgaggtggtggacatcgaggacgggagagacgacgatttcaacgtgtcgatgaaaaacgccttcaagctgcacaataaagagaccgaagaaatacatctgttctttgccaagaaacttgaagagaaaatccgatggctgagggcgtttcgggaagaacgaaaaatggtgcaggaagatgagaaaattggttttgagatctctgaaaatcaaaagcggcaggccgcgatgacagtccggaaggtcccgaaacagaaaggagttaactccgcccggtcggtgccccctagttaccctcccccacaagatcccctcaaccacggtcagtaccttgtgccagacggaatcgcacagagtcaggtctttgagttcactgaacctaaacggtcacagtcccccttctggcagaatttcagcaggttaaccccctttaagaaatag

SEQ ID NO: 324598 - DNA, 732 bp, Artificial Sequence
  derived and/or modified sequence
atgattgatatcgctatcgacgggttcctgttgacaccagtgcagaaaatctgcaaatatcctctgcagctggctgaattgttgaagtataccgctcaggatcattcagattaccgatacgtggctgcagctctagccgtgatgcgtaacgtcacgcaacaaatcaacgagcggaaaaggcgtttagagaatatcgataaaattgcacagtggcaggcatccgttctggactgggaggatttaatcaggcgcgacatcctttattacaagggcaggatcgacatggataagtacgaagtcgttgatatcgaagacgggagggatgatgacttcaatgtttctatgaaaaatgcttttaagcttcataataaagagactgaagagatccatctattttttgccaagaaattagaagagaaaatccgatggctcagggcatttagggaagagcggaagatggtccaagaggacgaaaagatcggatttgaaatcagcgagaaccaaaagcgtcaggctgctatgactgtgaggaaggtgccaaaacagaaaggcgtgaactcagccagatccgtacctccttcgtatcctccacctcaggatcccctcaatcacggccagtatctagtccccgacggcatcgctcaatctcaggtgtttgaattcactgaaccaaaaaggagtcagtctcctttttggcaaaacttctctaggctaacacccttcaagaagtag

SEQ ID NO: 324599 - DNA, 1059 bp, Artificial Sequence
  derived and/or modified sequence
agccgctaccagcacttctttgaggcctgtcgcctcttgcagcagatgattgacattgctatcgatggtttccttttgactccagtgcagaagatctgcaagtatcccttacagttggctgagctcctaaagtatactgcccaagaccacagtgactacaggtatgtggcagctgctttggctgtcatgagaaatgtgactcagcagatcaacgaacgcaagcgacgtttagagaatattgacaagattgctcagtggcaggcttctgtcctagactgggaggacctaatccggagagacatcctgtactacaaaggccgcattgacatggataaatatgaggtagttgacattgaggatggcagagatgatgacttcaatgtcagcatgaagaatgcctttaagcttcacaacaaggagactgaggagatacatctgttctttgccaagaagctggaggaaaaaatacgctggctcagggctttcagagaagagaggaaaatggtacaggaagatgaaaaaattggctttgaaatttctgaaaaccagaagaggcaggctgcaatgactgtgagaaaagtccctaagcaaaaaggtgtcaactctgcccgctcagttcctccttcctacccaccaccgcaggacccgttaaaccacggccagtacctggtccccgacggcatcgctcagtcgcaggtctttgagttcaccgaacccaagcgcagccagtcaccattctggcaaaacttcagcaggttaacccccttcaaaaaatgatacctacagggaggcagataattttaaaataaagtaaataaaattatatttatagatggaccttttttcggagaagcactgttgaaatttatacacacacacacacacagagacccttgagtacacatacacacacacacacacagacacacacacacacacacacacacacacacacacagagagataaggaacaaaagtgttttctgttgttttggggaagtgaaatatgtggttggtaggaagaggtaccaatgacttccaaacatgtgattccgtctt

SEQ ID NO: 324600 - DNA, 732 bp, Artificial Sequence
  derived and/or modified sequence
atgatcgacatcgccatcgacggcttcctgctgacccccgtgcagaagatctgcaagtaccccctgcagctggccgagctgctgaagtacaccgcccaggaccacagcgactacagatacgtggccgccgccctggccgtgatgagaaacgtgacccagcagatcaacgagagaaagagaagactggagaacatcgacaagatcgcccagtggcaggccagcgtgctggactgggaggacctgatcagaagagacatcctgtactacaagggcagaatcgacatggacaagtacgaggtggtggacatcgaggacggcagagacgacgacttcaacgtgagcatgaagaacgccttcaagctgcacaacaaggagaccgaggagatccacctgttcttcgccaagaagctggaggagaagatcagatggctgagagccttcagagaggagagaaagatggtgcaggaggacgagaagatcggcttcgagatcagcgagaaccagaagagacaggccgccatgaccgtgagaaaggtgcccaagcagaagggcgtgaacagcgccagaagcgtgccccccagctacccccccccccaggaccccctgaaccacggccagtacctggtgcccgacggcatcgcccagagccaggtgttcgagttcaccgagcccaagagaagccagagccccttctggcagaacttcagcagactgacccccttcaagaagtag

SEQ ID NO: 324601 - DNA, 5251 bp, Artificial Sequence
  derived and/or modified sequence
aaaaaggcagcctatgggctgagcgggggatggggagagaagagggatagggccagcaaggcagggatcgaacgagtgtctggcagccgggagcccagcgaagagagcgagcaagcttaggaaaacgagcgaagtaaagggagtaggggagactgagactgaccggtagccaggcaggcggacggacgcacgcccggacagactgagcaggcgccggagaaccactcacaggttccccccgcctttccctttgaaagctaggattttgcctttcccgtggcgcccgagagagaatgctggactctgccgacttcagcgcaagctaagatttctcagctagggacaaacgatcagcccaatcctgagaaggggggaaccaagcaccccgtccccatccccctcccctcccccgactaaactcgggcgccaaacccagcccttctctaaccaccctacttcctcctctcctttctagcatggtggctgtatggacagtctgacagaacagagactgacatctcccaatctgccggccccccacctggaacactacagtgttctgcattgcaccatgaccctggatgtgcaaactgtagtcgtttttgccgtgattgtagtcctcctgcttgtcaatgtcatactcatgtttttcctgggaacgcgctgaatggagtccagccacctgagctgtcgcgaactctcgctttgatttcatcccgagagccaccgagaaaaaaaaaaaatcacagacagagacagggaaagagagagaaagaacaagctttcttactcaggggggaaaacgttttgagcttcaacatggcctcgctgtgatatctctgggtgaaccaggaggatgaggtggaggaggggcccagcgatgtgcagaacggacacctggaccccaattcagactgcctctgtctggggcggccactacagaaccgggaccagatgcgggccaatgtcatcaatgagataatgagcactgagcgtcactacatcaagcacctcaaggatatttgtgagggctatctgaagcagtgccggaagagaagggacatgttcagtgacgagcaactgaaggtaatctttgggaacattgaagatatctacagatttcagatgggctttgtgagagacctggagaaacagtataacaatgatgacccccacctcagcgagataggaccctgcttcctagagcaccaagatggattctggatatactctgagtattgtaacaaccacctggatgcttgcatggagctctccaaactgatgaaggacagccgctaccagcacttctttgaggcctgtcgcctcttgcagcagatgattgacattgctatcgatggtttccttttgactccagtgcagaagatctgcaagtatcccttacagttggctgagctcctaaagtatactgcccaagaccacagtgactacaggtatgtggcagctgctttggctgtcatgagaaatgtgactcagcagatcaacgaacgcaagcgacgtttagagaatattgacaagattgctcagtggcaggcttctgtcctagactgggagggcgaggacatcctagacaggagctcggagctgatctacactggggagatggcctggatctaccagccctacggccgcaaccagcagcgggtcttcttcctgtttgaccaccagatggtcctctgcaagaaggacctaatccggagagacatcctgtactacaaaggccgcattgacatggataaatatgaggtagttgacattgaggatggcagagatgatgacttcaatgtcagcatgaagaatgcctttaagcttcacaacaaggagactgaggagatacatctgttctttgccaagaagctggaggaaaaaatacgctggctcagggctttcagagaagagaggaaaatggtacaggaagatgaaaaaattggctttgaaatttctgaaaaccagaagaggcaggctgcaatgactgtgagaaaagtccctaagcaaaaaggtgtcaactctgcccgctcagttcctccttcctacccaccaccgcaggacccgttaaaccacggccagtacctggtccccgacggcatcgctcagtcgcaggtctttgagttcaccgaacccaagcgcagccagtcaccattctggcaaaacttcagcaggttaacccccttcaaaaaatgatacctacagggaggcagataattttaaaataaagtaaataaaattatatttatagatggaccttttttcggagaagcactgttgaaatttatacacacacacacacacagagacccttgagtacacatacacacacacacacacagacacacacacacacacacacacacacacacacacagagagataaggaacaaaagtgttttctgttgttttggggaagtgaaatatgtggttggtaggaagaggtaccaatgacttccaaacatgtgattccgtcttaaaagttttccatttttaccctgtcccccttccctttgctttcagaagttgacatttctattcattgcttttcttgttaagataatctctttactcccctgtgagtgattcactgccttgtcattattacgatagatgtgtttgtattgttttttttctgatgatactgatgttgatgaatttttaattttatttgatgtggtagagttgggaggtttcagggttttttcccctcttttactttccattgaggaagggaatgagctcctttctcctctccttcagccaatcattatcaaatgttccttcagccctgcagttgccccaaataaccttttttcagcatcctctgtcctcagtcatgccagtctggacatgctctgttgtgccctgtgacaaaactgctcagtattcctattgcttttactgtgttttaggtactgtgaagggatcaaaaaaccaaacagaagcaagggagtatcagactatgatgatgctggagtggacttctgttcagggaacattttgcattcaggctgtttcttctatcactggggtttcccatgttgcagcacttctgggtcgttgcaattttgcatctaggagttagtttgatcgagttattctcttttttcaagtcacttttgttataggtctccccctaggcctgtctctcccttagcccaaaagatctgaactggaagcagaggttgagattctgcctcccaggagagggatttacctgccccctagtaccagataggtttagggcagtgatctctacagcaatcagttcagtgtcctggttgtccctgctcccatttacagatgtttgggcagcattgatagaagtatggaggggttcaagacagagcccacctgatcaagatcatcagctaccttcaaattattgacctggacagggtccaagtctgatagtaaccttttacaagaaagaacagggatgggaatggaaagagatagccttgatccacagtattgtacctgcattttctaccaccctaaaattgtgtgagacttctcccattgttaacagattgcatggacaatcttccctggcttctttctttccctctctctttcttctttctcctgccatcctagcacaggaggatttttggtattgatatagttaaagctgttctggcactcaaagaaggccgtgtttccaacatcctctcatcccaggacatttggggcaagtgagttaggggcccaggggcaattttccctctgaataacgtgtctgaggcagggatgctaccctcaggctcgcttttggccagctttttgcttgggaaaatctaacttctttcacaaggaggcaggcttcctatggatgttggagtacctgtttttcctccacacatagcccttttcatggatagaccttgaacaacaaaaagggtataagggaataaggatgaactctgctgtgaagagcaagccactgtagtgaggaatgtggagactgggagtctgtcctaaaccccatgggagaagacttcatcatgacaggacttcagcttaccaagcagcagccatagctgtgtggaggcttcagcatagctagcatgtttactgctctatgcctcctgatccagaccaggcattgcccagcctgggaatcttttctttgtgggaatcaaattacaagctatttaagtttatattccatcacaaccaagtcagacttgtattataagtcaaggatgagcctgatctggggagagggccggggctcgggactggccaccactgttcagcacatgacctaactacgtaagcctctttggcaagggtcctggtgcccagcacccaggctaaaatatcctgtctggcagagtgttttggtagctatgcaggcctcccttcagtgtacctctttttccaacttctcactcctccttactaggcttggccttgacatgcttcttcgagggttggcagcacaccgggaggggatgcttggacaagtttctgggcctacatttcttgactaggccctctcatttcctccctccttggggcttctgcccagggctccaggatcagggatattacttctcaacccgcacttctcctctactgaacccactggcatcacctgatgccactaatttgtgaacaacaagaaatcatttccccattggttggagtattccctcagcctatagcatcaaagcagaccagtggccaacagccccaaggggagcccaattaaatacctgggttcagtatcctaacctgttatgtcctgacagcaatggtaaccccagtaattctgtaatgttgtaatttccgcatggccctgagctcccttttcctcaactcagtgaggccaggatttgctctccaaaaggctttgctagtgtgttcaatgggacctgctgtggggagtcctaagacagacatctaattattctctctttttccccccctctctatgtgtatatttctaatggatctataagaacagcaacaagagagttctaacaattctagtgtgaagccaaatagtgatcttttagtgctttggggatggggtgggctggggtggatggatgggcaacagtgactttgattacccttgctgctctgcatttgccagtttattcttttgtttcttttatctgactgactctgtcaaacaagtgtcaaagttgtgtgttaaaaaatgtttaacaaaaaaaatgttgtaatgacacaaagccttatgaaaatatttatggagttcaataaaagaagt

SEQ ID NO: 324602 - protein, 1127 aa, Artificial Sequence
  derived and/or modified sequence
MKEEVKGIPVRVALRCRPLVPKEISEGCQMCLSFVPGEPQVVVGTDKSFTYDFVFDPSTEQEEVFNTAVAPLIKGVFKGYNATVLAYGQTGSGKTYSMGGAYTAEQENEPTVGVIPRVIQLLFKEIDKKSDFEFTLKVSYLEIYNEEILDLLCPSREKAQINIREDPKEGIKIVGLTEKTVLVALDTVSCLEQGNNSRTVASTAMNSQSSRSHAIFTISLEQRKKSDKNSSFRSKLHLVDLAGSERQKKTKAEGDRLKEGININRGLLCLGNVISALGDDKKGGFVPYRDSKLTRLLQDSLGGNSHTLMIACVSPADSNLEETLNTLRYADRARKIKNKPIVNIDPQTAELNHLKQQVQQLQVLLLQAHGGTLPGSITVEPSENLQSLMEKNQSLVEENEKLSRGLSEAAGQTAQMLERIILTEQANEKMNAKLEELRQHAACKLDLQKLVETLEDQELKENVEIICNLQQLITQLSDETVACMAAAIDTAVEQEAQVETSPETSRSSDAFTTQHALRQAQMSKELVELNKALALKEALARKMTQNDSQLQPIQYQYQDNIKELELEVINLQKEKEELVLELQTAKKDANQAKLSERRRKRLQELEGQIADLKKKLNEQSKLLKLKESTERTVSKLNQEIRMMKNQRVQLMRQMKEDAEKFRQWKQKKDKEVIQLKERDRKRQYELLKLERNFQKQSNVLRRKTEEAAAANKRLKDALQKQREVADKRKETQSRGMEGTAARVKNWLGNEIEVMVSTEEAKRHLNDLLEDRKILAQDVAQLKEKKESGENPPPKLRRRTFSLTEVRGQVSESEDSITKQIESLETEMEFRSAQIADLQQKLLDAESEDRPKQRWENIATILEAKCALKYLIGELVSSKIQVSKLESSLKQSKTSCADMQKMLFEERNHFAEIETELQAELVRMEQQHQEKVLYLLSQLQQSQMAEKQLEESVSEKEQQLLSTLKCQDEELEKMREVCEQNQQLLRENEIIKQKLTLLQVASRQKHLPKDTLLSPDSSFEYVPPKPKPSRVKEKFLEQSMDIEDLKYCSEHSVNEHEDGDGDDDEGDDEEWKPTKLVKVSRKNIQGVLLLTPVISALWEAEARGLLEARSSRPAWATWRDPVSTKPKN

SEQ ID NO: 324603 - protein, 1232 aa, Artificial Sequence
  derived and/or modified sequence
MKEEVKGIPVRVALRCRPLVPKEISEGCQMCLSFVPGEPQVVVGTDKSFTYDFVFDPSTEQEEVFNTAVAPLIKGVFKGYNATVLAYGQTGSGKTYSMGGAYTAEQENEPTVGVIPRVIQLLFKEIDKKSDFEFTLKVSYLEIYNEEILDLLCPSREKAQINIREDPKEGIKIVGLTEKTVLVALDTVSCLEQGNNSRTVASTAMNSQSSRSHAIFTISLEQRKKSDKNSSFRSKLHLVDLAGSERQKKTKAEGDRLKEGININRGLLCLGNVISALGDDKKGGFVPYRDSKLTRLLQDSLGGNSHTLMIACVSPADSNLEETLNTLRYADRARKIKNKPIVNIDPQTAELNHLKQQVQQLQVLLLQAHGGTLPGSITVEPSENLQSLMEKNQSLVEENEKLSRGLSEAAGQTAQMLERIILTEQANEKMNAKLEELRQHAACKLDLQKLVETLEDQELKENVEIICNLQQLITQLSDETVACMAAAIDTAVEQEAQVETSPETSRSSDAFTTQHALRQAQMSKELVELNKALALKEALARKMTQNDSQLQPIQYQYQDNIKELELEVINLQKEKEELVLELQTAKKDANQAKLSERRRKRLQELEGQIADLKKKLNEQSKLLKLKESTERTVSKLNQEIRMMKNQRVQLMRQMKEDAEKFRQWKQKKDKEVIQLKERDRKRQYELLKLERNFQKQSNVLRRKTEEAAAANKRLKDALQKQREVADKRKETQSRGMEGTAARVKNWLGNEIEVMVSTEEAKRHLNDLLEDRKILAQDVAQLKEKKESGENPPPKLRRRTFSLTEVRGQVSESEDSITKQIESLETEMEFRSAQIADLQQKLLDAESEDRPKQRWENIATILEAKCALKYLIGELVSSKIQVSKLESSLKQSKTSCADMQKMLFEERNHFAEIETELQAELVRMEQQHQEKVLYLLSQLQQSQMAEKQLEESVSEKEQQLLSTLKCQDEELEKMREVCEQNQQLLRENEIIKQKLTLLQVASRQKHLPKDTLLSPDSSFEYVPPKPKPSRVKEKFLEQSMDIEDLKYCSEHSVNEHEDGDGDDDEGDDEEWKPTKLVKVSRKNIQGCSCKGWCGNKQCGCRKQKSDCGVDCCCDPTKCRNRQQGKDSLGTVERTQDSEGSFKLEDPTEVTPGLSFFNPVCATPNSKILKEMCDVEQVLSKKTPPAPSPFDLPELKHVATEYQENKAPGKKKKRALASNTSFFSGCSPIEEEAH

SEQ ID NO: 324604 - protein, 534 aa, Artificial Sequence
  derived and/or modified sequence
MCSDVKREAAAANKRLKDALQKQREVADKRKETQSRGMEGTAARVKNWLGNEIEVMVSTEEAKRHLNDLLEDRKILAQDVAQLKEKKESGENPPPKLRRRTFSLTEVRGQVSESEDSITKQIESLETEMEFRSAQIADLQQKLLDAESEDRPKQRWENIATILEAKCALKYLIGELVSSKIQVSKLESSLKQSKTSCADMQKMLFEERNHFAEIETELQAELVRMEQQHQEKVLYLLSQLQQSQMAEKQLEESVSEKEQQLLSTLKCQDEELEKMREVCEQNQQLLRENEIIKQKLTLLQVASRQKHLPKDTLLSPDSSFEYVPPKPKPSRVKEKFLEQSMDIEDLKYCSEHSVNEHEDGDGDDDEGDDEEWKPTKLVKVSRKNIQGCSCKGWCGNKQCGCRKQKSDCGVDCCCDPTKCRNRQQGKDSLGTVERTQDSEGSFKLEDPTEVTPGLSFFNPVCATPNSKILKEMCDVEQVLSKKTPPAPSPFDLPELKHVATEYQENKAPGKKKKRALASNTSFFSGCSPIEEEAH

SEQ ID NO: 324605 - DNA, 3384 bp, Artificial Sequence
  derived and/or modified sequence
atgaaagaggaggtgaaggggatccctgtgcgcgtcgctctcagatgtagaccactagttccgaaagagatttcagagggatgccagatgtgcctgagtttcgtccccggggagccacaggtggttgtgggcacagataaatcttttacatacgatttcgtctttgaccccagtaccgagcaggaggaggtctttaacaccgccgtcgcccctctgattaaaggtgtcttcaaaggatataatgcaaccgtcctggcatacggccagactgggagcgggaagacttactctatgggcggcgcctacactgctgagcaggaaaacgaaccaacggtgggcgtcattccaagggtgatacaactcctgtttaaggaaatcgacaagaaaagtgattttgagtttactttgaaggtgagttacttagaaatctacaacgaagaaattctggacttactgtgtccatctcgagaaaaagcgcagattaacataagggaagatccaaaagagggaattaagatcgtaggcctgacggaaaaaacagttttggtggctttggataccgttagctgtctcgaacagggaaacaattcgcggacagtcgcctcaacagctatgaatagccaaagttcgagaagtcatgccatttttactataagtctcgagcaaaggaaaaagagtgataaaaatagttcttttcgctcaaaattgcacctggttgacctggccggctccgagcggcaaaagaaaactaaggccgaaggcgacagactcaaagaaggtattaatatcaataggggcctcttgtgcttgggcaatgtcatcagcgctttaggtgatgataaaaagggcggattcgtcccctaccgagacagtaagctgactcgcctgctgcaggactccctggggggaaacagccataccctcatgatagcgtgtgtatcaccagccgattccaacctggaagagacactcaataccctcaggtatgcggaccgggccaggaagatcaaaaacaagcctattgtgaacatcgacccgcagaccgccgagttaaatcatctgaagcagcaagtgcagcagttgcaagtcttactactgcaggcccacgggggcacccttccgggtagcatcacagtagaaccctctgagaacctccagagcctaatggagaagaaccagtcactggtggaggaaaatgagaaactcagtcggggcctgagcgaggccgcgggccagaccgctcaaatgcttgaaagaatcatcctgacagaacaggctaatgaaaaaatgaatgccaaactggaggaactgaggcagcacgccgcatgtaagctggacttgcagaagttagtggaaaccttggaggaccaggaactcaaagagaatgtcgagatcatctgtaacctacagcaactcatcacgcagctctccgacgaaactgtggcatgtatggctgccgccatcgacacggccgtggaacaggaggcacaggtggaaacctcaccggaaacctcccgctcgtctgacgcttttaccacgcagcacgcgctgcggcaggcgcaaatgagcaaagaacttgtggaactgaacaaggctctggcgctcaaagaagccctggccaggaaaatgactcagaacgattcccagcttcagccaatacagtatcagtatcaagacaatataaaggagctagagctcgaggttattaacctccagaaggagaaagaggagctggtgctggagttgcagactgctaaaaaggacgccaaccaagccaagttgtcggagaggaggcggaaaagacttcaagagttagagggccaaatcgcagaccttaagaaaaaactaaacgagcagagtaagctgctgaagctcaaagaatctacagagcgcacagtctctaaactgaaccaagaaattcgtatgatgaagaaccaaagagtgcagctgatgaggcagatgaaagaggatgccgagaagttccggcagtggaagcagaagaaggacaaggaggtcatacagctgaaggaaagagaccggaagcggcagtacgagcttctgaaactagaacgaaacttccaaaagcagtctaacgttttacgccgcaagacagaggaggcggctgccgcaaacaaacggctcaaagacgccctgcagaagcagagggaggttgccgataagcggaaagagacgcagtcacgggggatggagggcactgctgccagagtgaagaattggttggggaacgagattgaggttatggtttctacagaagaggctaagcgccaccttaacgacctcctcgaggaccggaaaatcttagcccaggatgtagcccaactcaaagaaaaaaaggagtccggcgaaaacccccctcctaagttgcggaggagaactttcagcttaactgaagtgcgcggccaggtgagtgaatcagaagattcgattaccaagcagatcgaatctttagaaacggagatggagttcagatccgctcaaattgcagatctgcagcagaaactgctcgatgcagagtcagaggatcggccgaaacagcgctgggagaacatcgcaacaattcttgaggccaaatgcgctttaaaatatctcattggagaactcgtgtcttccaagatccaggttagcaaattagaaagtagcttgaagcagagtaagaccagctgtgccgatatgcagaagatgctcttcgaagaaaggaatcacttcgctgaaattgagaccgagctgcaagcggagcttgtcaggatggaacagcaacaccaagagaaggtactgtacctgctgagccaactccagcagagtcagatggctgaaaagcaactggaggagtctgtgtccgaaaaagagcaacaactgctgtccaccttgaaatgtcaggacgaagagctggagaaaatgcgggaagtttgcgaacaaaaccaacagctactgcgagagaatgagataatcaagcagaagcttacgttgctacaagtggcatctcgccagaaacatctgccaaaggacacgctcctctcaccagactcgagcttcgaatacgtgccacccaaacccaagccatccagggtcaaagagaagttcctggaacaatcaatggatatcgaggacttgaaatactgttcagagcactctgtgaatgaacacgaagacggcgacggcgatgacgacgaaggagacgacgaagaatggaagcctactaagctggtgaaggtgtcccgcaaaaacatccagggcgtcctcctattaacacctgtgatcagtgctctctgggaggctgaggcaaggggactcctagaggcacgctctagccgtccggcctgggctacgtggcgggatcctgtgtctactaaaccaaaaaactag

SEQ ID NO: 324606 - DNA, 3699 bp, Artificial Sequence
  derived and/or modified sequence
atgaaagaggaagttaaagggatacctgttcgggtggccttgcggtgtcgacccctggtgccgaaggagataagcgaggggtgccagatgtgcctttcctttgtgcccggcgagccccaggtggtggtgggcaccgacaagtcatttacttacgattttgtgttcgacccttccactgagcaggaggaagtattcaatactgcagtggcgcctttgattaaaggcgtttttaaagggtataatgccacagtgctcgcttatgggcagacaggttccgggaagacatactctatgggtggcgcctatactgcagagcaggagaatgaacctacggtgggggtgatacctcgggtgattcagcttcttttcaaggagatcgataagaagtctgacttcgaattcaccctgaaagtgtcatacctggaaatatacaacgaggagattctggatctgctgtgtccctcgcgggagaaggcccagataaatattcgagaggaccccaaggaaggcatcaagattgtaggcctcacagagaagactgttctcgtggccttggatactgtctcctgtttggaacagggtaataactcccggaccgtcgccagtaccgccatgaattcccagagcagtcggtcgcatgcaatcttcaccatttcgctggaacagcgcaagaaatcagataagaattccagctttcgcagtaagttgcatcttgtcgacttggccggctccgagaggcaaaaaaagactaaggctgagggagatcgcctgaaagaaggtattaacattaataggggcctattgtgcttagggaatgtgatttcggcacttggtgatgataagaagggaggattcgttccttaccgagacagtaagctgacacggctgctccaagactccctgggtggaaatagccacacactgatgatagcgtgcgtgtctcccgccgatagcaacctggaagagaccctcaatactcttaggtatgccgatcgggctcgcaagataaagaacaagccaattgtgaatattgatccgcagaccgctgaattgaaccatctcaaacagcaggtccaacagctccaagtgctgctgctccaggcgcatgggggaaccctgccaggctcgattactgttgagcccagcgagaacctgcagtccctgatggagaagaatcaatcactcgtggaagaaaacgaaaaattgtcccgcggactgagcgaagctgccggtcagaccgcccagatgctcgagcggattattctcaccgaacaggccaatgagaaaatgaacgcgaagctggaggagttgcgtcagcacgcagcctgcaaacttgacctccaaaaactcgtggagaccctcgaagatcaggaattgaaggaaaacgtggagattatatgcaacctgcaacagttgattacacagcttagcgatgagactgtagcatgtatggccgctgccatcgatactgccgtcgagcaggaagcccaggtggagacctcacctgaaacaagcagatcctcggacgcattcactacgcagcatgccttgcgccaggcccaaatgagtaaagaattggtggagctgaacaaggctttagcactaaaggaggctctggccagaaaaatgacgcagaatgactcccagctacagccaatacaatatcaataccaggacaatattaaagagctcgagctggaagtgatcaatctgcagaaagagaaggaggaactagtccttgagctgcagaccgctaaaaaggacgctaatcaggctaaactgagcgaacgccgtcggaaacgcttacaggagctagaggggcagatcgccgacctgaaaaagaagcttaacgaacagtccaagctgctgaaacttaaagagtccacagagagaactgtgagcaaacttaatcaagagatccggatgatgaaaaaccagcgagtgcagttgatgcggcagatgaaagaggacgctgaaaaattccggcagtggaaacagaagaaagataaggaggtgatccagctgaaggaacgcgatagaaagcgtcagtatgagttgcttaaactggaacgcaattttcagaaacagtccaacgtcctccggaggaaaactgaagaggcagccgctgccaacaagaggctgaaggatgcccttcagaagcaacgagaggtggcggacaaaaggaaagaaacacaatcacgcgggatggaaggcaccgcggccagggtgaaaaattggcttgggaatgaaatcgaagtcatggtgtccacggaggaagctaagaggcatttgaatgatctactcgaggatcgtaaaattctcgcacaagatgtggcgcagctcaaggagaaaaaggagagcggcgaaaatcctccaccaaaactgcgtagaagaacgtttagcctgacagaggtcagaggacaagtgagcgaaagtgaagattcaataacaaaacagatagaaagccttgagacagagatggagtttcggtctgcccaaattgccgacttgcaacagaaactattggatgcggaatccgaggaccggcctaagcagagatgggagaatatcgccacaattctagaggccaaatgcgctcttaaatatcttatcggcgagctagtgagtagcaaaattcaagtgagcaagctagagtcctccttgaaacagagtaagacaagttgcgctgatatgcagaaaatgttgttcgaggagcggaaccatttcgcggaaatagagaccgaattgcaggcggagctcgtcaggatggaacagcagcaccaggagaaggtgctgtatctcctgagccagctgcagcagtctcagatggctgagaagcagctcgaggagagtgttagcgagaaagagcagcagcttctgtccactctcaaatgccaggatgaggagttggagaagatgcgggaagtctgcgagcagaaccagcaactgctgagggaaaatgagattatcaagcaaaagctcaccctgctgcaggttgcgtctcggcagaagcatcttccgaaggacaccctgctgtccccggattcaagcttcgagtatgtacctcctaagcctaaaccttcccgggtcaaggagaagttccttgaacaatcaatggatatcgaggacctaaagtactgtagcgaacacagtgtcaacgaacatgaggatggagatggcgacgatgacgaaggggacgacgaggaatggaaaccaaccaagctagtcaaggtctcaagaaagaacatacaggggtgcagctgtaagggatggtgcggcaacaagcagtgtggttgccggaaacagaaatctgactgcggtgtagattgttgttgcgacccgacaaaatgtagaaaccgtcagcaggggaaggactcgctaggtactgtggagaggacacaagattcggaaggctcattcaagctagaagatcctaccgaagttacgcctggtttgagctttttcaatccagtgtgtgcgactccaaactcaaagattcttaaggagatgtgcgatgtggaacaggtcctgagcaaaaagaccccaccagcaccatccccattcgatctgcctgagctcaaacacgtggcaacagagtatcaagagaacaaggcacctggtaaaaagaagaagagagcactggctagcaacacatcatttttctctggctgctctccaatcgaggaagaggcacactag

SEQ ID NO: 324607 - DNA, 1605 bp, Artificial Sequence
  derived and/or modified sequence
atgtgcagcgatgtgaaacgcgaggccgccgcagccaataaacgtctgaaagacgccctgcagaagcagcgcgaagttgccgataagaggaaagaaacccagtccagaggcatggaagggaccgctgctcgtgtaaagaactggctcggtaacgagattgaagtcatggtgagcaccgaggaggccaagaggcatctgaatgaccttctggaagataggaagatactggcccaggatgtcgcccagctgaaagaaaagaaggaaagcggagagaaccctcccccaaaactgcgacgcaggaccttctccttgacagaggtgagaggacaggtgtcagaatccgaagattcaatcactaagcaaattgagtcactagaaaccgaaatggaattcagaagcgcccagatagcggatctgcagcagaaactgctcgacgccgagtccgaagatagaccaaaacagcgatgggagaatatcgcgaccatcctcgaagccaagtgcgcattgaaatatcttattggcgagctcgtgagctctaagatccaagtgagcaagcttgaatccagtttgaagcagagcaagactagttgtgcggacatgcaaaaaatgctttttgaagagcgaaaccactttgcagaaattgagactgagctgcaggctgagttagtgaggatggagcagcaacatcaggagaaggtcctctatctgctatctcagctccaacaatcccagatggccgagaagcaactcgaagaaagcgtttctgaaaaggagcagcagttattgagcaccctcaagtgccaggacgaggaactggaaaagatgagagaagtgtgcgagcaaaaccaacaactgctccgagagaacgaaattatcaaacagaagctcaccctgctccaagtggccagccgtcagaaacatctccctaaagatacccttctcagccctgattcaagtttcgagtacgtgccccctaaacccaaaccgagtcgggtgaaggaaaaatttctggagcagtccatggacatcgaggacctgaaatattgcagcgagcacagcgtgaatgagcacgaagacggcgacggcgatgacgatgagggcgatgacgaggagtggaaaccgactaagcttgttaaggtcagccgcaagaatattcagggatgcagctgcaagggttggtgtggcaataagcagtgtggatgccgcaagcagaaatctgattgcggagtggattgctgttgcgaccctaccaagtgtaggaaccgtcagcagggaaaggactccttaggcaccgtggaacggacccaggactctgagggctcctttaagttggaagaccctaccgaggttacacccgggctgtcgttctttaatccagtgtgcgcaacccccaactcaaagatacttaaagagatgtgtgatgttgaacaggtgctatcaaaaaaaacaccaccagccccctccccttttgacctcccagaactgaagcatgtggccacagagtatcaggagaacaaagccccaggcaagaagaaaaaaagggctctggccagcaacactagttttttctcaggctgctcacccatcgaggaagaagcacactag

SEQ ID NO: 324608 - DNA, 3527 bp, Artificial Sequence
  derived and/or modified sequence
gggcagtccgcactgcaattggttggcgtctccgggacggatttgaaacttggcggttaaagctccggctgggacagggcggcgggaggcccagggagaacggggaagggacatttagtttgagacggtgctgagataggatcatgaaggaagaggtgaagggaattcccgtaagagtggcgctgcgttgtcgccctctggtccccaaagagattagcgagggctgccagatgtgcctttccttcgtgcccggagagcctcaggtggtggttggtacagataaatccttcacctacgattttgtatttgatccctctactgaacaggaagaagtcttcaatacagcagtagcgccactcataaaaggtgtatttaaaggatataatgcaacggtcctggcctatgggcagactggctctggaaaaacctattcaatgggaggtgcatatactgcagagcaagagaatgaaccaacagttggggttattcctagggtaatacaactgctcttcaaagaaattgataaaaagagtgactttgaatttactctgaaagtgtcttacttagagatttacaatgaagaaattttggatcttctatgcccatctcgtgagaaagctcaaataaatatacgagaggatcctaaggaaggcataaagattgtgggactcactgagaagactgttttggttgccttggatactgtttcctgtttggaacagggcaacaactctaggactgtggcctccacggctatgaactcccagtcgtcccgatctcatgccatctttacaatctccttagagcaaagaaagaaaagtgacaagaatagcagctttcgctccaagctgcatcttgtagacctcgctggatcagaaagacagaagaaaaccaaggctgaaggggatcgtctaaaagagggtattaatattaaccgaggcctcctatgcttgggaaatgtaatcagtgctcttggagatgacaaaaagggtggctttgtgccctacagagattccaagttgactcgactgcttcaagattctctaggaggtaatagccatactcttatgatagcctgtgtgagtcctgctgactccaatctagaggaaacattaaatacccttcgctatgctgacagagcaagaaaaatcaagaacaaacctattgttaatattgatccccagacagctgaacttaatcatctaaagcaacaggtacaacagctacaagtcttgttgctacaggcccatggaggtaccctgcctggatctataactgtggaaccatcagagaatctacaatccctgatggagaagaatcagtccctggtagaggagaatgaaaaattaagtcgtggtctgagcgaggcagctggtcagacagcccagatgttggagaggatcattttgacagagcaagcgaatgaaaaaatgaacgccaagctagaagagctcaggcagcatgcggcctgcaaactggatcttcaaaagctagtggagactttggaagaccaggaattgaaagaaaatgtagagataatttgtaacctgcagcaattgattacccagttatcggatgaaactgttgcttgcatggctgcagccattgatactgcggtggagcaagaagcccaagtagaaaccagtccagagacgagcaggtcttctgacgcttttaccactcagcatgctctccgtcaagcgcagatgtctaaggagctggttgagttgaataaagcgcttgcactgaaagaggccctggctaggaagatgactcagaatgacagccaactgcagcccattcagtaccaataccaggataacataaaagagctagaattagaagtcatcaatctgcaaaaggaaaaggaagaattggttcttgaacttcagacagcaaagaaggatgccaaccaagccaagttgagtgagcgccgccgcaaacgtctccaggagctggagggtcaaattgctgatctgaagaagaaactgaatgagcagtccaaacttctgaaactaaaggaatccacagagcgtactgtctccaaactgaaccaggagatacggatgatgaaaaaccagcgggtacagttaatgcgtcaaatgaaagaagatgctgagaagtttagacagtggaagcagaaaaaagacaaagaagtaatacagttaaaagaacgagaccgtaagaggcaatatgagctgctgaaacttgaaagaaacttccagaaacaatccaatgtgctcagacgtaaaacggaggaggcagcagctgccaacaagcgtctcaaggatgctctccagaaacaacgggaggttgcagataagcggaaagagactcagagccgtggaatggaaggcactgcagctcgagtgaagaattggcttggaaacgaaattgaggttatggtcagtactgaggaagccaaacgccatctgaatgacctccttgaagatagaaagatcctggctcaagatgtggctcaactcaaagaaaaaaaggaatctggggagaatccacctcctaaactccggaggcgtacattctcccttactgaagtgcgtggtcaagtttcggagtcagaagattctattacaaagcagattgaaagcctagagactgaaatggaattcaggagtgctcagattgctgacctacagcagaagctgctggatgcagaaagtgaagacagaccaaaacaacgctgggagaatattgccaccattctggaagccaagtgtgccctgaaatatttgattggagagctggtctcctccaaaatacaggtcagcaaacttgaaagcagcctgaaacagagcaagaccagctgtgctgacatgcagaagatgctgtttgaggaacgaaatcattttgccgagatagagacagagttacaagctgagctggtcagaatggagcaacagcaccaagagaaggtgctgtaccttctcagccagctgcagcaaagccaaatggcagagaagcagttagaggaatcagtcagtgaaaaggaacagcagctgctgagcacactgaagtgtcaggatgaagaacttgagaaaatgcgagaagtgtgtgagcaaaatcagcagcttctccgagagaatgaaatcatcaagcagaaactgaccctcctccaggtagccagcagacagaaacatcttcctaaggatacccttctatctccagactcttcttttgaatatgtcccacctaagccaaaaccttctcgtgttaaagaaaagttcctggagcaaagcatggacatcgaggatctaaaatattgttcagagcattctgtgaatgagcatgaggatggtgatggtgatgatgatgagggggatgacgaggaatggaagccaacaaaattagttaaggtgtccaggaagaacatccaaggggtgctgttgctcacgcctgtaatctcagcactttgggaggctgaggcaagaggattgcttgaggccaggagttcaagaccagcctgggcaacatggcgagaccctgtctctacaaaaccaaaaaattag

SEQ ID NO: 324609 - DNA, 4348 bp, Artificial Sequence
  derived and/or modified sequence
gctccggctgggacagggcggcgggaggcccagggagaacggggaagggacatttagtttgagacggtgctgagataggatcatgaaggaagaggtgaagggaattcccgtaagagtggcgctgcgttgtcgccctctggtccccaaagagattagcgagggctgccagatgtgcctttccttcgtgcccggagagcctcaggtggtggttggtacagataaatccttcacctacgattttgtatttgatccctctactgaacaggaagaagtcttcaatacagcagtagcgccactcataaaaggtgtatttaaaggatataatgcaacggtcctggcctatgggcagactggctctggaaaaacctattcaatgggaggtgcatatactgcagagcaagagaatgaaccaacagttggggttattcctagggtaatacaactgctcttcaaagaaattgataaaaagagtgactttgaatttactctgaaagtgtcttacttagagatttacaatgaagaaattttggatcttctatgcccatctcgtgagaaagctcaaataaatatacgagaggatcctaaggaaggcataaagattgtgggactcactgagaagactgttttggttgccttggatactgtttcctgtttggaacagggcaacaactctaggactgtggcctccacggctatgaactcccagtcgtcccgatctcatgccatctttacaatctccttagagcaaagaaagaaaagtgacaagaatagcagctttcgctccaagctgcatcttgtagacctcgctggatcagaaagacagaagaaaaccaaggctgaaggggatcgtctaaaagagggtattaatattaaccgaggcctcctatgcttgggaaatgtaatcagtgctcttggagatgacaaaaagggtggctttgtgccctacagagattccaagttgactcgactgcttcaagattctctaggaggtaatagccatactcttatgatagcctgtgtgagtcctgctgactccaatctagaggaaacattaaatacccttcgctatgctgacagagcaagaaaaatcaagaacaaacctattgttaatattgatccccagacagctgaacttaatcatctaaagcaacaggtacaacagctacaagtcttgttgctacaggcccatggaggtaccctgcctggatctataactgtggaaccatcagagaatctacaatccctgatggagaagaatcagtccctggtagaggagaatgaaaaattaagtcgtggtctgagcgaggcagctggtcagacagcccagatgttggagaggatcattttgacagagcaagcgaatgaaaaaatgaacgccaagctagaagagctcaggcagcatgcggcctgcaaactggatcttcaaaagctagtggagactttggaagaccaggaattgaaagaaaatgtagagataatttgtaacctgcagcaattgattacccagttatcggatgaaactgttgcttgcatggctgcagccattgatactgcggtggagcaagaagcccaagtagaaaccagtccagagacgagcaggtcttctgacgcttttaccactcagcatgctctccgtcaagcgcagatgtctaaggagctggttgagttgaataaagcgcttgcactgaaagaggccctggctaggaagatgactcagaatgacagccaactgcagcccattcagtaccaataccaggataacataaaagagctagaattagaagtcatcaatctgcaaaaggaaaaggaagaattggttcttgaacttcagacagcaaagaaggatgccaaccaagccaagttgagtgagcgccgccgcaaacgtctccaggagctggagggtcaaattgctgatctgaagaagaaactgaatgagcagtccaaacttctgaaactaaaggaatccacagagcgtactgtctccaaactgaaccaggagatacggatgatgaaaaaccagcgggtacagttaatgcgtcaaatgaaagaagatgctgagaagtttagacagtggaagcagaaaaaagacaaagaagtaatacagttaaaagaacgagaccgtaagaggcaatatgagctgctgaaacttgaaagaaacttccagaaacaatccaatgtgctcagacgtaaaacggaggaggcagcagctgccaacaagcgtctcaaggatgctctccagaaacaacgggaggttgcagataagcggaaagagactcagagccgtggaatggaaggcactgcagctcgagtgaagaattggcttggaaacgaaattgaggttatggtcagtactgaggaagccaaacgccatctgaatgacctccttgaagatagaaagatcctggctcaagatgtggctcaactcaaagaaaaaaaggaatctggggagaatccacctcctaaactccggaggcgtacattctcccttactgaagtgcgtggtcaagtttcggagtcagaagattctattacaaagcagattgaaagcctagagactgaaatggaattcaggagtgctcagattgctgacctacagcagaagctgctggatgcagaaagtgaagacagaccaaaacaacgctgggagaatattgccaccattctggaagccaagtgtgccctgaaatatttgattggagagctggtctcctccaaaatacaggtcagcaaacttgaaagcagcctgaaacagagcaagaccagctgtgctgacatgcagaagatgctgtttgaggaacgaaatcattttgccgagatagagacagagttacaagctgagctggtcagaatggagcaacagcaccaagagaaggtgctgtaccttctcagccagctgcagcaaagccaaatggcagagaagcagttagaggaatcagtcagtgaaaaggaacagcagctgctgagcacactgaagtgtcaggatgaagaacttgagaaaatgcgagaagtgtgtgagcaaaatcagcagcttctccgagagaatgaaatcatcaagcagaaactgaccctcctccaggtagccagcagacagaaacatcttcctaaggatacccttctatctccagactcttcttttgaatatgtcccacctaagccaaaaccttctcgtgttaaagaaaagttcctggagcaaagcatggacatcgaggatctaaaatattgttcagagcattctgtgaatgagcatgaggatggtgatggtgatgatgatgagggggatgacgaggaatggaagccaacaaaattagttaaggtgtccaggaagaacatccaagggtgttcctgcaagggctggtgtggaaacaagcagtgtgggtgcaggaagcaaaagtcagactgtggtgtggactgttgctgtgaccccacaaagtgtcggaaccgccagcaaggcaaggatagcttgggcactgttgaacggacccaggattccgaaggctccttcaaactggaggatcctaccgaggtgaccccaggattgagcttctttaatcccgtctgtgccacccccaatagcaagatcctgaaagagatgtgcgatgtggagcaggtgctgtcaaagaagactcccccagctccctccccttttgacctcccagagttgaaacatgtagcaacagaataccaagaaaacaaggctccagggaagaaaaagaaacgggctctggccagcaacaccagcttcttctctggctgctcccctatcgaagaagaggcccactgaagttggagtcatcatctctacccccagtctggcttgggagatgctttcaggttgcagccagaaggggttttttaaatgacttctctggatttcaggtttcttgctgttgaaaaaaggaacaaagcgttactgaaaagaaggtaacctttgttggatgtgggccttagcctccaggtccagactactactctatgttctccagaagggtgctaagtcacctactgaagagagaaccaactgactttcctattgactcatcaggaaccagtcctcagtctggtcaagttgtttcttatttgtgagcagttcaggctatctcctgatggggatgaggccaaggctttcttatcttttggttgtctctgcttaatggaggagcctggcctaggatggaggcctggcttagatctttcattccacctcaggaatgaggttgtgatctttcctgtcctgaccctctctgaattatgtttcaatagtactcttgattgtctgccatgttgttgaagcaaatgaattatttttaaatgttaagtaagtaaataaaccttagcccgtctactgttt

SEQ ID NO: 324610 - DNA, 2605 bp, Artificial Sequence
  derived and/or modified sequence
ccattcagtaccaataccaggataacataaaagagctagaattagaagtcatcaatctgcaaaaggaaaaggaagaattggttcttgaacttcagacagcaaagaaggatgccaaccaagccaagttgagtgagcgccgccgcaaacgtctccaggagctggagggtcaaattgctgatctgaagaagaaactgaatgagcagtccaaacttctgaaactaaaggaatccacagagcgtactgtctccaaactgaaccaggagatacggatgatgaaaaaccagcgggtacagttaatgcgtcaaatgaaagaagatgctgagaagtttagacagtggaagcagaaaaaagacaaagaagtaatacagttaaaagaacgagaccgtaagaggcaatatgagctgctgaaacttgaaagaaacttccagaaacaatccaatgtgctcagacgtaaaacgggaggcagcagctgccaacaagcgtctcaaggatgctctccagaaacaacgggaggttgcagataagcggaaagagactcagagccgtggaatggaaggcactgcagctcgagtgaagaattggcttggaaacgaaattgaggttatggtcagtactgaggaagccaaacgccatctgaatgacctccttgaagatagaaagatcctggctcaagatgtggctcaactcaaagaaaaaaaggaatctggggagaatccacctcctaaactccggaggcgtacattctcccttactgaagtgcgtggtcaagtttcggagtcagaagattctattacaaagcagattgaaagcctagagactgaaatggaattcaggagtgctcagattgctgacctacagcagaagctgctggatgcagaaagtgaagacagaccaaaacaacgctgggagaatattgccaccattctggaagccaagtgtgccctgaaatatttgattggagagctggtctcctccaaaatacaggtcagcaaacttgaaagcagcctgaaacagagcaagaccagctgtgctgacatgcagaagatgctgtttgaggaacgaaatcattttgccgagatagagacagagttacaagctgagctggtcagaatggagcaacagcaccaagagaaggtgctgtaccttctcagccagctgcagcaaagccaaatggcagagaagcagttagaggaatcagtcagtgaaaaggaacagcagctgctgagcacactgaagtgtcaggatgaagaacttgagaaaatgcgagaagtgtgtgagcaaaatcagcagcttctccgagagaatgaaatcatcaagcagaaactgaccctcctccaggtagccagcagacagaaacatcttcctaaggatacccttctatctccagactcttcttttgaatatgtcccacctaagccaaaaccttctcgtgttaaagaaaagttcctggagcaaagcatggacatcgaggatctaaaatattgttcagagcattctgtgaatgagcatgaggatggtgatggtgatgatgatgagggggatgacgaggaatggaagccaacaaaattagttaaggtgtccaggaagaacatccaagggtgttcctgcaagggctggtgtggaaacaagcagtgtgggtgcaggaagcaaaagtcagactgtggtgtggactgttgctgtgaccccacaaagtgtcggaaccgccagcaaggcaaggatagcttgggcactgttgaacggacccaggattccgaaggctccttcaaactggaggatcctaccgaggtgaccccaggattgagcttctttaatcccgtctgtgccacccccaatagcaagatcctgaaagagatgtgcgatgtggagcaggtgctgtcaaagaagactcccccagctccctccccttttgacctcccagagttgaaacatgtagcaacagaataccaagaaaacaaggctccagggaagaaaaagaaacgggctctggccagcaacaccagcttcttctctggctgctcccctatcgaagaagaggcccactgaagttggagtcatcatctctacccccagtctggcttgggagatgctttcaggttgcagccagaaggggttttttaaatgacttctctggatttcaggtttcttgctgttgaaaaaaggaacaaagcgttactgaaaagaaggtaacctttgttggatgtgggccttagcctccaggtccagactactactctatgttctccagaagggtgctaagtcacctactgaagagagaaccaactgactttcctattgactcatcaggaaccagtcctcagtctggtcaagttgtttcttatttgtgagcagttcaggctatctcctgatggggatgaggccaaggctttcttatcttttggttgtctctgcttaatggaggagcctggcctaggatggaggcctggcttagatctttcattccacctcaggaatgaggttgtgatctttcctgtcctgaccctctctgaattatgtttcaatagtactcttgattgtctgccatgttgttgaagcaaatgaattatttttaaatgttaagtaagtaaataaaccttagcccgtctac

SEQ ID NO: 324611 - DNA, 3384 bp, Artificial Sequence
  derived and/or modified sequence
atgaaggaggaggtgaagggcatccctgtgcgggtggccctgcgctgccggcccctggtgcccaaggagatcagcgagggctgccagatgtgcctgagctttgtgcctggagagccccaggtggtggtgggcacagacaagagcttcacctatgactttgtgtttgaccccagcacagagcaggaggaggtgttcaacacagctgtggcccccctcatcaagggcgtcttcaagggctacaatgccaccgtgctggcctacggccagacaggcagcggcaagacctacagcatgggcggggcctacacagctgagcaggagaatgagcccaccgtgggcgtcatccccagggtcatccagctgctcttcaaggagattgacaagaagagtgactttgagttcaccctgaaggtgtcctacctggagatctacaatgaggagatcctggacctgctgtgccccagccgggagaaggcccagatcaacatccgggaggaccccaaggagggcatcaagatcgtgggcctgacagagaagacagtgctggtggccctggacacagtgtcctgcctggagcagggcaacaacagcaggacagtggccagcacagccatgaacagccagagcagccgcagccacgccatcttcaccatcagcctggagcagaggaagaagagtgacaagaacagcagcttccgcagcaagctgcacctggtggacctggccggcagcgagcggcagaagaagaccaaggccgagggggaccggctgaaggagggcatcaacatcaacagaggcctgctgtgcctgggcaatgtcatcagcgccctgggagatgacaagaagggcggctttgtgccctacagagacagcaagctgacccggctgctgcaggacagcctgggcggcaacagccacaccctgatgattgcctgtgtgtccccagctgacagcaacctggaggagaccctgaacaccctgcgctatgctgaccgggccaggaagatcaagaacaagcccatcgtgaacatcgacccccagacagctgagctgaaccacctgaagcagcaggtgcagcagctgcaggtgctgctgctgcaggcccatggaggcaccctgcccggcagcatcaccgtggagcccagcgagaacctgcagagcctgatggagaagaaccagagcctggtggaggagaatgagaagctgagccggggcctgtctgaggccgccggccagacagcccagatgctggagcgcatcatcctgacagagcaggccaatgagaagatgaatgccaagctggaggagctgcggcagcacgccgcctgcaagctggacctgcagaagctggtggagaccctggaggaccaggagctgaaggaaaatgtggagatcatctgcaacctgcagcagctgatcacccagctgagtgatgagaccgtggcctgcatggccgccgccatcgacacagctgtggagcaggaggcccaggtggagaccagccctgagaccagccgcagcagtgatgccttcaccacccagcacgccctgcggcaggcccagatgagcaaggagctggtggagctgaacaaggccctggccctgaaggaggccctggccaggaagatgacccagaatgacagccagctgcagcccatccagtaccagtaccaggacaacatcaaggagctggagctggaggtgatcaacctgcagaaggagaaggaggagctggtgctggagctgcagacagccaagaaggatgccaaccaggccaagctgtctgaaagaagaaggaagaggctgcaggagctggagggccagattgctgacctgaagaagaagctgaatgagcagagcaagctgctgaagctgaaggagagcacagagaggacagtgtccaagctgaaccaggagatccgcatgatgaagaaccagagggtgcagctgatgaggcagatgaaggaggatgctgagaagttccggcagtggaagcagaagaaggacaaggaggtgatccagctgaaggagcgggacaggaagaggcagtatgagctgctgaagctggagaggaacttccagaagcagagcaatgtgctgcggaggaagacagaggaggccgctgctgccaacaagaggctgaaggatgccctgcagaagcagcgggaggtggccgacaagaggaaggagacccagagccggggcatggagggcacagctgcccgggtgaagaactggctgggcaatgaaattgaggtgatggtgtccacagaggaggccaagaggcacctgaatgacctgctggaggacaggaagatcctggcccaggatgtggcccagctgaaggagaagaaggagagcggagaaaatcctccacccaagctgcggcggaggaccttcagcctgacagaggtgcggggccaggtgtctgagagtgaagattccatcaccaagcagatcgagagcctggagacagagatggagttccgcagcgcccagattgctgacctgcagcagaagctgctggatgctgagagtgaagatcggcccaagcagcgctgggagaacatcgccaccatcctggaggccaagtgtgccctgaagtacctgattggagagctggtgagcagcaagatccaggtgtccaagctggagagcagcctgaagcagagcaagaccagctgtgccgacatgcagaagatgctgtttgaggagaggaaccactttgctgagattgaaacagagctgcaggccgagctggtgaggatggagcagcagcaccaggagaaggtgctgtacctgctgagccagctgcagcagagccagatggccgagaagcagctggaggagagcgtgtctgagaaggagcagcagctgctgagcaccctgaagtgccaggatgaggagctggagaagatgagggaggtgtgtgagcagaaccagcagctgctgcgggagaatgagatcatcaagcagaagctgaccctgctgcaggtggccagccggcagaagcacctgcccaaggacaccctgctgagcccagacagcagctttgaatatgtgccccccaagcccaagcccagccgggtgaaggagaagttcctggagcagagcatggacatcgaggacctgaagtactgcagcgagcacagcgtgaatgaacatgaagatggagatggagatgatgatgaaggagatgatgaggagtggaagcccaccaagctggtgaaggtgtccaggaagaacatccagggcgtgctgctgctgacccctgtgatcagcgccctgtgggaggccgaggcccggggcctgctggaggcccggagcagcaggcctgcctgggccacctggagggaccctgtgtccaccaagcccaagaactag

SEQ ID NO: 324612 - DNA, 3699 bp, Artificial Sequence
  derived and/or modified sequence
atgaaggaggaggtgaagggcatccctgtgcgggtggccctgcgctgccggcccctggtgcccaaggagatcagcgagggctgccagatgtgcctgagctttgtgcctggagagccccaggtggtggtgggcacagacaagagcttcacctatgactttgtgtttgaccccagcacagagcaggaggaggtgttcaacacagctgtggcccccctcatcaagggcgtcttcaagggctacaatgccaccgtgctggcctacggccagacaggcagcggcaagacctacagcatgggcggggcctacacagctgagcaggagaatgagcccaccgtgggcgtcatccccagggtcatccagctgctcttcaaggagattgacaagaagagtgactttgagttcaccctgaaggtgtcctacctggagatctacaatgaggagatcctggacctgctgtgccccagccgggagaaggcccagatcaacatccgggaggaccccaaggagggcatcaagatcgtgggcctgacagagaagacagtgctggtggccctggacacagtgtcctgcctggagcagggcaacaacagcaggacagtggccagcacagccatgaacagccagagcagccgcagccacgccatcttcaccatcagcctggagcagaggaagaagagtgacaagaacagcagcttccgcagcaagctgcacctggtggacctggccggcagcgagcggcagaagaagaccaaggccgagggggaccggctgaaggagggcatcaacatcaacagaggcctgctgtgcctgggcaatgtcatcagcgccctgggagatgacaagaagggcggctttgtgccctacagagacagcaagctgacccggctgctgcaggacagcctgggcggcaacagccacaccctgatgattgcctgtgtgtccccagctgacagcaacctggaggagaccctgaacaccctgcgctatgctgaccgggccaggaagatcaagaacaagcccatcgtgaacatcgacccccagacagctgagctgaaccacctgaagcagcaggtgcagcagctgcaggtgctgctgctgcaggcccatggaggcaccctgcccggcagcatcaccgtggagcccagcgagaacctgcagagcctgatggagaagaaccagagcctggtggaggagaatgagaagctgagccggggcctgtctgaggccgccggccagacagcccagatgctggagcgcatcatcctgacagagcaggccaatgagaagatgaatgccaagctggaggagctgcggcagcacgccgcctgcaagctggacctgcagaagctggtggagaccctggaggaccaggagctgaaggaaaatgtggagatcatctgcaacctgcagcagctgatcacccagctgagtgatgagaccgtggcctgcatggccgccgccatcgacacagctgtggagcaggaggcccaggtggagaccagccctgagaccagccgcagcagtgatgccttcaccacccagcacgccctgcggcaggcccagatgagcaaggagctggtggagctgaacaaggccctggccctgaaggaggccctggccaggaagatgacccagaatgacagccagctgcagcccatccagtaccagtaccaggacaacatcaaggagctggagctggaggtgatcaacctgcagaaggagaaggaggagctggtgctggagctgcagacagccaagaaggatgccaaccaggccaagctgtctgaaagaagaaggaagaggctgcaggagctggagggccagattgctgacctgaagaagaagctgaatgagcagagcaagctgctgaagctgaaggagagcacagagaggacagtgtccaagctgaaccaggagatccgcatgatgaagaaccagagggtgcagctgatgaggcagatgaaggaggatgctgagaagttccggcagtggaagcagaagaaggacaaggaggtgatccagctgaaggagcgggacaggaagaggcagtatgagctgctgaagctggagaggaacttccagaagcagagcaatgtgctgcggaggaagacagaggaggccgctgctgccaacaagaggctgaaggatgccctgcagaagcagcgggaggtggccgacaagaggaaggagacccagagccggggcatggagggcacagctgcccgggtgaagaactggctgggcaatgaaattgaggtgatggtgtccacagaggaggccaagaggcacctgaatgacctgctggaggacaggaagatcctggcccaggatgtggcccagctgaaggagaagaaggagagcggagaaaatcctccacccaagctgcggcggaggaccttcagcctgacagaggtgcggggccaggtgtctgagagtgaagattccatcaccaagcagatcgagagcctggagacagagatggagttccgcagcgcccagattgctgacctgcagcagaagctgctggatgctgagagtgaagatcggcccaagcagcgctgggagaacatcgccaccatcctggaggccaagtgtgccctgaagtacctgattggagagctggtgagcagcaagatccaggtgtccaagctggagagcagcctgaagcagagcaagaccagctgtgccgacatgcagaagatgctgtttgaggagaggaaccactttgctgagattgaaacagagctgcaggccgagctggtgaggatggagcagcagcaccaggagaaggtgctgtacctgctgagccagctgcagcagagccagatggccgagaagcagctggaggagagcgtgtctgagaaggagcagcagctgctgagcaccctgaagtgccaggatgaggagctggagaagatgagggaggtgtgtgagcagaaccagcagctgctgcgggagaatgagatcatcaagcagaagctgaccctgctgcaggtggccagccggcagaagcacctgcccaaggacaccctgctgagcccagacagcagctttgaatatgtgccccccaagcccaagcccagccgggtgaaggagaagttcctggagcagagcatggacatcgaggacctgaagtactgcagcgagcacagcgtgaatgaacatgaagatggagatggagatgatgatgaaggagatgatgaggagtggaagcccaccaagctggtgaaggtgtccaggaagaacatccagggctgcagctgcaagggctggtgtggcaacaagcagtgtggctgcaggaagcagaagagtgactgtggggtggactgctgctgtgaccccaccaagtgcaggaaccggcagcagggcaaggacagcctgggcaccgtggagaggacccaggacagcgagggcagcttcaagctggaggaccccacagaggtgaccccaggcctgtccttcttcaaccctgtgtgtgccacccccaacagcaagatcctgaaggagatgtgtgatgtggagcaggtgctgagcaagaagaccccaccagcccccagcccctttgacctgcctgagctgaagcacgtggccacagagtaccaggagaacaaggcccctgggaagaagaagaagagggccctggccagcaacaccagcttcttcagcggctgcagccccatcgaggaggaggcccactag

SEQ ID NO: 324613 - DNA, 1605 bp, Artificial Sequence
  derived and/or modified sequence
atgtgcagtgatgtgaagcgggaggccgctgctgccaacaagaggctgaaggatgccctgcagaagcagcgggaggtggccgacaagaggaaggagacccagagccggggcatggagggcacagctgcccgggtgaagaactggctgggcaatgaaattgaggtgatggtgtccacagaggaggccaagaggcacctgaatgacctgctggaggacaggaagatcctggcccaggatgtggcccagctgaaggagaagaaggagagcggagaaaatcctccacccaagctgcggcggaggaccttcagcctgacagaggtgcggggccaggtgtctgagagtgaagattccatcaccaagcagatcgagagcctggagacagagatggagttccgcagcgcccagattgctgacctgcagcagaagctgctggatgctgagagtgaagatcggcccaagcagcgctgggagaacatcgccaccatcctggaggccaagtgtgccctgaagtacctgattggagagctggtgagcagcaagatccaggtgtccaagctggagagcagcctgaagcagagcaagaccagctgtgccgacatgcagaagatgctgtttgaggagaggaaccactttgctgagattgaaacagagctgcaggccgagctggtgaggatggagcagcagcaccaggagaaggtgctgtacctgctgagccagctgcagcagagccagatggccgagaagcagctggaggagagcgtgtctgagaaggagcagcagctgctgagcaccctgaagtgccaggatgaggagctggagaagatgagggaggtgtgtgagcagaaccagcagctgctgcgggagaatgagatcatcaagcagaagctgaccctgctgcaggtggccagccggcagaagcacctgcccaaggacaccctgctgagcccagacagcagctttgaatatgtgccccccaagcccaagcccagccgggtgaaggagaagttcctggagcagagcatggacatcgaggacctgaagtactgcagcgagcacagcgtgaatgaacatgaagatggagatggagatgatgatgaaggagatgatgaggagtggaagcccaccaagctggtgaaggtgtccaggaagaacatccagggctgcagctgcaagggctggtgtggcaacaagcagtgtggctgcaggaagcagaagagtgactgtggggtggactgctgctgtgaccccaccaagtgcaggaaccggcagcagggcaaggacagcctgggcaccgtggagaggacccaggacagcgagggcagcttcaagctggaggaccccacagaggtgaccccaggcctgtccttcttcaaccctgtgtgtgccacccccaacagcaagatcctgaaggagatgtgtgatgtggagcaggtgctgagcaagaagaccccaccagcccccagcccctttgacctgcctgagctgaagcacgtggccacagagtaccaggagaacaaggcccctgggaagaagaagaagagggccctggccagcaacaccagcttcttcagcggctgcagccccatcgaggaggaggcccactag

SEQ ID NO: 324614 - DNA, 3384 bp, Artificial Sequence
  derived and/or modified sequence
atgaaggaggaggtgaagggcatccccgtgcgggtggccctgcggtgtcgccccctggtgcctaaagagatcagcgagggctgccagatgtgtctgagtttcgtaccgggcgaaccccaagttgttgtgggaactgacaaaagtttcacttacgacttcgtgttcgatcccagcacggaacaggaggaagtgtttaacactgctgtagcaccactgatcaaaggtgtctttaagggatacaatgcaaccgtactagcctatggacaaacaggctccgggaaaacttattcgatgggtggagcctataccgcagagcaggaaaacgagcccactgtcggagtgatcccccgggtcatccaactgctcttcaaagaaatcgacaagaaaagcgacttcgagtttacactcaaagtttcttatctggagatctataacgaagagattctcgacctgctctgcccgagcagagaaaaggcccaaattaacatccgggaggatccaaaagagggtatcaagattgtgggtttaacagaaaagaccgtgctggttgccctggataccgtgagttgcctcgagcaaggcaataactctcgaactgtggcctcgacagcaatgaactcacagtcctccagatctcacgccattttcacaatcagcctagagcagcgaaagaagtcagataagaattcatcatttaggtcaaaactccacctagtcgacctggccggatcagagaggcagaaaaaaaccaaggccgaaggtgatagactaaaagaaggcattaacataaatagaggactcctttgtctgggaaacgttatcagtgccctcggagatgataaaaaagggggatttgtgccctaccgggacagtaagctcaccaggctgctccaggacagcctagggggtaattcacatactctgatgatcgcatgcgtgtcacctgccgattctaaccttgaagagacattaaatactctcagatatgctgacagggcgagaaagataaagaacaagccaatcgtgaacattgaccctcagaccgctgaacttaatcacttgaaacagcaagtgcagcagctgcaagtactcctgcttcaagcacatggtggaactctgccaggatccattaccgtcgaaccatcagaaaatctgcaaagcttgatggaaaagaatcagtccttagtggaagaaaatgaaaaactgagccgcggactgtcagaggccgccggtcagacagctcagatgctggagcgcattattctgactgaacaggccaacgagaaaatgaacgccaaattggaagaactacgacaacatgctgcgtgtaaactggatctgcagaaacttgtggagacactggaggaccaggagttaaaagagaacgtggagatcatctgtaacttgcagcagttaatcacacagcttagcgacgaaacagttgcctgtatggctgccgccatagacacagctgtggagcaggaggcgcaggtggaaacatcaccggaaacaagtcgcagctctgatgctttcaccacacaacacgctttgaggcaggcacaaatgtcgaaggaacttgtggagctcaacaaggccctcgctctgaaagaggcactggcaagaaagatgacccaaaacgacagccagctgcagccgattcagtaccagtatcaggacaatatcaaggaactggagctcgaggtgatcaacctccaaaaggaaaaggaggaactcgtactggagctccagaccgctaaaaaagacgctaatcaggctaaactgagcgagaggaggaggaagcgtttgcaggaattagaggggcagatcgcagatcttaagaagaagttaaacgaacagtccaagctacttaaactgaaggaatctaccgagaggaccgtctccaagctgaaccaggaaattaggatgatgaagaatcaaagggtccagctgatgcgtcagatgaaggaagacgcagagaaatttcgccaatggaagcagaaaaaagataaggaggtcatccagcttaaagagagagaccggaaaaggcagtacgaattgctgaaactggaacggaatttccagaaacagtctaatgtcttacgcagaaaaaccgaggaggccgccgccgccaacaaacggctcaaagacgccttgcagaagcagagggaggtagccgacaaacgaaaggagacacagagccgagggatggaaggcactgctgcacgagtgaagaattggctgggcaatgaaattgaggtgatggtgtccaccgaggaggctaagcggcatcttaacgacctacttgaagaccgtaagatcctggctcaggacgtggctcaacttaaagagaagaaggagagcggggagaacccaccaccaaagctgagaaggcggacattcagtctcacagaggtgcgcggccaagtgtcagaatctgaagacagcatcactaagcaaatcgaatcgctcgaaactgagatggagtttcgatccgcccagatcgccgacctgcagcaaaagttactcgatgcagagtcagaggacaggcccaagcagcgatgggagaatatagccacgattctggaagccaagtgtgcgctgaagtatctgatcggggagttggtttctagcaagatacaggtctcaaagctcgagtccagtctgaaacagtcgaaaacaagttgtgccgatatgcaaaaaatgttgtttgaggaacggaaccattttgctgaaatagagactgagcttcaggcagaattggtaaggatggaacagcagcatcaggagaaggtcctgtatctgctgagccaactgcagcagagtcaaatggctgagaagcaactggaggagagcgtcagtgaaaaggagcagcagctcctgtccaccctgaaatgccaagacgaagagttggagaagatgcgtgaggtgtgtgagcaaaatcagcagttgctgagggagaacgaaatcatcaaacaaaaactcacgctgcttcaggtagcctctagacagaagcacctgccaaaggacacacttctgtccccagatagctcctttgagtatgtcccccccaaacccaaacccagtcgcgtgaaggagaaatttttggagcagagcatggacatagaagatctgaagtattgcagcgagcactcagtcaacgaacacgaagatggtgatggcgacgatgatgaaggagacgatgaagagtggaaacccacgaaactagtcaaagtgtctagaaagaacattcaaggggtcctgctcctaactcccgttatcagcgctctgtgggaagctgaggcaagaggcctgttggaggcgaggtcctcacgtcctgcctgggccacttggcgtgaccccgtgtctacaaaacccaaaaattag

SEQ ID NO: 324615 - DNA, 3699 bp, Artificial Sequence
  derived and/or modified sequence
atgaaggaggaggtgaagggcatccccgtgcgggtggccctgcggtgccgtccgctggtgcccaaggagattagcgagggctgccagatgtgcctgtcattcgtaccaggggaaccccaggtagtggttggaaccgacaaatcttttacttacgatttcgttttcgacccctctacggagcaagaagaggtgtttaacaccgctgtcgcccccctgataaaaggagtgtttaagggctacaatgccacagtgctcgcgtacggacaaacaggctccggcaagacatacagtatgggcggagcatatacggccgaacaggagaacgaaccaacggtgggcgtgatcccgcgagtgattcagctgctgttcaaagagatcgacaagaaatcagattttgaattcacccttaaagtgtcgtatctagagatttacaacgaagaaatcctggatctgctctgcccatcacgagagaaggcgcagatcaacattagagaggacccgaaggagggaatcaaaatcgtcggcctcacagagaaaacagtactggtggctctggacactgtgtcctgtttggagcaggggaacaattctaggacagttgccagcaccgccatgaactctcaatcttctcgaagccacgccatatttacgattagcctggagcagcgcaagaagagtgacaaaaattccagttttaggtccaagctgcacctggtcgacttggctgggtcagagcgacagaaaaagaccaaggccgaaggggaccgacttaaggaagggatcaacattaacaggggcctcctgtgtctgggaaacgttatcagtgctctgggggatgacaaaaagggcggtttcgtgccgtaccgcgacagcaaactaactagattgctgcaagatagcctgggggggaacagtcacactctcatgatcgcctgcgtcagtccagccgatagcaacctggaggagaccctaaacacccttcgatacgcagacagagctcgtaaaatcaagaacaagcctattgtcaacatcgatcctcaaactgcagagctaaatcacctgaaacagcaagtgcaacagctgcaggtgcttctcctgcaggcgcacggcgggaccttgccggggagcattactgtcgaaccaagcgaaaacctgcagagcctcatggaaaaaaaccaaagtttagtcgaggaaaacgaaaagttgtctcgcggtctaagcgaggccgctgggcagaccgcccagatgcttgaacgaataatcctcacagaacaggcaaacgagaagatgaacgcaaaattggaggagctacggcaacacgctgcttgcaaacttgacctgcaaaagctggtggagactctcgaggaccaagaactgaaggagaacgttgagatcatttgcaacctgcaacagttgattacccagctatccgacgagaccgtggcctgtatggccgccgcaattgatactgcggtggagcaggaagcacaagtcgaaaccagccccgagacctctcgctccagcgatgcgttcaccacacagcacgccttgagacaggcgcagatgtccaaagaactggtggaattaaataaggcacttgcactgaaggaggcactggcacggaaaatgacccagaacgactcccaattgcaacccatccagtatcagtaccaggacaacatcaaggagcttgaactggaagtaattaatctgcagaaagagaaagaggagcttgtgctcgaactccagacagctaagaaagatgctaatcaggcgaaactctctgaaaggcgccgtaagaggctgcaggagctggaaggacagattgccgacctaaagaagaagctgaatgaacagtcaaagctgctcaagctgaaagaatcgaccgagcggaccgtgagcaaactgaaccaggagattcgcatgatgaagaatcagagagtgcagctcatgcggcagatgaaagaggacgctgagaagtttcgccagtggaagcagaaaaaggacaaggaggtgatccaacttaaagaacgggacagaaaacggcagtatgagctcttgaaactggaaaggaattttcagaaacagagtaacgttctgaggaggaagaccgaagaagccgccgccgctaataagcggttaaaggatgccctgcagaagcagcgcgaggtggcagacaaacgcaaagagacacagagcaggggcatggagggcacggccgccagagtgaagaattggctgggcaatgagattgaggttatggtgtccaccgaggaagctaaaaggcatctcaatgatctgctggaagaccggaaaatactagcccaggatgtcgcacagctgaaagaaaaaaaagagtcaggggaaaatccaccaccgaagcttcggagaaggaccttttcacttacagaggtgcggggccaggtgagcgagagtgaggattctattactaagcagattgagtccctggaaacagagatggaattcagaagcgcccagatcgctgatctgcagcaaaagctgctggatgccgaaagcgaggaccgcccaaaacagaggtgggaaaacattgcgacaatattagaagcaaaatgtgcacttaaatacttgattggagagctggtgtcgagcaaaattcaggttagcaaactggagtcttccctgaagcagtccaaaacctcctgcgcagatatgcaaaagatgctgtttgaggaaagaaaccacttcgctgagatcgagactgaactgcaggccgagttggtgagaatggaacagcaacaccaggaaaaggtactttatctcctgtctcagctccaacagagccagatggcagagaagcagctcgaagagtccgtcagcgagaaggaacagcagcttctcagcacgcttaaatgtcaggacgaggagctcgaaaaaatgcgggaagtgtgtgagcagaatcagcagctgctgagagaaaacgagattatcaaacagaaattaacactgttacaggtagcctcacgccaaaagcacttgcccaaagacacactgctttccccagattcttcatttgagtatgtgccacccaagccaaagccttctcgcgtcaaggagaagtttctggaacagtccatggacattgaggatctgaaatactgtagcgaacactcagtcaacgagcatgaggacggagatggcgacgatgatgagggcgacgatgaggaatggaagcccactaaactcgtcaaagtctcaaggaagaacatccaggggtgttcttgcaaaggatggtgtggtaacaagcagtgcggttgccgtaaacagaaatcagactgcggcgttgactgctgttgtgaccccacaaagtgtcgtaaccgccagcaggggaaggactcactgggcacagtggagagaacccaggactccgaaggctcctttaaacttgaggatccaacggaagtgaccccaggtctgagtttcttcaaccccgtatgcgccactccaaacagtaaaatcctcaaagagatgtgtgatgtggaacaagtcttgtctaagaaaacacccccggcgccatccccatttgaccttcccgagctgaagcatgtcgcaactgaataccaggagaataaagctcccgggaagaaaaagaagcgcgcgctggcttcaaacacctcattcttctcaggctgtagcccgatcgaggaggaagctcattag

SEQ ID NO: 324616 - DNA, 1605 bp, Artificial Sequence
  derived and/or modified sequence
atgtgcagcgacgtgaagcgggaggccgccgccgccaacaagcggctgaaagacgcacttcagaaacaaagagaagtcgccgataagcgcaaagaaacgcaaagtagaggtatggaaggcaccgcagccagagtgaagaactggctgggcaatgaaatcgaagtgatggttagtacagaggaggcgaagcgccatctcaacgatctgctcgaagataggaagatcttggcccaagatgtcgcgcagttgaaggaaaagaaggaaagcggtgaaaaccctcccccaaagctgcgaagaaggaccttctcactcacggaggtgaggggccaggtgagtgagtccgaggactccatcaccaaacaaatcgagagtcttgaaaccgagatggagttccggagtgctcagatcgcagacctgcaacagaagctgttagacgctgagagcgaagataggcccaagcagagatgggaaaacattgctactatccttgaggcaaaatgtgccttgaaatatctcataggcgagttggtgtctagcaagatccaagttagcaagctagagagcagcctcaaacagtccaaaacttcgtgtgctgacatgcagaagatgctgttcgaggagcggaatcatttcgcagagatcgaaacggaactgcaggcagagctcgtaaggatggaacagcagcaccaggagaaggtattgtatctcctctcgcagttgcagcagtcgcagatggctgagaagcagcttgaagagtccgtgagtgaaaaagaacaacagctgctgagcaccctaaagtgccaggacgaggagcttgagaagatgcgagaagtgtgtgagcaaaaccagcagttgttgcgcgagaacgagattatcaaacaaaaactgacactgctgcaagtggcatccagacaaaaacacctgccaaaagataccctgttgtccccagacagtagcttcgagtatgtgcctccgaaacccaagcctagtcgggtgaaagagaaattcctagaacagtctatggacatcgaggacctcaagtactgtagcgaacacagcgtgaatgaacacgaagatggcgacggtgacgatgacgagggcgacgatgaagagtggaagcccacgaagctggtgaaggtcagcaggaagaatattcaagggtgtagctgcaagggctggtgcggtaataaacagtgcggatgccgcaaacagaaatctgactgcggcgtggattgttgttgcgatcctaccaagtgcagaaacaggcaacaaggcaaggacagtttaggaaccgtggaacggacccaggactccgagggatcttttaaactggaggatcccactgaggttactcccgggctgtctttctttaatccagtttgcgctacaccaaactcaaaaatcctgaaggaaatgtgcgatgttgaacaggttctcagcaagaaaacaccccccgcccctagccccttcgacctcccggagctgaaacacgttgccacagaataccaagaaaataaggccccagggaaaaagaagaagagggccctggcgtcaaacacttcgttcttctcaggctgtagccctattgaggaggaagctcactag

SEQ ID NO: 324617 - DNA, 3384 bp, Artificial Sequence
  derived and/or modified sequence
atgaaagaggaggtaaaaggcatccccgtgcgtgtggccttgcgctgtcggccactggtgcccaaagagattagcgaaggctgccagatgtgtctctcttttgtgcctggggagccgcaggtcgtagtcgggaccgataagtccttcacatacgattttgtgttcgacccctctactgagcaggaggaggtgttcaatacggctgtggccccactcataaaaggagttttcaaagggtataacgcaacagtgcttgcttacggccagacaggctcaggcaagacatacagcatggggggagcgtatacagctgagcaggaaaacgagcctactgttggagtgataccccgagtgatacagttgttattcaaagagattgataaaaagtcagattttgagtttactttgaaagtgtcatacttggaaatctacaacgaggagattctggacctgctgtgtcccagccgcgagaaagcgcaaatcaatatcagggaagaccctaaagaggggattaaaatcgtgggtctgacggagaagactgtcttagtcgcattggacactgtgtcctgtcttgagcagggaaataattctaggacagtagcgtctacagctatgaatagtcagtcatcccgcagccatgctattttcactatatcactggaacagcgtaagaagagcgacaagaacagctccttccggagcaaactacatctggtcgacctggcaggctctgaaaggcagaaaaagaccaaagccgagggtgatcggctgaaggaagggatcaatatcaaccgcggacttttatgcctgggcaacgtcataagcgccctgggcgacgataagaagggcggttttgtcccttatagagacagcaaattaacccggcttctccaggatagcttaggtgggaatagccatacattaatgatcgcctgtgtgagccctgcagatagcaatctagaggagaccctcaacacactacgttatgccgaccgggctcgaaaaataaagaacaaacctatagtgaacattgatccacagaccgccgaattgaaccacctcaaacagcaggttcagcagctgcaggtcctcctgctgcaggcgcatgggggaactctccctggtagcattaccgtggagccatccgagaacttgcagagcttgatggaaaagaatcagagtctcgtggaagagaacgagaaactgagccgcggtttaagcgaagccgctgggcagaccgcccagatgttggaaaggattatcctgaccgaacaggcaaatgagaagatgaatgcaaaacttgaggaacttagacagcacgctgcatgcaagctggacctgcagaagctggtggagactctggaagaccaagagctaaaggaaaacgttgaaattatctgtaacctccagcaactgatcacgcagttgagcgatgaaaccgtggcttgcatggccgctgcgatagatactgccgtggagcaggaggcccaggtcgagacctctcccgagacctccagatcgtccgatgccttcacgacgcagcatgctctaaggcaggcgcagatgagcaaggagctcgttgaactgaacaaggccctcgctttgaaggaggccttagcgcgaaaaatgactcaaaacgatagtcaactccaaccaatccagtatcagtaccaggacaacattaaggaattggagctggaggtgatcaatttgcagaaagagaaggaagaactggttctggagctgcagacagccaagaaggatgccaaccaggccaagctaagcgaaagaagacgcaaaagactccaggaattggaaggccaaattgcagacttgaaaaaaaagctgaatgaacaatcaaaactactcaaactcaaggagtccacggagcgtacagtttcaaagttaaaccaggagatcaggatgatgaaaaatcagagagtgcaattaatgcgacaaatgaaggaagacgctgaaaagtttaggcagtggaaacagaagaaagataaggaggtgatccaactcaaagaaagagacagaaagaggcagtacgagctcttgaagcttgagcgcaacttccagaaacagtccaacgtcctgagacgtaaaacagaggaggctgcggcagccaataaacggctgaaggatgccctccagaaacaacgcgaggtcgccgataagcgcaaggaaactcaatcgcgcggaatggagggcacggctgctcgagttaaaaactggttgggtaatgagattgaggtgatggtttcaacagaggaagccaagagacaccttaacgatctattagaagatcggaaaatactggctcaggacgtggcgcagttaaaggaaaaaaaagagtcgggggagaaccctcctcctaagctgagacgaaggacattctcccttacagaggtgagggggcaggtgtcagaaagcgaagatagtattaccaaacagatcgagtctttagaaaccgagatggaattcaggagcgctcagattgccgatctccagcaaaagttgttggacgcagaatccgaggaccgtccaaagcagcggtgggaaaacatcgcaaccatcctggaagcaaagtgtgccctgaagtatttaattggcgagctagtttcctctaagattcaggtttcgaaactggaaagctcactgaagcagtccaagacctcttgcgccgacatgcagaaaatgctcttcgaggagagaaaccactttgcagaaattgagacagaactgcaagctgaattggtgcgaatggagcagcagcaccaggagaaggtgctctatctcctctcacagttgcagcagtctcagatggcagagaagcagttggaggagtctgtgtcggaaaaagagcagcagcttctcagtacgttaaagtgccaggatgaagagttggaaaagatgcgagaggtgtgcgagcagaatcagcagctgctgagggagaacgaaatcatcaaacagaaactgaccttgctccaggttgcctctcgccagaaacatctgcccaaagacactttgctcagtcctgactccagctttgaatatgtacctcctaaaccaaaaccctctcgcgtcaaagagaaattcttggagcaatctatggatattgaagatctaaaatactgctctgagcattctgtaaacgagcatgaagacggcgatggtgatgacgatgaaggagacgatgaagagtggaaacctactaaactggtgaaggtgtcccgtaagaatatccaaggagtactgctcctgacacctgtcatttcagccttgtgggaggccgaagcacgaggtttgctcgaggcacggagcagccgacccgcatgggcaacatggagagatcctgtatcaaccaagcccaagaattag

SEQ ID NO: 324618 - DNA, 3699 bp, Artificial Sequence
  derived and/or modified sequence
atgaaggaagaagtgaagggaatccccgtacgcgtggcgctacggtgcagaccactggtgcctaaggagattagtgagggctgccaaatgtgcctgagcttcgtgcctggagagccccaggtggttgtagggaccgacaaatcctttacgtacgatttcgtgtttgatccaagtaccgagcaggaggaggtatttaataccgctgtggcaccgctgatcaagggcgtgtttaaaggctacaacgccactgtgctcgcctatggtcagaccggaagcgggaaaacttactcaatgggcggtgcctacaccgcagagcaggaaaacgaacctaccgtgggggtgatccccagagtgatccagttgcttttcaaagagatcgataagaagtcagacttcgagtttacgttgaaggtaagctatctggagatctataatgaggagattctggatctcctttgccccagccgagagaaagcccaaatcaacattcgagaagatccgaaagaagggatcaaaattgttgggctgactgagaaaaccgtgctggtggctttggacaccgtatcgtgcctcgaacagggcaataacagtcgaacggttgcttctactgccatgaattcccagtcatcaagaagccatgccatattcactatttccctggaacagagaaaaaaaagtgacaaaaattcttcattccggtctaaattgcacctcgtggacctcgcaggatccgagaggcaaaagaaaaccaaagccgagggagaccgactcaaagaagggattaatatcaatcggggattactgtgcctcgggaacgtgattagcgctctcggcgacgacaagaagggaggctttgtgccataccgggattccaaactgacaagattgctacaggattcattgggcggaaacagtcacaccctgatgatcgcttgcgtttctcccgcagactcaaacctggaagaaaccctgaatacactgagatacgctgatagagctcgtaagatcaagaataagcccattgtgaatattgacccacaaacagctgagctcaatcacctgaagcagcaggtgcagcagctgcaggtcctgctgctccaggcccacggaggcactttgccaggttctatcaccgtcgagccgagtgaaaacctgcaaagcttgatggagaaaaatcagagcttagtcgaggaaaacgagaagctctcccgaggactgagtgaagctgcaggtcagaccgctcagatgcttgaacgtatcattttaactgagcaagcgaacgagaagatgaatgccaagctcgaagagctgcgacagcatgccgcatgtaagctggatctgcaaaaattggtcgagactctcgaagaccaggagttgaaagagaatgtggagatcatctgtaacctccagcagttgatcactcagctgagcgacgaaaccgtagcttgtatggcagccgcaattgataccgcagtcgaacaagaggctcaggtggaaacctcgcctgagacctcccgctcttctgatgccttcacaactcagcacgccttaagacaggcccaaatgtccaaggagctcgtggagttgaataaggcactggccctcaaggaagcactcgcgagaaaaatgacacagaatgattcccagctgcaaccgatccagtatcagtaccaagacaatattaaggaactggaactggaggtgattaacctgcagaaagaaaaagaggaactagtcctggaactccaaactgcaaagaaggatgccaaccaggccaaacttagcgagcggcgtaggaagaggctccaggaactggaaggtcagatcgccgatttgaagaagaagcttaacgagcagtctaagcttctcaaactcaaggagtctacggagcgcacggtgtccaaacttaatcaggagatccgtatgatgaaaaaccaacgcgtccaattgatgcgccagatgaaagaagatgcggagaaatttcgtcagtggaagcaaaagaaggataaagaggtgattcaattgaaagaacgcgaccgcaagaggcagtacgagctgctaaaactggagcgaaactttcagaaacagagcaatgtgttaagaagaaagacagaagaggcagccgctgcaaacaagcgattgaaggatgctcttcagaagcagagggaggtggctgacaaaagaaaagagactcagtccagaggtatggagggcaccgctgccagggtgaaaaattggctgggcaacgagattgaggtcatggtatccaccgaggaagcaaaacgccacctcaacgatctgctggaagatcgaaagattttggcccaagatgtagcccagctaaaagagaaaaaggagtcgggggagaaccctccaccgaagctgagacggcgaacattctctctgaccgaagtaagggggcaggttagtgagagtgaggacagcattaccaagcagattgagagcctggagacagaaatggagttcaggagtgctcaaatcgccgacctgcagcagaagctgctggacgctgaaagcgaggaccggccaaagcagagatgggagaacattgcaaccatcctcgaggcaaagtgtgctcttaagtatttgataggggagttagtgtcatccaagattcaggtaagcaagctggaatcctctctcaagcaaagcaaaaccagctgtgccgacatgcagaagatgctgttcgaagagaggaatcactttgctgagattgaaaccgagcttcaggctgagctcgtccgaatggaacagcagcaccaggagaaggttctttatcttctttctcaattacaacaaagtcaaatggctgagaaacagcttgaagagtccgtttctgagaaagaacagcagttactatccacacttaaatgtcaggatgaagaactagaaaagatgagagaggtgtgcgagcaaaaccaacagctattgcgggaaaacgagatcatcaaacagaagctaacactgttacaagtggcttcccgacaaaaacatcttcccaaggacacgctcctgtcccccgattcgagttttgagtatgttccccctaagcctaagcccagcagggtcaaggagaaattccttgagcagtccatggacatagaggacctgaaatattgttcggaacactccgtcaacgagcatgaggacggggatggagacgatgacgaaggagatgatgaagaatggaagcccactaagttagttaaggttagccggaagaacatacagggttgttcatgtaagggatggtgcgggaacaaacagtgtggttgccggaaacagaagtccgattgtggtgtggactgctgttgcgacccaactaaatgtaggaaccggcagcagggtaaagattctctcggtactgtagagagaacccaggatagcgaaggctccttcaaactggaagacccgaccgaggtgaccccagggctgagcttctttaaccctgtctgcgctacccctaatagtaagatcctgaaggaaatgtgtgacgtggaacaggtcctgtcaaaaaaaacgccaccggctccaagcccattcgatcttccggaactgaagcacgtagccacggagtaccaggaaaataaggctccgggaaaaaaaaaaaagagagctctggcctcaaacacatcattcttcagcgggtgtagtcctatcgaagaagaagcgcattag

SEQ ID NO: 324619 - DNA, 1605 bp, Artificial Sequence
  derived and/or modified sequence
atgtgcagtgatgtaaagcgcgaggcggcagctgctaataagcggctcaaggacgcgctacaaaagcagagggaagtggccgataaacgcaaagaaactcaatcccgcggaatggaagggaccgctgccagagtcaagaactggctgggcaacgaaatagaggtcatggtatctacggaggaagcgaaaagacatctgaacgatttgctggaggacaggaaaatcttggcccaggatgtagcccagctcaaagagaaaaaagagagtggtgaaaacccgccacccaagctgcgccgaaggacattctctctgactgaagttcgcggacaggtatccgagagcgaagacagcattactaagcagatcgagtcattggagactgaaatggagtttagatctgctcagatcgcagatcttcaacagaagctgttggacgcagagtccgaagatcgaccaaaacagagatgggagaacatagccacaattctcgaagcaaaatgcgccctgaagtacctgattggcgagctcgtcagctccaaaatccaggtgagtaagctggaatcgagtctgaagcagagcaagacctcatgcgcagacatgcaaaaaatgcttttcgaagagagaaatcattttgcagaaatagaaaccgaattgcaagccgagctggtgcggatggagcaacagcaccaggagaaggttctgtacttactttcccagcttcaacagtcacagatggccgaaaagcagctagaagagtccgtatccgagaaggaacagcagctcttgagcacacttaaatgtcaggacgaagagctagagaaaatgagggaggtctgcgagcagaatcagcagctactgagggagaacgagataatcaagcagaaactgactcttctgcaggtggcatcccgccaaaaacatctgccgaaagacacactgctgtctcccgattcaagctttgagtacgtgccccctaaaccgaaaccatcacgagtgaaggagaagtttctggagcaatccatggacatcgaggacctgaaatattgttctgagcactccgtgaatgaacacgaagatggcgatggcgacgacgacgaaggagatgatgaggaatggaagcctactaaactcgtcaaagtctctcggaagaacatccagggctgctcctgtaaaggatggtgcgggaataaacagtgtggttgccgaaaacagaaatcagactgtggcgtggactgttgttgtgatccgactaagtgccggaaccggcaacaggggaaagactcgctcgggactgtcgagaggacccaagattcggagggctctttcaagctcgaagatccaactgaagtcactcccggtctgtcattttttaaccctgtgtgtgcaacacccaactctaaaattcttaaagaaatgtgcgacgtggagcaagtgttgtcaaagaagactcccccagccccttctccctttgacctccctgaacttaaacacgtggccactgagtatcaagagaataaagctcccggaaaaaagaagaaaagggcactcgcgtccaacacctccttcttctctggctgctcccccatagaggaggaagctcactag

SEQ ID NO: 324620 - DNA, 3384 bp, Artificial Sequence
  derived and/or modified sequence
atgaaggaggaggtgaagggcatccccgtgagagtggccctgagatgcagacccctggtgcccaaggagatcagcgagggctgccagatgtgcctgagcttcgtgcccggcgagccccaggtggtggtgggcaccgacaagagcttcacctacgacttcgtgttcgaccccagcaccgagcaggaggaggtgttcaacaccgccgtggcccccctgatcaagggcgtgttcaagggctacaacgccaccgtgctggcctacggccagaccggcagcggcaagacctacagcatgggcggcgcctacaccgccgagcaggagaacgagcccaccgtgggcgtgatccccagagtgatccagctgctgttcaaggagatcgacaagaagagcgacttcgagttcaccctgaaggtgagctacctggagatctacaacgaggagatcctggacctgctgtgccccagcagagagaaggcccagatcaacatcagagaggaccccaaggagggcatcaagatcgtgggcctgaccgagaagaccgtgctggtggccctggacaccgtgagctgcctggagcagggcaacaacagcagaaccgtggccagcaccgccatgaacagccagagcagcagaagccacgccatcttcaccatcagcctggagcagagaaagaagagcgacaagaacagcagcttcagaagcaagctgcacctggtggacctggccggcagcgagagacagaagaagaccaaggccgagggcgacagactgaaggagggcatcaacatcaacagaggcctgctgtgcctgggcaacgtgatcagcgccctgggcgacgacaagaagggcggcttcgtgccctacagagacagcaagctgaccagactgctgcaggacagcctgggcggcaacagccacaccctgatgatcgcctgcgtgagccccgccgacagcaacctggaggagaccctgaacaccctgagatacgccgacagagccagaaagatcaagaacaagcccatcgtgaacatcgacccccagaccgccgagctgaaccacctgaagcagcaggtgcagcagctgcaggtgctgctgctgcaggcccacggcggcaccctgcccggcagcatcaccgtggagcccagcgagaacctgcagagcctgatggagaagaaccagagcctggtggaggagaacgagaagctgagcagaggcctgagcgaggccgccggccagaccgcccagatgctggagagaatcatcctgaccgagcaggccaacgagaagatgaacgccaagctggaggagctgagacagcacgccgcctgcaagctggacctgcagaagctggtggagaccctggaggaccaggagctgaaggagaacgtggagatcatctgcaacctgcagcagctgatcacccagctgagcgacgagaccgtggcctgcatggccgccgccatcgacaccgccgtggagcaggaggcccaggtggagaccagccccgagaccagcagaagcagcgacgccttcaccacccagcacgccctgagacaggcccagatgagcaaggagctggtggagctgaacaaggccctggccctgaaggaggccctggccagaaagatgacccagaacgacagccagctgcagcccatccagtaccagtaccaggacaacatcaaggagctggagctggaggtgatcaacctgcagaaggagaaggaggagctggtgctggagctgcagaccgccaagaaggacgccaaccaggccaagctgagcgagagaagaagaaagagactgcaggagctggagggccagatcgccgacctgaagaagaagctgaacgagcagagcaagctgctgaagctgaaggagagcaccgagagaaccgtgagcaagctgaaccaggagatcagaatgatgaagaaccagagagtgcagctgatgagacagatgaaggaggacgccgagaagttcagacagtggaagcagaagaaggacaaggaggtgatccagctgaaggagagagacagaaagagacagtacgagctgctgaagctggagagaaacttccagaagcagagcaacgtgctgagaagaaagaccgaggaggccgccgccgccaacaagagactgaaggacgccctgcagaagcagagagaggtggccgacaagagaaaggagacccagagcagaggcatggagggcaccgccgccagagtgaagaactggctgggcaacgagatcgaggtgatggtgagcaccgaggaggccaagagacacctgaacgacctgctggaggacagaaagatcctggcccaggacgtggcccagctgaaggagaagaaggagagcggcgagaaccccccccccaagctgagaagaagaaccttcagcctgaccgaggtgagaggccaggtgagcgagagcgaggacagcatcaccaagcagatcgagagcctggagaccgagatggagttcagaagcgcccagatcgccgacctgcagcagaagctgctggacgccgagagcgaggacagacccaagcagagatgggagaacatcgccaccatcctggaggccaagtgcgccctgaagtacctgatcggcgagctggtgagcagcaagatccaggtgagcaagctggagagcagcctgaagcagagcaagaccagctgcgccgacatgcagaagatgctgttcgaggagagaaaccacttcgccgagatcgagaccgagctgcaggccgagctggtgagaatggagcagcagcaccaggagaaggtgctgtacctgctgagccagctgcagcagagccagatggccgagaagcagctggaggagagcgtgagcgagaaggagcagcagctgctgagcaccctgaagtgccaggacgaggagctggagaagatgagagaggtgtgcgagcagaaccagcagctgctgagagagaacgagatcatcaagcagaagctgaccctgctgcaggtggccagcagacagaagcacctgcccaaggacaccctgctgagccccgacagcagcttcgagtacgtgccccccaagcccaagcccagcagagtgaaggagaagttcctggagcagagcatggacatcgaggacctgaagtactgcagcgagcacagcgtgaacgagcacgaggacggcgacggcgacgacgacgagggcgacgacgaggagtggaagcccaccaagctggtgaaggtgagcagaaagaacatccagggcgtgctgctgctgacccccgtgatcagcgccctgtgggaggccgaggccagaggcctgctggaggccagaagcagcagacccgcctgggccacctggagagaccccgtgagcaccaagcccaagaactag

SEQ ID NO: 324621 - DNA, 3699 bp, Artificial Sequence
  derived and/or modified sequence
atgaaggaggaggtgaagggcatccccgtgagagtggccctgagatgcagacccctggtgcccaaggagatcagcgagggctgccagatgtgcctgagcttcgtgcccggcgagccccaggtggtggtgggcaccgacaagagcttcacctacgacttcgtgttcgaccccagcaccgagcaggaggaggtgttcaacaccgccgtggcccccctgatcaagggcgtgttcaagggctacaacgccaccgtgctggcctacggccagaccggcagcggcaagacctacagcatgggcggcgcctacaccgccgagcaggagaacgagcccaccgtgggcgtgatccccagagtgatccagctgctgttcaaggagatcgacaagaagagcgacttcgagttcaccctgaaggtgagctacctggagatctacaacgaggagatcctggacctgctgtgccccagcagagagaaggcccagatcaacatcagagaggaccccaaggagggcatcaagatcgtgggcctgaccgagaagaccgtgctggtggccctggacaccgtgagctgcctggagcagggcaacaacagcagaaccgtggccagcaccgccatgaacagccagagcagcagaagccacgccatcttcaccatcagcctggagcagagaaagaagagcgacaagaacagcagcttcagaagcaagctgcacctggtggacctggccggcagcgagagacagaagaagaccaaggccgagggcgacagactgaaggagggcatcaacatcaacagaggcctgctgtgcctgggcaacgtgatcagcgccctgggcgacgacaagaagggcggcttcgtgccctacagagacagcaagctgaccagactgctgcaggacagcctgggcggcaacagccacaccctgatgatcgcctgcgtgagccccgccgacagcaacctggaggagaccctgaacaccctgagatacgccgacagagccagaaagatcaagaacaagcccatcgtgaacatcgacccccagaccgccgagctgaaccacctgaagcagcaggtgcagcagctgcaggtgctgctgctgcaggcccacggcggcaccctgcccggcagcatcaccgtggagcccagcgagaacctgcagagcctgatggagaagaaccagagcctggtggaggagaacgagaagctgagcagaggcctgagcgaggccgccggccagaccgcccagatgctggagagaatcatcctgaccgagcaggccaacgagaagatgaacgccaagctggaggagctgagacagcacgccgcctgcaagctggacctgcagaagctggtggagaccctggaggaccaggagctgaaggagaacgtggagatcatctgcaacctgcagcagctgatcacccagctgagcgacgagaccgtggcctgcatggccgccgccatcgacaccgccgtggagcaggaggcccaggtggagaccagccccgagaccagcagaagcagcgacgccttcaccacccagcacgccctgagacaggcccagatgagcaaggagctggtggagctgaacaaggccctggccctgaaggaggccctggccagaaagatgacccagaacgacagccagctgcagcccatccagtaccagtaccaggacaacatcaaggagctggagctggaggtgatcaacctgcagaaggagaaggaggagctggtgctggagctgcagaccgccaagaaggacgccaaccaggccaagctgagcgagagaagaagaaagagactgcaggagctggagggccagatcgccgacctgaagaagaagctgaacgagcagagcaagctgctgaagctgaaggagagcaccgagagaaccgtgagcaagctgaaccaggagatcagaatgatgaagaaccagagagtgcagctgatgagacagatgaaggaggacgccgagaagttcagacagtggaagcagaagaaggacaaggaggtgatccagctgaaggagagagacagaaagagacagtacgagctgctgaagctggagagaaacttccagaagcagagcaacgtgctgagaagaaagaccgaggaggccgccgccgccaacaagagactgaaggacgccctgcagaagcagagagaggtggccgacaagagaaaggagacccagagcagaggcatggagggcaccgccgccagagtgaagaactggctgggcaacgagatcgaggtgatggtgagcaccgaggaggccaagagacacctgaacgacctgctggaggacagaaagatcctggcccaggacgtggcccagctgaaggagaagaaggagagcggcgagaaccccccccccaagctgagaagaagaaccttcagcctgaccgaggtgagaggccaggtgagcgagagcgaggacagcatcaccaagcagatcgagagcctggagaccgagatggagttcagaagcgcccagatcgccgacctgcagcagaagctgctggacgccgagagcgaggacagacccaagcagagatgggagaacatcgccaccatcctggaggccaagtgcgccctgaagtacctgatcggcgagctggtgagcagcaagatccaggtgagcaagctggagagcagcctgaagcagagcaagaccagctgcgccgacatgcagaagatgctgttcgaggagagaaaccacttcgccgagatcgagaccgagctgcaggccgagctggtgagaatggagcagcagcaccaggagaaggtgctgtacctgctgagccagctgcagcagagccagatggccgagaagcagctggaggagagcgtgagcgagaaggagcagcagctgctgagcaccctgaagtgccaggacgaggagctggagaagatgagagaggtgtgcgagcagaaccagcagctgctgagagagaacgagatcatcaagcagaagctgaccctgctgcaggtggccagcagacagaagcacctgcccaaggacaccctgctgagccccgacagcagcttcgagtacgtgccccccaagcccaagcccagcagagtgaaggagaagttcctggagcagagcatggacatcgaggacctgaagtactgcagcgagcacagcgtgaacgagcacgaggacggcgacggcgacgacgacgagggcgacgacgaggagtggaagcccaccaagctggtgaaggtgagcagaaagaacatccagggctgcagctgcaagggctggtgcggcaacaagcagtgcggctgcagaaagcagaagagcgactgcggcgtggactgctgctgcgaccccaccaagtgcagaaacagacagcagggcaaggacagcctgggcaccgtggagagaacccaggacagcgagggcagcttcaagctggaggaccccaccgaggtgacccccggcctgagcttcttcaaccccgtgtgcgccacccccaacagcaagatcctgaaggagatgtgcgacgtggagcaggtgctgagcaagaagaccccccccgcccccagccccttcgacctgcccgagctgaagcacgtggccaccgagtaccaggagaacaaggcccccggcaagaagaagaagagagccctggccagcaacaccagcttcttcagcggctgcagccccatcgaggaggaggcccactag

SEQ ID NO: 324622 - DNA, 1605 bp, Artificial Sequence
  derived and/or modified sequence
atgtgcagcgacgtgaagagagaggccgccgccgccaacaagagactgaaggacgccctgcagaagcagagagaggtggccgacaagagaaaggagacccagagcagaggcatggagggcaccgccgccagagtgaagaactggctgggcaacgagatcgaggtgatggtgagcaccgaggaggccaagagacacctgaacgacctgctggaggacagaaagatcctggcccaggacgtggcccagctgaaggagaagaaggagagcggcgagaaccccccccccaagctgagaagaagaaccttcagcctgaccgaggtgagaggccaggtgagcgagagcgaggacagcatcaccaagcagatcgagagcctggagaccgagatggagttcagaagcgcccagatcgccgacctgcagcagaagctgctggacgccgagagcgaggacagacccaagcagagatgggagaacatcgccaccatcctggaggccaagtgcgccctgaagtacctgatcggcgagctggtgagcagcaagatccaggtgagcaagctggagagcagcctgaagcagagcaagaccagctgcgccgacatgcagaagatgctgttcgaggagagaaaccacttcgccgagatcgagaccgagctgcaggccgagctggtgagaatggagcagcagcaccaggagaaggtgctgtacctgctgagccagctgcagcagagccagatggccgagaagcagctggaggagagcgtgagcgagaaggagcagcagctgctgagcaccctgaagtgccaggacgaggagctggagaagatgagagaggtgtgcgagcagaaccagcagctgctgagagagaacgagatcatcaagcagaagctgaccctgctgcaggtggccagcagacagaagcacctgcccaaggacaccctgctgagccccgacagcagcttcgagtacgtgccccccaagcccaagcccagcagagtgaaggagaagttcctggagcagagcatggacatcgaggacctgaagtactgcagcgagcacagcgtgaacgagcacgaggacggcgacggcgacgacgacgagggcgacgacgaggagtggaagcccaccaagctggtgaaggtgagcagaaagaacatccagggctgcagctgcaagggctggtgcggcaacaagcagtgcggctgcagaaagcagaagagcgactgcggcgtggactgctgctgcgaccccaccaagtgcagaaacagacagcagggcaaggacagcctgggcaccgtggagagaacccaggacagcgagggcagcttcaagctggaggaccccaccgaggtgacccccggcctgagcttcttcaaccccgtgtgcgccacccccaacagcaagatcctgaaggagatgtgcgacgtggagcaggtgctgagcaagaagaccccccccgcccccagccccttcgacctgcccgagctgaagcacgtggccaccgagtaccaggagaacaaggcccccggcaagaagaagaagagagccctggccagcaacaccagcttcttcagcggctgcagccccatcgaggaggaggcccactag

SEQ ID NO: 324623 - DNA, 216 bp, Artificial Sequence
  derived and/or modified sequence
atgaagatcgtgcacgtgaatgtgatgggcgtgggcggctggggcgctgtgttcctggacatgtggcacgtgacccaggagagcaagaggcccatcatcagcaagatgcctgcctggatcttcccctgccaccccctggatgagcagacctaccacatggccctgaatgctgccaccttccccaagaatgccacctggattggccccctgtggtag

SEQ ID NO: 324624 - DNA, 876 bp, Artificial Sequence
  derived and/or modified sequence
atgagggataacaaggaatacgacgcgtatctttcttatacaaaagtcgaccaggacaccctggactgcgataaccccgaagaagaacagtttgccctggaagtcctgcccgacgttctcgaaaaacactatggatataagttattcatcccagaacgggatctgatcccatctggcacttacatggaagacctcacccgttacgttgaacagtctaggcggcttatcatagtgttgacacccgattatatcctccgcagaggatggtccattttcgagctggagtcaaggctgcataacatgctggtttcaggcgaaataaaagttatcctgatcgaatgcactgagttgaaaggcaaggtaaattgtcaggaagttgagtctctcaaaagatccatcaaactcctaagtttgattaagtggaagggctcgaagtccagtaagctgaacagcaagttctggaaacatctggtctacgagatgcccatcaaaaaaaaggagatgttgcctaggtgccacgtgcttgatagtgccgagcaggggctgttcggcgaactccagcctatccctagtatcgctatgaccagcacatctgccacacttgttagcagtcaagcggatttacccgagttccacccaagtgacagcatgcagatccgccactgctgcagggggtataaacatgaaattcctgctactaccttgcctgttccgtcactgggcaatcatcacacctactgtaatcttcctctaacacttctgaacggacaattgcctctgaataatactcttaaggatactcaggagtttcacaggaactcctctttgctacccctgagttccaaggaattgtcctttacgtccgacatttggtag

SEQ ID NO: 324625 - DNA, 1561 bp, Artificial Sequence
  derived and/or modified sequence
gaggttttcttggctgtctacataaggctgaagtgcattatttaaactgtagcatccgtgtcactgctggctcactagctggtatcctagagcttttgggacatctgacatggtggctttgagagctgtcttcctgctctggccagccaccataagctcttcacctttagttcatcttaaagggacacgaatgaaaccagaagcattcattttttcaacgaatggtgtgcttctagaatgcgagacaacaaggaatatgatgcctatctctcttacacaaaagtggaccaagatactttagactgtgacaatcctgaagaagagcagtttgctcttgaagtactgccagatgtcctggaaaaacactatggatataaactcttcatcccagaaagagacctgattccaagtggaacatacatggaagatctcacaagatatgttgaacaaagcagaagacttattatcgtgctaactccagactatattctcagacggggatggagtattttcgaactggaaagcagactccataacatgctagtcagtggagaaatcaaagtgattttgattgagtgtacagaattaaaagggaaagtgaattgccaggaagtggaatcactaaagcgtagcatcaaacttctgtccctgatcaagtggaagggatccaaaagcagcaaattaaattctaagttttggaagcacttagtatatgaaatgcccatcaagaaaaaagaaatgctacctcggtgccatgttctggactccgcagaacaaggactttttggagaactccagcctataccctctattgccatgaccagtacttcagccactctggtgtcatctcaggctgatctccctgaattccacccttcagattcaatgcaaatcaggcactgttgcagaggttataaacatgagataccagccacgaccttgccagtaccttccttaggcaaccaccatacttattgtaacctgcctctgacgctactcaacggacagctaccccttaataacaccctgaaagatacccaggaatttcacaggaacagttctttgctgcctttatcctccaaagagcttagctttaccagtgatatttggtagtgaaaaatctgaattcctctgaacagctagataagcatagagaatttctgttataccaagcataaagtacacctaataacgttgtgttaaaaaagtgtttgaagaaaaaggtacaaaaatggcttttatacttaaatatttttgtttacatttccagaatagtggggggaaagaaggacctgcttttgtagtatggcaccttgttccaatgtacagttttgatttcttcctgaaaacaaaaattttaaaatcctgttgtcttagagtagcttttatgatagcacatggactgcatgcttagtaggtgagctgtcttgcccatatttaaaaagatttcagtattcacatggtatttgaaataaagaaaatttaaagactttaattgaatttgaaaattctgaaccaagtttaagggaaaaaatgacttctatagagttctgaaaactca

SEQ ID NO: 324626 - DNA, 876 bp, Artificial Sequence
  derived and/or modified sequence
atgagggacaacaaggagtatgatgcctacctgagctacaccaaggtggaccaggacaccctggactgtgacaaccctgaggaggagcagtttgccctggaggtgctgcctgatgtgctggagaagcactacggctacaagctgttcatccctgagcgggacctgatccccagcggcacctacatggaggacctgacccgctacgtggagcagagcagaagactcatcatcgtgctgaccccagactacatcctgcggcggggctggagcatctttgagctggagagccggctgcacaacatgctggtgtctggagagatcaaggtgatcctgattgaatgtacagagctgaagggcaaggtgaactgccaggaggtggagagcctgaagaggagcatcaagctgctgagcctcatcaagtggaagggcagcaagagcagcaagctgaacagcaagttctggaagcacctggtgtatgagatgcccatcaagaagaaggagatgctgccccgctgccacgtgctggacagcgctgagcagggcctgtttggagagctgcagcccatccccagcatcgccatgaccagcaccagcgccaccctggtgagcagccaggccgacctgcctgagttccaccccagcgacagcatgcagatccgccactgctgccggggctacaagcatgagatcccagccaccaccctgcctgtgcccagcctgggcaaccaccacacctactgcaacctgcccctgaccctgctgaatggccagctgcccctgaacaacaccctgaaggacacccaggagttccacaggaacagcagcctgctgcccctgagcagcaaggagctgtccttcaccagtgacatctggtag

SEQ ID NO: 324627 - DNA, 876 bp, Artificial Sequence
  derived and/or modified sequence
atgcgggacaacaaggagtacgacgcctacctgagctacaccaaggtggaccaggacaccctagattgtgacaaccccgaggaggaacagttcgcactcgaggtcttacctgacgttttagagaagcattacgggtacaaattattcataccagaacgcgacctgatcccttccggcacatatatggaagacctgacgcggtatgttgaacagtcgcggagactaattatcgttctgacccctgactatatcttgcgacgcggttggagcattttcgagttggaatcccgcctacataacatgctggttagcggcgaaatcaaggttatcctaattgaatgcaccgagcttaaagggaaagttaactgccaagaggtcgagtccctcaaaagatctattaaactgttgtccctgattaagtggaaaggatccaagtcatccaaacttaacagcaagttttggaagcatctggtctacgaaatgccgatcaagaagaaagagatgttaccccggtgtcatgttctggactccgccgaacaaggtcttttcggtgaactccagccaattccttcgatagccatgacctcaacttccgccaccctggtctcctcccaagcagacctccccgagttccacccctcagattctatgcaaattaggcactgttgcagagggtataagcatgaaatccctgcaactactctccctgtgccctcactgggaaaccatcacacctattgcaacttacctctgacgctgctcaacggtcagctgccacttaataacacactcaaagatacacaagaattccaccgaaattcaagtctgttgcccctgtcaagtaaggagctcagtttcacctccgatatctggtag

SEQ ID NO: 324628 - DNA, 876 bp, Artificial Sequence
  derived and/or modified sequence
atgagagacaacaaagaatacgacgcttatttgtcctacactaaagtggaccaggacacactggattgcgataatcccgaagaagagcagttcgccttggaggtattgcccgacgtcctggagaagcactacgggtacaagctgtttatccctgagcgggacctcatcccctccggtacatacatggaagatctgacccgatacgtggaacaatcaagacgactgattatcgtgctcactccagattacatccttagacgagggtggtcaattttcgagttagagtccaggctgcacaatatgctggtctcaggagagatcaaagtaatcttgatagagtgcacggaactcaagggcaaagtaaattgtcaggaggtcgaaagtcttaagcggtccatcaagctgctgtccctcatcaaatggaaaggctccaaatcatccaagcttaacagcaagttctggaaacatctagtctacgagatgccaatcaagaagaaggagatgttgcccagatgccacgtgctcgattcggccgagcaggggttattcggggaactgcagccaattccttccattgccatgacctccacatctgcaacactcgtgagctctcaagccgacttacccgagttccaccctagtgattcaatgcaaattagacactgctgcagaggctacaaacacgaaatacctgcaaccacccttccggtgcctagtctgggtaatcaccatacgtactgcaacctccccctgacactgctgaacggacaacttcccctgaacaacacgttgaaggacacacaagaatttcatagaaattccagtctgttgccccttagcagcaaggagctgtctttcaccagtgatatttggtag

SEQ ID NO: 324629 - DNA, 876 bp, Artificial Sequence
  derived and/or modified sequence
atgagagacaacaaggagtacgacgcctacctgagctacaccaaggtggaccaggacaccctggactgcgacaaccccgaggaggagcagttcgccctggaggtgctgcccgacgtgctggagaagcactacggctacaagctgttcatccccgagagagacctgatccccagcggcacctacatggaggacctgaccagatacgtggagcagagcagaagactgatcatcgtgctgacccccgactacatcctgagaagaggctggagcatcttcgagctggagagcagactgcacaacatgctggtgagcggcgagatcaaggtgatcctgatcgagtgcaccgagctgaagggcaaggtgaactgccaggaggtggagagcctgaagagaagcatcaagctgctgagcctgatcaagtggaagggcagcaagagcagcaagctgaacagcaagttctggaagcacctggtgtacgagatgcccatcaagaagaaggagatgctgcccagatgccacgtgctggacagcgccgagcagggcctgttcggcgagctgcagcccatccccagcatcgccatgaccagcaccagcgccaccctggtgagcagccaggccgacctgcccgagttccaccccagcgacagcatgcagatcagacactgctgcagaggctacaagcacgagatccccgccaccaccctgcccgtgcccagcctgggcaaccaccacacctactgcaacctgcccctgaccctgctgaacggccagctgcccctgaacaacaccctgaaggacacccaggagttccacagaaacagcagcctgctgcccctgagcagcaaggagctgagcttcaccagcgacatctggtag

SEQ ID NO: 324630 - protein, 1347 aa, Artificial Sequence
  derived and/or modified sequence
MDLLSGTYIFAVLLACVVFHSGAQEKNYTIREEMPENVLIGDLLKDLNLSLIPNKSLTTAMQFKLVYKTGDVPLIRIEEDTGEIFTTGARIDREKLCAGIPRDEHCFYEVEVAILPDEIFRLVKIRFLIEDINDNAPLFPATVINISIPENSAINSKYTLPAAVDPDVGINGVQNYELIKSQNIFGLDVIETPEGDKMPQLIVQKELDREEKDTYVMKVKVEDGGFPQRSSTAILQVSVTDTNDNHPVFKETEIEVSIPENAPVGTSVTQLHATDADIGENAKIHFSFSNLVSNIARRLFHLNATTGLITIKEPLDREETPNHKLLVLASDGGLMPARAMVLVNVTDVNDNVPSIDIRYIVNPVNDTVVLSENIPLNTKIALITVTDKDADHNGRVTCFTDHEIPFRLRPVFSNQFLLETAAYLDYESTKEYAIKLLAADAGKPPLNQSAMLFIKVKDENDNAPVFTQSFVTVSIPENNSPGIQLTKVSAMDADSGPNAKINYLLGPDAPPEFSLDCRTGMLTVVKKLDREKEDKYLFTILAKDNGVPPLTSNVTVFVSIIDQNDNSPVFTHNEYNFYVPENLPRHGTVGLITVTDPDYGDNSAVTLSILDENDDFTIDSQTGVIRPNISFDREKQESYTFYVKAEDGGRVSRSSSAKVTINVVDVNDNKPVFIVPPSNCSYELVLPSTNPGTVVFQVIAVDNDTGMNAEVRYSIVGGNTRDLFAIDQETGNITLMEKCDVTDLGLHRVLVKANDLGQPDSLFSVVIVNLFVNESVTNATLINELVRKSTEAPVTPNTEIADVSSPTSDYVKILVAAVAGTITVVVVIFITAVVRCRQAPHLKAAQKNKQNSEWATPNPENRQMIMMKKKKKKKKHSPKNLLLNFVTIEETKADDVDSDGNRVTLDLPIDLEEQTMGKYNWVTTPTTFKPDSPDLARHYKSASPQPAFQIQPETPLNSKHHIIQELPLDNTFVACDSISKCSSSSSDPYSVSDCGYPVTTFEVPVSVHTRPPMKEVVRSCTPMKESTTMEIWIHPQPQRKSEGKVAGKSQRRVTFHLPEGSQESSSDGGLGDHDAGSLTSTSHGLPLGYPQEEYFDRATPSNRTEGDGNSDPESTFIPGLKKAAEITVQPTVEEASDNCTQECLIYGHSDACWMPASLDHSSSSQAQASALCHSPPLSQASTQHHSPRVTQTIALCHSPPVTQTIALCHSPPPIQVSALHHSPPLVQATALHHSPPSAQASALCYSPPLAQAAAISHSSPLPQVIALHRSQAQSSVSLQQGWVQGADGLCSVDQGVQGSATSQFYTMSERLHPSDDSIKVIPLTTFTPRQQARPSRGDSPIMEEHPL

SEQ ID NO: 324631 - DNA, 9176 bp, Artificial Sequence
  derived and/or modified sequence
ctggtggtccagtacctccaaagatatggaatacactcctgaaatatcctgaaaacttttttttttcagaatcctttaataagcagttatgtcaatctgaaagttgcttacttgtactttatattaatagctattcttgtttttcttatccaaagaaaaatcctctaatccccttttcacatgatagttgttaccatgtttaggcattagtcacatcaacccctctcctctcccaaacttctcttcttcaaatcaaactttattagtccctcctttataatgattccttgcctcgttttatccagatcaattttttttcactttgatgcccagagctgaagaaatggactactgtataaattattcattgccaagagaataattgcattttaaacccatattataacaaagaataatgattatattttgtgatttgtaacaaataccctttattttcccttaactattgaattaaatattttaattatttgtattctctttaactatcttggtatattaaagtattatcttttatatatttatcaatggtggacacttttataggtactctgtgtcatttttgatactgtaggtatcttatttcatttatctttattcttaatgtacgaattcataatatttgattcagaacaaatttatcactaattaacagagtgtcaattatgctaacatctcatttactgattttaatttaaaacagtttttgttaacatgcatgtttagggttggcttcttaataatttcttcttcctcttctctctctcctcttcttttggtcagtgttgtgcgggttaatacaacaaactgtaacaagtgtacctggtatggacttgttgtccgggacgtacattttcgcggtcctgctagcatgcgtggtgttccactctggcgcccaggagaaaaactacaccatccgagaagaaatgccagaaaacgtcctgataggcgacttgttgaaagaccttaacttgtcgctgattccaaacaagtccttgacaactgctatgcagttcaagctagtgtacaagaccggagatgtgccactgattcgaattgaagaggatactggtgagatcttcactactggcgctcgcattgatcgtgagaaattatgtgctggtatcccaagggatgagcattgcttttatgaagtggaggttgccattttgccggatgaaatatttagactggttaagatacgttttctgatagaagatataaatgataatgcaccattgttcccagcaacagttatcaacatatcaattccagagaactcggctataaactctaaatatactctcccagcggctgttgatcctgacgtaggaataaacggagttcaaaactacgaactaattaagagtcaaaacatttttggcctcgatgtcattgaaacaccagaaggagacaagatgccacaactgattgttcaaaaggagttagatagggaagagaaggatacctacgtgatgaaagtaaaggttgaagatggtggctttcctcaaagatccagtactgctattttgcaagtgagtgttactgatacaaatgacaaccacccagtctttaaggagacagagattgaagtcagtataccagaaaatgctcctgtaggcacttcagtgacacagctccatgccacagatgctgacataggtgaaaatgccaagatccacttctctttcagcaatctagtctccaacattgccaggagattatttcacctcaatgccaccactggacttatcacaatcaaagaaccactggatagggaagaaacaccaaaccacaagttactggttttggcaagtgatggtggattgatgccagcaagagcaatggtgctggtaaatgttacagatgtcaatgataatgtcccatccattgacataagatacatcgtcaatcctgtcaatgacacagttgttctttcagaaaatattccactcaacaccaaaattgctctcataactgtgacggataaggatgcggaccataatggcagggtgacatgcttcacagatcatgaaatccctttcagattaaggccagtattcagtaatcagttcctcctggagactgcagcatatcttgactatgagtccacaaaagaatatgccattaaattactggctgcagatgctggcaaacctcctttgaatcagtcagcaatgctcttcatcaaagtgaaagatgaaaatgacaatgctccagttttcacccagtctttcgtaactgtttctattcctgagaataactctcctggcatccagttgacgaaagtaagtgcaatggatgcagacagtgggcctaatgctaagatcaattacctgctaggccctgatgctccacctgaattcagcctggattgtcgtacaggcatgctgactgtagtgaagaaactagatagagaaaaagaggataaatatttattcacaattctggcaaaagataacggggtaccacccttaaccagcaatgtcacagtctttgtaagcattattgatcagaatgacaatagcccagttttcactcacaatgaatacaacttctatgtcccagaaaaccttccaaggcatggtacagtaggactaatcactgtaactgatcctgattatggagacaattctgcagttacgctctccattttagatgagaatgatgacttcaccattgattcacaaactggtgtcatccgaccaaatatttcatttgatagagaaaaacaagaatcttacactttctatgtaaaggctgaggatggtggtagagtatcacgttcttcaagtgccaaagtaaccataaatgtggttgatgtcaatgacaacaaaccagttttcattgtccctccttccaactgttcttatgaattggttctaccgtccactaatccaggcacagtggtctttcaggtaattgctgttgacaatgacactggcatgaatgcagaggttcgttacagcattgtaggaggaaacacaagagatctgtttgcaatcgaccaagaaacaggcaacataacattgatggagaaatgtgatgttacagaccttggtttacacagagtgttggtcaaagctaatgacttaggacagcctgattctctcttcagtgttgtaattgtcaatctgttcgtgaatgagtcggtgaccaatgctacactgattaatgaactggtgcgcaaaagcactgaagcaccagtgaccccaaatactgagatagctgatgtatcctcaccaactagtgactatgtcaagatcctggttgcagctgttgctggcaccataactgtcgttgtagttattttcatcactgctgtagtaagatgtcgccaggcaccacaccttaaggctgctcagaaaaacaagcagaattctgaatgggctaccccaaacccagaaaacaggcagatgataatgatgaagaaaaagaaaaagaagaagaagcattcccctaagaacttgctgcttaattttgtcactattgaagaaactaaggcagatgatgttgacagtgatggaaacagagtcacactagaccttcctattgatctagaagagcaaacaatgggaaagtacaattgggtaactacacctactactttcaagcccgacagccctgatttggcccgacactacaaatctgcctctccacagcctgccttccaaattcagcctgaaactcccctgaattcgaagcaccacatcatccaagaactgcctctcgataacacctttgtggcctgtgactctatctccaagtgttcctcaagcagttcagatccctacagcgtttctgactgtggctatccagtgacgaccttcgaggtacctgtgtccgtacacaccagaccgccaatgaaggaggttgtgcgatcttgcacccccatgaaagagtctacaactatggagatctggattcatccccaaccacagcggaaatctgaagggaaagtggcaggaaagtcccagcggcgtgtcacatttcacctgccagaaggctctcaggaaagcagcagtgatggtggactgggagaccatgatgcaggcagccttaccagcacatctcatggcctgccccttggctatcctcaggaggagtactttgatcgtgctacacccagcaatcgcactgaaggggatggcaactccgatcctgaatctactttcatacctggactaaagaaagctgcagaaataactgttcaaccaactgtggaagaggcctctgacaactgcactcaagaatgtctcatctatggccattctgatgcctgctggatgccggcatctctggatcattccagctcttcgcaagcacaggcctctgctctatgccacagcccaccactgtcacaggcctctactcagcaccacagcccacgagtgacacagaccattgctctctgccacagccctccagtgacacagaccatcgcattgtgccacagcccaccaccgatacaggtgtctgctctccaccacagtcctcctctagtgcaggctactgcacttcaccacagcccaccatcagcacaggcctcagccctctgctacagccctcctttagcacaggctgctgcaatcagccacagctctcctctgccacaggttattgccctccatcgtagtcaggcccaatcatcagtcagtttgcagcaaggttgggtgcaaggtgctgatgggctatgctctgttgatcagggagtgcaaggtagtgcaacatctcagttttacaccatgtctgaaagacttcatcccagtgatgattcaattaaagtcattcctttgacaaccttcactccacgccaacaggccagaccgtccagaggtgattcccccattatggaagaacatcccttgtaaagctaaaatagttacttcaaattttcagaaaagatgtatatagtcaaaatttaagatacaattccaatgagtattctgattatcagatttgtaaataactatgtaaatagaaacagataccagaataaatctacagctagacccttagtcaatagttaaccaaaaaattgcaatttgtttaattcagaatgtgtatttaaaaagaaaaggaatttaacaatttgcatccccttgtacagtaaggcttatcatgacagagcgcactatttctgatgtacagtattttttgttgtttttatcatcatgtgcaatattactgatttgtttccatgctgattgtgtggaaccagtatgtagcaaatggaaagcctagaaatatcttattttctaagtttacctttagtttacctaaacttttgttcagataacgttaaaaggtatacgtactctagcctttttttgggctttctttttgatttttgtttgttgttttcagtttttttgttgttgttagtgagtctcccttcaaaatacgcagtaggtagtgtaaatactgcttgtttgtgtctctctgctgtcatgttttctaccttattccaatactatattgttgataaaatttgtatatacattttcaataaagaatatgtataaactgtacagatctagatctacaacctatttctctactctttagtagagttcgagacacagaagtgcaataactgccctaattaagcaactatttgttaaaaagggcctctttttactttaatagtttagtgtaaagtacatcagaaataaagctgtatctgccattttaagcctgtagtccattattacttgggtctttacttctgggaatttgtatgtaacagcctagaaaattaaaaggaggtggatgcatccaaagcacgagtcacttaaaatatcgacggtaaactactattttgtagagaaactcaggaagatttaaatgttgatttgacagctcaataggctgttaccaaagggtgttcagtaaaaataacaaatacatgtaactgtagataaaaccatatactaaatctataagactaagggatttttgttattctagctcaacttactgaagaaaaccactaataacaacaagaatatcaggaaggaacttttcaagaaatgtaattataaatctacatcaaacagaattttaaggaaaaatgcagagggagaaataaggcacatgactgcttcttgcagtcaacaagaaataccaataacacacacagaacaaaaaccatcaaaatctcatatatgaaataaaatatattcttctaagcaaagaaacagtactattcatagaaaacattagttttcttctgttgtctgttatttccttcttgtatcctcttaactggccattatcttgtatgtgcacattttataaatgtacagaaacatcaccaacttaattttcttccatagcaaaactgagaaaataccttgtttcagtataacactaaaccaagagacaattgatgtttaatgggggcggttggggtgggggggggagtcaatatctcctattgattaacttagacatagattttgtaatgtataacttgatatttaatttatgattaaactgtgtgtaaattttgtaacataaactgtggtaattgcataatttcattggtgaggatttccactgaatattgagaaagtttcttttcatgtgcccagcaggttaagtagcgttttcagaatatacattattcccatccattgtaaagttccttaagtcatatttgactgggcgtgcagaataacttcttaacttttaactatcagagtttgattaataaaattaattaatgttttttctccttcgtgttgttaatgttccaagggatttggagcatactggttttccaggtgcatgtgaatcccgaaggactgatgatatttgaatgtttattaaattattatcatacaaatgtgttgatattgtggctattgttgatgttgaaaattttaaacttggggaagattaagaaaagaaccaatagtgacaaaaatcagtgcttccagtagattttagaacattctttgcctcaaaaaacctgcaaagatgatgtgagattttttcttgtgttttaattattttcacattttctctctgcaaaactttagttttctgatgatctacacacacacacacacacacacgtgcacacacacacacatttaaatgatataaaaagaagaggttgaaagattattaaataacttatcaggcatctcaatggttactatctatgttagtgaaaatcaaataggactcaaagttggatatttgggatttttcttctgacagtataatttattgagttactagggaggttcttaaatcctcatatctggaaacttgtgacgttttgacacctttcctatagatgatataggaatgaaccaatacgcttttattaccctttctaactctgattttataatcagacttagattgtgtttagaatattaaatgactgggcaccctcttcttggtttttaccagagaggctttgaatggaagcaggctgagagtagccaaagaggcaaggggtattagcccagttattctcccctatgccttccttctctttctaagcgtccactaggtctggccttggaaacctgttacttctagggcttcagatctgatgatatctttttcatcacattacaagttatttctctgactgaatagacagtggtataggttgacacagcacacaagtggctattgtgatgtatgatgtatgtagtcctacaactgcaaaacgtcttactgaaccaacaatcaaaaaatggttctgttttaaaaaggattttgtttgatttgaaattaaaacttcaagctgaatgacttatatgagaataatacgttcaatcaaagtagttattctattttgtgtccatattccattagattgtgattattaattttctagctatggtattactatatcacacttgtgagtatgtattcaaatactaagtatcttatatgctacgtgcatacacattcttttcttaaactttacctgtgttttaactaatattgtgtcagtgtattaaaaattagcttttacatatgatatctacaatgtaataaatttagagagtaattttgtgtattcttatttacttaacattttacttttaattatgtaaatttggttagaaaataataataaatggttagtgctattgtgtaatggtagcagttacaaagagcctctgccttcccaaactaatatttatcacacatggtcattaaatgggaaaaaaatagactaaacaaatcacaaattgttcagttcttaaaatgtaattatgtcacacacacaaaaaatccttttcaatcctgagaaaattaaaggcgttttactcacatggctatttcaacattagttttttttgtttgtttctttttcatggtattactgaaggtgtgtatactccctaatacacatttatgaaaatctacttgtttaggcttttatttatactcttctgatttatattttttattataattattatttcttatctttcttcttttatattttttggaaaccaaatttatagttagtttaggtaaactttttattatgaccattagaaactattttgaatgcttccaactggctcaattggccgggaaaacatgggagcaagagaagctgaaatatatttctgcaagaacctttctatattatgtgccaattaccacaccagatcaattttatgcagaggccttaaaatattctttcacagtagctttcttacactaaccgtcatgtgcttttagtaaatatgatttttaaaagcagttcaagttgacaacagcagaaacagtaacaaaaaaatctgctcagaaaaatgtatgtgcacaaataaaaaaaattaatggcaattgtttagtgattgtaagtgatactttttaaagagtaaactgtgtgaaatttatactatccctgcttaaaatattaagatttttatgaaatatgtatttatgtttgtattgtgggaagattcctcctctgtgatatcatacagcatctgaaagtgaacagtatcccaaagcagttccaaccatgctttggaagtaagaaggttgactattgtatggccaaggatggcagtatgtaatccagaagcaaacttgtattaattgttctatttcaggttctgtattgcatgttttcttattaatatatattaataaaagttatgagaaat

SEQ ID NO: 324632 - DNA, 9149 bp, Artificial Sequence
  derived and/or modified sequence
ctggtggtccagtacctccaaagatatggaatacactcctgaaatatcctgaaaacttttttttttcagaatcctttaataagcagttatgtcaatctgaaagttgcttacttgtactttatattaatagctattcttgtttttcttatccaaagaaaaatcctctaatccccttttcacatgatagttgttaccatgtttaggcattagtcacatcaacccctctcctctcccaaacttctcttcttcaaatcaaactttattagtccctcctttataatgattccttgcctcgttttatccagatcaattttttttcactttgatgcccagagctgaagaaatggactactgtataaattattcattgccaagagaataattgcattttaaacccatattataacaaagaataatgattatattttgtgatttgtaacaaataccctttattttcccttaactattgaattaaatattttaattatttgtattctctttaactatcttggtatattaaagtattatcttttatatatttatcaatggtggacacttttataggtactctgtgtcatttttgatactgtaggtatcttatttcatttatctttattcttaatgtacgaattcataatatttgattcagaacaaatttatcactaattaacagagtgtcaattatgctaacatctcatttactgattttaatttaaaacagtttttgttaacatgcatgtttagggttggcttcttaataatttcttcttcctcttctctctctcctcttcttttggtcagtgttgtgcgggttaatacaacaaactgtaacaagtgtacctggtatggacttgttgtccgggacgtacattttcgcggtcctgctagcatgcgtggtgttccactctggcgcccaggagaaaaactacaccatccgagaagaaatgccagaaaacgtcctgataggcgacttgttgaaagaccttaacttgtcgctgattccaaacaagtccttgacaactgctatgcagttcaagctagtgtacaagaccggagatgtgccactgattcgaattgaagaggatactggtgagatcttcactactggcgctcgcattgatcgtgagaaattatgtgctggtatcccaagggatgagcattgcttttatgaagtggaggttgccattttgccggatgaaatatttagactggttaagatacgttttctgatagaagatataaatgataatgcaccattgttcccagcaacagttatcaacatatcaattccagagaactcggctataaactctaaatatactctcccagcggctgttgatcctgacgtaggaataaacggagttcaaaactacgaactaattaagagtcaaaacatttttggcctcgatgtcattgaaacaccagaaggagacaagatgccacaactgattgttcaaaaggagttagatagggaagagaaggatacctacgtgatgaaagtaaaggttgaagatggtggctttcctcaaagatccagtactgctattttgcaagtgagtgttactgatacaaatgacaaccacccagtctttaaggagacagagattgaagtcagtataccagaaaatgctcctgtaggcacttcagtgacacagctccatgccacagatgctgacataggtgaaaatgccaagatccacttctctttcagcaatctagtctccaacattgccaggagattatttcacctcaatgccaccactggacttatcacaatcaaagaaccactggatagggaagaaacaccaaaccacaagttactggttttggcaagtgatggtggattgatgccagcaagagcaatggtgctggtaaatgttacagatgtcaatgataatgtcccatccattgacataagatacatcgtcaatcctgtcaatgacacagttgttctttcagaaaatattccactcaacaccaaaattgctctcataactgtgacggataaggatgcggaccataatggcagggtgacatgcttcacagatcatgaaatccctttcagattaaggccagtattcagtaatcagttcctcctggagactgcagcatatcttgactatgagtccacaaaagaatatgccattaaattactggctgcagatgctggcaaacctcctttgaatcagtcagcaatgctcttcatcaaagtgaaagatgaaaatgacaatgctccagttttcacccagtctttcgtaactgtttctattcctgagaataactctcctggcatccagttgacgaaagtaagtgcaatggatgcagacagtgggcctaatgctaagatcaattacctgctaggccctgatgctccacctgaattcagcctggattgtcgtacaggcatgctgactgtagtgaagaaactagatagagaaaaagaggataaatatttattcacaattctggcaaaagataacggggtaccacccttaaccagcaatgtcacagtctttgtaagcattattgatcagaatgacaatagcccagttttcactcacaatgaatacaacttctatgtcccagaaaaccttccaaggcatggtacagtaggactaatcactgtaactgatcctgattatggagacaattctgcagttacgctctccattttagatgagaatgatgacttcaccattgattcacaaactggtgtcatccgaccaaatatttcatttgatagagaaaaacaagaatcttacactttctatgtaaaggctgaggatggtggtagagtatcacgttcttcaagtgccaaagtaaccataaatgtggttgatgtcaatgacaacaaaccagttttcattgtccctccttccaactgttcttatgaattggttctaccgtccactaatccaggcacagtggtctttcaggtaattgctgttgacaatgacactggcatgaatgcagaggttcgttacagcattgtaggaggaaacacaagagatctgtttgcaatcgaccaagaaacaggcaacataacattgatggagaaatgtgatgttacagaccttggtttacacagagtgttggtcaaagctaatgacttaggacagcctgattctctcttcagtgttgtaattgtcaatctgttcgtgaatgagtcggtgaccaatgctacactgattaatgaactggtgcgcaaaagcactgaagcaccagtgaccccaaatactgagatagctgatgtatcctcaccaactagtgactatgtcaagatcctggttgcagctgttgctggcaccataactgtcgttgtagttattttcatcactgctgtagtaagatgtcgccaggcaccacaccttaaggctgctcagaaaaacaagcagaattctgaatgggctaccccaaacccagaaaacaggcagatgataatgatgaagaaaaagaaaaagaagaagaagcattcccctaagaacttgctgcttaattttgtcactattgaagaaactaaggcagatgatgttgacagtgatggaaacagagtcacactagaccttcctattgatctagaagagcaaacaatgggaaagtacaattgggtaactacacctactactttcaagcccgacagccctgatttggcccgacactacaaatctgcctctccacagcctgccttccaaattcagcctgaaactcccctgaattcgaagcaccacatcatccaagaactgcctctcgataacacctttgtggcctgtgactctatctccaagtgttcctcaagcagttcagatccctacagcgtttctgactgtggctatccagtgacgaccttcgaggtacctgtgtccgtacacaccagaccgccaatgaaggaggttgtgcgatcttgcacccccatgaaagagtctacaactatggagatctggattcatccccaaccacagtcccagcggcgtgtcacatttcacctgccagaaggctctcaggaaagcagcagtgatggtggactgggagaccatgatgcaggcagccttaccagcacatctcatggcctgccccttggctatcctcaggaggagtactttgatcgtgctacacccagcaatcgcactgaaggggatggcaactccgatcctgaatctactttcatacctggactaaagaaagctgcagaaataactgttcaaccaactgtggaagaggcctctgacaactgcactcaagaatgtctcatctatggccattctgatgcctgctggatgccggcatctctggatcattccagctcttcgcaagcacaggcctctgctctatgccacagcccaccactgtcacaggcctctactcagcaccacagcccacgagtgacacagaccattgctctctgccacagccctccagtgacacagaccatcgcattgtgccacagcccaccaccgatacaggtgtctgctctccaccacagtcctcctctagtgcaggctactgcacttcaccacagcccaccatcagcacaggcctcagccctctgctacagccctcctttagcacaggctgctgcaatcagccacagctctcctctgccacaggttattgccctccatcgtagtcaggcccaatcatcagtcagtttgcagcaaggttgggtgcaaggtgctgatgggctatgctctgttgatcagggagtgcaaggtagtgcaacatctcagttttacaccatgtctgaaagacttcatcccagtgatgattcaattaaagtcattcctttgacaaccttcactccacgccaacaggccagaccgtccagaggtgattcccccattatggaagaacatcccttgtaaagctaaaatagttacttcaaattttcagaaaagatgtatatagtcaaaatttaagatacaattccaatgagtattctgattatcagatttgtaaataactatgtaaatagaaacagataccagaataaatctacagctagacccttagtcaatagttaaccaaaaaattgcaatttgtttaattcagaatgtgtatttaaaaagaaaaggaatttaacaatttgcatccccttgtacagtaaggcttatcatgacagagcgcactatttctgatgtacagtattttttgttgtttttatcatcatgtgcaatattactgatttgtttccatgctgattgtgtggaaccagtatgtagcaaatggaaagcctagaaatatcttattttctaagtttacctttagtttacctaaacttttgttcagataacgttaaaaggtatacgtactctagcctttttttgggctttctttttgatttttgtttgttgttttcagtttttttgttgttgttagtgagtctcccttcaaaatacgcagtaggtagtgtaaatactgcttgtttgtgtctctctgctgtcatgttttctaccttattccaatactatattgttgataaaatttgtatatacattttcaataaagaatatgtataaactgtacagatctagatctacaacctatttctctactctttagtagagttcgagacacagaagtgcaataactgccctaattaagcaactatttgttaaaaagggcctctttttactttaatagtttagtgtaaagtacatcagaaataaagctgtatctgccattttaagcctgtagtccattattacttgggtctttacttctgggaatttgtatgtaacagcctagaaaattaaaaggaggtggatgcatccaaagcacgagtcacttaaaatatcgacggtaaactactattttgtagagaaactcaggaagatttaaatgttgatttgacagctcaataggctgttaccaaagggtgttcagtaaaaataacaaatacatgtaactgtagataaaaccatatactaaatctataagactaagggatttttgttattctagctcaacttactgaagaaaaccactaataacaacaagaatatcaggaaggaacttttcaagaaatgtaattataaatctacatcaaacagaattttaaggaaaaatgcagagggagaaataaggcacatgactgcttcttgcagtcaacaagaaataccaataacacacacagaacaaaaaccatcaaaatctcatatatgaaataaaatatattcttctaagcaaagaaacagtactattcatagaaaacattagttttcttctgttgtctgttatttccttcttgtatcctcttaactggccattatcttgtatgtgcacattttataaatgtacagaaacatcaccaacttaattttcttccatagcaaaactgagaaaataccttgtttcagtataacactaaaccaagagacaattgatgtttaatgggggcggttggggtgggggggggagtcaatatctcctattgattaacttagacatagattttgtaatgtataacttgatatttaatttatgattaaactgtgtgtaaattttgtaacataaactgtggtaattgcataatttcattggtgaggatttccactgaatattgagaaagtttcttttcatgtgcccagcaggttaagtagcgttttcagaatatacattattcccatccattgtaaagttccttaagtcatatttgactgggcgtgcagaataacttcttaacttttaactatcagagtttgattaataaaattaattaatgttttttctccttcgtgttgttaatgttccaagggatttggagcatactggttttccaggtgcatgtgaatcccgaaggactgatgatatttgaatgtttattaaattattatcatacaaatgtgttgatattgtggctattgttgatgttgaaaattttaaacttggggaagattaagaaaagaaccaatagtgacaaaaatcagtgcttccagtagattttagaacattctttgcctcaaaaaacctgcaaagatgatgtgagattttttcttgtgttttaattattttcacattttctctctgcaaaactttagttttctgatgatctacacacacacacacacacacacgtgcacacacacacacatttaaatgatataaaaagaagaggttgaaagattattaaataacttatcaggcatctcaatggttactatctatgttagtgaaaatcaaataggactcaaagttggatatttgggatttttcttctgacagtataatttattgagttactagggaggttcttaaatcctcatatctggaaacttgtgacgttttgacacctttcctatagatgatataggaatgaaccaatacgcttttattaccctttctaactctgattttataatcagacttagattgtgtttagaatattaaatgactgggcaccctcttcttggtttttaccagagaggctttgaatggaagcaggctgagagtagccaaagaggcaaggggtattagcccagttattctcccctatgccttccttctctttctaagcgtccactaggtctggccttggaaacctgttacttctagggcttcagatctgatgatatctttttcatcacattacaagttatttctctgactgaatagacagtggtataggttgacacagcacacaagtggctattgtgatgtatgatgtatgtagtcctacaactgcaaaacgtcttactgaaccaacaatcaaaaaatggttctgttttaaaaaggattttgtttgatttgaaattaaaacttcaagctgaatgacttatatgagaataatacgttcaatcaaagtagttattctattttgtgtccatattccattagattgtgattattaattttctagctatggtattactatatcacacttgtgagtatgtattcaaatactaagtatcttatatgctacgtgcatacacattcttttcttaaactttacctgtgttttaactaatattgtgtcagtgtattaaaaattagcttttacatatgatatctacaatgtaataaatttagagagtaattttgtgtattcttatttacttaacattttacttttaattatgtaaatttggttagaaaataataataaatggttagtgctattgtgtaatggtagcagttacaaagagcctctgccttcccaaactaatatttatcacacatggtcattaaatgggaaaaaaatagactaaacaaatcacaaattgttcagttcttaaaatgtaattatgtcacacacacaaaaaatccttttcaatcctgagaaaattaaaggcgttttactcacatggctatttcaacattagttttttttgtttgtttctttttcatggtattactgaaggtgtgtatactccctaatacacatttatgaaaatctacttgtttaggcttttatttatactcttctgatttatattttttattataattattatttcttatctttcttcttttatattttttggaaaccaaatttatagttagtttaggtaaactttttattatgaccattagaaactattttgaatgcttccaactggctcaattggccgggaaaacatgggagcaagagaagctgaaatatatttctgcaagaacctttctatattatgtgccaattaccacaccagatcaattttatgcagaggccttaaaatattctttcacagtagctttcttacactaaccgtcatgtgcttttagtaaatatgatttttaaaagcagttcaagttgacaacagcagaaacagtaacaaaaaaatctgctcagaaaaatgtatgtgcacaaataaaaaaaattaatggcaattgtttagtgattgtaagtgatactttttaaagagtaaactgtgtgaaatttatactatccctgcttaaaatattaagatttttatgaaatatgtatttatgtttgtattgtgggaagattcctcctctgtgatatcatacagcatctgaaagtgaacagtatcccaaagcagttccaaccatgctttggaagtaagaaggttgactattgtatggccaaggatggcagtatgtaatccagaagcaaacttgtattaattgttctatttcaggttctgtattgcatgttttcttattaatatatattaataaaagttatgagaaataaa

SEQ ID NO: 324633 - DNA, 4020 bp, Artificial Sequence
  derived and/or modified sequence
atggacttactgtctggaacgtatatcttcgcagtgctgcttgcgtgcgtcgtttttcacagcggggcccaggagaagaattatacaatccgagaagagatgcccgagaacgtcttgatcggcgacctcctgaaagacctcaatctctccctcatccccaataaatcactaaccacagctatgcaatttaaactagtgtataagacaggcgacgtacctcttatccgaattgaagaggataccggcgaaatcttcactactggcgcgagaattgaccgggagaagctgtgtgcaggcattccaagggacgaacattgtttctatgaggtagaggtggcgattcttcctgacgaaatcttccgcctagttaaaattcgttttctaatcgaagatatcaacgataacgctcccctgttccctgccactgtgatcaatatttcgataccggagaattctgcaatcaactccaaatatacacttcccgccgccgtagaccccgacgtgggcatcaatggtgtgcagaattatgagctgatcaaatcccagaacatctttggcctggatgtgatcgagacaccggagggggacaagatgccgcagctgatagtccaaaaggagcttgacagggaggaaaaggacacatacgtgatgaaggtgaaagtggaggatggtggatttccccagcggagctccacagccatcctacaggttagtgtgaccgataccaatgataaccaccctgttttcaaggaaaccgagatcgaagtgagtatccctgagaacgctcccgtcgggacctccgtgacccagctgcacgctacagatgccgacattggagaaaacgccaagatccatttttcgttttcgaaccttgtcagtaatattgctcgacgactgttccacctgaatgccacaaccggcctgattaccatcaaagagccactcgatcgcgaggagacccccaatcataaattgcttgtgcttgcttccgacgggggactgatgcctgcaagggccatggtgttagtgaatgtcaccgacgttaatgataacgtcccttcaatagatataaggtatatcgtgaaccctgttaacgacaccgtcgtactgagcgagaacattccactcaatactaaaattgccctgattaccgttaccgataaagatgcagatcataacggacgcgttacctgctttactgatcatgagattcctttccgacttcgtcctgtcttttctaatcagttcctgctcgagacagctgcctatctggattatgagtcaaccaaggagtacgcgatcaagctgctcgctgccgatgcaggcaagccgccattgaaccagtccgcgatgctcttcatcaaggtgaaagatgagaacgataatgctcccgtcttcacacaaagtttcgtcacagttagcataccagagaacaattcccctgggatccagctgactaaggtatctgcaatggatgcagacagcggaccaaacgcgaaaattaattacctcctgggcccagatgcgccccccgagttcagcttagattgccggaccggcatgctgaccgtcgtcaagaaattagatagggagaaggaagataagtatctgttcaccatcctggctaaagacaatggtgtacccccccttacgtccaacgtgacagtattcgtctctatcatagatcagaacgataacagccccgtgtttactcataacgagtacaacttttacgtccctgaaaacctgcccagacatgggactgttggcctgattaccgtcaccgatccagactatggggataatagcgcggtgactctttccatcttggatgagaacgacgatttcaccatcgattcccagactggagtgatacggccgaatatatcctttgaccgcgagaaacaagagagctatacattttacgtgaaggcggaagacggcggccgggtttccagatcgtcctccgccaaagtcacaataaacgttgtggacgtaaacgataataaacccgtgttcattgtgccaccctccaactgctcttacgaactggtgctgccatccacaaacccagggaccgttgtttttcaggttattgctgtggataacgacaccgggatgaacgccgaggttcgttactcgattgtgggtggaaacacaagagacctgtttgccattgaccaggaaacagggaatattactttgatggagaagtgcgacgtgacggacctcggcttgcaccgcgtccttgtgaaggccaacgatttgggacagcccgattctctgttcagtgttgtaatcgtcaacctatttgtcaatgagtcggtcacgaatgccacgctgatcaacgaactggtgaggaagtcaaccgaggcccctgtgactccgaacactgaaatcgctgatgtgagcagtccaacctcagattacgtgaagattcttgttgcggccgtggccggaactattactgtcgtggtggtcatctttattaccgccgtggttcggtgtagacaagcccctcacctgaaagccgctcagaagaacaagcaaaactccgagtgggctacaccaaatcccgagaatagacagatgattatgatgaagaaaaaaaagaaaaagaaaaaacactccccgaagaacctgcttctgaacttcgtcaccatcgaagagaccaaggctgacgatgtggattctgacggaaaccgggtgacgctggatttgccgatagatctggaagagcagacgatgggtaaatacaactgggttacaactcccactacctttaagcctgatagtccggatctggcgcggcactacaagtccgcctccccccaacctgctttccagatacagcctgagaccccactgaacagcaagcaccacataattcaggaattaccactcgacaacacattcgtggcgtgtgacagtatcagtaaatgtagtagttctagctctgatccctactctgtgtctgactgcggctaccccgtcactaccttcgaggtgcccgtgtccgtgcacacacgtccaccaatgaaagaggtagtcagaagttgtactcccatgaaggaatccactactatggaaatctggatccatccacagccacagcgcaaatctgagggaaaagtggcggggaagtcgcagcgccgagtgacattccaccttcccgagggatctcaagaatcctcttccgacggtggcctcggcgaccacgacgcaggaagcctcacgtcgacctcccacgggctgcccctcggctacccgcaagaggagtattttgaccgcgcgacacccagtaaccgcacggagggcgacggcaacagtgaccctgaaagtactgctgagatcacagtacagccaacagttgaggaggccagcgataattgcactcaggagtgtcttatctatggacacagtgatgcctgctggatgccagcaagcctagaccacagtagttcctcccaggcgcaagctagcgcattatgccatagcccccctctgtctcaagcgtccacccaacaccatagcccgagagttactcagaccatcgctctgtgtcactcccccccggtaacacagactatcgcactgtgtcattcaccacccccaattcaagtgtccgctctccatcactcccctccccttgtgcaggctaccgcactgcatcactcccctccctcagcacaagccagtgccttatgttattcaccccctcttgctcaggcagcagcaatatctcattcatcccctctccctcaggtgatcgctctccacagatcgcaagcacagagtagcgttagtctgcagcaaggttgggttcagggcgcagatggattgtgtagtgtggatcagggcgtccaagggtcagctacatctcagttctacacaatgagcgagagattgcatccgtccgatgactccatcaaggtaattcccttaactacatttactccccgtcagcaggcccggccctctagaggggactctccaataatggaagaacatccactgtag

SEQ ID NO: 324634 - DNA, 4020 bp, Artificial Sequence
  derived and/or modified sequence
atggacctgctgagcggcacctacatctttgctgtgctgctggcctgtgtggtgttccacagcggggcccaggagaagaactacaccatccgggaggagatgccagaaaatgtgctgattggagacctgctgaaggacctgaacctgagcctcatccccaacaagagcctgaccacagccatgcagttcaagctggtgtacaagacaggagatgtgcccctcatcagaattgaagaagatactggagagatcttcaccactggagccagaattgaccgggagaagctgtgtgccggcatccccagagatgagcactgcttctatgaggtggaggtggccatcctgcctgatgagatcttccggctggtgaagatccgcttcctgattgaggacatcaatgacaatgcccccctcttccctgccaccgtcatcaacatcagcatccctgagaacagcgccatcaacagcaagtacaccctgcctgctgctgtggaccctgatgtgggcatcaatggagtgcagaactatgagctgatcaagagccagaacatcttcggcctggatgtgattgagaccccagagggggacaagatgccccagctgattgtgcagaaggagctggaccgggaggagaaggacacctacgtgatgaaggtgaaggtggaggatggcggcttcccccagaggagcagcacagccatcctgcaggtgtctgtgacagacaccaatgacaaccaccctgtgttcaaggagacagaaattgaggtgtccatcccagaaaatgcccctgtgggcacctctgtgacccagctgcacgccacagatgctgacatcggggagaatgccaagatccacttctccttcagcaacctggtgagcaacatcgcccggcggctcttccacctgaatgccaccaccggcctcatcaccatcaaggagcccctggaccgggaggagacccccaaccacaagctgctggtgctggccagtgatggcggcctgatgcctgcccgggccatggtgctggtgaatgtgacagatgtgaatgacaacgtgcccagcattgacatccgctacatcgtgaaccctgtgaatgacacagtggtgctgtctgagaacatccccctgaacaccaagatcgccctgatcaccgtgacagacaaggatgctgaccacaacggccgggtgacctgcttcacagaccacgagatccccttccggctgcggcctgtgttcagcaaccagttcctgctggagacagctgcctacctggactatgagagcaccaaggagtatgccatcaagctgctggccgcagatgctgggaagccacccctgaaccagagcgccatgctgttcatcaaggtgaaggatgaaaatgacaatgcccctgtgttcacccagagctttgtgacagtgtccatccctgagaacaacagccctggcatccagctgaccaaggtgtctgccatggatgctgacagcggccccaatgccaagatcaactacctgctgggcccagatgcccctcctgagttcagcctggactgcaggacaggcatgctgactgtggtgaagaagctggaccgggagaaggaggacaagtacctgttcaccatcctggccaaggacaatggagtgccccccctgaccagcaatgtgacagtgtttgtgtccatcatcgaccagaatgacaacagccctgtgttcacccacaatgagtacaacttctacgtgcctgagaacctgcccaggcatggcaccgtgggcctcatcaccgtgacagatcctgactatggagacaacagcgctgtgaccctgagcatcctggatgaaaatgatgacttcaccatcgacagccagacaggagtcatccggcccaacatcagctttgaccgggagaagcaggagagctacaccttctacgtgaaggccgaggatggcggccgggtgagccgcagcagcagcgccaaggtgaccatcaacgtggtggatgtgaatgacaacaagcctgtgttcatcgtgccccccagcaactgcagctatgagctggtgctgcccagcaccaaccctggcaccgtggtgttccaggtgattgctgtggacaatgacaccggcatgaatgctgaggtgcgctacagcatcgtgggcggcaacacccgggacctgtttgccatcgaccaggagaccggcaacatcaccctgatggagaagtgtgatgtgacagacctgggcctgcaccgggtgctggtgaaggccaatgacctgggccagcctgacagcctcttctctgtggtgattgtgaacctgtttgtgaatgaatctgtgaccaatgccaccctcatcaatgagctggtgaggaagagcacagaggcccctgtgacccccaacacagaaattgctgatgtgagcagccccaccagtgactatgtgaagatcctggtggccgctgtggccggcaccatcaccgtggtggtggtgatcttcatcacagctgtggtgcgctgccggcaggccccccacctgaaggccgcccagaagaacaagcagaacagcgagtgggccacccccaaccctgagaaccggcagatgatcatgatgaagaagaagaagaagaagaagaagcacagccccaagaacctgctgctgaactttgtgaccatcgaggagaccaaggcagatgatgtggacagtgatggcaacagagtgaccctggacctgcccatcgacctggaggagcagaccatgggcaagtacaactgggtgaccacccccaccaccttcaagccagacagcccagacctggcccggcactacaagagcgccagcccccagcctgccttccagatccagcctgagacccccctgaacagcaagcaccacatcatccaggagctgcccctggacaacacctttgtggcctgtgacagcatcagcaagtgcagcagcagcagcagtgacccctacagcgtgtctgactgtggctaccctgtgaccacctttgaggtgcctgtgtctgtgcacaccaggcctcccatgaaggaggtggtgcgcagctgcacccccatgaaggagagcaccaccatggagatctggatccacccccagccccagaggaagtctgagggcaaggtggccggcaagagccagaggagagtgaccttccacctgcctgagggcagccaggagagcagcagtgatggcggcctgggggaccatgatgctggcagcctgaccagcaccagccacggcctgcccctgggctacccccaggaggagtactttgaccgggccacccccagcaacagaacagaaggagatggcaacagcgaccctgagagcacagctgagatcaccgtgcagcccaccgtggaggaggccagtgacaactgcacccaggagtgcctgatctacggccacagtgatgcctgctggatgcctgccagcctggaccacagcagcagcagccaggcccaggccagcgccctgtgccacagcccccccctgagccaggccagcacccagcaccacagcccccgggtgacccagaccatcgccctgtgccacagcccccctgtgacccagaccatcgccctgtgccacagccccccacccatccaggtgtctgccctgcaccacagcccccccctggtgcaggccacagccctgcaccacagccccccatctgcccaggccagcgccctgtgctacagcccccccctggcccaggccgccgccatcagccacagcagccccctgccccaggtgattgccctgcacaggagccaggcccagagctctgtgtccctgcagcagggctgggtgcagggcgcagatggcctgtgcagcgtggaccagggcgtgcagggcagcgccaccagccagttctacaccatgtctgagcggctgcaccccagtgatgacagcatcaaggtgatccccctgaccaccttcaccccccggcagcaggcccggcccagcagaggagacagccccatcatggaggagcaccccctgtag

SEQ ID NO: 324635 - DNA, 4020 bp, Artificial Sequence
  derived and/or modified sequence
atggacctgctgagcggcacctacatcttcgccgtgctgctggcctgcgtcgtattccacagcggcgcccaggaaaaaaattacaccattcgcgaggaaatgccagaaaatgttctgataggggatctgctaaaggacctgaatctttcgctcatccccaacaagtcactgacaaccgcaatgcagttcaaactggtttacaaaaccggggatgtgcccctgatccgtattgaagaggacacaggagagatcttcaccacgggggcccggatagatagggaaaagctgtgtgcgggtatcccacgagatgagcattgtttttatgaagtcgaggtagcaatcttaccagacgaaatctttcggctggtgaagattcgctttctgattgaggacattaacgacaatgctccactgttccctgcaaccgtgataaacattagcatcccagagaattctgcgattaactcgaagtatacactccccgcggctgttgacccagatgttggtataaacggcgtccagaattacgagttgattaagtcacagaacattttcggacttgatgtgattgaaaccccagagggcgacaagatgcctcagttaatagtgcagaaagaactggaccgtgaagagaaggatacttatgtgatgaaggtaaaagtggaggatggcgggtttccacaaaggagtagcaccgctatcctccaagtaagcgtcacagacaccaacgacaatcatcccgtctttaaagagacggagatcgaagtatcaatccctgagaacgcaccggtcggcacatcggtgactcagttacacgccacagatgcagacatcggcgagaatgccaaaatccattttagttttagcaatctggtgtcaaatatagccaggaggcttttccacctcaatgccaccaccggtttaatcaccatcaaggaaccactggatagggaagaaaccccaaaccataagcttctcgtactagcctctgacggtggactgatgcctgctagggcaatggtgttagttaacgtgaccgacgtgaatgacaatgtgccttccattgatattcgctatatcgtgaacccagtaaacgatactgttgtgctctccgagaatattccactgaacaccaagatcgcattgattacggtcacggataaagacgccgatcataacgggcgggtgacgtgttttaccgaccatgaaatcccattccggctgaggccggtgtttagcaaccagtttctcttggaaaccgcagcctacttagactatgagagcaccaaagaatatgccattaaactgctggctgccgatgcaggcaaaccccccctaaaccagtccgccatgctgttcatcaaggttaaggatgaaaacgacaacgcgcctgtcttcacccagtcgtttgtgacggtaagcatccctgagaataacagccccggtattcagctgactaaggtaagcgccatggacgctgacagcggtcccaacgccaagatcaattacctgcttggacctgatgccccccccgagtttagccttgattgccgtacggggatgctcaccgtagtcaaaaaacttgaccgcgaaaaagaggataagtatctgtttaccatcctggctaaggataacggtgtgccacctctgacttctaacgtcaccgtgtttgtgtcaattatcgatcagaatgataatagcccagtgttcacgcacaacgaatataacttttatgttccagaaaatctaccacggcatggaaccgtgggccttatcacggtgacagaccccgactatggggataacagtgccgttactttgagcattctggatgaaaatgatgattttactatagacagtcaaacaggcgtaatccggcctaatatatctttcgatagagaaaagcaggagtcctacactttttatgtgaaggccgaagacggaggcagagtttccagaagttcctccgccaaagtcaccatcaatgtagtcgacgtgaatgacaacaaaccggtattcattgtccctccatccaattgttcctatgaattggtgctcccaagcacaaatccaggcactgtggtgtttcaggttattgccgtggacaatgataccggaatgaacgccgaggtgagatactccattgtgggcggtaacactagggatctcttcgcaatcgaccaagaaaccggtaacattactttgatggagaaatgtgatgttacggatctggggctgcacagggtgctcgtgaaagctaacgatctgggccagcccgattctttgtttagtgttgtgattgtcaatttattcgttaacgagtctgtgacaaacgccactttaatcaacgaactggtgcggaagtcaacagaggcccccgtgacgccaaataccgagatagccgacgtcagtagccccacctctgactacgtaaagattcttgtcgcagccgtggccggcaccatcaccgtcgtggtggtaattttcatcactgccgtggtgaggtgtcgccaggctcctcatctgaaggctgcccagaaaaacaagcagaattccgagtgggccactccaaaccctgaaaaccgccaaatgatcatgatgaagaaaaaaaagaaaaaaaagaagcatagtcccaagaatctgctgcttaattttgttaccatcgaggaaaccaaagcagatgacgtagacagtgacggaaatcgcgtcactctggatctgccgatcgacctggaagagcagaccatgggcaaatacaattgggtcactacgcccactacatttaaaccagacagtccagacctcgctaggcactacaagtctgcttcccctcagccggccttccagattcagcccgagactccactcaactccaaacaccacataattcaggagcttccacttgacaataccttcgttgcatgcgacagtatctcaaaatgcagctcgagctctagcgatccctacagcgttagcgactgcggctatcctgtcactactttcgaagtcccagtgtccgtccacacccgccccccaatgaaagaggtggtaaggtcatgtacccccatgaaggaaagtactactatggagatttggattcaccctcaaccccagcggaagagtgaaggcaaagtggccgggaagtcacaacgtagagtgacttttcacctgccggagggcagccaggaatccagttcagatggagggttgggggaccacgatgccggctccctcacttctacatctcacgggttacccctgggctatccccaggaagagtactttgacagggcaactccgtctaatcgaaccgagggggacggaaacagcgatccagagtcaactgccgagattacagtccaaccaactgtagaggaggcttctgacaactgcacgcaggaatgcttaatttatggccacagcgacgcctgttggatgcccgccagcctggatcattcttcttcaagccaggcccaggccagcgccctgtgtcatagccctcccttaagccaggccagtactcaacaccattctcccagagtcacgcagaccattgccctctgtcactcaccccctgttacacaaaccattgcactctgtcattctccaccccccatacaggtcagtgccctacatcatagccctccactagttcaagcgaccgcactgcatcatagtccgcccagcgctcaagcatcagccctttgttatagcccacccctggcgcaagccgcggctatctcacatagctctcctctgcctcaggtcatagccttgcatcggtcccaggctcagagctccgtttctctccaacaggggtgggttcagggtgcagatgggctgtgctcggttgaccagggcgtgcagggatcggccactagtcagttctacacaatgagcgaacggcttcacccctctgacgactcaatcaaggtcatcccacttaccactttcaccccgcgccagcaggctagaccttccaggggggattcccccatcatggaagagcatccgttgtag

SEQ ID NO: 324636 - DNA, 4020 bp, Artificial Sequence
  derived and/or modified sequence
atggacctgctcagcggcacttatatatttgccgtcctactcgcctgcgtggtattccacagcggggcacaagagaagaactacactatccgagaggaaatgccagaaaacgtcctcataggtgacttactcaaggatctgaacctgtcactgatccctaacaaaagtttgacaactgctatgcaattcaagttagtctataagacaggcgacgtaccattgattagaattgaagaggacacaggggagatttttaccactggagcacgcattgacagagagaaactttgcgccggtatccccagagatgagcactgtttttacgaagtggaagtcgcaattctgccagatgagatctttcgattagtcaagatccgctttctgattgaggatatcaatgataacgctcctctgtttcctgccacagtaatcaacatcagcatcccagaaaactccgctattaatagcaagtacaccctccccgctgctgtggaccctgacgttggtatcaatggtgttcaaaactatgagttgatcaaatcccaaaatatattcggtctagacgtgatagagacccccgagggcgacaagatgccacaactgattgttcaaaaggagttggacagggaggaaaaggacacgtacgtgatgaaggtcaaggtcgaggacggcggtttcccccaacgctcttccaccgccattctgcaggtcagcgtaaccgacaccaacgataatcacccagtttttaaggagactgagatcgaagtgtccatacctgagaacgcacctgttggtacaagtgtgacacaattgcatgcgacggacgccgacatcggcgagaatgcgaaaatacatttttccttctcaaatctcgtgtctaatatcgcccgtcgactctttcatcttaatgctacaacgggtctaatcacaataaaagaacccctggatagggaagaaacgcctaaccacaagctgttggtgctggccagcgacggtggcctgatgcccgctagagccatggttctcgtcaacgtgactgacgttaacgacaatgttccgagcattgacatacgctacattgttaatcccgtgaacgacacggttgtccttagtgagaacatcccgttgaataccaaaatagcattgattaccgtgaccgacaaagatgctgaccacaacggtcgagtgacatgcttcaccgatcatgaaatcccttttcgcctccgccctgtgttctcgaaccagtttctgcttgagaccgcagcttacctggattacgagagcactaaagaatacgctataaaattgctcgccgcagatgccggaaagccccctctcaaccaatctgctatgctcttcatcaaggtcaaggatgaaaatgataatgctcctgtgtttacccagtcgttcgttacggtgtccattcccgagaacaactcacccggaatacagctgacaaaagtgtccgcaatggatgctgattccggaccgaatgctaaaattaactaccttttggggcctgacgctccacccgaattttcattagactgtcgcacaggcatgctgaccgtggttaagaaactagaccgtgaaaaagaagataagtatctctttaccatactggctaaagataacggtgtcccccctctgacttcaaacgtgactgtttttgtgtccatcatcgatcagaatgataattctcctgtcttcacacacaatgagtataacttttacgttccagagaacttgcctcgccacggaacggtcggcctgatcacagttacagaccctgattacggcgataattctgcggtgactctgtccatactggatgagaacgacgactttacaatagacagtcaaactggggtgattcgcccaaacattagcttcgaccgggaaaagcaggaaagctacacgttctatgtgaaggcagaggacggagggcgtgtgtccagaagcagcagcgcgaaggttactatcaacgtggtggatgtcaacgacaataaaccggttttcatagtgcctccttctaactgcagctatgagctggttctgccctctaccaacccaggaactgtggtctttcaagtcatcgcagtggataatgacaccggtatgaacgctgaagtcaggtatagcattgtgggaggaaatacccgagatctgttcgcaattgatcaagaaacaggcaacataaccctgatggagaaatgcgatgtgaccgacctcggactgcacagagttctggttaaggctaatgatctgggacagccagattctttattttccgtcgtgattgtcaacctctttgtgaacgaatccgtgactaacgcaactctgatcaatgaactcgtcaggaagtctacagaagcgccagttacccctaatactgaaatagccgacgtttcctcccctacctccgattacgtcaagatactagtggccgcagtcgcgggaaccataaccgtcgtcgtggtgatctttatcaccgccgtcgtcaggtgtcgccaggctccacatctcaaggccgctcagaaaaacaagcagaatagtgagtgggctacgcccaatccggagaatcgccaaatgattatgatgaagaagaaaaaaaaaaagaagaagcactcaccaaagaaccttctactgaatttcgtcaccattgaagagactaaggccgacgacgtcgactctgacggcaacagagtcaccttggatctcccaatcgacctcgaggaacaaacgatgggaaaatataactgggttacaacccctactacttttaagccagattccccagatcttgccagacactataagtcagctagtccacagccagctttccagattcagcccgagacacctctgaactcaaaacaccacattattcaagagctgcccttggataacacgtttgtagcctgtgattcaatatctaaatgcagcagttccagcagcgatccctatagcgtgagcgactgcggctatccagtcaccacatttgaagtccctgtctctgtgcataccagaccgcctatgaaggaagtggtacggagctgcactcctatgaaagaaagcaccacaatggagatttggatccacccacagccacaacgtaagtcagagggcaaggtcgccggaaagtctcagcgcagagtgactttccatctgcccgagggctcacaagagagcagtagcgacggtggtctgggagaccacgacgccggtagcctgacctcaacctcccacggcctgcctctcggctatcctcaggaagaatacttcgatcgcgcaacaccatcaaataggactgagggcgacggaaattcagatcccgagtctaccgctgaaattacagtgcagccgactgtggaggaggcttccgataactgcacccaagagtgcctgatatacggccacagcgatgcttgctggatgcccgctagcttggaccatagctcttcatcacaggcgcaggcctcagctctttgtcactctcctccattatcccaggcctcaactcagcatcactctcccagagtgactcagactatcgcgctctgtcacagcccacccgttacccagaccatagcactgtgccattcgccaccgcctatacaggtgagtgctctacatcactcgccccctctagtgcaggctacagccctgcatcactctccgccatccgctcaggccagtgccctttgctactctcccccattggcacaagctgcagcaatctcccactcatcgcctctccctcaggtaatcgcgttgcaccgttctcaagcacagtcaagtgtgtcattgcagcaggggtgggtccagggcgctgacggactgtgctctgtggaccagggtgtgcagggtagcgccaccagtcagttttatactatgtctgaaaggctgcacccttcagacgactccatcaaagtgatccccttaaccacatttacgccccgtcagcaggcccgtccgtcccgtggcgacagtccaatcatggaggagcacccgttgtag

SEQ ID NO: 324637 - DNA, 4020 bp, Artificial Sequence
  derived and/or modified sequence
atggacttgttgtccgggacgtacattttcgcggtcctgctagcatgcgtggtgttccactctggcgcccaggagaaaaactacaccatccgagaagaaatgccagaaaacgtcctgataggcgacttgttgaaagaccttaacttgtcgctgattccaaacaagtccttgacaactgctatgcagttcaagctagtgtacaagaccggagatgtgccactgattcgaattgaagaggatactggtgagatcttcactactggcgctcgcattgatcgtgagaaattatgtgctggtatcccaagggatgagcattgcttttatgaagtggaggttgccattttgccggatgaaatatttagactggttaagatacgttttctgatagaagatataaatgataatgcaccattgttcccagcaacagttatcaacatatcaattccagagaactcggctataaactctaaatatactctcccagcggctgttgatcctgacgtaggaataaacggagttcaaaactacgaactaattaagagtcaaaacatttttggcctcgatgtcattgaaacaccagaaggagacaagatgccacaactgattgttcaaaaggagttagatagggaagagaaggatacctacgtgatgaaagtaaaggttgaagatggtggctttcctcaaagatccagtactgctattttgcaagtgagtgttactgatacaaatgacaaccacccagtctttaaggagacagagattgaagtcagtataccagaaaatgctcctgtaggcacttcagtgacacagctccatgccacagatgctgacataggtgaaaatgccaagatccacttctctttcagcaatctagtctccaacattgccaggagattatttcacctcaatgccaccactggacttatcacaatcaaagaaccactggatagggaagaaacaccaaaccacaagttactggttttggcaagtgatggtggattgatgccagcaagagcaatggtgctggtaaatgttacagatgtcaatgataatgtcccatccattgacataagatacatcgtcaatcctgtcaatgacacagttgttctttcagaaaatattccactcaacaccaaaattgctctcataactgtgacggataaggatgcggaccataatggcagggtgacatgcttcacagatcatgaaatccctttcagattaaggccagtattcagtaatcagttcctcctggagactgcagcatatcttgactatgagtccacaaaagaatatgccattaaattactggctgcagatgctggcaaacctcctttgaatcagtcagcaatgctcttcatcaaagtgaaagatgaaaatgacaatgctccagttttcacccagtctttcgtaactgtttctattcctgagaataactctcctggcatccagttgacgaaagtaagtgcaatggatgcagacagtgggcctaatgctaagatcaattacctgctaggccctgatgctccacctgaattcagcctggattgtcgtacaggcatgctgactgtagtgaagaaactagatagagaaaaagaggataaatatttattcacaattctggcaaaagataacggggtaccacccttaaccagcaatgtcacagtctttgtaagcattattgatcagaatgacaatagcccagttttcactcacaatgaatacaacttctatgtcccagaaaaccttccaaggcatggtacagtaggactaatcactgtaactgatcctgattatggagacaattctgcagttacgctctccattttagatgagaatgatgacttcaccattgattcacaaactggtgtcatccgaccaaatatttcatttgatagagaaaaacaagaatcttacactttctatgtaaaggctgaggatggtggtagagtatcacgttcttcaagtgccaaagtaaccataaatgtggttgatgtcaatgacaacaaaccagttttcattgtccctccttccaactgttcttatgaattggttctaccgtccactaatccaggcacagtggtctttcaggtaattgctgttgacaatgacactggcatgaatgcagaggttcgttacagcattgtaggaggaaacacaagagatctgtttgcaatcgaccaagaaacaggcaacataacattgatggagaaatgtgatgttacagaccttggtttacacagagtgttggtcaaagctaatgacttaggacagcctgattctctcttcagtgttgtaattgtcaatctgttcgtgaatgagtcggtgaccaatgctacactgattaatgaactggtgcgcaaaagcactgaagcaccagtgaccccaaatactgagatagctgatgtatcctcaccaactagtgactatgtcaagatcctggttgcagctgttgctggcaccataactgtcgttgtagttattttcatcactgctgtagtaagatgtcgccaggcaccacaccttaaggctgctcagaaaaacaagcagaattctgaatgggctaccccaaacccagaaaacaggcagatgataatgatgaagaaaaagaaaaagaagaagaagcattcccctaagaacttgctgcttaattttgtcactattgaagaaactaaggcagatgatgttgacagtgatggaaacagagtcacactagaccttcctattgatctagaagagcaaacaatgggaaagtacaattgggtaactacacctactactttcaagcccgacagccctgatttggcccgacactacaaatctgcctctccacagcctgccttccaaattcagcctgaaactcccctgaattcgaagcaccacatcatccaagaactgcctctcgataacacctttgtggcctgtgactctatctccaagtgttcctcaagcagttcagatccctacagcgtttctgactgtggctatccagtgacgaccttcgaggtacctgtgtccgtacacaccagaccgccaatgaaggaggttgtgcgatcttgcacccccatgaaagagtctacaactatggagatctggattcatccccaaccacagcggaaatctgaagggaaagtggcaggaaagtcccagcggcgtgtcacatttcacctgccagaaggctctcaggaaagcagcagtgatggtggactgggagaccatgatgcaggcagccttaccagcacatctcatggcctgccccttggctatcctcaggaggagtactttgatcgtgctacacccagcaatcgcactgaaggggatggcaactccgatcctgaatctactgcagaaataactgttcaaccaactgtggaagaggcctctgacaactgcactcaagaatgtctcatctatggccattctgatgcctgctggatgccggcatctctggatcattccagctcttcgcaagcacaggcctctgctctatgccacagcccaccactgtcacaggcctctactcagcaccacagcccacgagtgacacagaccattgctctctgccacagccctccagtgacacagaccatcgcattgtgccacagcccaccaccgatacaggtgtctgctctccaccacagtcctcctctagtgcaggctactgcacttcaccacagcccaccatcagcacaggcctcagccctctgctacagccctcctttagcacaggctgctgcaatcagccacagctctcctctgccacaggttattgccctccatcgtagtcaggcccaatcatcagtcagtttgcagcaaggttgggtgcaaggtgctgatgggctatgctctgttgatcagggagtgcaaggtagtgcaacatctcagttttacaccatgtctgaaagacttcatcccagtgatgattcaattaaagtcattcctttgacaaccttcactccacgccaacaggccagaccgtccagaggtgattcccccattatggaagaacatcccttgtaa

SEQ ID NO: 324638 - DNA, 4020 bp, Artificial Sequence
  derived and/or modified sequence
atggacctgctgagcggcacctacatcttcgccgtgctgctggcctgcgtggtgttccacagcggcgcccaggagaagaactacaccatcagagaggagatgcccgagaacgtgctgatcggcgacctgctgaaggacctgaacctgagcctgatccccaacaagagcctgaccaccgccatgcagttcaagctggtgtacaagaccggcgacgtgcccctgatcagaatcgaggaggacaccggcgagatcttcaccaccggcgccagaatcgacagagagaagctgtgcgccggcatccccagagacgagcactgcttctacgaggtggaggtggccatcctgcccgacgagatcttcagactggtgaagatcagattcctgatcgaggacatcaacgacaacgcccccctgttccccgccaccgtgatcaacatcagcatccccgagaacagcgccatcaacagcaagtacaccctgcccgccgccgtggaccccgacgtgggcatcaacggcgtgcagaactacgagctgatcaagagccagaacatcttcggcctggacgtgatcgagacccccgagggcgacaagatgccccagctgatcgtgcagaaggagctggacagagaggagaaggacacctacgtgatgaaggtgaaggtggaggacggcggcttcccccagagaagcagcaccgccatcctgcaggtgagcgtgaccgacaccaacgacaaccaccccgtgttcaaggagaccgagatcgaggtgagcatccccgagaacgcccccgtgggcaccagcgtgacccagctgcacgccaccgacgccgacatcggcgagaacgccaagatccacttcagcttcagcaacctggtgagcaacatcgccagaagactgttccacctgaacgccaccaccggcctgatcaccatcaaggagcccctggacagagaggagacccccaaccacaagctgctggtgctggccagcgacggcggcctgatgcccgccagagccatggtgctggtgaacgtgaccgacgtgaacgacaacgtgcccagcatcgacatcagatacatcgtgaaccccgtgaacgacaccgtggtgctgagcgagaacatccccctgaacaccaagatcgccctgatcaccgtgaccgacaaggacgccgaccacaacggcagagtgacctgcttcaccgaccacgagatccccttcagactgagacccgtgttcagcaaccagttcctgctggagaccgccgcctacctggactacgagagcaccaaggagtacgccatcaagctgctggccgccgacgccggcaagccccccctgaaccagagcgccatgctgttcatcaaggtgaaggacgagaacgacaacgcccccgtgttcacccagagcttcgtgaccgtgagcatccccgagaacaacagccccggcatccagctgaccaaggtgagcgccatggacgccgacagcggccccaacgccaagatcaactacctgctgggccccgacgccccccccgagttcagcctggactgcagaaccggcatgctgaccgtggtgaagaagctggacagagagaaggaggacaagtacctgttcaccatcctggccaaggacaacggcgtgccccccctgaccagcaacgtgaccgtgttcgtgagcatcatcgaccagaacgacaacagccccgtgttcacccacaacgagtacaacttctacgtgcccgagaacctgcccagacacggcaccgtgggcctgatcaccgtgaccgaccccgactacggcgacaacagcgccgtgaccctgagcatcctggacgagaacgacgacttcaccatcgacagccagaccggcgtgatcagacccaacatcagcttcgacagagagaagcaggagagctacaccttctacgtgaaggccgaggacggcggcagagtgagcagaagcagcagcgccaaggtgaccatcaacgtggtggacgtgaacgacaacaagcccgtgttcatcgtgccccccagcaactgcagctacgagctggtgctgcccagcaccaaccccggcaccgtggtgttccaggtgatcgccgtggacaacgacaccggcatgaacgccgaggtgagatacagcatcgtgggcggcaacaccagagacctgttcgccatcgaccaggagaccggcaacatcaccctgatggagaagtgcgacgtgaccgacctgggcctgcacagagtgctggtgaaggccaacgacctgggccagcccgacagcctgttcagcgtggtgatcgtgaacctgttcgtgaacgagagcgtgaccaacgccaccctgatcaacgagctggtgagaaagagcaccgaggcccccgtgacccccaacaccgagatcgccgacgtgagcagccccaccagcgactacgtgaagatcctggtggccgccgtggccggcaccatcaccgtggtggtggtgatcttcatcaccgccgtggtgagatgcagacaggccccccacctgaaggccgcccagaagaacaagcagaacagcgagtgggccacccccaaccccgagaacagacagatgatcatgatgaagaagaagaagaagaagaagaagcacagccccaagaacctgctgctgaacttcgtgaccatcgaggagaccaaggccgacgacgtggacagcgacggcaacagagtgaccctggacctgcccatcgacctggaggagcagaccatgggcaagtacaactgggtgaccacccccaccaccttcaagcccgacagccccgacctggccagacactacaagagcgccagcccccagcccgccttccagatccagcccgagacccccctgaacagcaagcaccacatcatccaggagctgcccctggacaacaccttcgtggcctgcgacagcatcagcaagtgcagcagcagcagcagcgacccctacagcgtgagcgactgcggctaccccgtgaccaccttcgaggtgcccgtgagcgtgcacaccagaccccccatgaaggaggtggtgagaagctgcacccccatgaaggagagcaccaccatggagatctggatccacccccagccccagagaaagagcgagggcaaggtggccggcaagagccagagaagagtgaccttccacctgcccgagggcagccaggagagcagcagcgacggcggcctgggcgaccacgacgccggcagcctgaccagcaccagccacggcctgcccctgggctacccccaggaggagtacttcgacagagccacccccagcaacagaaccgagggcgacggcaacagcgaccccgagagcaccgccgagatcaccgtgcagcccaccgtggaggaggccagcgacaactgcacccaggagtgcctgatctacggccacagcgacgcctgctggatgcccgccagcctggaccacagcagcagcagccaggcccaggccagcgccctgtgccacagcccccccctgagccaggccagcacccagcaccacagccccagagtgacccagaccatcgccctgtgccacagcccccccgtgacccagaccatcgccctgtgccacagccccccccccatccaggtgagcgccctgcaccacagcccccccctggtgcaggccaccgccctgcaccacagcccccccagcgcccaggccagcgccctgtgctacagcccccccctggcccaggccgccgccatcagccacagcagccccctgccccaggtgatcgccctgcacagaagccaggcccagagcagcgtgagcctgcagcagggctgggtgcagggcgccgacggcctgtgcagcgtggaccagggcgtgcagggcagcgccaccagccagttctacaccatgagcgagagactgcaccccagcgacgacagcatcaaggtgatccccctgaccaccttcacccccagacagcaggccagacccagcagaggcgacagccccatcatggaggagcaccccctgtag

SEQ ID NO: 324639 - protein, 1329 aa, Artificial Sequence
  derived and/or modified sequence
MDLLSGTYIFAVLLACVVFHSGAQEKNYTIREEMPENVLIGDLLKDLNLSLIPNKSLTTAMQFKLVYKTGDVPLIRIEEDTGEIFTTGARIDREKLCAGIPRDEHCFYEVEVAILPDEIFRLVKIRFLIEDINDNAPLFPATVINISIPENSAINSKYTLPAAVDPDVGINGVQNYELIKSQNIFGLDVIETPEGDKMPQLIVQKELDREEKDTYVMKVKVEDGGFPQRSSTAILQVSVTDTNDNHPVFKETEIEVSIPENAPVGTSVTQLHATDADIGENAKIHFSFSNLVSNIARRLFHLNATTGLITIKEPLDREETPNHKLLVLASDGGLMPARAMVLVNVTDVNDNVPSIDIRYIVNPVNDTVVLSENIPLNTKIALITVTDKDADHNGRVTCFTDHEIPFRLRPVFSNQFLLETAAYLDYESTKEYAIKLLAADAGKPPLNQSAMLFIKVKDENDNAPVFTQSFVTVSIPENNSPGIQLTKVSAMDADSGPNAKINYLLGPDAPPEFSLDCRTGMLTVVKKLDREKEDKYLFTILAKDNGVPPLTSNVTVFVSIIDQNDNSPVFTHNEYNFYVPENLPRHGTVGLITVTDPDYGDNSAVTLSILDENDDFTIDSQTGVIRPNISFDREKQESYTFYVKAEDGGRVSRSSSAKVTINVVDVNDNKPVFIVPPSNCSYELVLPSTNPGTVVFQVIAVDNDTGMNAEVRYSIVGGNTRDLFAIDQETGNITLMEKCDVTDLGLHRVLVKANDLGQPDSLFSVVIVNLFVNESVTNATLINELVRKSTEAPVTPNTEIADVSSPTSDYVKILVAAVAGTITVVVVIFITAVVRCRQAPHLKAAQKNKQNSEWATPNPENRQMIMMKKKKKKKKHSPKNLLLNFVTIEETKADDVDSDGNRVTLDLPIDLEEQTMGKYNWVTTPTTFKPDSPDLARHYKSASPQPAFQIQPETPLNSKHHIIQELPLDNTFVACDSISKCSSSSSDPYSVSDCGYPVTTFEVPVSVHTRPPMKEVVRSCTPMKESTTMEIWIHPQPQSQRRVTFHLPEGSQESSSDGGLGDHDAGSLTSTSHGLPLGYPQEEYFDRATPSNRTEGDGNSDPESTAEITVQPTVEEASDNCTQECLIYGHSDACWMPASLDHSSSSQAQASALCHSPPLSQASTQHHSPRVTQTIALCHSPPVTQTIALCHSPPPIQVSALHHSPPLVQATALHHSPPSAQASALCYSPPLAQAAAISHSSPLPQVIALHRSQAQSSVSLQQGWVQGADGLCSVDQGVQGSATSQFYTMSERLHPSDDSIKVIPLTTFTPRQQARPSRGDSPIMEEHPL

SEQ ID NO: 324640 - DNA, 3990 bp, Artificial Sequence
  derived and/or modified sequence
atggatctgctgagtgggacctacatctttgccgttctgctggcctgcgtcgtttttcactcgggcgctcaagagaagaattacacaatcagagaagaaatgcccgagaatgtgcttatcggagacttgcttaaagatctgaatctctccctgattccaaataagtcactgaccaccgctatgcagtttaaacttgtctataagaccggcgatgttcctctgattcgaattgaggaggacacaggagaaatttttaccaccggagcacgcatagaccgggagaagctctgtgctgggatcccccgggacgagcattgcttctacgaggttgaggtcgcaattctgcctgacgagatttttcggttggtaaagatcaggttcttaatcgaagacatcaatgacaacgcacctctgttccccgctacagtgatcaacataagcattccggagaacagcgcgattaacagcaagtacacactaccagccgcagtggacccggatgtcggtatcaacggcgtgcaaaattacgagcttataaaatcccagaacatctttgggttggacgtgatcgagacccccgaaggggataagatgccacaactcatcgtgcaaaaggagctggatcgcgaggaaaaagatacatacgtgatgaaggtcaaggtggaggatggtggcttccctcagcgatccagcaccgctattcttcaggtgtcagtgaccgataccaatgataaccacccggtgtttaaggagaccgaaatcgaggtgtcaatccccgaaaatgcacccgtgggtacatccgttacacagctgcatgccaccgacgccgacatcggcgagaatgcgaagattcacttcagtttttccaatctcgtttccaatattgcacggcgattattccacctgaacgccacaaccggcctgattacaattaaggaaccacttgatcgcgaagaaacccccaaccacaaactgctggtgttggccagtgacggcggcctcatgcctgcacgagccatggtgctagtcaacgtcacagacgttaatgacaatgtacccagtatcgatattcggtacattgtgaatccagtgaatgacacagtcgttctgtccgaaaacataccgttgaatacaaagatcgctctgatcaccgtcaccgataaagatgcagatcacaacgggagagttacttgttttactgaccatgagataccatttcggctacgccccgtgttcagtaaccaattcttactggagaccgcagcttatctggactatgagagtacgaaggagtatgcaataaaactcctcgctgcagacgccggtaaacctcctttgaatcagtccgccatgcttttcatcaaggtcaaggatgagaatgacaacgcccctgtgttcacccagagcttcgttaccgtgtcaatcccagagaataactctccaggaatccagcttacaaaagtgtccgccatggatgctgactcgggacccaacgcaaaaatcaattaccttctgggcccggatgccccacctgaatttagtctggattgcaggacaggcatgcttactgtggtcaagaagctagaccgggaaaaagaggacaagtatctgtttaccatcctggctaaagacaatggagtgccacctctgacatctaacgtgaccgtgttcgtctccatcatcgatcagaacgacaactcccccgtctttacacataacgagtataatttctatgttcctgagaacctcccccggcacgggaccgtgggcctgatcaccgtcacggacccagattacggcgataatagcgctgtgactttatcaatactggatgagaatgatgacttcaccatcgattcccagacgggcgtcattcggccgaatatcagcttcgaccgcgagaaacaggagtcttacacattttatgtgaaagctgaggatggaggaagagttagcaggagctcctccgctaaagttacgataaatgtcgtcgatgtgaatgacaataaacctgtgttcatcgtgcccccatccaactgtagttacgaacttgtgctcccatccacgaatccgggaacagttgtctttcaggtcatcgccgtcgataatgacacggggatgaacgctgaagtgcggtacagcattgtcggcggaaatacacgtgatctctttgctatcgaccaagagaccggcaacattacactaatggaaaagtgtgatgtgacagaccttgggcttcacagggtcctcgtgaaagccaatgacctgggtcagccagactcccttttttcagtcgtgatcgtgaacctgttcgtgaacgaaagcgttactaatgcaacacttatcaatgaactggttcgaaaaagcacggaggctcctgtgacaccaaatactgaaatcgcagacgtgtcaagtcctactagtgactacgtaaagattcttgtagcggcagtagccggcactattacagtggtggtagttatttttataactgccgtcgtcaggtgcagacaagcccctcatttgaaggctgctcaaaagaacaaacaaaactcagaatgggcaactccaaatccagaaaaccgccagatgattatgatgaagaagaaaaagaagaagaaaaagcattcaccaaaaaacctgctgttaaatttcgtcactatcgaagaaacaaaggctgacgacgttgactcagacgggaacagggtaacattggatttgccaatcgacctggaagagcagaccatgggaaagtacaactgggtgactaccccaacaaccttcaagccagactctcctgatctagctcgacactacaagtctgcttcacctcaacccgcgtttcagattcagcccgagacacctcttaactcaaaacatcatatcattcaggaacttccactggacaacacctttgtggcctgcgactctatttcaaagtgcagctccagtagtagtgatccttatagcgtctccgactgtggctacccagtaacaacattcgaggtgccggtcagcgtacacacccggccccccatgaaggaggtagtcagatcttgcacacctatgaaagaaagcacaaccatggaaatctggattcacccgcagcctcagtcacagaggcgcgtcaccttccatttacccgagggcagccaggagagcagcagtgatggcggactgggcgaccacgacgccgggagcctgaccagtacttctcacggccttccccttggctatcctcaagaggaatactttgatcgggccaccccttctaaccgcacagagggcgacggtaatagtgatcctgagtccaccgccgaaatcacggtgcagcctaccgtcgaggaggccagtgataactgcacacaggaatgtctaatctacggccactctgatgcctgctggatgcccgcgtccttggaccattcctcaagttcccaagcgcaggcctctgccctgtgtcatagtccaccacttagccaggcaagcacccagcatcactcccccagagtgacccaaaccatcgccctctgtcactctccacccgtcacccaaaccattgccctgtgtcattccccccccccgatacaggtgtcagcactccaccactcacctcccctggttcaggccacagccctgcaccactctccaccatctgcccaggcatccgcattgtgttacagtccccccttagctcaggccgccgctatatctcattcaagccccctgcctcaggtcatagccctgcaccgatcccaggcgcagtcttccgtatctctacaacaaggttgggtgcagggagccgacggcctgtgtagcgtggaccagggcgttcagggaagtgcgaccagtcaattttatactatgagtgaacggctgcatccttccgatgactctataaaggtcatccctctgacaacgtttacaccacggcagcaggcccggccttcaagaggtgattcacccattatggaggagcacccattgtag

SEQ ID NO: 324641 - DNA, 3990 bp, Artificial Sequence
  derived and/or modified sequence
atggacctgctgagcggcacctacatctttgctgtgctgctggcctgtgtggtgttccacagcggggcccaggagaagaactacaccatccgggaggagatgccagaaaatgtgctgattggagacctgctgaaggacctgaacctgagcctcatccccaacaagagcctgaccacagccatgcagttcaagctggtgtacaagacaggagatgtgcccctcatcagaattgaagaagatactggagagatcttcaccactggagccagaattgaccgggagaagctgtgtgccggcatccccagagatgagcactgcttctatgaggtggaggtggccatcctgcctgatgagatcttccggctggtgaagatccgcttcctgattgaggacatcaatgacaatgcccccctcttccctgccaccgtcatcaacatcagcatccctgagaacagcgccatcaacagcaagtacaccctgcctgctgctgtggaccctgatgtgggcatcaatggagtgcagaactatgagctgatcaagagccagaacatcttcggcctggatgtgattgagaccccagagggggacaagatgccccagctgattgtgcagaaggagctggaccgggaggagaaggacacctacgtgatgaaggtgaaggtggaggatggcggcttcccccagaggagcagcacagccatcctgcaggtgtctgtgacagacaccaatgacaaccaccctgtgttcaaggagacagaaattgaggtgtccatcccagaaaatgcccctgtgggcacctctgtgacccagctgcacgccacagatgctgacatcggggagaatgccaagatccacttctccttcagcaacctggtgagcaacatcgcccggcggctcttccacctgaatgccaccaccggcctcatcaccatcaaggagcccctggaccgggaggagacccccaaccacaagctgctggtgctggccagtgatggcggcctgatgcctgcccgggccatggtgctggtgaatgtgacagatgtgaatgacaacgtgcccagcattgacatccgctacatcgtgaaccctgtgaatgacacagtggtgctgtctgagaacatccccctgaacaccaagatcgccctgatcaccgtgacagacaaggatgctgaccacaacggccgggtgacctgcttcacagaccacgagatccccttccggctgcggcctgtgttcagcaaccagttcctgctggagacagctgcctacctggactatgagagcaccaaggagtatgccatcaagctgctggccgcagatgctgggaagccacccctgaaccagagcgccatgctgttcatcaaggtgaaggatgaaaatgacaatgcccctgtgttcacccagagctttgtgacagtgtccatccctgagaacaacagccctggcatccagctgaccaaggtgtctgccatggatgctgacagcggccccaatgccaagatcaactacctgctgggcccagatgcccctcctgagttcagcctggactgcaggacaggcatgctgactgtggtgaagaagctggaccgggagaaggaggacaagtacctgttcaccatcctggccaaggacaatggagtgccccccctgaccagcaatgtgacagtgtttgtgtccatcatcgaccagaatgacaacagccctgtgttcacccacaatgagtacaacttctacgtgcctgagaacctgcccaggcatggcaccgtgggcctcatcaccgtgacagatcctgactatggagacaacagcgctgtgaccctgagcatcctggatgaaaatgatgacttcaccatcgacagccagacaggagtcatccggcccaacatcagctttgaccgggagaagcaggagagctacaccttctacgtgaaggccgaggatggcggccgggtgagccgcagcagcagcgccaaggtgaccatcaacgtggtggatgtgaatgacaacaagcctgtgttcatcgtgccccccagcaactgcagctatgagctggtgctgcccagcaccaaccctggcaccgtggtgttccaggtgattgctgtggacaatgacaccggcatgaatgctgaggtgcgctacagcatcgtgggcggcaacacccgggacctgtttgccatcgaccaggagaccggcaacatcaccctgatggagaagtgtgatgtgacagacctgggcctgcaccgggtgctggtgaaggccaatgacctgggccagcctgacagcctcttctctgtggtgattgtgaacctgtttgtgaatgaatctgtgaccaatgccaccctcatcaatgagctggtgaggaagagcacagaggcccctgtgacccccaacacagaaattgctgatgtgagcagccccaccagtgactatgtgaagatcctggtggccgctgtggccggcaccatcaccgtggtggtggtgatcttcatcacagctgtggtgcgctgccggcaggccccccacctgaaggccgcccagaagaacaagcagaacagcgagtgggccacccccaaccctgagaaccggcagatgatcatgatgaagaagaagaagaagaagaagaagcacagccccaagaacctgctgctgaactttgtgaccatcgaggagaccaaggcagatgatgtggacagtgatggcaacagagtgaccctggacctgcccatcgacctggaggagcagaccatgggcaagtacaactgggtgaccacccccaccaccttcaagccagacagcccagacctggcccggcactacaagagcgccagcccccagcctgccttccagatccagcctgagacccccctgaacagcaagcaccacatcatccaggagctgcccctggacaacacctttgtggcctgtgacagcatcagcaagtgcagcagcagcagcagtgacccctacagcgtgtctgactgtggctaccctgtgaccacctttgaggtgcctgtgtctgtgcacaccaggcctcccatgaaggaggtggtgcgcagctgcacccccatgaaggagagcaccaccatggagatctggatccacccccagccccagagccagaggagagtgaccttccacctgcctgagggcagccaggagagcagcagtgatggcggcctgggggaccatgatgctggcagcctgaccagcaccagccacggcctgcccctgggctacccccaggaggagtactttgaccgggccacccccagcaacagaacagaaggagatggcaacagcgaccctgagagcacagctgagatcaccgtgcagcccaccgtggaggaggccagtgacaactgcacccaggagtgcctgatctacggccacagtgatgcctgctggatgcctgccagcctggaccacagcagcagcagccaggcccaggccagcgccctgtgccacagcccccccctgagccaggccagcacccagcaccacagcccccgggtgacccagaccatcgccctgtgccacagcccccctgtgacccagaccatcgccctgtgccacagccccccacccatccaggtgtctgccctgcaccacagcccccccctggtgcaggccacagccctgcaccacagccccccatctgcccaggccagcgccctgtgctacagcccccccctggcccaggccgccgccatcagccacagcagccccctgccccaggtgattgccctgcacaggagccaggcccagagctctgtgtccctgcagcagggctgggtgcagggcgcagatggcctgtgcagcgtggaccagggcgtgcagggcagcgccaccagccagttctacaccatgtctgagcggctgcaccccagtgatgacagcatcaaggtgatccccctgaccaccttcaccccccggcagcaggcccggcccagcagaggagacagccccatcatggaggagcaccccctgtag

SEQ ID NO: 324642 - DNA, 3990 bp, Artificial Sequence
  derived and/or modified sequence
atggacctgctgagcggcacctacatcttcgccgtgctgctggcctgtgttgtctttcattcaggcgcgcaggaaaagaactatacaatcagagaagagatgcctgagaatgtgctaattggcgatttgcttaaggatctcaatctgtccctaatccccaacaagtccctcacgaccgcaatgcagtttaagttagtctacaaaactggagacgtaccacttattcggatcgaggaagacaccggtgagatttttaccactggtgctcgcatcgaccgcgaaaagctatgtgccgggatccctcgcgacgagcactgcttttatgaagtggaggttgccatattacccgacgagattttcagacttgtgaagattagatttctgatcgaagacattaacgacaacgcccctctgtttcctgccactgtaatcaatatcagcatcccagaaaactccgctatcaatagcaagtacaccctacccgctgccgtcgacccagatgtcggtatcaacggagttcagaactacgaacttattaaatcccaaaatattttcggtttggacgtaattgagacccctgagggggataaaatgccacagctgatcgtgcagaaagagttagaccgagaggaaaaggatacttacgttatgaaggtgaaggtcgaggacgggggatttcctcagcgctcaagtacagcaatcctccaggtttctgtaactgatactaacgataaccacccagtgtttaaggaaaccgagatcgaggtgagcattcccgagaacgcacccgtcggcacatctgtcacccaacttcatgccacagacgcagacatcggagaaaacgccaagatccatttcagtttctccaatctagtaagtaacattgccagaagactatttcatctaaacgccactaccggcctgattactataaaggagcctctggatagggaggaaactccaaaccacaagctgttggtgctagcgtcagacggaggactgatgcccgcaagagccatggtgctcgtgaacgtgacagatgtgaatgataacgtgccatccatagacattcgctacattgtgaatcccgtcaatgatactgtcgtgctgagcgaaaacattcccctgaacaccaaaattgccctcatcactgtgactgacaaagacgccgaccataacggacgcgtgacatgctttacagatcatgagattccatttaggctgagacctgttttttccaatcagttcctgctcgagacagccgcatatttggactacgagtccaccaaagagtatgccatcaaacttctcgccgcagacgccggcaagccacccttgaaccagtccgcaatgctgttcattaaggtgaaggacgagaatgataatgcgcccgtcttcacacaatcgttcgtgacagtatcaatacccgagaataactcgccaggcatacagctcaccaaggtgagtgctatggatgccgatagcgggcctaacgctaagataaactacctactgggaccagatgcaccgccagagtttagccttgactgtagaacaggtatgcttacagtggtgaagaagctggatcgtgagaaggaggacaagtatttgtttaccatcttggctaaggataatggagtgccaccattaactagcaacgtcacagtatttgtttcaatcattgatcagaatgacaactccccagtgttcactcataacgagtacaacttctacgtacctgaaaatttgccgcggcacggtaccgtggggttaattaccgttacggaccccgattacggagataactcagccgtgaccttgtcaatcctggatgaaaatgacgacttcactatcgactcacagaccggcgtgatcaggcctaatattagttttgatcgcgaaaaacaggagagttataccttctacgttaaggcagaggacggtgggagggtgtctcggtcttcctccgcaaaggttactatcaacgtggtggatgtgaacgataataagcccgtattcattgttcctccttctaactgcagttacgagctcgtactcccatcaaccaaccccggaacggttgtgttccaggtgattgcagtggataatgacactggcatgaatgccgaggtccgttattcaattgtcggcggaaacacccgcgacctgtttgctatagatcaggagaccggcaatattacactaatggaaaagtgcgacgtcaccgacctcggcttgcaccgggtattggtgaaggcaaacgacctggggcagcccgacagtctatttagtgtcgtcatagtcaaccttttcgtgaacgaatctgttacaaacgcaacccttattaacgaactggtcagaaagagtacagaggctcccgttacccctaataccgaaattgccgatgtaagcagtccaaccagcgactacgtgaaaatcttggtggctgccgtagcgggcacgatcacagtggtggtggtgatcttcataacagcagtcgtgcgatgtcgacaggcgcctcatctgaaagctgctcagaaaaacaagcagaactccgagtgggccacccccaaccccgaaaacagacagatgatcatgatgaaaaaaaagaagaagaaaaagaaacacagccctaaaaatctgctgttgaacttcgtaacaatcgaggagacaaaggctgatgacgtggatagcgatggaaaccgcgtcactcttgacctgccaatagacctggaagagcagactatgggcaaatacaattgggtgacaacaccaactacctttaaacccgattccccagacctggcacgccattataagtctgcaagcccccagccagcatttcaaatccagcctgaaactcctcttaactctaagcaccacatcatccaggaactgcctctagataacacatttgtggcttgcgacagtatcagcaagtgcagctcttccagtagcgacccatatagcgtgtctgattgcgggtatcccgtgacaacttttgaagtcccggtcagcgtgcacacaagacctcctatgaaagaggtggtaaggtcttgtacaccaatgaaggaatctaccactatggagatttggattcatccccagccacagtctcagcgtagagttacatttcacctgcctgaaggatcccaggagtcctcctcagatggcggactgggggatcacgatgccggaagcctgactagtacaagccacgggctcccgctgggttacccacaggaggagtacttcgaccgagctactccatcaaaccgcaccgagggggatggcaactctgatcctgaaagtaccgctgaaatcacagtacagccaactgtagaggaagccagtgataactgcacgcaggagtgtctgatttacggccattcagacgcgtgttggatgcctgcatctcttgatcactcatccagctcacaggcccaggcttccgccctgtgtcacagcccaccattgtcccaggcctcgacccagcatcactccccacgagtgactcaaaccatagctctttgtcatagcccacctgttacccagaccatcgcgttgtgccactctccccccccgattcaggtctctgcgctgcatcacagcccaccgcttgttcaagcaaccgctctccatcatagtcccccatcagcacaggcgagcgccctttgttacagcccaccgctggcacaggctgcagcaattagtcattcatcacccctaccacaggtcattgcgctccaccggtcacaagcccagagctcagtaagtctgcagcaaggttgggtgcagggggcagatggcctgtgctctgtggatcagggagtgcagggaagtgcgacaagtcagttctacaccatgtccgaaaggctgcatccgtccgatgacagtattaaggtcatccctctcacgacttttaccccccgccagcaggcccggccatcacgcggcgattctccaattatggaggaacaccccctgtag

SEQ ID NO: 324643 - DNA, 3990 bp, Artificial Sequence
  derived and/or modified sequence
atggacctactgtctggcacctacatcttcgcagttttgctcgcctgtgtggtgttccacagcggcgctcaagaaaagaattacacaatacgagaggagatgccggaaaacgttttgataggggacctacttaaggatttgaatctgagcctcatccctaataaatccctgacaactgcaatgcagttcaagctcgtctacaagactggggatgtcccgctgatcaggatcgaagaggatacaggtgaaatctttactacaggtgctaggattgatcgcgaaaaattgtgtgcgggtatccccagggatgagcactgcttctatgaagtggaggtggctatcttaccagacgagatctttcggctggtgaagatccgctttctcatcgaggatataaatgataatgcacccctgttccccgctacagtgatcaacatatcaatccctgaaaactcggctattaactccaaatacacactcccagccgctgtggaccctgacgtgggaataaacggcgtacagaactatgagctgatcaaaagccagaacattttcggactggacgttatagaaacgcctgaaggtgacaagatgccccagttgatcgtgcagaaagaactcgatcgggaggagaaagatacttatgtaatgaaagtaaaggtcgaggatgggggatttcctcagcgttcttccacggccattctgcaagtctctgtgacagacacaaacgataatcaccccgtatttaaggagaccgagatcgaggtttccatacccgagaacgcaccagttgggacctctgttacacaactgcatgcgacggacgctgacataggagaaaatgccaagattcacttttcgttttctaatctagtgagcaatattgccagacgactgttccacctcaacgccacaacaggtcttattactattaaggaaccactcgatcgtgaggaaacccccaaccataagctgctcgtcctagcctctgacggaggattgatgccagcacgcgctatggttctggtgaatgtaactgacgtgaatgacaacgtcccttccatagacatccggtatatcgtgaaccccgtaaatgacacggtggttctgagcgagaacattcctcttaataccaaaattgccctgattaccgtgaccgacaaagatgccgatcacaacggccgagtgacttgtttcactgaccacgagatcccttttaggctcagacccgtcttctctaaccagtttctgcttgagaccgccgcatacctggattatgaatctaccaaggaatatgctatcaaattgctcgcggcagatgcgggaaagccgccactgaaccagagtgctatgctgtttatcaaagtcaaagatgaaaatgataacgcccctgtattcactcagtctttcgttaccgtctcgatcccagagaacaactcacccggtattcagctgaccaaggtctcagccatggacgctgattcaggacccaacgccaagattaactacctgctgggacccgatgcacccccagagttcagcttggactgccgaactgggatgctaacagtggttaagaagctcgacagggagaaagaagataagtacctgtttactatattggctaaagataacggcgttccccctttgacaagtaacgttaccgttttcgtgtctatcattgaccagaatgacaacagtcccgtgttcacccacaatgaatataacttctatgtacccgagaatctgcccaggcatgggacggttggtctgatcactgtcacagacccagactacggcgataactcagccgtgaccctgagcatcctggatgagaatgatgatttcaccattgactcgcagaccggggtcatcaggcccaacatcagctttgatcgggaaaagcaggagtcatataccttctacgtgaaggccgaagatggagggcgagtctcacgctcctcgtctgctaaggtgaccatcaatgttgtggacgttaacgacaataaaccggttttcatcgtcccaccttctaattgttcatatgagctggtgctgccaagtaccaatcccggtacagttgtgttccaagtgatcgctgtggacaatgataccggtatgaatgccgaggtgcgttattcaatcgtgggaggcaacaccagagacctattcgccatcgaccaggagaccgggaacattaccctgatggaaaaatgcgatgtgacagacttaggcctgcaccgggtgctcgttaaagcgaatgacttggggcagcccgactccctcttctcagtagtgattgttaacctattcgtcaacgagtcggtgactaatgccaccctaatcaatgagctggttagaaaatctaccgaagccccagtcacccccaacacagaaatcgcggacgtaagcagccccacctctgactatgtgaaaattcttgtcgccgcagtggctggcacgataactgtggtcgtggtcatctttattacagcagtcgttagatgccgacaagcacctcaccttaaggcggcacaaaaaaataagcagaacagtgaatgggccacccccaacccggaaaacagacagatgatcatgatgaagaagaaaaagaagaagaagaaacatagcccgaagaatcttctgcttaacttcgtgactatagaggaaaccaaggcagatgacgtcgattccgatgggaacagggtgacactcgaccttcctattgatctggaagagcagaccatggggaaatacaactgggtaactacaccaacaactttcaagccagactctccagatctggccagacactacaaatctgcttcaccacagcctgctttccagatccagcccgagacgccgctaaattctaaacaccacatcatccaggagctgcctctcgataatacctttgttgcctgtgacagcatctcaaagtgcagctcctcctcctcagacccatattccgtgtccgactgcggctatccagttacaaccttcgaggtgccagtcagcgtccatacgcgaccgcctatgaaggaagtggtgcgctcatgcactcccatgaaggagtcaacaaccatggaaatttggattcaccctcagccgcaaagccaacgaagggttactttccatctccctgaaggatctcaggagtcaagttctgacgggggactcggtgatcacgatgcgggatccctgacgagcacttctcacggcctcccgctcggctaccctcaagaggagtacttcgatagggccacaccttctaatagaaccgagggggacgggaacagcgaccctgaatccaccgctgagataacagtccagccaacagtagaggaggcatccgataattgtacccaagagtgccttatatatgggcactccgacgcctgttggatgccagcatcactggatcattcgagcagttcgcaggcccaggcaagcgcgctgtgtcattccccccctctgtcacaggctagcacccagcatcacagcccccgagtaacccagactattgctctgtgccactccccacctgtaactcagaccatcgctctctgccacagcccacccccaatacaggtctctgctctgcaccatagcccacccctggtgcaagctacggcactgcaccattcaccgccttcagcgcaggcatccgctctgtgttatagtccaccacttgcccaagccgctgccatatcccattcatcacctctgccgcaggtgatagcgctgcaccggtcacaagcgcaatctagcgtaagtttgcagcaggggtgggttcagggagcagacggactgtgtagcgtcgatcagggagttcaggggagcgctacatctcagttctacactatgagtgagcggctccacccctcagacgattccataaaagtgatccccctcaccaccttcacgccgagacagcaggctaggccctcccgtggcgattctcctataatggaagagcatcctctgtag

SEQ ID NO: 324644 - DNA, 3990 bp, Artificial Sequence
  derived and/or modified sequence
atggacttgttgtccgggacgtacattttcgcggtcctgctagcatgcgtggtgttccactctggcgcccaggagaaaaactacaccatccgagaagaaatgccagaaaacgtcctgataggcgacttgttgaaagaccttaacttgtcgctgattccaaacaagtccttgacaactgctatgcagttcaagctagtgtacaagaccggagatgtgccactgattcgaattgaagaggatactggtgagatcttcactactggcgctcgcattgatcgtgagaaattatgtgctggtatcccaagggatgagcattgcttttatgaagtggaggttgccattttgccggatgaaatatttagactggttaagatacgttttctgatagaagatataaatgataatgcaccattgttcccagcaacagttatcaacatatcaattccagagaactcggctataaactctaaatatactctcccagcggctgttgatcctgacgtaggaataaacggagttcaaaactacgaactaattaagagtcaaaacatttttggcctcgatgtcattgaaacaccagaaggagacaagatgccacaactgattgttcaaaaggagttagatagggaagagaaggatacctacgtgatgaaagtaaaggttgaagatggtggctttcctcaaagatccagtactgctattttgcaagtgagtgttactgatacaaatgacaaccacccagtctttaaggagacagagattgaagtcagtataccagaaaatgctcctgtaggcacttcagtgacacagctccatgccacagatgctgacataggtgaaaatgccaagatccacttctctttcagcaatctagtctccaacattgccaggagattatttcacctcaatgccaccactggacttatcacaatcaaagaaccactggatagggaagaaacaccaaaccacaagttactggttttggcaagtgatggtggattgatgccagcaagagcaatggtgctggtaaatgttacagatgtcaatgataatgtcccatccattgacataagatacatcgtcaatcctgtcaatgacacagttgttctttcagaaaatattccactcaacaccaaaattgctctcataactgtgacggataaggatgcggaccataatggcagggtgacatgcttcacagatcatgaaatccctttcagattaaggccagtattcagtaatcagttcctcctggagactgcagcatatcttgactatgagtccacaaaagaatatgccattaaattactggctgcagatgctggcaaacctcctttgaatcagtcagcaatgctcttcatcaaagtgaaagatgaaaatgacaatgctccagttttcacccagtctttcgtaactgtttctattcctgagaataactctcctggcatccagttgacgaaagtaagtgcaatggatgcagacagtgggcctaatgctaagatcaattacctgctaggccctgatgctccacctgaattcagcctggattgtcgtacaggcatgctgactgtagtgaagaaactagatagagaaaaagaggataaatatttattcacaattctggcaaaagataacggggtaccacccttaaccagcaatgtcacagtctttgtaagcattattgatcagaatgacaatagcccagttttcactcacaatgaatacaacttctatgtcccagaaaaccttccaaggcatggtacagtaggactaatcactgtaactgatcctgattatggagacaattctgcagttacgctctccattttagatgagaatgatgacttcaccattgattcacaaactggtgtcatccgaccaaatatttcatttgatagagaaaaacaagaatcttacactttctatgtaaaggctgaggatggtggtagagtatcacgttcttcaagtgccaaagtaaccataaatgtggttgatgtcaatgacaacaaaccagttttcattgtccctccttccaactgttcttatgaattggttctaccgtccactaatccaggcacagtggtctttcaggtaattgctgttgacaatgacactggcatgaatgcagaggttcgttacagcattgtaggaggaaacacaagagatctgtttgcaatcgaccaagaaacaggcaacataacattgatggagaaatgtgatgttacagaccttggtttacacagagtgttggtcaaagctaatgacttaggacagcctgattctctcttcagtgttgtaattgtcaatctgttcgtgaatgagtcggtgaccaatgctacactgattaatgaactggtgcgcaaaagcactgaagcaccagtgaccccaaatactgagatagctgatgtatcctcaccaactagtgactatgtcaagatcctggttgcagctgttgctggcaccataactgtcgttgtagttattttcatcactgctgtagtaagatgtcgccaggcaccacaccttaaggctgctcagaaaaacaagcagaattctgaatgggctaccccaaacccagaaaacaggcagatgataatgatgaagaaaaagaaaaagaagaagaagcattcccctaagaacttgctgcttaattttgtcactattgaagaaactaaggcagatgatgttgacagtgatggaaacagagtcacactagaccttcctattgatctagaagagcaaacaatgggaaagtacaattgggtaactacacctactactttcaagcccgacagccctgatttggcccgacactacaaatctgcctctccacagcctgccttccaaattcagcctgaaactcccctgaattcgaagcaccacatcatccaagaactgcctctcgataacacctttgtggcctgtgactctatctccaagtgttcctcaagcagttcagatccctacagcgtttctgactgtggctatccagtgacgaccttcgaggtacctgtgtccgtacacaccagaccgccaatgaaggaggttgtgcgatcttgcacccccatgaaagagtctacaactatggagatctggattcatccccaaccacagtcccagcggcgtgtcacatttcacctgccagaaggctctcaggaaagcagcagtgatggtggactgggagaccatgatgcaggcagccttaccagcacatctcatggcctgccccttggctatcctcaggaggagtactttgatcgtgctacacccagcaatcgcactgaaggggatggcaactccgatcctgaatctactgcagaaataactgttcaaccaactgtggaagaggcctctgacaactgcactcaagaatgtctcatctatggccattctgatgcctgctggatgccggcatctctggatcattccagctcttcgcaagcacaggcctctgctctatgccacagcccaccactgtcacaggcctctactcagcaccacagcccacgagtgacacagaccattgctctctgccacagccctccagtgacacagaccatcgcattgtgccacagcccaccaccgatacaggtgtctgctctccaccacagtcctcctctagtgcaggctactgcacttcaccacagcccaccatcagcacaggcctcagccctctgctacagccctcctttagcacaggctgctgcaatcagccacagctctcctctgccacaggttattgccctccatcgtagtcaggcccaatcatcagtcagtttgcagcaaggttgggtgcaaggtgctgatgggctatgctctgttgatcagggagtgcaaggtagtgcaacatctcagttttacaccatgtctgaaagacttcatcccagtgatgattcaattaaagtcattcctttgacaaccttcactccacgccaacaggccagaccgtccagaggtgattcccccattatggaagaacatcccttgtaa

SEQ ID NO: 324645 - DNA, 3990 bp, Artificial Sequence
  derived and/or modified sequence
atggacctgctgagcggcacctacatcttcgccgtgctgctggcctgcgtggtgttccacagcggcgcccaggagaagaactacaccatcagagaggagatgcccgagaacgtgctgatcggcgacctgctgaaggacctgaacctgagcctgatccccaacaagagcctgaccaccgccatgcagttcaagctggtgtacaagaccggcgacgtgcccctgatcagaatcgaggaggacaccggcgagatcttcaccaccggcgccagaatcgacagagagaagctgtgcgccggcatccccagagacgagcactgcttctacgaggtggaggtggccatcctgcccgacgagatcttcagactggtgaagatcagattcctgatcgaggacatcaacgacaacgcccccctgttccccgccaccgtgatcaacatcagcatccccgagaacagcgccatcaacagcaagtacaccctgcccgccgccgtggaccccgacgtgggcatcaacggcgtgcagaactacgagctgatcaagagccagaacatcttcggcctggacgtgatcgagacccccgagggcgacaagatgccccagctgatcgtgcagaaggagctggacagagaggagaaggacacctacgtgatgaaggtgaaggtggaggacggcggcttcccccagagaagcagcaccgccatcctgcaggtgagcgtgaccgacaccaacgacaaccaccccgtgttcaaggagaccgagatcgaggtgagcatccccgagaacgcccccgtgggcaccagcgtgacccagctgcacgccaccgacgccgacatcggcgagaacgccaagatccacttcagcttcagcaacctggtgagcaacatcgccagaagactgttccacctgaacgccaccaccggcctgatcaccatcaaggagcccctggacagagaggagacccccaaccacaagctgctggtgctggccagcgacggcggcctgatgcccgccagagccatggtgctggtgaacgtgaccgacgtgaacgacaacgtgcccagcatcgacatcagatacatcgtgaaccccgtgaacgacaccgtggtgctgagcgagaacatccccctgaacaccaagatcgccctgatcaccgtgaccgacaaggacgccgaccacaacggcagagtgacctgcttcaccgaccacgagatccccttcagactgagacccgtgttcagcaaccagttcctgctggagaccgccgcctacctggactacgagagcaccaaggagtacgccatcaagctgctggccgccgacgccggcaagccccccctgaaccagagcgccatgctgttcatcaaggtgaaggacgagaacgacaacgcccccgtgttcacccagagcttcgtgaccgtgagcatccccgagaacaacagccccggcatccagctgaccaaggtgagcgccatggacgccgacagcggccccaacgccaagatcaactacctgctgggccccgacgccccccccgagttcagcctggactgcagaaccggcatgctgaccgtggtgaagaagctggacagagagaaggaggacaagtacctgttcaccatcctggccaaggacaacggcgtgccccccctgaccagcaacgtgaccgtgttcgtgagcatcatcgaccagaacgacaacagccccgtgttcacccacaacgagtacaacttctacgtgcccgagaacctgcccagacacggcaccgtgggcctgatcaccgtgaccgaccccgactacggcgacaacagcgccgtgaccctgagcatcctggacgagaacgacgacttcaccatcgacagccagaccggcgtgatcagacccaacatcagcttcgacagagagaagcaggagagctacaccttctacgtgaaggccgaggacggcggcagagtgagcagaagcagcagcgccaaggtgaccatcaacgtggtggacgtgaacgacaacaagcccgtgttcatcgtgccccccagcaactgcagctacgagctggtgctgcccagcaccaaccccggcaccgtggtgttccaggtgatcgccgtggacaacgacaccggcatgaacgccgaggtgagatacagcatcgtgggcggcaacaccagagacctgttcgccatcgaccaggagaccggcaacatcaccctgatggagaagtgcgacgtgaccgacctgggcctgcacagagtgctggtgaaggccaacgacctgggccagcccgacagcctgttcagcgtggtgatcgtgaacctgttcgtgaacgagagcgtgaccaacgccaccctgatcaacgagctggtgagaaagagcaccgaggcccccgtgacccccaacaccgagatcgccgacgtgagcagccccaccagcgactacgtgaagatcctggtggccgccgtggccggcaccatcaccgtggtggtggtgatcttcatcaccgccgtggtgagatgcagacaggccccccacctgaaggccgcccagaagaacaagcagaacagcgagtgggccacccccaaccccgagaacagacagatgatcatgatgaagaagaagaagaagaagaagaagcacagccccaagaacctgctgctgaacttcgtgaccatcgaggagaccaaggccgacgacgtggacagcgacggcaacagagtgaccctggacctgcccatcgacctggaggagcagaccatgggcaagtacaactgggtgaccacccccaccaccttcaagcccgacagccccgacctggccagacactacaagagcgccagcccccagcccgccttccagatccagcccgagacccccctgaacagcaagcaccacatcatccaggagctgcccctggacaacaccttcgtggcctgcgacagcatcagcaagtgcagcagcagcagcagcgacccctacagcgtgagcgactgcggctaccccgtgaccaccttcgaggtgcccgtgagcgtgcacaccagaccccccatgaaggaggtggtgagaagctgcacccccatgaaggagagcaccaccatggagatctggatccacccccagccccagagccagagaagagtgaccttccacctgcccgagggcagccaggagagcagcagcgacggcggcctgggcgaccacgacgccggcagcctgaccagcaccagccacggcctgcccctgggctacccccaggaggagtacttcgacagagccacccccagcaacagaaccgagggcgacggcaacagcgaccccgagagcaccgccgagatcaccgtgcagcccaccgtggaggaggccagcgacaactgcacccaggagtgcctgatctacggccacagcgacgcctgctggatgcccgccagcctggaccacagcagcagcagccaggcccaggccagcgccctgtgccacagcccccccctgagccaggccagcacccagcaccacagccccagagtgacccagaccatcgccctgtgccacagcccccccgtgacccagaccatcgccctgtgccacagccccccccccatccaggtgagcgccctgcaccacagcccccccctggtgcaggccaccgccctgcaccacagcccccccagcgcccaggccagcgccctgtgctacagcccccccctggcccaggccgccgccatcagccacagcagccccctgccccaggtgatcgccctgcacagaagccaggcccagagcagcgtgagcctgcagcagggctgggtgcagggcgccgacggcctgtgcagcgtggaccagggcgtgcagggcagcgccaccagccagttctacaccatgagcgagagactgcaccccagcgacgacagcatcaaggtgatccccctgaccaccttcacccccagacagcaggccagacccagcagaggcgacagccccatcatggaggagcaccccctgtag

SEQ ID NO: 324646 - protein, 1347 aa, Artificial Sequence
  derived and/or modified sequence
MDLLSGTYIFAVLLACVVFHSGAQEKNYTIREEMPENVLIGDLLKDLNLSLIPNKSLTTAMQFKLVYKTGDVPLIRIEEDTGEIFTTGARIDREKLCAGIPRDEHCFYEVEVAILPDEIFRLVKIRFLIEDINDNAPLFPATVINISIPENSAINSKYTLPAAVDPDVGINGVQNYELIKSQNIFGLDVIETPEGDKMPQLIVQKELDREEKDTYVMKVKVEDGGFPQRSSTAILQVSVTDTNDNHPVFKETEIEVSIPENAPVGTSVTQLHATDADIGENAKIHFSFSNLVSNIARRLFHLNATTGLITIKEPLDREETPNHKLLVLASDGGLMPARAMVLVNVTDVNDNVPSIDIRYIVNPVNDTVVLSENIPLNTKIALITVTDKDADHNGRVTCFTDHEIPFRLRPVFSNQFLLETAAYLDYESTKEYAIKLLAADAGKPPLNQSAMLFIKVKDENDNAPVFTQSFVTVSIPENNSPGIQLTKVSAMDADSGPNAKINYLLGPDAPPEFSLDCRTGMLTVVKKLDREKEDKYLFTILAKDNGVPPLTSNVTVFVSIIDQNDNSPVFTHNEYNFYVPENLPRHGTVGLITVTDPDYGDNSAVTLSILDENDDFTIDSQTGVIRPNISFDREKQESYTFYVKAEDGGRVSRSSSAKVTINVVDVNDNKPVFIVPPSNCSYELVLPSTNPGTVVFQVIAVDNDTGMNAEVRYSIVGGNTRDLFAIDQETGNITLMEKCDVTDLGLHRVLVKANDLGQPDSLFSVVIVNLFVNESVTNATLINELVRKSTEAPVTPNTEIADVSSPTSDYVKILVAAVAGTITVVVVIFITAVVRCRQAPHLKAAQKNKQNSEWATPNPENRQMIMMKKKKKKKKHSPKNLLLNFVTIEETKADDVDSDGNRVTLDLPIDLEEQTMGKYNWVTTPTTFKPDSPDLARHYKSASPQPAFQIQPETPLNSKHHIIQELPLDNTFVACDSISKCSSSSSDPYSVSDCGYPVTTFEVPVSVHTRPPMKEVVRSCTPMKESTTMEIWIHPQPQRKSEGKVAGKSQRRVTFHLPEGSQESSSDGGLGDHDAGSLTSTSHGLPLGYPQEEYFDRATPSNRTEGDGNSDPESTFIPRSPTAAEITVQPTVEEASDNCTQECLIYGHSDACWMPASLDHSSSSQAQASALCHSPPLSQASTQHHSPRVTQTIALCHSPPVTQTIALCHSPPPIQVSALHHSPPLVQATALHHSPPSAQASALCYSPPLAQAAAISHSSPLPQVIALHRSQAQSSVSLQQGWVQGADGLCSVDQGVQGSATSQFYTMSERLHPSDDSIKVIPLTTFTPRQQARPSRGDSPIMEEHPL

SEQ ID NO: 324647 - protein, 1021 aa, Artificial Sequence
  derived and/or modified sequence
MDLLSGTYIFAVLLACVVFHSGAQEKNYTIREEMPENVLIGDLLKDLNLSLIPNKSLTTAMQFKLVYKTGDVPLIRIEEDTGEIFTTGARIDREKLCAGIPRDEHCFYEVEVAILPDEIFRLVKIRFLIEDINDNAPLFPATVINISIPENSAINSKYTLPAAVDPDVGINGVQNYELIKSQNIFGLDVIETPEGDKMPQLIVQKELDREEKDTYVMKVKVEDGGFPQRSSTAILQVSVTDTNDNHPVFKETEIEVSIPENAPVGTSVTQLHATDADIGENAKIHFSFSNLVSNIARRLFHLNATTGLITIKEPLDREETPNHKLLVLASDGGLMPARAMVLVNVTDVNDNVPSIDIRYIVNPVNDTVVLSENIPLNTKIALITVTDKDADHNGRVTCFTDHEIPFRLRPVFSNQFLLETAAYLDYESTKEYAIKLLAADAGKPPLNQSAMLFIKVKDENDNAPVFTQSFVTVSIPENNSPGIQLTKVSAMDADSGPNAKINYLLGPDAPPEFSLDCRTGMLTVVKKLDREKEDKYLFTILAKDNGVPPLTSNVTVFVSIIDQNDNSPVFTHNEYNFYVPENLPRHGTVGLITVTDPDYGDNSAVTLSILDENDDFTIDSQTGVIRPNISFDREKQESYTFYVKAEDGGRVSRSSSAKVTINVVDVNDNKPVFIVPPSNCSYELVLPSTNPGTVVFQVIAVDNDTGMNAEVRYSIVGGNTRDLFAIDQETGNITLMEKCDVTDLGLHRVLVKANDLGQPDSLFSVVIVNLFVNESVTNATLINELVRKSTEAPVTPNTEIADVSSPTSDYVKILVAAVAGTITVVVVIFITAVVRCRQAPHLKAAQKNKQNSEWATPNPENRQMIMMKKKKKKKKHSPKNLLLNFVTIEETKADDVDSDGNRVTLDLPIDLEEQTMGKYNWVTTPTTFKPDSPDLARHYKSASPQPAFQIQPETPLNSKHHIIQELPLDNTFVACDSISKCSSSSSDPYSVSDCGYPVTTFEVPVSVHTRPVGIQVSNTTF

SEQ ID NO: 324648 - DNA, 4044 bp, Artificial Sequence
  derived and/or modified sequence
atggacctgctctcagggacttatatttttgcagttctcctcgcctgcgtggtttttcactctggagctcaggaaaagaattatacaatccgggaagaaatgcccgaaaatgtgctgatcggcgatctgctgaaggatctgaacctgagcctgataccaaacaagtcactgactactgcaatgcagttcaagctagtatacaagaccggggacgttcctctgattagaattgaggaggacaccggcgaaatattcaccacaggggcacggatcgaccgagagaagctgtgtgctgggattcccagagacgaacattgtttttacgaagtggaagtggcaattcttcccgatgaaatcttccgcctcgtgaaaatccgcttcctcatcgaggacattaatgataacgctcccctgttccccgcaaccgtcataaacattagtatcccggaaaattcagctattaattccaagtataccctgcccgccgctgtcgaccctgatgttggcatcaatggcgtacagaactatgagttgatcaagtcccagaatatcttcggtctggacgtgatcgagacgcccgagggggacaaaatgcctcagctgatagtgcagaaggaactagacagagaggaaaaggacacctatgtgatgaaggtcaaggtggaagatggcgggttccctcaacgctcttccaccgctattctccaggtcagcgtcactgacacaaacgataatcaccccgtattcaaagagaccgaaatcgaggtgagtattccggagaacgcccctgtggggaccagcgtcactcagctccacgcaaccgacgctgatattggggaaaatgcgaaaattcacttctccttttctaatttggtttctaatatcgcacggcggctttttcatctcaatgccaccacgggcctcataactatcaaagagcccttggatcgcgaggagacccccaatcacaaactcctagtcttagccagcgatggcggtctgatgcctgcccgcgctatggtgttagtcaacgtgaccgatgtgaatgataacgtgccatctatcgatattcgctatattgtgaatccagtcaacgatactgtagtgctcagcgagaatattccactaaacaccaaaatcgccctgattacagtgactgataaagacgctgaccataacggcagggtgacatgtttcacagatcatgaaatacctttcagactgcgtccagtcttcagtaaccaatttctcctggagaccgcagcatacctcgattatgaatccaccaaagaatatgccatcaagctgctggccgccgacgcaggaaagcctcccctgaatcaaagtgcgatgctgttcatcaaggtcaaggatgagaatgacaacgctcccgtgttcactcagtccttcgtgacagtcagtattcctgaaaataatagcccaggcattcagctgacaaaagtgagcgctatggacgccgatagcgggccgaacgctaaaattaactatttgctgggacctgacgcccctccagaattttccctggattgcaggacaggtatgttgactgttgtgaaaaaattggatcgcgagaaggaagataagtatttgttcaccattctggcaaaggataacggcgtcccccctctgaccagcaacgtgactgttttcgtctcgataatagatcaaaacgacaatagtcccgtctttactcataatgaatataatttttacgtcccagagaatctcccaagacacggcaccgtggggctgataaccgtcaccgacccagactacggtgacaactccgccgttacactcagtatcttagacgagaatgatgacttcaccatcgatagccagactggtgtcatccggccaaacatatcatttgaccgggagaagcaagaatcatatactttctatgttaaggcagaggacgggggaagagttagtcgctccagcagtgctaaggtgactataaacgtggtcgacgtgaatgataataaaccggtcttcattgtcccaccttccaactgtagttatgagctagttttgccatccaccaatccggggaccgtcgtgttccaggtaatcgcagttgataacgatactgggatgaacgccgaggtgaggtatagcatcgtgggaggcaatacccgcgatctattcgccatagatcaagagactggaaacattacactgatggagaagtgcgacgtgacggatctgggattgcacagggtcttggtgaaagccaacgatttaggacagcctgattccctgtttagtgttgtgatcgtgaatttattcgtgaacgagtccgttaccaacgccacactgatcaatgagctggtccggaagagtactgaagcccccgtgaccccaaatacagagatcgctgacgtgtcctccccgacctcagactacgtcaaaattttggtggctgccgtggccggaacaataacagtagtggttgtaatcttcatcactgctgttgtgagatgccgccaagcgcctcaccttaaggcagcgcagaagaacaaacagaactccgaatgggcaacccctaaccctgagaataggcaaatgattatgatgaaaaagaagaaaaaaaaaaagaagcacagccctaagaatcttcttcttaattttgtgaccattgaagagaccaaggctgacgatgtggacagcgacggcaatagagttaccctggacctgcccattgacctggaagagcagacgatgggcaaatataattgggtcacaacaccgaccacctttaaacccgattcaccagacttggctcgccactacaagtcggcttcaccgcagcctgcctttcagatacagccggaaacgcccttgaactccaagcaccacattattcaagagctgcccttggacaataccttcgtggcctgcgactctatctcgaaatgctcttcctcctcttcagatccatatagcgtgtccgactgtgggtacccagtcacgacctttgaagttccggttagcgtccatacgagacctcccatgaaagaggtagtccgatcgtgtacaccaatgaaggagtcgacgaccatggagatctggatacatccgcagcctcagcggaagtccgaaggaaaagtagcggggaaatcccaaaggagagtgacctttcatttgcccgaaggatcgcaggaatcttcctccgacgggggattaggcgaccatgatgcaggaagccttactagcactagtcatggactgcccctgggttacccccaggaagaatactttgaccgcgccacgccctctaaccgcactgagggagatggcaacagtgatccagagagcaccttcatcccacggtccccgaccgctgctgagattaccgtacagcccaccgtcgaagaagcatccgataactgcacgcaggagtgccttatttatgggcattctgacgcctgctggatgcctgcaagtctcgaccactccagcagtagccaagcccaggcgagtgcactttgtcacagtcctccgctgtctcaggcatccacacagcaccattctccaagggtgacacagacaatcgctttatgtcacagcccgccggttacacaaaccattgcactgtgccattctcctccccccattcaagtttccgcactgcatcattcaccacccctcgttcaggcaacagccctgcatcatagtcccccgtccgctcaggcgagcgccctgtgctactcaccacctttggcgcaggccgcagcaatcagccattccagcccactaccacaggttattgctttgcacagatctcaggcacaatcttccgtgagcctgcagcaaggttgggtgcagggggcggatggcctctgtagcgtggatcagggcgtgcaaggttctgctacttctcagttctacactatgtccgaacggttgcatcctagcgacgattccattaaagttataccgctcacaacgttcacccctcggcaacaagctcggccatcacggggggatagccctattatggaggagcatcctctctag

SEQ ID NO: 324649 - DNA, 4044 bp, Artificial Sequence
  derived and/or modified sequence
atggacttgttgagtgggacttatatattcgcagtgctccttgcttgtgtggtattccactccggagcccaggaaaagaactacacaatcagggaggagatgccggaaaacgtgctgatcggcgacctccttaaagatctcaacctcagccttatcccgaacaagtccctgaccacagctatgcagttcaagctggtgtacaaaaccggcgacgttccccttataaggatcgaggaggatacgggtgagatatttaccactggtgccaggatcgacagggagaagctctgtgcaggaatcccacgtgatgagcattgtttttacgaggtcgaggtggcaattctgcctgatgagattttcaggcttgttaaaattcgcttcctgatcgaggatataaacgacaacgcacctcttttccccgccacagtgataaatatctctatccccgagaattccgcaatcaactcgaagtacacactccccgctgcagtagaccccgacgtcggtatcaacggtgtccagaactacgaactgatcaagagccagaatatttttggtctcgatgtgatagagacacctgaaggcgacaaaatgccccaactcatcgtgcaaaaagagcttgatagagaggagaaggatacatacgtgatgaaggtgaaggtggaggatggggggtttccccaacgatctagcactgcaattctccaggtatctgttacagataccaatgacaaccatcccgtcttcaaggagaccgaaattgaagtgagcattcccgagaatgcgccggtgggtacgagcgttacacagttgcacgccacggacgcggatattggcgaaaatgccaaaatacactttagcttctctaatttagtgtctaacattgccaggagactgtttcacctgaacgctaccactgggctgatcaccatcaaggagccgctggaccgcgaggagaccccgaatcacaaactcctggtgctggcgagtgatggtggtttgatgcctgcccgtgcaatggtgctcgtgaacgtgacagatgttaacgacaatgtgccctctatcgatatacggtatatcgtgaatcctgtgaacgatactgtcgttctttcagagaatattccattgaatacaaagattgctctgatcactgtgaccgataaggacgcagatcacaacggccgagtcacgtgttttacagaccatgagatcccattcaggttgcggccggtcttttcaaaccaattcctactagaaactgccgcgtatctggattacgagtcaactaaagagtacgcgattaagctcctggctgcggacgccgggaaaccccctctaaatcaatcagccatgctgtttatcaaagtgaaagatgaaaatgataatgcccctgttttcacccaaagctttgtgaccgtttctatcccagagaacaatagtcctgggattcaacttacgaaagtaagcgcgatggacgcggacagcggcccaaacgctaagatcaactacctcctcggtcctgacgcaccccctgaattctctctcgactgccggaccggcatgctaactgtggtcaagaagctagaccgagagaaagaagataaatatctctttaccatcctcgcaaaggataacggcgtccctccactgactagcaacgtgacagtgttcgtgtcaatcatcgaccagaacgataacagccccgtttttacacacaatgaatataatttctacgtgcctgaaaacctgccacgccacggcacggtggggttgattaccgtgaccgacccagactatggggacaatagtgctgttacgttgtccattcttgacgaaaacgacgatttcacaatcgatagtcaaacgggagtaatccggcccaatatcagctttgatagggagaagcaagagtcatatactttttatgttaaagcagaggacggaggaagagtgagcagatcgtcatcagctaaggtgaccatcaatgtcgtggatgtgaacgacaataagccagtgttcattgttccccctagcaattgttcctacgaattagtgttgccatcgacaaaccctggaaccgttgtgttccaagtgattgccgtcgacaacgacaccgggatgaacgcagaggtacgctattccatcgtcggaggaaacacaagggacctttttgcaattgaccaggagacaggaaacattactctgatggaaaagtgtgacgtcactgatcttggtctgcaccgggtgctcgtgaaggctaacgatctgggccagccagactctctgttctcagtagtgatagtgaacctgtttgtgaacgaatcagtcaccaacgctacactgattaacgaactggtgaggaaaagcacagaggcgcccgtaacaccgaacacagagattgccgatgtctcatcgcccacctcagactacgttaagatactagtggcagcggtcgctggtacgatcacagttgtcgtcgtgatatttattactgccgtggtgcgttgccgacaagctccacacctcaaagcagcacagaagaacaaacaaaactcagaatgggctactcctaatcctgaaaatcgacagatgattatgatgaagaagaagaagaagaaaaaaaagcatagccccaaaaacttgctgctgaactttgtaaccatcgaggagacaaaggcggacgatgtcgatagtgatggaaatagggtcactctcgatctcccaattgatctggaagaacagactatgggaaaatataattgggtcactacaccaaccacttttaaaccagatagcccagacctagccagacactacaaaagtgcgtctccacagcctgcctttcagattcaacctgaaacgcctctgaactccaaacatcacataatccaggagctgccccttgacaatactttcgtggcctgcgacagcatcagcaaatgcagcagttctagcagcgacccctactccgtaagtgattgtggctaccctgtgaccacctttgaggtgcccgtgtccgtgcacactaggccccccatgaaggaggttgtgagatcctgtactccaatgaaagagtcgactaccatggagatttggatacatccacagccacagagaaaaagtgaaggcaaagtcgccggaaaaagccagaggcgagtcactttccacttgccagaaggtagccaggagtcatcctctgacggagggttgggtgaccatgacgctggaagcctgaccagcacatctcacggcctccccttaggatacccccaagaggagtatttcgatcgtgctacaccctctaaccggaccgagggcgacggcaattcagaccctgagtccacctttatccctggtctgaagaaagcagcagagattacagtgcagcccactgttgaggaagcttctgacaactgcacccaggagtgcctgatctacggacattcggatgcatgttggatgcccgctagcttggatcactcatcaagcagtcaagctcaggccagtgccctctgtcattcccccccattgtctcaggctagcacccagcaccactctcctcgggtgactcagaccattgcgctgtgtcattccccccccgtgacccagaccatagctctatgtcactcccctcctccaattcaagtgtccgcactgcaccatagccccccactggtgcaggctacagcactgcatcatagtccccccagcgcacaggcatccgctctatgctactcccctcctctcgcccaagcagctgccataagccactccagccccctgccgcaggtgatcgcattgcacaggtcgcaagctcagtcttctgtgagcctccagcaggggtgggtccagggcgcagacggactttgttccgtagatcagggtgtacaagggtcagccaccagtcagttctataccatgagcgagcggctgcatccaagcgacgacagtattaaggtcatccctctgactaccttcactcctcggcagcaggctcgcccctcccgtggtgactctcccattatggaggagcaccctctttag

SEQ ID NO: 324650 - DNA, 4044 bp, Artificial Sequence
  derived and/or modified sequence
atggacctgctgagcggcacctacatctttgctgtgctgctggcctgtgtggtgttccacagcggggcccaggagaagaactacaccatccgggaggagatgccagaaaatgtgctgattggagacctgctgaaggacctgaacctgagcctcatccccaacaagagcctgaccacagccatgcagttcaagctggtgtacaagacaggagatgtgcccctcatcagaattgaagaagatactggagagatcttcaccactggagccagaattgaccgggagaagctgtgtgccggcatccccagagatgagcactgcttctatgaggtggaggtggccatcctgcctgatgagatcttccggctggtgaagatccgcttcctgattgaggacatcaatgacaatgcccccctcttccctgccaccgtcatcaacatcagcatccctgagaacagcgccatcaacagcaagtacaccctgcctgctgctgtggaccctgatgtgggcatcaatggagtgcagaactatgagctgatcaagagccagaacatcttcggcctggatgtgattgagaccccagagggggacaagatgccccagctgattgtgcagaaggagctggaccgggaggagaaggacacctacgtgatgaaggtgaaggtggaggatggcggcttcccccagaggagcagcacagccatcctgcaggtgtctgtgacagacaccaatgacaaccaccctgtgttcaaggagacagaaattgaggtgtccatcccagaaaatgcccctgtgggcacctctgtgacccagctgcacgccacagatgctgacatcggggagaatgccaagatccacttctccttcagcaacctggtgagcaacatcgcccggcggctcttccacctgaatgccaccaccggcctcatcaccatcaaggagcccctggaccgggaggagacccccaaccacaagctgctggtgctggccagtgatggcggcctgatgcctgcccgggccatggtgctggtgaatgtgacagatgtgaatgacaacgtgcccagcattgacatccgctacatcgtgaaccctgtgaatgacacagtggtgctgtctgagaacatccccctgaacaccaagatcgccctgatcaccgtgacagacaaggatgctgaccacaacggccgggtgacctgcttcacagaccacgagatccccttccggctgcggcctgtgttcagcaaccagttcctgctggagacagctgcctacctggactatgagagcaccaaggagtatgccatcaagctgctggccgcagatgctgggaagccacccctgaaccagagcgccatgctgttcatcaaggtgaaggatgaaaatgacaatgcccctgtgttcacccagagctttgtgacagtgtccatccctgagaacaacagccctggcatccagctgaccaaggtgtctgccatggatgctgacagcggccccaatgccaagatcaactacctgctgggcccagatgcccctcctgagttcagcctggactgcaggacaggcatgctgactgtggtgaagaagctggaccgggagaaggaggacaagtacctgttcaccatcctggccaaggacaatggagtgccccccctgaccagcaatgtgacagtgtttgtgtccatcatcgaccagaatgacaacagccctgtgttcacccacaatgagtacaacttctacgtgcctgagaacctgcccaggcatggcaccgtgggcctcatcaccgtgacagatcctgactatggagacaacagcgctgtgaccctgagcatcctggatgaaaatgatgacttcaccatcgacagccagacaggagtcatccggcccaacatcagctttgaccgggagaagcaggagagctacaccttctacgtgaaggccgaggatggcggccgggtgagccgcagcagcagcgccaaggtgaccatcaacgtggtggatgtgaatgacaacaagcctgtgttcatcgtgccccccagcaactgcagctatgagctggtgctgcccagcaccaaccctggcaccgtggtgttccaggtgattgctgtggacaatgacaccggcatgaatgctgaggtgcgctacagcatcgtgggcggcaacacccgggacctgtttgccatcgaccaggagaccggcaacatcaccctgatggagaagtgtgatgtgacagacctgggcctgcaccgggtgctggtgaaggccaatgacctgggccagcctgacagcctcttctctgtggtgattgtgaacctgtttgtgaatgaatctgtgaccaatgccaccctcatcaatgagctggtgaggaagagcacagaggcccctgtgacccccaacacagaaattgctgatgtgagcagccccaccagtgactatgtgaagatcctggtggccgctgtggccggcaccatcaccgtggtggtggtgatcttcatcacagctgtggtgcgctgccggcaggccccccacctgaaggccgcccagaagaacaagcagaacagcgagtgggccacccccaaccctgagaaccggcagatgatcatgatgaagaagaagaagaagaagaagaagcacagccccaagaacctgctgctgaactttgtgaccatcgaggagaccaaggcagatgatgtggacagtgatggcaacagagtgaccctggacctgcccatcgacctggaggagcagaccatgggcaagtacaactgggtgaccacccccaccaccttcaagccagacagcccagacctggcccggcactacaagagcgccagcccccagcctgccttccagatccagcctgagacccccctgaacagcaagcaccacatcatccaggagctgcccctggacaacacctttgtggcctgtgacagcatcagcaagtgcagcagcagcagcagtgacccctacagcgtgtctgactgtggctaccctgtgaccacctttgaggtgcctgtgtctgtgcacaccaggcctcccatgaaggaggtggtgcgcagctgcacccccatgaaggagagcaccaccatggagatctggatccacccccagccccagaggaagtctgagggcaaggtggccggcaagagccagaggagagtgaccttccacctgcctgagggcagccaggagagcagcagtgatggcggcctgggggaccatgatgctggcagcctgaccagcaccagccacggcctgcccctgggctacccccaggaggagtactttgaccgggccacccccagcaacagaacagaaggagatggcaacagcgaccctgagagcaccttcatccccaggagccccacagctgctgagatcaccgtgcagcccaccgtggaggaggccagtgacaactgcacccaggagtgcctgatctacggccacagtgatgcctgctggatgcctgccagcctggaccacagcagcagcagccaggcccaggccagcgccctgtgccacagcccccccctgagccaggccagcacccagcaccacagcccccgggtgacccagaccatcgccctgtgccacagcccccctgtgacccagaccatcgccctgtgccacagccccccacccatccaggtgtctgccctgcaccacagcccccccctggtgcaggccacagccctgcaccacagccccccatctgcccaggccagcgccctgtgctacagcccccccctggcccaggccgccgccatcagccacagcagccccctgccccaggtgattgccctgcacaggagccaggcccagagctctgtgtccctgcagcagggctgggtgcagggcgcagatggcctgtgcagcgtggaccagggcgtgcagggcagcgccaccagccagttctacaccatgtctgagcggctgcaccccagtgatgacagcatcaaggtgatccccctgaccaccttcaccccccggcagcaggcccggcccagcagaggagacagccccatcatggaggagcaccccctgtag

SEQ ID NO: 324651 - DNA, 4044 bp, Artificial Sequence
  derived and/or modified sequence
atggacctgctgagcggcacctacatctttgctgtgctgctggcctgtgtggtgttccacagcggggcccaggagaagaactacaccatccgggaggagatgccagaaaatgtgctgattggagacctgctgaaggacctgaacctgagcctcatccccaacaagagcctgaccacagccatgcagttcaagctggtgtacaagacaggagatgtgcccctcatcagaattgaagaagatactggagagatcttcaccactggagccagaattgaccgggagaagctgtgtgccggcatccccagagatgagcactgcttctatgaggtggaggtggccatcctgcctgatgagatcttccggctggtgaagatccgcttcctgattgaggacatcaatgacaatgcccccctcttccctgccaccgtcatcaacatcagcatccctgagaacagcgccatcaacagcaagtacaccctgcctgctgctgtggaccctgatgtgggcatcaatggagtgcagaactatgagctgatcaagagccagaacatcttcggcctggatgtgattgagaccccagagggggacaagatgccccagctgattgtgcagaaggagctggaccgggaggagaaggacacctacgtgatgaaggtgaaggtggaggatggcggcttcccccagaggagcagcacagccatcctgcaggtgtctgtgacagacaccaatgacaaccaccctgtgttcaaggagacagaaattgaggtgtccatcccagaaaatgcccctgtgggcacctctgtgacccagctgcacgccacagatgctgacatcggggagaatgccaagatccacttctccttcagcaacctggtgagcaacatcgcccggcggctcttccacctgaatgccaccaccggcctcatcaccatcaaggagcccctggaccgggaggagacccccaaccacaagctgctggtgctggccagtgatggcggcctgatgcctgcccgggccatggtgctggtgaatgtgacagatgtgaatgacaacgtgcccagcattgacatccgctacatcgtgaaccctgtgaatgacacagtggtgctgtctgagaacatccccctgaacaccaagatcgccctgatcaccgtgacagacaaggatgctgaccacaacggccgggtgacctgcttcacagaccacgagatccccttccggctgcggcctgtgttcagcaaccagttcctgctggagacagctgcctacctggactatgagagcaccaaggagtatgccatcaagctgctggccgcagatgctgggaagccacccctgaaccagagcgccatgctgttcatcaaggtgaaggatgaaaatgacaatgcccctgtgttcacccagagctttgtgacagtgtccatccctgagaacaacagccctggcatccagctgaccaaggtgtctgccatggatgctgacagcggccccaatgccaagatcaactacctgctgggcccagatgcccctcctgagttcagcctggactgcaggacaggcatgctgactgtggtgaagaagctggaccgggagaaggaggacaagtacctgttcaccatcctggccaaggacaatggagtgccccccctgaccagcaatgtgacagtgtttgtgtccatcatcgaccagaatgacaacagccctgtgttcacccacaatgagtacaacttctacgtgcctgagaacctgcccaggcatggcaccgtgggcctcatcaccgtgacagatcctgactatggagacaacagcgctgtgaccctgagcatcctggatgaaaatgatgacttcaccatcgacagccagacaggagtcatccggcccaacatcagctttgaccgggagaagcaggagagctacaccttctacgtgaaggccgaggatggcggccgggtgagccgcagcagcagcgccaaggtgaccatcaacgtggtggatgtgaatgacaacaagcctgtgttcatcgtgccccccagcaactgcagctatgagctggtgctgcccagcaccaaccctggcaccgtggtgttccaggtgattgctgtggacaatgacaccggcatgaatgctgaggtgcgctacagcatcgtgggcggcaacacccgggacctgtttgccatcgaccaggagaccggcaacatcaccctgatggagaagtgtgatgtgacagacctgggcctgcaccgggtgctggtgaaggccaatgacctgggccagcctgacagcctcttctctgtggtgattgtgaacctgtttgtgaatgaatctgtgaccaatgccaccctcatcaatgagctggtgaggaagagcacagaggcccctgtgacccccaacacagaaattgctgatgtgagcagccccaccagtgactatgtgaagatcctggtggccgctgtggccggcaccatcaccgtggtggtggtgatcttcatcacagctgtggtgcgctgccggcaggccccccacctgaaggccgcccagaagaacaagcagaacagcgagtgggccacccccaaccctgagaaccggcagatgatcatgatgaagaagaagaagaagaagaagaagcacagccccaagaacctgctgctgaactttgtgaccatcgaggagaccaaggcagatgatgtggacagtgatggcaacagagtgaccctggacctgcccatcgacctggaggagcagaccatgggcaagtacaactgggtgaccacccccaccaccttcaagccagacagcccagacctggcccggcactacaagagcgccagcccccagcctgccttccagatccagcctgagacccccctgaacagcaagcaccacatcatccaggagctgcccctggacaacacctttgtggcctgtgacagcatcagcaagtgcagcagcagcagcagtgacccctacagcgtgtctgactgtggctaccctgtgaccacctttgaggtgcctgtgtctgtgcacaccaggcctcccatgaaggaggtggtgcgcagctgcacccccatgaaggagagcaccaccatggagatctggatccacccccagccccagaggaagtctgagggcaaggtggccggcaagagccagaggagagtgaccttccacctgcctgagggcagccaggagagcagcagtgatggcggcctgggggaccatgatgctggcagcctgaccagcaccagccacggcctgcccctgggctacccccaggaggagtactttgaccgggccacccccagcaacagaacagaaggagatggcaacagcgaccctgagagcaccttcatccctggcctgaagaaggctgctgagatcaccgtgcagcccaccgtggaggaggccagtgacaactgcacccaggagtgcctgatctacggccacagtgatgcctgctggatgcctgccagcctggaccacagcagcagcagccaggcccaggccagcgccctgtgccacagcccccccctgagccaggccagcacccagcaccacagcccccgggtgacccagaccatcgccctgtgccacagcccccctgtgacccagaccatcgccctgtgccacagccccccacccatccaggtgtctgccctgcaccacagcccccccctggtgcaggccacagccctgcaccacagccccccatctgcccaggccagcgccctgtgctacagcccccccctggcccaggccgccgccatcagccacagcagccccctgccccaggtgattgccctgcacaggagccaggcccagagctctgtgtccctgcagcagggctgggtgcagggcgcagatggcctgtgcagcgtggaccagggcgtgcagggcagcgccaccagccagttctacaccatgtctgagcggctgcaccccagtgatgacagcatcaaggtgatccccctgaccaccttcaccccccggcagcaggcccggcccagcagaggagacagccccatcatggaggagcaccccctgtag

SEQ ID NO: 324652 - DNA, 4044 bp, Artificial Sequence
  derived and/or modified sequence
atggacctgctgagcggcacctacatcttcgccgtgctgctggcctgtgtggtcttccattctggagcccaggagaaaaattatacgataagagaagaaatgcctgagaacgtgctgatcggggacctgcttaaggatttaaacctgtcgctaattcctaacaaatctctaacaaccgccatgcagttcaagctggtgtacaagaccggtgatgtacctctgatccgcatagaggaagatacgggggagatctttacaaccggggccagaatcgaccgggaaaaattgtgtgctggaatcccgagagatgagcattgtttttatgaggttgaagttgctattctccccgatgaaatttttcgcctggttaagattaggttcctgattgaggatattaacgataatgcccccctgtttcctgcaacagtgatcaatatttcaatccccgagaattctgccatcaactctaagtacacccttcctgcagccgtggacccagatgtagggattaatggcgtacaaaattacgagctgatcaaatcacagaatattttcggtcttgacgtgatagaaacccctgagggggataaaatgccccagctgatcgtccagaaagagttggaccgcgaggaaaaagacacatacgtcatgaaggttaaggtggaggatggtggtttcccgcaacgctcaagcaccgcgatcctccaagttagcgtgaccgacaccaacgacaatcacccagttttcaaggagactgaaattgaggtgtccatccctgaaaacgcacctgtcggcaccagtgttacgcagttgcatgcaacagacgctgatataggtgaaaatgctaaaatacacttttccttcagcaatctggtgagtaatatcgctcgtcgtctcttccacctgaacgccaccaccggtcttatcacaatcaaggagccactcgacagagaagagacgcctaaccacaagttgctcgtgctggcttctgatggcggcttaatgccagctcgggccatggtgctagtgaatgtcacggatgtcaacgacaacgttccctccattgatatcagatatatcgtgaaccctgttaacgatacggtggtgctgagtgagaatatccctctgaatacgaaaatcgctctaatcaccgtgactgataaggatgcagaccataacgggagggtaacctgtttcacagatcacgaaatcccattcaggctgaggccggtgttcagcaaccagttccttctcgagactgccgcttatcttgactatgagtcaacgaaagagtacgcgatcaagcttctggccgcagatgcaggcaagccacctctcaaccaaagtgctatgctcttcatcaaagtgaaggatgaaaacgataatgcgccagtgtttacacagtcttttgtaaccgtctctatccccgaaaacaatagcccaggcattcagctgaccaaggtgtctgcaatggacgccgacagcggccctaatgcaaaaataaattacttgttaggtccagacgctccaccagagtttagcctggactgtcgcaccggtatgctcacagtcgtaaagaagctggatagagagaaggaagacaaatatctattcaccattttggccaaggacaacggcgttccacccctgacatcgaacgtgacggtatttgtttctattatcgaccagaacgacaatagtccagtattcacccataacgagtacaacttctatgttccagaaaatctaccaagacacggaaccgtggggctgataaccgtgactgaccctgattacggcgataatagcgccgtgactttatccattctggatgagaatgacgactttacaatcgattcccaaaccggcgtgatccgcccgaacatctccttcgatagagaaaaacaagaatcatacaccttttacgtgaaagcagaagacggaggtagggtgtcccgttcctcgagcgccaaagtcaccattaacgtggtagacgtgaatgataataagccggtgtttatagtgccccccagtaactgcagttacgagttggtgctcccctcaaccaatccaggtacggtggtctttcaggtgatcgccgttgacaacgacacaggtatgaatgccgaggtcagatacagtatagttggagggaacacacgcgacttatttgcgattgaccaagagacgggcaatataacgctaatggaaaagtgcgacgttaccgatttgggcctgcaccgggtgctggttaaagcaaatgatcttgggcagcccgacagtctattctctgtcgtaatcgttaatctgtttgttaatgaatccgtgactaacgcaacgctaattaacgagctcgtgcggaagtccaccgaggctcctgtgacgccaaatacggagattgcagatgtgagtagtcccacatccgactacgtcaagattctggtggcggcagtagcaggaacaataacagttgtggttgttatattcataaccgctgtcgtccggtgtcgacaggccccacatttaaaagccgctcagaaaaacaagcagaattctgagtgggccacgcctaatcccgagaatcggcagatgattatgatgaaaaaaaaaaaaaagaagaagaagcatagccccaaaaatttacttctgaattttgtcacaattgaggaaactaaggcggacgatgtggattcagacggaaacagggtaacgcttgatctacctattgatttggaagaacagaccatgggaaagtataactgggtaaccacccctacgactttcaagcctgattcgccagaccttgctagacattataaatcagccagccctcagcctgccttccagatacagcctgagacacccctgaactcgaagcaccacattatccaagagcttcctctcgacaatacatttgtagcgtgcgacagcatctccaagtgtagctctagctcgagtgatccttactctgtgtcggactgtggctaccctgttaccacctttgaggtccctgttagtgtgcatacccgacctcccatgaaggaagtggtcagatcttgcacgccaatgaaggagtctaccactatggaaatctggatccaccctcagcctcagcgcaaaagcgaaggcaaggttgccggcaagagtcagcgcagagtcacttttcaccttccagaaggaagccaagaatcgtccagcgatggaggccttggtgaccatgacgctggcagtctcacgagcacatcacacggccttcccctcggctatccccaggaggaatactttgacagggccaccccgtcaaataggacagagggagatggtaactccgaccctgagtcgacattcatccctagatctccaactgcggccgagattaccgttcagccaacagtcgaagaggcttctgacaactgcacacaagaatgcctgatctacggacactccgacgcctgctggatgcctgcctcgctcgaccattcatcatcttctcaggcccaggcctctgccctctgtcacagtccccccttgtcacaggcaagcacccagcaccactccccaagggtgactcagaccattgccctttgccacagtcctcccgtaacacagacaatcgctctgtgtcactcaccacctccaatccaggtttcagccctgcaccactctccccctctggtccaagctaccgcactgcaccactctccaccgagtgcccaggcaagcgcactgtgttatagtcccccactggcccaagctgccgctatttcgcactctagccctctgccacaggtgatcgcattacaccgcagtcaggctcagtcctctgttagtctgcagcagggttgggtacaaggagccgacgggctgtgctccgtcgaccagggggtgcaggggtccgcaaccagtcaattttatacgatgtcggagaggttacatcccagcgacgactcaatcaaggtcattcctctgactactttcactcctcgacagcaggccaggcccagcaggggtgactctccgattatggaagaacaccccctctag

SEQ ID NO: 324653 - DNA, 4044 bp, Artificial Sequence
  derived and/or modified sequence
atggacctgctgagcggcacctacatcttcgccgtgctgctggcctgtgtggtgttccattcaggagcccaagaaaagaactacaccatcagggaggaaatgcccgagaatgtgctgattggcgacctacttaaagacttaaatctctccctgatcccaaacaaatcgttgacaaccgccatgcagtttaagctggtgtataaaacgggagacgtgcctctaattagaatcgaagaggatactggtgaaatatttacaacaggcgcccgaatcgacagagagaagttgtgtgcgggcatcccaagggatgagcattgcttttatgaagtggaggtggcaattctgcctgatgaaattttcaggttagtgaaaatcagatttctgatcgaggatattaacgataatgcaccccttttcccagccactgttataaatatttcaatacccgagaactcggccatcaattccaagtataccttgccggccgcggtggaccccgacgtcggcatcaacggggtccagaattatgagctgattaagagccaaaatatttttggccttgacgtgattgagacacccgaaggggataaaatgccacagctaattgtccaaaaggaactggaccgagaggagaaggacacctacgtgatgaaggtgaaagtcgaggacggtggcttcccccagagatcttccactgcaatcctacaggtatccgtaactgatacgaacgataatcacccggtgttcaaggaaacggaaatcgaggtttccatcccggagaatgctcccgttggcacttcagtgactcaactgcatgcaactgatgccgatatcggagagaacgccaaaattcacttctcattctccaatctggtgtctaacatcgcacgccggctgttccacctcaacgccactaccggattgatcacaatcaaggaacccctggatagagaggaaacaccaaatcacaaattgctggtgcttgcaagcgacggaggtctcatgccggccagagccatggtgttagtcaatgtgacggacgttaacgacaatgtcccctccattgacatcagatacattgtgaatcccgttaacgacaccgtcgtgttgagcgaaaacatacctctgaacactaagatcgccctcatcaccgttactgacaaggacgcagatcacaacggcagggtgacatgcttcaccgaccacgagatcccttttagactgagacctgtgttcagcaaccagtttctcctggagaccgccgcttatttggactatgagagcactaaggaatatgccatcaagctcctcgctgccgatgcaggaaaacctccactgaaccagtccgcaatgctgttcatcaaggtaaaagacgagaacgacaatgcaccggtcttcacacagtcctttgtgacagtgtcaatccctgaaaataacagtccaggcatacagctgacgaaggtctcagctatggatgccgatagcgggcctaacgcaaaaattaactacctgctggggcccgatgctcccccagaattctctcttgactgccgaacagggatgctcacagtcgtgaaaaagctcgaccgcgagaaggaagataagtacttgtttactatcctggcgaaggacaatggcgtgcccccattaacatcaaacgttacagtgtttgtttccattattgatcagaatgataatagccccgtgttcacacacaacgagtataacttctacgttccggaaaatttgccacgccatggcacggttggcttgatcacagtcaccgaccccgattacggagacaactccgccgtgaccctgagcatcctggacgagaatgatgactttaccatcgattcacagaccggcgtaatccgcccaaatatcagctttgacagggaaaaacaggaatcttacactttctacgttaaagccgaggacgggggccgcgtaagccgcagctcatcggcaaaggtgaccatcaatgttgtggacgtgaacgataacaagcctgtgttcatcgttccaccatctaactgttcctatgaattggtgttgccaagcacaaaccccggaacagtcgtctttcaggtcatcgccgtcgataacgacacaggcatgaacgctgaggtccgctattccatcgttggagggaacacccgcgacctgtttgcgattgaccaggagacagggaacattactctgatggagaaatgcgatgtgactgatctgggcctgcatagggtcctggtaaaagccaatgacttaggccagcctgacagcttattcagtgtagtcatcgtaaatctatttgtcaatgagagcgtaactaacgccacactcattaacgaactcgtacgtaaatctacggaggcccccgtaaccccaaacacagagatcgccgacgtgtctagccccacatccgactacgttaagatcctggtagccgcggtggcgggaaccattacggtggtggtggtgatctttataaccgcagtcgtgcgatgtagacaggcgccccaccttaaggccgctcagaaaaacaaacagaattccgaatgggccacaccaaatcctgagaaccgccagatgattatgatgaagaaaaagaagaaaaagaagaaacactccccaaaaaatcttctcctgaatttcgtgactattgaggaaacaaaggcagatgacgtggacagcgatgggaaccgagtgacactagatttgcctatcgacctggaggagcagactatgggtaagtacaattgggtgactacgcccactacgttcaagcccgactctcctgatctcgctaggcattacaagagtgcaagcccacaaccagcctttcagattcaacccgaaacacctctgaattcaaaacaccacatcattcaggagctgccactagacaatacctttgtggcttgtgacagtatttctaaatgtagtagtagtagctctgacccctactcagtctctgactgcggatatccagttactactttcgaggtgcctgtgagcgtacacaccaggcctcctatgaaggaagttgtccgcagttgtacccctatgaaggaatccaccacgatggagatctggatacatcctcaacctcagaggaagtccgagggaaaagtggcaggcaaatcacaaagaagagttacttttcatctgccggagggctcacaagagagctcctccgatggaggccttggagaccacgacgcaggttctttgactagcactagccacggcctgccgctggggtacccccaggaggaatacttcgaccgtgcaacaccttcaaaccggactgagggcgacggaaacagcgatccagagagcacattcatcccaggtctgaagaaagcggctgagataacggtgcaaccaacggttgaggaggctagtgataattgtacgcaggaatgcttaatttacggacacagtgatgcctgttggatgcccgcaagtctggatcacagttcctcctcgcaggcacaagcaagtgccctctgccactccccacctctttcacaggccagcactcaacaccactcacctcgcgtaacccagaccatcgccttgtgccacagtccacccgtaacacagacaatcgctctgtgtcattctccaccaccaatccaggtaagcgctctgcatcattcaccccctctagttcaggctacagccctgcatcattcccctcccagcgcccaggcatctgcattgtgctattcgcctcctctagcgcaggctgccgccatttcccattcaagcccgctccctcaggtcatcgcccttcatagatcccaagctcagagcagcgtgtctctgcagcagggttgggtccagggcgcggacggtttgtgttccgtggaccagggagtacaagggagcgctaccagccagttttacaccatgagtgaacgccttcacccctctgacgacagcattaaggtgatcccactgacaacctttaccccgcgtcagcaagcccgcccatcccgtggtgattctccaattatggaggaacacccactgtag

SEQ ID NO: 324654 - DNA, 4044 bp, Artificial Sequence
  derived and/or modified sequence
atggatctgctgtcaggtacctatatctttgctgtgctcctcgcatgcgtggtgttccattcaggcgcacaggagaagaattacacaattagggaagaaatgcccgagaatgtcttgatcggcgatctcctaaaagatctcaatcttagcttaatccccaacaagagcctgaccaccgctatgcagttcaaattggtgtataagactggcgacgtcccactcatcagaatcgaggaagataccggagagatctttacaacaggtgcccgtattgatagggaaaagctgtgcgcaggtatcccgagagacgaacattgcttttacgaggtggaggtggctatcctgcccgatgagatctttcgattagtgaagattcgctttctgattgaggatatcaatgacaatgcccctctgttccccgctactgtgatcaatatctctattcctgagaacagcgcaataaacagcaaatatacactcccggctgctgtggatccggacgtgggcatcaatggggtgcagaactacgaattgattaagagtcagaacatcttcggccttgatgttatcgaaacaccagagggtgacaagatgccacagttgatcgtgcagaaggagttagatagagaggagaaagacacgtacgtgatgaaagtaaaggtggaggatggcggtttccctcagcggtcgagcaccgcaattctgcaggtctctgtaactgatactaacgacaaccacccagtgttcaaagaaaccgagatagaagtctcgatcccagaaaacgctccagtcggtaccagtgtaacccaacttcatgctacggatgccgatattggagagaacgcgaaaattcacttcagcttctcaaacctggtatctaatatcgctagaagactgttccatttgaacgccacgaccggactgattaccattaaagagccgctggacagagaggagactcctaaccataaactcctggtgcttgccagcgacgggggacttatgcccgcaagggcaatggtcctcgtaaatgtgacagacgtgaatgacaatgtgccaagtatcgatattcgctacattgtgaatcccgtaaatgataccgtggtacttagcgaaaatatccccctgaacacgaagattgctttgattaccgtcaccgacaaagacgcagatcataacgggagagtcacttgcttcaccgaccatgaaattccgttccgactccgcccagtattctctaaccagtttctgctggaaaccgctgcctatctggactatgagtccactaaagaatacgctatcaagcttctggccgcagatgcgggaaagcccccactaaatcagtcagccatgcttttcattaaagtgaaagacgaaaacgacaatgccccagttttcactcaatcatttgtcacagttagcatacccgaaaacaactcccccggaatccagctcactaaagtatccgcgatggatgcagattccggtcccaatgctaagatcaattacctccttggacccgacgcccctccagagtttagtctggattgccggaccggcatgttgactgtagtgaagaaactggatagagagaaggaggataagtatctgtttaccatcctggccaaagacaatggggttcccccactgacttccaatgtgactgtgtttgtgtctattattgaccagaacgataattcaccagtgttcacccataatgagtataacttctacgtccctgaaaatcttccgagacatggaacagtggggttgatcaccgtgaccgaccccgactacggcgacaattcagcagtcactctgtcaatcctcgacgaaaatgacgactttactatcgattcccagaccggggtcatcagacccaatattagctttgacagagaaaaacaagagagctacactttttatgtaaaggcggaagacggaggtcgtgtgagccgatcatcgtcagctaaagttaccattaacgttgttgacgtgaatgataataaacctgtctttattgtccccccatcgaattgttcttacgaactcgtgctcccttcaacgaatcccggtaccgtagtgttccaggttatcgccgttgacaatgacaccggtatgaacgctgaggtgcggtatagtatcgtgggaggaaacacccgagacctgtttgctatcgatcaggaaacgggcaacatcactctcatggagaagtgtgatgtcactgatctcggacttcaccgagttctcgtaaaagcaaatgatttaggccagcctgattccctgttctccgtagtaattgtcaatctattcgttaacgagtcagttacgaatgcaaccttgattaacgaattggtgcgaaagagcacggaggcccctgtgaccccaaacaccgagatcgctgacgtgtccagtccaacatccgattacgtgaagatactggtagccgctgtggctggcaccattaccgtagtggtggtcatatttatcacagccgtggtgcggtgccggcaagctccacacctgaaagccgcacagaaaaataaacagaactcagaatgggctacaccgaaccctgaaaacaggcagatgatcatgatgaaaaagaagaaaaagaagaaaaaacattcacctaaaaatctcttactgaacttcgtaaccatagaggaaaccaaagccgacgatgttgactccgacggaaaccgcgtgacccttgacctgcccatcgaccttgaagagcagactatgggtaagtataattgggtcacgactcccaccacctttaagcccgatagccccgacctggcccgacattacaagtccgcttcccctcaaccggcatttcagattcagccagagacccctttgaactccaaacaccatataatccaggagctgcctctggacaacaccttcgtggcctgtgactctattagtaaatgtagctcatctagctcggatccctatagcgtgtccgattgtggttaccctgtgactacattcgaagtcccagtgtcggtgcacacacgacctccaatgaaggaggtggttaggtcttgtactcctatgaaggagtctacgacaatggagatctggatccaccctcaaccccagcggaagtccgaggggaaggtcgcaggcaagagtcagcgacgggtgacatttcaccttcccgaggggtctcaagagtcttcatctgacggcggtctgggagaccacgacgccggttctctgactagtacgtcccacggactccctctcgggtacccacaggaggaatattttgaccgcgcaacacctagcaaccgcacagagggtgatgggaactccgaccctgaatcaaccttcattcctagatcccccaccgccgctgaaataactgttcagcccacagtcgaagaggcgagcgacaactgtacccaggagtgcctgatttacggccatagcgacgcatgctggatgcccgcaagtctcgaccactctagtagcagccaggcccaggcctctgccttgtgccattcacccccactgtctcaggcctctacccaacatcacagccctagagtgacacaaacgatagcactgtgtcacagcccacctgtgactcagactattgccctatgccactcccccccacctattcaggtaagcgcgcttcaccattccccgcctctggtacaggcaactgcccttcaccattcccctccctcggcccaagcaagcgcgctgtgctactcccccccactagcacaggccgcagccatttcccactcttcccccctgccacaggtgatcgcactgcacaggtcgcaggctcagtcaagcgtgagtctgcaacaggggtgggtgcagggtgcggatggactttgctcagtggaccagggggtgcaaggaagcgccacttctcagttctacacaatgagcgagcgcctgcacccgtcagatgacagcattaaagtgattcctctgacaacctttacacctagacagcaagctcgtcctagccggggagacagtcctattatggaggagcaccctctgtag

SEQ ID NO: 324655 - DNA, 4044 bp, Artificial Sequence
  derived and/or modified sequence
atggatctactgtccggtacatacatattcgccgttctattggcctgcgtggtgttccattctggcgctcaggagaaaaattatacgatacgagaagaaatgccagaaaatgtacttataggggacctcttaaaagatctgaacctcagtcttattccaaacaagtcattgacgacagccatgcaattcaagttggtttacaagactggtgatgttccgctgatacgaatcgaggaggatacaggggagatattcaccacaggagcaagaatcgaccgagagaaattgtgcgccggtattccaagggatgagcactgtttttatgaggttgaagtcgctatactgcccgacgagatctttcgactcgtgaagatccggttcctcatcgaagacatcaatgacaatgcccctctgtttccggcaactgttattaatatctcaatccccgagaatagcgccataaactccaagtataccctacctgccgctgtcgatccagatgtgggcattaatggggtgcaaaactatgagctgatcaagagccagaatatctttggacttgacgttattgagacccccgagggcgataaaatgccccaactgatcgtgcaaaaggagctcgatagagaggaaaaagatacctacgtaatgaaagttaaggttgaagacggaggattcccccaacgctcatcgactgccattttgcaggtgagtgtgacggacacgaacgataaccaccccgtgttcaaggaaactgaaattgaggtgagcatcccagaaaatgcacccgtgggcacatctgtgactcagttgcacgccaccgacgctgacataggagaaaacgcaaagattcatttctcgttttctaacctggtgtcaaatatcgctagaagacttttccatctcaacgccactacaggcctaatcacaataaaagagccacttgaccgggaggagacaccaaatcataagctactagtgcttgccagtgatggcggactaatgcctgcacgtgccatggtgttggttaatgtgacagacgttaacgataatgtcccttccatcgatattcgatacattgttaacccagtcaacgacaccgtggtgctctccgagaacatcccccttaatacaaagatcgcactaattacggtgacagacaaggacgcagaccataatggaagagtaacgtgctttactgaccacgagattcccttccgtttacggcctgttttcagcaatcaattcctcttagagaccgctgcctaccttgactacgagagtacaaaggagtacgccataaagctcctcgccgctgatgctgggaagcctcctctgaatcaatccgctatgctgttcatcaaagtgaaggacgaaaatgataatgccccagtttttacccaaagcttcgtcacagttagtattccggagaacaactctccaggcattcaattgactaaggtgtcagccatggacgctgatagtggcccaaacgccaaaatcaactatctgctgggacctgatgcgccaccagagttttccctagattgcagaactggcatgttaacagttgtaaaaaagctagacagagagaaagaggacaagtacttattcactattctggctaaagacaatggagtcccccctttgacgagcaacgtgactgtatttgtgagcatcattgatcaaaatgacaattcgcccgtgttcactcataatgaatacaatttctatgtgcccgagaaccttcctcgccatggtaccgtgggactcatcactgtgaccgatcccgattacggggataattccgctgtgacattaagtatactggatgagaacgatgacttcacgattgactcccagaccggagtcattagaccaaacatatcctttgaccgagaaaaacaggagagctacacattttatgtgaaggcggaagatgggggaagagtttcaagatccagctctgccaaagtcacaattaacgtcgtcgatgtgaacgataataagccggtctttatagtaccacctagcaattgttcctacgagcttgtgttacccagcacaaacccagggacagttgtttttcaggtgatcgctgtggataatgacacaggaatgaatgcagaggtccgttattcaatagttggcggaaatacgcgggacctctttgcaatagatcaggagacaggcaatatcacgctgatggagaaatgcgacgtgactgatcttggactccatagggtcctcgtgaaggccaatgatttgggacagccagactcgctcttctctgttgtcattgtgaacctgtttgtgaacgagtccgtcaccaatgcgaccctcattaacgaactggtacggaagtccacagaggccccagttacaccgaatactgagatcgctgatgtgtctagtcccacctcggactacgtgaaaatcttggttgccgcagtggctgggaccataactgtagtggtggtcatcttcattacagccgttgtccggtgtcgccaggcaccccacctcaaagccgcacaaaagaacaaacagaactcagagtgggccaccccaaatccagagaaccgtcaaatgatcatgatgaaaaagaaaaagaagaaaaaaaagcactcccctaaaaatttattgctcaatttcgtcacaatagaagagactaaggcggatgacgttgactcagacggtaaccgtgttaccttggatctcccaattgatctggaagagcagactatgggcaagtacaattgggtcactaccccaacaacatttaagccagattccccagaccttgccagacactacaagtcagcctccccccaaccggctttccagatacagcccgaaacgcctctgaattccaagcaccatatcattcaggaactccctctggacaacacctttgtggcctgcgactccatttcaaagtgttcctcatccagctccgatccatacagtgttagcgactgcggatatcctgtgaccacattcgaagtgcctgtgtccgtgcacacacggccaccgatgaaggaggtggtgaggtcgtgtactccaatgaaggagtccactactatggaaatttggatccatcctcagccacagcgcaagtccgaggggaaggtggcagggaaatcccagcggagggtgacgttccacctgcccgaagggtcgcaagaaagttccagcgacggaggcctgggtgaccacgacgctggtagcctcacgtcaacctcccatggtctgccactcggttacccacaggaggaatactttgacagggctacgcccagcaatagaaccgaaggggatggcaactcagaccctgaatcaacattcatccccggactgaaaaaggctgccgagatcacggtgcagcccaccgtagaggaagcgagcgacaactgtactcaggagtgtctcatttacggacacagcgacgcttgctggatgccggcttcccttgatcactcaagttcaagccaggcccaggcatctgcgctgtgccactcccctcccctgagtcaggcctcgacacagcatcactcccccagggtgacacaaacaatagccctatgtcactctcccccagtaacccagaccatagcgctctgtcatagccccccaccgattcaggtatctgcgcttcaccactccccaccactagtccaggctactgccttgcaccattcccccccttcagcccaggcatcagcactgtgctactctccaccactcgcacaggcagccgctatatcacattctagccctctgccccaggtaatagccctacaccgaagccaggcacaaagtagcgtgagcctgcagcaggggtgggtgcagggagcggatggcctctgctctgtcgatcaaggagtgcaggggtcagcaacctcccagttctataccatgtctgagcgcttacacccctccgatgattctataaaggtgatcccattaaccactttcacaccgcgtcagcaagcacgaccctcacggggtgacagcccgattatggaggaacatcccctatag

SEQ ID NO: 324656 - DNA, 4044 bp, Artificial Sequence
  derived and/or modified sequence
atggacttgttgtccgggacgtacattttcgcggtcctgctagcatgcgtggtgttccactctggcgcccaggagaaaaactacaccatccgagaagaaatgccagaaaacgtcctgataggcgacttgttgaaagaccttaacttgtcgctgattccaaacaagtccttgacaactgctatgcagttcaagctagtgtacaagaccggagatgtgccactgattcgaattgaagaggatactggtgagatcttcactactggcgctcgcattgatcgtgagaaattatgtgctggtatcccaagggatgagcattgcttttatgaagtggaggttgccattttgccggatgaaatatttagactggttaagatacgttttctgatagaagatataaatgataatgcaccattgttcccagcaacagttatcaacatatcaattccagagaactcggctataaactctaaatatactctcccagcggctgttgatcctgacgtaggaataaacggagttcaaaactacgaactaattaagagtcaaaacatttttggcctcgatgtcattgaaacaccagaaggagacaagatgccacaactgattgttcaaaaggagttagatagggaagagaaggatacctacgtgatgaaagtaaaggttgaagatggtggctttcctcaaagatccagtactgctattttgcaagtgagtgttactgatacaaatgacaaccacccagtctttaaggagacagagattgaagtcagtataccagaaaatgctcctgtaggcacttcagtgacacagctccatgccacagatgctgacataggtgaaaatgccaagatccacttctctttcagcaatctagtctccaacattgccaggagattatttcacctcaatgccaccactggacttatcacaatcaaagaaccactggatagggaagaaacaccaaaccacaagttactggttttggcaagtgatggtggattgatgccagcaagagcaatggtgctggtaaatgttacagatgtcaatgataatgtcccatccattgacataagatacatcgtcaatcctgtcaatgacacagttgttctttcagaaaatattccactcaacaccaaaattgctctcataactgtgacggataaggatgcggaccataatggcagggtgacatgcttcacagatcatgaaatccctttcagattaaggccagtattcagtaatcagttcctcctggagactgcagcatatcttgactatgagtccacaaaagaatatgccattaaattactggctgcagatgctggcaaacctcctttgaatcagtcagcaatgctcttcatcaaagtgaaagatgaaaatgacaatgctccagttttcacccagtctttcgtaactgtttctattcctgagaataactctcctggcatccagttgacgaaagtaagtgcaatggatgcagacagtgggcctaatgctaagatcaattacctgctaggccctgatgctccacctgaattcagcctggattgtcgtacaggcatgctgactgtagtgaagaaactagatagagaaaaagaggataaatatttattcacaattctggcaaaagataacggggtaccacccttaaccagcaatgtcacagtctttgtaagcattattgatcagaatgacaatagcccagttttcactcacaatgaatacaacttctatgtcccagaaaaccttccaaggcatggtacagtaggactaatcactgtaactgatcctgattatggagacaattctgcagttacgctctccattttagatgagaatgatgacttcaccattgattcacaaactggtgtcatccgaccaaatatttcatttgatagagaaaaacaagaatcttacactttctatgtaaaggctgaggatggtggtagagtatcacgttcttcaagtgccaaagtaaccataaatgtggttgatgtcaatgacaacaaaccagttttcattgtccctccttccaactgttcttatgaattggttctaccgtccactaatccaggcacagtggtctttcaggtaattgctgttgacaatgacactggcatgaatgcagaggttcgttacagcattgtaggaggaaacacaagagatctgtttgcaatcgaccaagaaacaggcaacataacattgatggagaaatgtgatgttacagaccttggtttacacagagtgttggtcaaagctaatgacttaggacagcctgattctctcttcagtgttgtaattgtcaatctgttcgtgaatgagtcggtgaccaatgctacactgattaatgaactggtgcgcaaaagcactgaagcaccagtgaccccaaatactgagatagctgatgtatcctcaccaactagtgactatgtcaagatcctggttgcagctgttgctggcaccataactgtcgttgtagttattttcatcactgctgtagtaagatgtcgccaggcaccacaccttaaggctgctcagaaaaacaagcagaattctgaatgggctaccccaaacccagaaaacaggcagatgataatgatgaagaaaaagaaaaagaagaagaagcattcccctaagaacttgctgcttaattttgtcactattgaagaaactaaggcagatgatgttgacagtgatggaaacagagtcacactagaccttcctattgatctagaagagcaaacaatgggaaagtacaattgggtaactacacctactactttcaagcccgacagccctgatttggcccgacactacaaatctgcctctccacagcctgccttccaaattcagcctgaaactcccctgaattcgaagcaccacatcatccaagaactgcctctcgataacacctttgtggcctgtgactctatctccaagtgttcctcaagcagttcagatccctacagcgtttctgactgtggctatccagtgacgaccttcgaggtacctgtgtccgtacacaccagaccgccaatgaaggaggttgtgcgatcttgcacccccatgaaagagtctacaactatggagatctggattcatccccaaccacagcggaaatctgaagggaaagtggcaggaaagtcccagcggcgtgtcacatttcacctgccagaaggctctcaggaaagcagcagtgatggtggactgggagaccatgatgcaggcagccttaccagcacatctcatggcctgccccttggctatcctcaggaggagtactttgatcgtgctacacccagcaatcgcactgaaggggatggcaactccgatcctgaatctaccttcatcccaaggagcccaacagctgcagaaataactgttcaaccaactgtggaagaggcctctgacaactgcactcaagaatgtctcatctatggccattctgatgcctgctggatgccggcatctctggatcattccagctcttcgcaagcacaggcctctgctctatgccacagcccaccactgtcacaggcctctactcagcaccacagcccacgagtgacacagaccattgctctctgccacagccctccagtgacacagaccatcgcattgtgccacagcccaccaccgatacaggtgtctgctctccaccacagtcctcctctagtgcaggctactgcacttcaccacagcccaccatcagcacaggcctcagccctctgctacagccctcctttagcacaggctgctgcaatcagccacagctctcctctgccacaggttattgccctccatcgtagtcaggcccaatcatcagtcagtttgcagcaaggttgggtgcaaggtgctgatgggctatgctctgttgatcagggagtgcaaggtagtgcaacatctcagttttacaccatgtctgaaagacttcatcccagtgatgattcaattaaagtcattcctttgacaaccttcactccacgccaacaggccagaccgtccagaggtgattcccccattatggaagaacatcccttgtaa

SEQ ID NO: 324657 - DNA, 4044 bp, Artificial Sequence
  derived and/or modified sequence
atggacctgctgagcggcacctacatcttcgccgtgctgctggcctgcgtggtgttccacagcggcgcccaggagaagaactacaccatcagagaggagatgcccgagaacgtgctgatcggcgacctgctgaaggacctgaacctgagcctgatccccaacaagagcctgaccaccgccatgcagttcaagctggtgtacaagaccggcgacgtgcccctgatcagaatcgaggaggacaccggcgagatcttcaccaccggcgccagaatcgacagagagaagctgtgcgccggcatccccagagacgagcactgcttctacgaggtggaggtggccatcctgcccgacgagatcttcagactggtgaagatcagattcctgatcgaggacatcaacgacaacgcccccctgttccccgccaccgtgatcaacatcagcatccccgagaacagcgccatcaacagcaagtacaccctgcccgccgccgtggaccccgacgtgggcatcaacggcgtgcagaactacgagctgatcaagagccagaacatcttcggcctggacgtgatcgagacccccgagggcgacaagatgccccagctgatcgtgcagaaggagctggacagagaggagaaggacacctacgtgatgaaggtgaaggtggaggacggcggcttcccccagagaagcagcaccgccatcctgcaggtgagcgtgaccgacaccaacgacaaccaccccgtgttcaaggagaccgagatcgaggtgagcatccccgagaacgcccccgtgggcaccagcgtgacccagctgcacgccaccgacgccgacatcggcgagaacgccaagatccacttcagcttcagcaacctggtgagcaacatcgccagaagactgttccacctgaacgccaccaccggcctgatcaccatcaaggagcccctggacagagaggagacccccaaccacaagctgctggtgctggccagcgacggcggcctgatgcccgccagagccatggtgctggtgaacgtgaccgacgtgaacgacaacgtgcccagcatcgacatcagatacatcgtgaaccccgtgaacgacaccgtggtgctgagcgagaacatccccctgaacaccaagatcgccctgatcaccgtgaccgacaaggacgccgaccacaacggcagagtgacctgcttcaccgaccacgagatccccttcagactgagacccgtgttcagcaaccagttcctgctggagaccgccgcctacctggactacgagagcaccaaggagtacgccatcaagctgctggccgccgacgccggcaagccccccctgaaccagagcgccatgctgttcatcaaggtgaaggacgagaacgacaacgcccccgtgttcacccagagcttcgtgaccgtgagcatccccgagaacaacagccccggcatccagctgaccaaggtgagcgccatggacgccgacagcggccccaacgccaagatcaactacctgctgggccccgacgccccccccgagttcagcctggactgcagaaccggcatgctgaccgtggtgaagaagctggacagagagaaggaggacaagtacctgttcaccatcctggccaaggacaacggcgtgccccccctgaccagcaacgtgaccgtgttcgtgagcatcatcgaccagaacgacaacagccccgtgttcacccacaacgagtacaacttctacgtgcccgagaacctgcccagacacggcaccgtgggcctgatcaccgtgaccgaccccgactacggcgacaacagcgccgtgaccctgagcatcctggacgagaacgacgacttcaccatcgacagccagaccggcgtgatcagacccaacatcagcttcgacagagagaagcaggagagctacaccttctacgtgaaggccgaggacggcggcagagtgagcagaagcagcagcgccaaggtgaccatcaacgtggtggacgtgaacgacaacaagcccgtgttcatcgtgccccccagcaactgcagctacgagctggtgctgcccagcaccaaccccggcaccgtggtgttccaggtgatcgccgtggacaacgacaccggcatgaacgccgaggtgagatacagcatcgtgggcggcaacaccagagacctgttcgccatcgaccaggagaccggcaacatcaccctgatggagaagtgcgacgtgaccgacctgggcctgcacagagtgctggtgaaggccaacgacctgggccagcccgacagcctgttcagcgtggtgatcgtgaacctgttcgtgaacgagagcgtgaccaacgccaccctgatcaacgagctggtgagaaagagcaccgaggcccccgtgacccccaacaccgagatcgccgacgtgagcagccccaccagcgactacgtgaagatcctggtggccgccgtggccggcaccatcaccgtggtggtggtgatcttcatcaccgccgtggtgagatgcagacaggccccccacctgaaggccgcccagaagaacaagcagaacagcgagtgggccacccccaaccccgagaacagacagatgatcatgatgaagaagaagaagaagaagaagaagcacagccccaagaacctgctgctgaacttcgtgaccatcgaggagaccaaggccgacgacgtggacagcgacggcaacagagtgaccctggacctgcccatcgacctggaggagcagaccatgggcaagtacaactgggtgaccacccccaccaccttcaagcccgacagccccgacctggccagacactacaagagcgccagcccccagcccgccttccagatccagcccgagacccccctgaacagcaagcaccacatcatccaggagctgcccctggacaacaccttcgtggcctgcgacagcatcagcaagtgcagcagcagcagcagcgacccctacagcgtgagcgactgcggctaccccgtgaccaccttcgaggtgcccgtgagcgtgcacaccagaccccccatgaaggaggtggtgagaagctgcacccccatgaaggagagcaccaccatggagatctggatccacccccagccccagagaaagagcgagggcaaggtggccggcaagagccagagaagagtgaccttccacctgcccgagggcagccaggagagcagcagcgacggcggcctgggcgaccacgacgccggcagcctgaccagcaccagccacggcctgcccctgggctacccccaggaggagtacttcgacagagccacccccagcaacagaaccgagggcgacggcaacagcgaccccgagagcaccttcatccccagaagccccaccgccgccgagatcaccgtgcagcccaccgtggaggaggccagcgacaactgcacccaggagtgcctgatctacggccacagcgacgcctgctggatgcccgccagcctggaccacagcagcagcagccaggcccaggccagcgccctgtgccacagcccccccctgagccaggccagcacccagcaccacagccccagagtgacccagaccatcgccctgtgccacagcccccccgtgacccagaccatcgccctgtgccacagccccccccccatccaggtgagcgccctgcaccacagcccccccctggtgcaggccaccgccctgcaccacagcccccccagcgcccaggccagcgccctgtgctacagcccccccctggcccaggccgccgccatcagccacagcagccccctgccccaggtgatcgccctgcacagaagccaggcccagagcagcgtgagcctgcagcagggctgggtgcagggcgccgacggcctgtgcagcgtggaccagggcgtgcagggcagcgccaccagccagttctacaccatgagcgagagactgcaccccagcgacgacagcatcaaggtgatccccctgaccaccttcacccccagacagcaggccagacccagcagaggcgacagccccatcatggaggagcaccccctgtag

SEQ ID NO: 324658 - DNA, 4044 bp, Artificial Sequence
  derived and/or modified sequence
atggacctgctgagcggcacctacatcttcgccgtgctgctggcctgcgtggtgttccacagcggcgcccaggagaagaactacaccatcagagaggagatgcccgagaacgtgctgatcggcgacctgctgaaggacctgaacctgagcctgatccccaacaagagcctgaccaccgccatgcagttcaagctggtgtacaagaccggcgacgtgcccctgatcagaatcgaggaggacaccggcgagatcttcaccaccggcgccagaatcgacagagagaagctgtgcgccggcatccccagagacgagcactgcttctacgaggtggaggtggccatcctgcccgacgagatcttcagactggtgaagatcagattcctgatcgaggacatcaacgacaacgcccccctgttccccgccaccgtgatcaacatcagcatccccgagaacagcgccatcaacagcaagtacaccctgcccgccgccgtggaccccgacgtgggcatcaacggcgtgcagaactacgagctgatcaagagccagaacatcttcggcctggacgtgatcgagacccccgagggcgacaagatgccccagctgatcgtgcagaaggagctggacagagaggagaaggacacctacgtgatgaaggtgaaggtggaggacggcggcttcccccagagaagcagcaccgccatcctgcaggtgagcgtgaccgacaccaacgacaaccaccccgtgttcaaggagaccgagatcgaggtgagcatccccgagaacgcccccgtgggcaccagcgtgacccagctgcacgccaccgacgccgacatcggcgagaacgccaagatccacttcagcttcagcaacctggtgagcaacatcgccagaagactgttccacctgaacgccaccaccggcctgatcaccatcaaggagcccctggacagagaggagacccccaaccacaagctgctggtgctggccagcgacggcggcctgatgcccgccagagccatggtgctggtgaacgtgaccgacgtgaacgacaacgtgcccagcatcgacatcagatacatcgtgaaccccgtgaacgacaccgtggtgctgagcgagaacatccccctgaacaccaagatcgccctgatcaccgtgaccgacaaggacgccgaccacaacggcagagtgacctgcttcaccgaccacgagatccccttcagactgagacccgtgttcagcaaccagttcctgctggagaccgccgcctacctggactacgagagcaccaaggagtacgccatcaagctgctggccgccgacgccggcaagccccccctgaaccagagcgccatgctgttcatcaaggtgaaggacgagaacgacaacgcccccgtgttcacccagagcttcgtgaccgtgagcatccccgagaacaacagccccggcatccagctgaccaaggtgagcgccatggacgccgacagcggccccaacgccaagatcaactacctgctgggccccgacgccccccccgagttcagcctggactgcagaaccggcatgctgaccgtggtgaagaagctggacagagagaaggaggacaagtacctgttcaccatcctggccaaggacaacggcgtgccccccctgaccagcaacgtgaccgtgttcgtgagcatcatcgaccagaacgacaacagccccgtgttcacccacaacgagtacaacttctacgtgcccgagaacctgcccagacacggcaccgtgggcctgatcaccgtgaccgaccccgactacggcgacaacagcgccgtgaccctgagcatcctggacgagaacgacgacttcaccatcgacagccagaccggcgtgatcagacccaacatcagcttcgacagagagaagcaggagagctacaccttctacgtgaaggccgaggacggcggcagagtgagcagaagcagcagcgccaaggtgaccatcaacgtggtggacgtgaacgacaacaagcccgtgttcatcgtgccccccagcaactgcagctacgagctggtgctgcccagcaccaaccccggcaccgtggtgttccaggtgatcgccgtggacaacgacaccggcatgaacgccgaggtgagatacagcatcgtgggcggcaacaccagagacctgttcgccatcgaccaggagaccggcaacatcaccctgatggagaagtgcgacgtgaccgacctgggcctgcacagagtgctggtgaaggccaacgacctgggccagcccgacagcctgttcagcgtggtgatcgtgaacctgttcgtgaacgagagcgtgaccaacgccaccctgatcaacgagctggtgagaaagagcaccgaggcccccgtgacccccaacaccgagatcgccgacgtgagcagccccaccagcgactacgtgaagatcctggtggccgccgtggccggcaccatcaccgtggtggtggtgatcttcatcaccgccgtggtgagatgcagacaggccccccacctgaaggccgcccagaagaacaagcagaacagcgagtgggccacccccaaccccgagaacagacagatgatcatgatgaagaagaagaagaagaagaagaagcacagccccaagaacctgctgctgaacttcgtgaccatcgaggagaccaaggccgacgacgtggacagcgacggcaacagagtgaccctggacctgcccatcgacctggaggagcagaccatgggcaagtacaactgggtgaccacccccaccaccttcaagcccgacagccccgacctggccagacactacaagagcgccagcccccagcccgccttccagatccagcccgagacccccctgaacagcaagcaccacatcatccaggagctgcccctggacaacaccttcgtggcctgcgacagcatcagcaagtgcagcagcagcagcagcgacccctacagcgtgagcgactgcggctaccccgtgaccaccttcgaggtgcccgtgagcgtgcacaccagaccccccatgaaggaggtggtgagaagctgcacccccatgaaggagagcaccaccatggagatctggatccacccccagccccagagaaagagcgagggcaaggtggccggcaagagccagagaagagtgaccttccacctgcccgagggcagccaggagagcagcagcgacggcggcctgggcgaccacgacgccggcagcctgaccagcaccagccacggcctgcccctgggctacccccaggaggagtacttcgacagagccacccccagcaacagaaccgagggcgacggcaacagcgaccccgagagcaccttcatccccggcctgaagaaggccgccgagatcaccgtgcagcccaccgtggaggaggccagcgacaactgcacccaggagtgcctgatctacggccacagcgacgcctgctggatgcccgccagcctggaccacagcagcagcagccaggcccaggccagcgccctgtgccacagcccccccctgagccaggccagcacccagcaccacagccccagagtgacccagaccatcgccctgtgccacagcccccccgtgacccagaccatcgccctgtgccacagccccccccccatccaggtgagcgccctgcaccacagcccccccctggtgcaggccaccgccctgcaccacagcccccccagcgcccaggccagcgccctgtgctacagcccccccctggcccaggccgccgccatcagccacagcagccccctgccccaggtgatcgccctgcacagaagccaggcccagagcagcgtgagcctgcagcagggctgggtgcagggcgccgacggcctgtgcagcgtggaccagggcgtgcagggcagcgccaccagccagttctacaccatgagcgagagactgcaccccagcgacgacagcatcaaggtgatccccctgaccaccttcacccccagacagcaggccagacccagcagaggcgacagccccatcatggaggagcaccccctgtag

SEQ ID NO: 324659 - protein, 1025 aa, Artificial Sequence
  derived and/or modified sequence
MDLLSGTYIFAVLLACVVFHSGAQEKNYTIREEMPENVLIGDLLKDLNLSLIPNKSLTTAMQFKLVYKTGDVPLIRIEEDTGEIFTTGARIDREKLCAGIPRDEHCFYEVEVAILPDEIFRLVKIRFLIEDINDNAPLFPATVINISIPENSAINSKYTLPAAVDPDVGINGVQNYELIKSQNIFGLDVIETPEGDKMPQLIVQKELDREEKDTYVMKVKVEDGGFPQRSSTAILQVSVTDTNDNHPVFKETEIEVSIPENAPVGTSVTQLHATDADIGENAKIHFSFSNLVSNIARRLFHLNATTGLITIKEPLDREETPNHKLLVLASDGGLMPARAMVLVNVTDVNDNVPSIDIRYIVNPVNDTVVLSENIPLNTKIALITVTDKDADHNGRVTCFTDHEIPFRLRPVFSNQFLLETAAYLDYESTKEYAIKLLAADAGKPPLNQSAMLFIKVKDENDNAPVFTQSFVTVSIPENNSPGIQLTKVSAMDADSGPNAKINYLLGPDAPPEFSLDCRTGMLTVVKKLDREKEDKYLFTILAKDNGVPPLTSNVTVFVSIIDQNDNSPVFTHNEYNFYVPENLPRHGTVGLITVTDPDYGDNSAVTLSILDENDDFTIDSQTGVIRPNISFDREKQESYTFYVKAEDGGRVSRSSSAKVTINVVDVNDNKPVFIVPPSNCSYELVLPSTNPGTVVFQVIAVDNDTGMNAEVRYSIVGGNTRDLFAIDQETGNITLMEKCDVTDLGLHRVLVKANDLGQPDSLFSVVIVNLFVNESVTNATLINELVRKSTEAPVTPNTEIADVSSPTSDYVKILVAAVAGTITVVVVIFITAVVRCRQAPHLKAAQKNKQNSEWATPNPENRQMIMMKKKKKKKKHSPKNLLLNFVTIEETKADDVDSDGNRVTLDLPIDLEEQTMGKYNWVTTPTTFKPDSPDLARHYKSASPQPAFQIQPETPLNSKHHIIQELPLDNTFVACDSISKCSSSSSDPYSVSDCGYPVTTFEVPVSVHTRPTDSRTSTIEICSEI

SEQ ID NO: 324660 - DNA, 3066 bp, Artificial Sequence
  derived and/or modified sequence
atggacttgttatcaggcacgtatatattcgccgtgttgttagcctgcgttgtgtttcattccggggcacaagagaagaattacaccattcgagaagagatgcccgagaacgtgctaattggcgacctcctgaaagatctgaacctgtctctgatccccaataagagtctgacaaccgctatgcagtttaaacttgtatacaaaacaggagacgtgcccctgatcagaattgaggaggacaccggcgaaatttttacaactggggcacgaatcgaccgggagaagctttgcgccggaattccccgcgacgaacattgtttctacgaggttgaggtagctatcttaccagacgagatctttcgtctcgttaaaattcggttccttatcgaagacatcaacgacaatgccccactgtttcccgccaccgtgataaacatttcaatccccgaaaactctgcaatcaattcgaagtatacacttcccgcggcagtggaccccgacgtgggaatcaatggcgtccagaactacgaactgattaagtctcagaacatcttcggcttggatgtaatagaaacgcccgagggagataagatgccccagctcatcgttcagaaggagcttgatcgtgaggaaaaagatacttacgtgatgaaagttaaagttgaggacggagggttcccccaaagatcaagcaccgccattcttcaggtgtcggttaccgacaccaacgacaatcaccccgtcttcaaggaaactgaaattgaggtgagcatccctgagaatgctcccgttggtacatctgtcacccagttgcatgcaactgatgctgacatcggggaaaacgccaaaatacacttctctttttctaacttggtatccaacattgcaagacgactcttccacctgaacgcaaccactggactgatcacaataaaagaacccctggaccgcgaggagacccccaaccacaaactgttggtccttgcttctgatggtggtcttatgcccgcaagggcaatggtgcttgtgaacgtgaccgatgtcaatgacaacgtgccaagcatcgatatccgctacattgtaaatccggtgaatgacaccgttgttcttagcgagaatatcccattgaacacaaagatcgctctgattacagtgacagataaggacgccgatcacaatggacgagtgacctgtttcacagatcatgaaattcctttcaggctgcggccagtattctccaatcagtttctgctggaaaccgccgcttacctcgactacgagtcaaccaaggagtatgccataaaactcctggcagctgacgcagggaagcctcccctgaatcaaagcgcgatgctattcattaaggtgaaagacgaaaatgataacgccccagtgtttacacagagtttcgtaactgtctccattcccgaaaacaattctccagggattcagctcacaaaggtttccgctatggacgccgactccggacctaatgcaaaaattaactatctgctagggccggatgctccacctgagttttccctggactgtagaactggaatgttaacggttgtgaaaaagctggatagagagaaagaggataagtacctgttcactattctagccaaagacaacggagtgccacccctcacaagcaatgtgacggtctttgtttccattatcgaccagaatgacaattcccctgtgtttactcacaacgagtataatttttacgtgcccgaaaacctcccaagacatgggactgttggactgatcacagtgactgaccctgactacggggataatagcgcagtaaccctgagcatcctggacgaaaacgacgactttaccattgatagccagacaggcgtgatccggccgaatatctccttcgatcgtgaaaagcaagaatcgtatacattctatgtgaaagctgaggatgggggtagggtttctcgaagttccagtgccaaggtgaccattaatgtggtggacgttaatgacaataagcccgtgttcatcgtcccgccatccaattgttcctacgaactagtgctccctagtactaaccctggtactgtggtcttccaagtcatcgccgtggataatgacaccgggatgaacgcagaggtgaggtattctattgtaggagggaacacacgagacttgtttgccatcgaccaggagacaggcaatattaccctgatggaaaaatgtgatgttactgacctcgggttgcatagagttctagtgaaggcaaatgatctggggcaacccgacagcctgttctctgtcgtaattgtcaatctgtttgtcaacgagtccgttactaacgccacgttgatcaacgagttagtgcggaaatccaccgaagcccccgtcacccctaacactgagatcgcagatgtctcttcacctacgagcgattatgtaaagattctggttgccgccgttgcaggaactattacagtagtggtcgtgatctttataacggccgttgtcagatgcaggcaggctccgcacctcaaagctgcacaaaagaacaagcaaaatagtgagtgggccaccccaaaccctgagaatcggcagatgattatgatgaaaaagaaaaagaagaaaaagaagcacagccccaaaaatctgttgctaaatttcgtgacaattgaagagacaaaagctgacgacgttgacagcgatgggaatagagtaacacttgacctacctatcgatcttgaggagcaaactatgggaaaatataactgggtaacaacgcccactacatttaagccagattcccctgatcttgcacggcattataagtctgcatccccacaaccggcattccaaattcagcctgagactcccctgaactcaaagcatcacatcattcaagaactgcctttggacaatacctttgtagcatgtgattctatatctaagtgttcttccagtagcagcgacccttattctgttagcgattgtgggtacccggtgactaccttcgaggtgcccgtatctgtacataccagaccggttgggattcaggtgtcaaacacaactttttag

SEQ ID NO: 324661 - DNA, 3078 bp, Artificial Sequence
  derived and/or modified sequence
atggacttactatctgggacatacattttcgcagtgctgttggcatgtgtcgtctttcatagcggggctcaggaaaagaactacaccattcgggaagaaatgcctgagaacgtcctaataggtgacttgctgaaagatttgaacctttcccttattccaaataagagcctgaccaccgcaatgcaattcaaactcgtctacaagaccggcgatgttccacttatcagaatcgaagaggacacaggggagatcttcacgaccggcgcccggattgatagagaaaagttgtgtgccgggatcccaagggacgaacactgcttctacgaggtggaagtggctatcctgccagacgagatttttcgattagtgaaaattcggtttctgatagaagatatcaacgataacgctccattatttcctgcaactgtcatcaacataagcattccggagaattccgccatcaacagtaaatatactttgcccgcagcagttgatcctgacgtcggtatcaatggggtccagaattacgagctgatcaagtctcagaatatctttgggctcgacgtaattgaaactcccgagggcgataagatgccccagcttatcgtgcagaaagaattggatagggaagagaaggatacttacgtgatgaaggtgaaagtcgaggacggaggatttccccagcgttcaagcacggccattctgcaggtctctgtgacagataccaacgacaaccacccagtattcaaggagacagaaatcgaggtgagcatcccagaaaacgcccctgtggggacctccgtgactcaactgcacgctacagacgccgacattggagagaatgcgaagattcacttcagtttttccaatctcgtaagcaacatcgccaggaggttgtttcacctcaacgctactacaggactgataactataaaagaacctctcgatagggaagaaactcccaaccacaagttattagtgttagcaagcgacggtggcctgatgccagcgcgggctatggtgctggttaacgtcactgatgtcaacgataacgtgccttctatcgatatacggtacattgtgaaccctgttaatgataccgtggtcttaagcgagaacattcctctcaacacaaagattgccttaatcaccgtcaccgataaagatgccgaccacaacggaagggtcacatgtttcacagatcatgagatcccgttccggctgcgtccagttttctccaatcagtttttattggagactgctgcctacctcgattatgaaagcaccaaggagtatgccattaaattattggctgcagacgcgggaaagcctcctctcaaccagagcgcgatgctgttcataaaagtaaaggacgagaatgacaatgcgccagtttttactcagagttttgtgacggtttccattccggagaataatagccctggcatccaactcaccaaggtgtccgctatggacgccgatagtggccccaacgcgaaaattaactacctcctcggccctgatgccccccctgagttttccctggactgtcgtacgggcatgttgaccgtggtcaaaaaactcgaccgtgagaaagaagacaagtatctttttacaattctcgctaaagacaatggagtacctccgttaacatcaaacgtgaccgtgtttgtctctataatcgaccaaaatgacaactccccagtattcacccataatgaatataatttctacgtacccgaaaacctcccccgccacggcactgtgggcttgatcaccgtgacggatccagattatggggataactccgctgtgacactgtctatactggacgagaatgacgatttcaccatagattctcagactggcgtcatccggcctaacataagtttcgatagggagaagcaggagtcttataccttctatgtcaaggccgaggacggcgggcgcgtcagcaggtcttcatcagccaaggtaaccattaatgtggtggacgtcaatgacaacaagcccgttttcatagtgccacccagtaactgcagttacgagctcgtactgccatccactaatcctggcaccgtggtgtttcaggtcattgctgtggataacgatacaggcatgaacgcagaagtgaggtattccatcgtgggcggtaatacccgtgatctgtttgcaatcgatcaggagactggcaatatcactctgatggagaaatgcgatgtcactgatctgggacttcaccgggtgctggtgaaggccaacgacctggggcaacccgattctctgttttcggttgtgatcgtgaacctcttcgtcaacgagtccgtgaccaacgctacactgatcaatgaactcgtgcggaagtccacagaggcccccgtgactcccaatactgaaattgccgatgtgtcatcccccacatctgactacgtgaagatcctggtagcagcagttgcaggaacgattactgtggtggttgttattttcatcactgctgtggtgaggtgtcggcaggcaccacacctgaaggcggcccagaagaacaaacagaacagtgagtgggccactcctaaccccgaaaaccgccagatgatcatgatgaagaaaaagaaaaagaagaagaagcactccccgaagaatctgctgttgaactttgtgacgatcgaggaaactaaagccgacgacgtcgactctgatggaaacagagtgactttggacctccctattgatcttgaagagcaaaccatggggaagtacaattgggtaacaacacccactacgtttaaacctgatagcccagacttagctagacactacaaatcagccagcccccagcccgccttccagatccagcctgaaactcctctgaacagtaaacaccatattatacaggagctcccgctggacaacacgttcgtcgcgtgcgattctatttcaaagtgtagctcttcatcatctgatccatattccgttagcgactgcggttaccccgttaccaccttcgaagttcctgtgtcagtccataccaggcccactgattcaagaaccagtactatcgagatttgttctgaaatatag

SEQ ID NO: 324662 - DNA, 3066 bp, Artificial Sequence
  derived and/or modified sequence
atggacctgctgagcggcacctacatctttgctgtgctgctggcctgtgtggtgttccacagcggggcccaggagaagaactacaccatccgggaggagatgccagaaaatgtgctgattggagacctgctgaaggacctgaacctgagcctcatccccaacaagagcctgaccacagccatgcagttcaagctggtgtacaagacaggagatgtgcccctcatcagaattgaagaagatactggagagatcttcaccactggagccagaattgaccgggagaagctgtgtgccggcatccccagagatgagcactgcttctatgaggtggaggtggccatcctgcctgatgagatcttccggctggtgaagatccgcttcctgattgaggacatcaatgacaatgcccccctcttccctgccaccgtcatcaacatcagcatccctgagaacagcgccatcaacagcaagtacaccctgcctgctgctgtggaccctgatgtgggcatcaatggagtgcagaactatgagctgatcaagagccagaacatcttcggcctggatgtgattgagaccccagagggggacaagatgccccagctgattgtgcagaaggagctggaccgggaggagaaggacacctacgtgatgaaggtgaaggtggaggatggcggcttcccccagaggagcagcacagccatcctgcaggtgtctgtgacagacaccaatgacaaccaccctgtgttcaaggagacagaaattgaggtgtccatcccagaaaatgcccctgtgggcacctctgtgacccagctgcacgccacagatgctgacatcggggagaatgccaagatccacttctccttcagcaacctggtgagcaacatcgcccggcggctcttccacctgaatgccaccaccggcctcatcaccatcaaggagcccctggaccgggaggagacccccaaccacaagctgctggtgctggccagtgatggcggcctgatgcctgcccgggccatggtgctggtgaatgtgacagatgtgaatgacaacgtgcccagcattgacatccgctacatcgtgaaccctgtgaatgacacagtggtgctgtctgagaacatccccctgaacaccaagatcgccctgatcaccgtgacagacaaggatgctgaccacaacggccgggtgacctgcttcacagaccacgagatccccttccggctgcggcctgtgttcagcaaccagttcctgctggagacagctgcctacctggactatgagagcaccaaggagtatgccatcaagctgctggccgcagatgctgggaagccacccctgaaccagagcgccatgctgttcatcaaggtgaaggatgaaaatgacaatgcccctgtgttcacccagagctttgtgacagtgtccatccctgagaacaacagccctggcatccagctgaccaaggtgtctgccatggatgctgacagcggccccaatgccaagatcaactacctgctgggcccagatgcccctcctgagttcagcctggactgcaggacaggcatgctgactgtggtgaagaagctggaccgggagaaggaggacaagtacctgttcaccatcctggccaaggacaatggagtgccccccctgaccagcaatgtgacagtgtttgtgtccatcatcgaccagaatgacaacagccctgtgttcacccacaatgagtacaacttctacgtgcctgagaacctgcccaggcatggcaccgtgggcctcatcaccgtgacagatcctgactatggagacaacagcgctgtgaccctgagcatcctggatgaaaatgatgacttcaccatcgacagccagacaggagtcatccggcccaacatcagctttgaccgggagaagcaggagagctacaccttctacgtgaaggccgaggatggcggccgggtgagccgcagcagcagcgccaaggtgaccatcaacgtggtggatgtgaatgacaacaagcctgtgttcatcgtgccccccagcaactgcagctatgagctggtgctgcccagcaccaaccctggcaccgtggtgttccaggtgattgctgtggacaatgacaccggcatgaatgctgaggtgcgctacagcatcgtgggcggcaacacccgggacctgtttgccatcgaccaggagaccggcaacatcaccctgatggagaagtgtgatgtgacagacctgggcctgcaccgggtgctggtgaaggccaatgacctgggccagcctgacagcctcttctctgtggtgattgtgaacctgtttgtgaatgaatctgtgaccaatgccaccctcatcaatgagctggtgaggaagagcacagaggcccctgtgacccccaacacagaaattgctgatgtgagcagccccaccagtgactatgtgaagatcctggtggccgctgtggccggcaccatcaccgtggtggtggtgatcttcatcacagctgtggtgcgctgccggcaggccccccacctgaaggccgcccagaagaacaagcagaacagcgagtgggccacccccaaccctgagaaccggcagatgatcatgatgaagaagaagaagaagaagaagaagcacagccccaagaacctgctgctgaactttgtgaccatcgaggagaccaaggcagatgatgtggacagtgatggcaacagagtgaccctggacctgcccatcgacctggaggagcagaccatgggcaagtacaactgggtgaccacccccaccaccttcaagccagacagcccagacctggcccggcactacaagagcgccagcccccagcctgccttccagatccagcctgagacccccctgaacagcaagcaccacatcatccaggagctgcccctggacaacacctttgtggcctgtgacagcatcagcaagtgcagcagcagcagcagtgacccctacagcgtgtctgactgtggctaccctgtgaccacctttgaggtgcctgtgtctgtgcacaccaggcctgtgggcatccaggtgagcaacaccaccttctag

SEQ ID NO: 324663 - DNA, 3078 bp, Artificial Sequence
  derived and/or modified sequence
atggacctgctgagcggcacctacatctttgctgtgctgctggcctgtgtggtgttccacagcggggcccaggagaagaactacaccatccgggaggagatgccagaaaatgtgctgattggagacctgctgaaggacctgaacctgagcctcatccccaacaagagcctgaccacagccatgcagttcaagctggtgtacaagacaggagatgtgcccctcatcagaattgaagaagatactggagagatcttcaccactggagccagaattgaccgggagaagctgtgtgccggcatccccagagatgagcactgcttctatgaggtggaggtggccatcctgcctgatgagatcttccggctggtgaagatccgcttcctgattgaggacatcaatgacaatgcccccctcttccctgccaccgtcatcaacatcagcatccctgagaacagcgccatcaacagcaagtacaccctgcctgctgctgtggaccctgatgtgggcatcaatggagtgcagaactatgagctgatcaagagccagaacatcttcggcctggatgtgattgagaccccagagggggacaagatgccccagctgattgtgcagaaggagctggaccgggaggagaaggacacctacgtgatgaaggtgaaggtggaggatggcggcttcccccagaggagcagcacagccatcctgcaggtgtctgtgacagacaccaatgacaaccaccctgtgttcaaggagacagaaattgaggtgtccatcccagaaaatgcccctgtgggcacctctgtgacccagctgcacgccacagatgctgacatcggggagaatgccaagatccacttctccttcagcaacctggtgagcaacatcgcccggcggctcttccacctgaatgccaccaccggcctcatcaccatcaaggagcccctggaccgggaggagacccccaaccacaagctgctggtgctggccagtgatggcggcctgatgcctgcccgggccatggtgctggtgaatgtgacagatgtgaatgacaacgtgcccagcattgacatccgctacatcgtgaaccctgtgaatgacacagtggtgctgtctgagaacatccccctgaacaccaagatcgccctgatcaccgtgacagacaaggatgctgaccacaacggccgggtgacctgcttcacagaccacgagatccccttccggctgcggcctgtgttcagcaaccagttcctgctggagacagctgcctacctggactatgagagcaccaaggagtatgccatcaagctgctggccgcagatgctgggaagccacccctgaaccagagcgccatgctgttcatcaaggtgaaggatgaaaatgacaatgcccctgtgttcacccagagctttgtgacagtgtccatccctgagaacaacagccctggcatccagctgaccaaggtgtctgccatggatgctgacagcggccccaatgccaagatcaactacctgctgggcccagatgcccctcctgagttcagcctggactgcaggacaggcatgctgactgtggtgaagaagctggaccgggagaaggaggacaagtacctgttcaccatcctggccaaggacaatggagtgccccccctgaccagcaatgtgacagtgtttgtgtccatcatcgaccagaatgacaacagccctgtgttcacccacaatgagtacaacttctacgtgcctgagaacctgcccaggcatggcaccgtgggcctcatcaccgtgacagatcctgactatggagacaacagcgctgtgaccctgagcatcctggatgaaaatgatgacttcaccatcgacagccagacaggagtcatccggcccaacatcagctttgaccgggagaagcaggagagctacaccttctacgtgaaggccgaggatggcggccgggtgagccgcagcagcagcgccaaggtgaccatcaacgtggtggatgtgaatgacaacaagcctgtgttcatcgtgccccccagcaactgcagctatgagctggtgctgcccagcaccaaccctggcaccgtggtgttccaggtgattgctgtggacaatgacaccggcatgaatgctgaggtgcgctacagcatcgtgggcggcaacacccgggacctgtttgccatcgaccaggagaccggcaacatcaccctgatggagaagtgtgatgtgacagacctgggcctgcaccgggtgctggtgaaggccaatgacctgggccagcctgacagcctcttctctgtggtgattgtgaacctgtttgtgaatgaatctgtgaccaatgccaccctcatcaatgagctggtgaggaagagcacagaggcccctgtgacccccaacacagaaattgctgatgtgagcagccccaccagtgactatgtgaagatcctggtggccgctgtggccggcaccatcaccgtggtggtggtgatcttcatcacagctgtggtgcgctgccggcaggccccccacctgaaggccgcccagaagaacaagcagaacagcgagtgggccacccccaaccctgagaaccggcagatgatcatgatgaagaagaagaagaagaagaagaagcacagccccaagaacctgctgctgaactttgtgaccatcgaggagaccaaggcagatgatgtggacagtgatggcaacagagtgaccctggacctgcccatcgacctggaggagcagaccatgggcaagtacaactgggtgaccacccccaccaccttcaagccagacagcccagacctggcccggcactacaagagcgccagcccccagcctgccttccagatccagcctgagacccccctgaacagcaagcaccacatcatccaggagctgcccctggacaacacctttgtggcctgtgacagcatcagcaagtgcagcagcagcagcagtgacccctacagcgtgtctgactgtggctaccctgtgaccacctttgaggtgcctgtgtctgtgcacacccggcccacagacagcaggaccagcaccatcgagatctgcagcgagatctag

SEQ ID NO: 324664 - DNA, 3066 bp, Artificial Sequence
  derived and/or modified sequence
atggacctgctgagcggcacctacatcttcgccgtgctgctggcctgtgtggtgttccacagcggtgcccaagagaagaactatacaatccgagaggagatgcccgagaatgtcctgatcggagacttgttgaaagacttaaacctgtcattaatacctaataaatcactcactactgcgatgcaattcaagctggtgtacaaaaccggggatgttccacttatccggattgaggaggacaccggagagattttcaccactggggctagaatcgatagagagaagctctgtgctggcatcccccgagatgaacactgtttctacgaagtggaagtggcgatcctgccggacgagatatttaggttggtgaaaattcggtttctcatcgaggacatcaacgacaacgccccactctttcctgccactgtgatcaacatatccataccagagaactcggcgatcaattcaaagtacacgttacccgcagcagtagatcccgatgttggtataaacggcgtccagaattatgagctgattaaatcccagaacatcttcggtctggacgtgatcgaaaccccggagggcgataagatgccacaacttattgtgcagaaggaactagaccgggaagagaaagacacatatgtcatgaaagtaaaggtggaagatggcggattccctcagcggtcatcaactgcgattctgcaggtgtccgtgacagatactaacgacaatcaccccgtcttcaaagaaacggaaatcgaagtcagcatccctgagaacgcgcctgtgggcacttccgtgacccagctgcacgccactgacgccgacatcggcgagaatgcaaagatccatttcagtttctccaacctggtgtcaaatatcgcccgacgcctgttccatctgaatgcaactactggattaatcaccatcaaagagcccctggacagggaggaaaccccgaatcacaagctgctcgtgttggcttcagacggcggcttaatgccagcccgggctatggtccttgttaacgttacagatgtgaacgacaacgtgccgagtatcgatatcaggtacatcgttaaccccgtaaatgataccgttgtgctgagcgaaaacatccctctgaatactaaaatcgccctgatcactgtcactgacaaggatgcggatcataacgggagagtaacttgtttcaccgaccatgagatcccattcagactgcgcccggtctttagtaaccagttcctcctcgagactgcggcatatctggactatgaatcaacaaaagaatacgcaattaagctgctcgccgcagacgctggtaaaccacctcttaatcagtcagctatgctgtttataaaagtcaaggacgagaacgataatgcccctgtgtttacccaaagctttgtgaccgtctctattcctgagaacaacagccctggcattcaattgacaaaggttagtgctatggatgcagacagcggtccgaatgccaaaattaactacctcctgggccccgacgctccaccagagttctccctcgactgccgtactgggatgctaaccgttgtgaagaaactggaccgtgagaaagaggacaagtatctgttcactatcctggcaaaagataatggtgtacccccactgacgtctaacgtgactgtgtttgtgagtataattgatcagaatgataattctccagttttcacccataacgagtacaacttttatgtaccggaaaacctgcctcgccacggcaccgttggattgattactgtgacagaccccgactatggcgataatagtgcggtgacattgtccattctggacgagaacgacgacttcactatcgatagccagacgggcgtaattagacccaacatctcttttgaccgcgagaagcaggaatcttataccttttacgtgaaagccgaagatggtgggcgggttagtagatcttctagcgcaaaggttacgatcaacgtagtggatgtcaacgataataaacccgtctttattgttcccccctccaactgctcttacgagctagtactcccgtcgaccaaccctggtacagtcgttttccaggtgatcgcagtagataacgacacaggaatgaatgcggaagtaaggtacagtatcgtcggtggcaacacacgggatcttttcgccatcgatcaggagaccgggaacatcacactgatggagaaatgcgacgttacagacctaggcctccatagagtcttggtcaaggcaaacgaccttggtcagcctgacagcctgttcagtgtggtaatcgtgaatctctttgttaatgagagcgtgacaaacgccacactcattaatgagttagttcgcaaatctacagaggccccagtaacccctaacacagaaattgcggacgtgtcatctcctaccagcgactatgtcaaaatactggtcgccgctgtcgcgggaactattaccgtagtcgtggtgatatttataacagctgtggtacggtgccggcaggcgcctcacctaaaagcggctcagaagaacaaacaaaactccgagtgggcgacccccaacccggagaacagacagatgatcatgatgaagaaaaaaaagaaaaagaaaaagcatagccccaaaaatctgcttctcaactttgtgacgatagaggagaccaaggccgacgatgtggattcagatggcaaccgtgtgacgctggacttgcccatcgacctcgaggaacaaacaatggggaagtataactgggtaactacgcctaccactttcaagccagactcacccgatttagctcggcactacaaaagcgctagtcctcaaccagccttccaaatccagccagagacgccgctgaattctaaacatcacattatccaagagctgccattggacaacacattcgttgcctgcgacagcatctctaagtgctctagcagctctagcgatccctactctgtgtcagactgtgggtaccccgttacaacttttgaagtccccgttagcgtccacacacgccccgtgggtattcaggtgtctaatactacattctag

SEQ ID NO: 324665 - DNA, 3078 bp, Artificial Sequence
  derived and/or modified sequence
atggacctgctgagcggcacctacatcttcgccgtgctgctggcctgcgttgtttttcatagcggcgcccaggagaagaactatactattcgcgaagaaatgcccgaaaacgttttgattggcgacctgctgaaagacctcaacttgtctttgattccaaataaatccctgacgacagccatgcagttcaagttggtctataaaacaggggacgttcccctcatacggatagaggaggataccggggagatcttcaccacgggggcacgtattgatagggaaaaactttgcgctgggatccccagggacgaacactgcttttacgaggttgaagtcgccattctgccagacgagatttttcgcctcgtcaaaatcagattcttaatagaagatataaacgataacgcccccctgtttcctgctactgtcattaacatttccatcccagagaacagcgccattaactcgaaatacacacttcctgcggctgtggaccctgacgtaggaattaacggcgtacaaaactacgagctgataaagagccagaacatcttcggacttgacgtgatcgagactcccgaaggagataagatgccccagctgattgtgcaaaaggagcttgatcgggaggaaaaagatacttatgtgatgaaggttaaggtagaggatggcgggttcccccagcgttcaagcacagccatcttgcaggtttccgttacagacacaaatgataatcatccagtcttcaaagaaacagagatagaagtgtccatcccagaaaacgcgcctgtcgggacatccgtgacccaactccacgctacggacgcagacatcggcgagaacgctaaaatccactttagtttcagtaatttagtgagcaatatcgcccgtcgcctcttccatctgaatgccacaacggggctaatcacaataaaggagcccttggacagagaggagactcccaatcataaactgttagtgctcgctagcgacggagggctgatgcctgcgcgggcaatggtcctggtgaacgtaaccgatgtgaacgataatgtcccttccatcgacattcgctacatcgtcaatccggtaaacgacacagtagtgctgtctgaaaacatccctctgaataccaaaatcgcactcattaccgttactgacaaagatgccgaccacaacggccgggtcacgtgctttactgatcacgagatcccattcaggctgagaccagtctttagcaaccaattccttctggagactgccgcctacctggactacgaaagtaccaaagagtacgcaatcaagttgttggcagcggatgccggaaagccaccattgaaccagagcgcaatgttatttattaaagtaaaggacgagaacgataacgcccccgtctttactcaaagctttgtgaccgttagcataccggagaataatagccccggaatccagctcacaaaagtgagcgccatggatgctgacagcggccccaatgctaagattaattaccttctggggccagacgcccctccagaattctctcttgactgtaggactggcatgctaaccgtcgtcaagaaactggaccgagagaaggaggataaatacctcttcaccattctggccaaggacaacggcgttcccccactaactagcaatgtcaccgtatttgtttcgatcattgaccagaacgacaactcaccagtgttcacccacaatgaatacaatttttacgtcccggaaaacctgcctaggcacggaactgtcggtttaattactgtgaccgatcctgattatggcgataactcagccgttacgctgagcattctggacgaaaacgacgattttacgatcgacagccagactggagttatacgccctaacattagtttcgaccgagagaagcaggagagttacactttctacgtaaaggctgaggacgggggcagggtgtcaaggagctccagcgcaaaggttacgatcaatgtagttgacgtgaatgacaacaagcccgttttcatcgtacccccttcaaactgcagttatgagctcgtcttacctagcactaacccgggtacggtggttttccaggtgatagccgtggacaatgataccgggatgaacgcggaggtccgctacagcattgttggcggcaatacccgggatctcttcgccatcgaccaggagactggaaatattacactgatggagaagtgcgatgtcacagatttgggcctacacagagtcctcgtcaaggcaaacgacctggggcagccagacagcctgttctccgtggttatcgtgaacctcttcgttaatgagtcagtgacgaatgcgacattgattaacgaactggtccggaagtctacagaagcaccagtcacccctaacaccgagatcgcggacgtgagttctccaaccagtgactatgttaaaatcctggtggcagctgtggccggaacaatcaccgtggtggttgtgatttttatcaccgctgtggtccggtgcagacaggcaccccacctgaaagctgcgcagaagaataaacagaactccgagtgggcaacccccaaccctgaaaacaggcagatgattatgatgaaaaaaaagaagaagaagaaaaagcattcgccaaaaaatttgctgctgaactttgtgacgatcgaggagacaaaggccgatgacgttgattctgatggcaaccgcgtgacgctggatctgcccattgacctggaggagcaaacaatgggaaaatacaattgggtgacaactccaactacttttaaacctgatagtcccgacctggcacggcactataagagtgcatctcctcaaccagctttccaaatccagcctgagacacctctgaattccaaacaccacatcatacaagaactgcctctcgacaatacttttgtagcctgtgactcgatctcaaaatgcagtagcagttcgtctgatccctattctgtcagcgactgtggataccccgttaccactttcgaggtgcctgtttcagtacataccaggccaacagattcacgcacctctaccattgagatatgtagtgaaatttag

SEQ ID NO: 324666 - DNA, 3066 bp, Artificial Sequence
  derived and/or modified sequence
atggatctgctatccggcacttacatttttgcggtgttgttggcctgtgtcgtcttccacagcggagcccaagagaagaattacactatcagggaggagatgcccgaaaacgtcctgataggagatctcctgaaggatttgaacttgtcacttatccccaataaatcactaaccacagcgatgcagtttaagcttgtttacaagacgggggatgtgcccctcattcggattgaggaagatactggtgagatctttaccaccggcgctcgcattgatcgtgagaaactgtgcgcgggaattcccagagatgaacactgtttctacgaggttgaagtcgctatccttcctgacgaaatttttcgtttggtgaagatccgcttcctgatagaggacatcaacgacaacgcccctctctttcctgccacggttatcaacatatccatccccgagaacagcgccataaacagcaagtacacccttccagcagctgtagatcctgacgtcggcatcaatggagtacagaattatgaactgataaaaagtcagaatatcttcggcttggacgtgatagagacccccgagggcgacaaaatgccccaactgatcgttcagaaggaactggaccgggaggagaaagatacttacgttatgaaagtgaaagtggaggatggagggttccctcagaggagtagcaccgccattctgcaggttagtgtaaccgacacaaatgataatcaccccgtatttaaagagacagagatcgaggtgtctatcccggaaaatgccccagttggcactagcgttacgcagttacatgctaccgacgccgacattggagagaatgctaagattcacttttcatttagcaatctcgtctcaaacatcgcccgtagactctttcaccttaacgcaaccaccggacttatcaccatcaaggagccgctggatagagaggaaactcccaaccacaaactgctggtgctggcatcagacggcggactcatgcctgccagggcaatggtgctggtgaacgtaacggacgtcaatgacaacgtgcctagcattgacatcagatatattgtaaatcccgtgaacgacacagtcgtgctctccgagaacatccccctcaacactaagattgccttaatcaccgtcaccgacaaagacgccgaccataatgggagagttacctgctttactgatcacgagatcccttttcggctgcggcctgttttctctaatcaatttctgcttgagacagctgcttacttggattacgaatcaactaaagaatacgctatcaagctgttagccgctgacgccggtaagccccctttgaatcaatcagctatgctgtttattaaagtgaaggacgaaaacgacaacgcaccagtgtttacccaaagcttcgtcaccgtgagcatccccgaaaacaattcccctggcatacagctgaccaaagtgtctgcgatggatgccgactctgggcctaacgcaaaaattaactacttactgggccctgatgctccccctgagtttagcctggattgcaggaccggcatgttaactgtagtgaagaagctggatcgggagaaggaggacaagtatttgtttactattttagccaaggacaacggagtccccccactaaccagcaacgtcaccgtgttcgttagtatcattgaccagaacgacaactctcctgtattcacccataacgagtacaatttttatgtacctgaaaatctcccacgtcacggcactgtgggtctaattacagtgacggatcccgactatggagataatagcgcggttacacttagtatccttgatgagaatgatgattttaccatcgactctcagactggggtgataagacctaatatcagcttcgaccgagagaagcaggaaagctacactttttatgtgaaggccgaggacggaggcagagtctctcggtccagttctgcgaaggtgaccattaatgtggtggacgtcaatgataacaaacctgtctttatagttcctccaagcaactgctcctacgaattagtactcccaagtacgaatccagggacagttgtcttccaggtaattgctgtggacaacgatactggtatgaatgcagaggtgagatatagtatagtggggggaaacacgcgcgacttgtttgccatcgaccaagaaactgggaatataaccctgatggaaaagtgtgatgtaactgacctgggtcttcacagggtgctggtgaaggcaaatgacctaggacagcctgatagtctcttctcggtggtgatcgttaatttgtttgtgaatgaatctgtgacaaacgcaactttgattaatgagctggtcaggaagagtaccgaggctcctgtgacacccaacactgagatcgctgatgtgtcatctccaacctccgactacgttaaaatcctcgtagcggcagtcgcaggtactatcacggtggtggtggtcatctttatcactgccgtcgttaggtgtcgacaggctccccacctgaaggctgcgcagaagaacaagcaaaacagcgaatgggctactcctaatccggaaaacaggcagatgatcatgatgaagaaaaagaagaagaagaaaaaacattcaccgaagaaccttttgttgaactttgtgacaatcgaagaaacaaaggccgacgacgtggattcggatgggaacagagtgactttggatctgcccattgatctggaagagcagactatgggcaaatataactgggtcaccactcccaccactttcaagcccgacagccctgatctggcccgtcactacaagtctgcctccccgcagcctgctttccaaatccagcctgagaccccactcaactccaagcaccacatcatacaggagctgccactggacaacacttttgttgcgtgtgatagcatcagcaagtgcagtagctcgtcatcagatccctactccgtgtccgactgtggttaccctgttactacattcgaggtccccgtctccgtacatacaagacccgtcggtatccaggtgtcaaacacaaccttttag

SEQ ID NO: 324667 - DNA, 3078 bp, Artificial Sequence
  derived and/or modified sequence
atggatctcctctctggaacatatatctttgcagtccttttggcctgcgtggtttttcattctggagctcaggagaagaattacaccatccgcgaagaaatgcctgagaatgtactgattggagacctgcttaaggacctcaacctttccctaattccaaacaagtcactgaccacggccatgcagttcaaacttgtatataaaaccggagacgtcccgcttatcagaatcgaggaagatacaggggagattttcaccactggagcacgcatcgacagagagaagctgtgtgctgggatcccgagagatgagcactgtttctatgaggtcgaagttgccattcttcctgacgagatattcagactggtgaagatccggttccttatcgaagacataaatgataatgccccactctttcccgctacagtgatcaacatctcaatccccgagaactctgccattaactccaagtacacattgccagcagcagtggatccggatgtgggcataaacggagttcaaaattatgagcttattaaatctcagaatatcttcggtctcgacgtgatcgagactcctgagggcgataaaatgccacagctgatcgtccagaaagaactggatcgagaggagaaagatacttatgtaatgaaggttaaggtggaagacgggggattcccgcagcgctcgtctaccgccattctccaggtaagtgtaaccgatactaacgataatcatccagtgttcaaggagacggagattgaggtaagtatccccgagaacgccccagtgggaactagtgtcacccagctgcacgccactgacgccgatattggggaaaatgctaaaatccacttctcttttagtaacctggtgagtaatatcgcccgacgactcttccacctaaacgccactaccgggctgattacaattaaggaaccactggacagggaggagacaccgaaccacaaattgctggtgctggcatcggatgggggactgatgcccgctagagcaatggtcctggtcaacgtgaccgacgtcaatgacaatgtccccagtatcgacatcagatatattgtgaatccagttaacgataccgtagtgctcagcgaaaacatccctttaaacacaaagatcgctcttatcacagtaaccgataaggatgcggatcacaatggcagagtgacatgcttcaccgaccacgaaattcctttcagactgcggccagtgttctcaaaccaattccttttggagacagcagcgtatctggattacgaatcaaccaaagaatacgcaatcaagctgctcgctgccgatgccggaaaaccacccttgaatcagtcagccatgctctttataaaggtgaaagatgaaaacgataacgccccagtcttcacccagagcttcgttacggtatccatcccagagaataattcgcccggaattcagctcactaaagtaagtgctatggacgcagactcaggccctaatgccaaaattaattacttgctcggtccagacgctccaccagagttcagcctggattgtcggaccggcatgctgacggttgtgaaaaaattggatcgcgaaaaggaggacaaataccttttcactattctcgccaaagacaatggagtccccccactgacaagcaatgttactgtgtttgtcagtatcatcgatcagaatgataattcacccgttttcacacataacgaatacaatttctatgtgcccgagaacctgccccgacacgggacagtgggtcttatcaccgtgacggatcctgactacggtgacaattccgccgttaccctgagtatcctagacgaaaacgacgacttcacaatcgactctcaaacaggtgtaatccggcctaatattagctttgacagggagaagcaggagtcctacacattttacgttaaggcagaggacgggggtcgagtgagcaggtcctcgagcgccaaagtcactatcaatgtggtggacgttaatgacaacaaacccgtgttcatagtaccaccatctaactgctcctacgaactggtcctacctagcaccaatcccggaacagtcgtattccaggtgattgctgtcgacaatgataccggaatgaacgctgaggtcaggtactcaattgtgggcggtaacacaagggatctgtttgccattgatcaagaaactggcaatatcactctcatggagaagtgtgatgtcactgacctgggccttcaccgcgtactcgtcaaggcgaatgaccttggacaaccagacagtctcttttcagtggttatcgtgaatctgtttgtcaacgagtccgtcaccaacgccacgctcattaatgagctcgtcaggaaatcgacagaggcccctgtgacccccaacaccgaaattgccgacgtgtcctcccctacctcagactatgtcaagatcctggtagcagctgtggccggtaccattaccgtggtggtcgtcattttcatcaccgctgtggtgcgctgtcggcaggcccctcatttgaaagcagcccaaaaaaacaagcagaattctgaatgggccactcccaatcccgaaaatagacagatgatcatgatgaaaaagaagaaaaaaaagaaaaaacactctccaaagaatttgctcctgaattttgttactatagaggaaactaaggcagatgatgttgacagtgacgggaacagggtcaccttagacctacctatagatttagaggaacagactatgggcaaatataactgggtgaccactccaactacgtttaagcccgactctcccgatttggctcgccattataaaagtgcttctccacagcctgctttccagatccagcctgaaacacccctcaattctaagcaccatataatccaagagctaccactggacaacacctttgtggcatgtgactcaatctcaaagtgttcatctagttcctccgatccctactccgtgagtgactgtggctatcccgtgaccacgttcgaagtcccagtctctgtgcacactagacccacggatagccgcacaagcaccatcgagatctgctcagaaatctag

SEQ ID NO: 324668 - DNA, 4603 bp, Artificial Sequence
  derived and/or modified sequence
ctggtggtccagtacctccaaagatatggaatacactcctgaaatatcctgaaaacttttttttttcagaatcctttaataagcagttatgtcaatctgaaagttgcttacttgtactttatattaatagctattcttgtttttcttatccaaagaaaaatcctctaatccccttttcacatgatagttgttaccatgtttaggcattagtcacatcaacccctctcctctcccaaacttctcttcttcaaatcaaactttattagtccctcctttataatgattccttgcctcgttttatccagatcaattttttttcactttgatgcccagagctgaagaaatggactactgtataaattattcattgccaagagaataattgcattttaaacccatattataacaaagaataatgattatattttgtgatttgtaacaaataccctttattttcccttaactattgaattaaatattttaattatttgtattctctttaactatcttggtatattaaagtattatcttttatatatttatcaatggtggacacttttataggtactctgtgtcatttttgatactgtaggtatcttatttcatttatctttattcttaatgtacgaattcataatatttgattcagaacaaatttatcactaattaacagagtgtcaattatgctaacatctcatttactgattttaatttaaaacagtttttgttaacatgcatgtttagggttggcttcttaataatttcttcttcctcttctctctctcctcttcttttggtcagtgttgtgcgggttaatacaacaaactgtaacaagtgtacctggtatggacttgttgtccgggacgtacattttcgcggtcctgctagcatgcgtggtgttccactctggcgcccaggagaaaaactacaccatccgagaagaaatgccagaaaacgtcctgataggcgacttgttgaaagaccttaacttgtcgctgattccaaacaagtccttgacaactgctatgcagttcaagctagtgtacaagaccggagatgtgccactgattcgaattgaagaggatactggtgagatcttcactactggcgctcgcattgatcgtgagaaattatgtgctggtatcccaagggatgagcattgcttttatgaagtggaggttgccattttgccggatgaaatatttagactggttaagatacgttttctgatagaagatataaatgataatgcaccattgttcccagcaacagttatcaacatatcaattccagagaactcggctataaactctaaatatactctcccagcggctgttgatcctgacgtaggaataaacggagttcaaaactacgaactaattaagagtcaaaacatttttggcctcgatgtcattgaaacaccagaaggagacaagatgccacaactgattgttcaaaaggagttagatagggaagagaaggatacctacgtgatgaaagtaaaggttgaagatggtggctttcctcaaagatccagtactgctattttgcaagtgagtgttactgatacaaatgacaaccacccagtctttaaggagacagagattgaagtcagtataccagaaaatgctcctgtaggcacttcagtgacacagctccatgccacagatgctgacataggtgaaaatgccaagatccacttctctttcagcaatctagtctccaacattgccaggagattatttcacctcaatgccaccactggacttatcacaatcaaagaaccactggatagggaagaaacaccaaaccacaagttactggttttggcaagtgatggtggattgatgccagcaagagcaatggtgctggtaaatgttacagatgtcaatgataatgtcccatccattgacataagatacatcgtcaatcctgtcaatgacacagttgttctttcagaaaatattccactcaacaccaaaattgctctcataactgtgacggataaggatgcggaccataatggcagggtgacatgcttcacagatcatgaaatccctttcagattaaggccagtattcagtaatcagttcctcctggagactgcagcatatcttgactatgagtccacaaaagaatatgccattaaattactggctgcagatgctggcaaacctcctttgaatcagtcagcaatgctcttcatcaaagtgaaagatgaaaatgacaatgctccagttttcacccagtctttcgtaactgtttctattcctgagaataactctcctggcatccagttgacgaaagtaagtgcaatggatgcagacagtgggcctaatgctaagatcaattacctgctaggccctgatgctccacctgaattcagcctggattgtcgtacaggcatgctgactgtagtgaagaaactagatagagaaaaagaggataaatatttattcacaattctggcaaaagataacggggtaccacccttaaccagcaatgtcacagtctttgtaagcattattgatcagaatgacaatagcccagttttcactcacaatgaatacaacttctatgtcccagaaaaccttccaaggcatggtacagtaggactaatcactgtaactgatcctgattatggagacaattctgcagttacgctctccattttagatgagaatgatgacttcaccattgattcacaaactggtgtcatccgaccaaatatttcatttgatagagaaaaacaagaatcttacactttctatgtaaaggctgaggatggtggtagagtatcacgttcttcaagtgccaaagtaaccataaatgtggttgatgtcaatgacaacaaaccagttttcattgtccctccttccaactgttcttatgaattggttctaccgtccactaatccaggcacagtggtctttcaggtaattgctgttgacaatgacactggcatgaatgcagaggttcgttacagcattgtaggaggaaacacaagagatctgtttgcaatcgaccaagaaacaggcaacataacattgatggagaaatgtgatgttacagaccttggtttacacagagtgttggtcaaagctaatgacttaggacagcctgattctctcttcagtgttgtaattgtcaatctgttcgtgaatgagtcggtgaccaatgctacactgattaatgaactggtgcgcaaaagcactgaagcaccagtgaccccaaatactgagatagctgatgtatcctcaccaactagtgactatgtcaagatcctggttgcagctgttgctggcaccataactgtcgttgtagttattttcatcactgctgtagtaagatgtcgccaggcaccacaccttaaggctgctcagaaaaacaagcagaattctgaatgggctaccccaaacccagaaaacaggcagatgataatgatgaagaaaaagaaaaagaagaagaagcattcccctaagaacttgctgcttaattttgtcactattgaagaaactaaggcagatgatgttgacagtgatggaaacagagtcacactagaccttcctattgatctagaagagcaaacaatgggaaagtacaattgggtaactacacctactactttcaagcccgacagccctgatttggcccgacactacaaatctgcctctccacagcctgccttccaaattcagcctgaaactcccctgaattcgaagcaccacatcatccaagaactgcctctcgataacacctttgtggcctgtgactctatctccaagtgttcctcaagcagttcagatccctacagcgtttctgactgtggctatccagtgacgaccttcgaggtacctgtgtccgtacacaccagaccggtaggtatccaagtttctaacacaactttctaactatttttttattattattttcagttgatgtagaactttacaaaatctattgacttcaaagagggatcaaaacaatcatattctacagatgtacccaatagatatatggattcaattaagtttggtagaagatgagaacaaaataactactgatttaggaaaattggatgcagaataataattatagtaggggcaattttgtctgtagatggcagtatgacaattcttgctagagaatatattgaaaaaaacttcaacacaaagggttgtagcactgtcctcagtaccattgtgtgcatgaggatcagaatagtctgggctagatacatcacattaaagcttttcagaatctgataaatagctctaaatactaatgatattgagaagcctagcttcacttgggaaaatctgtggctgttcacagaaattcagcaccaagttattccccccatactctaccaggccttcaggtcctcataaagaaaagtgtcgttttcagattaggaactcaaaattattttggtgcatcaaatctacagtcacacaatataacaagaatgggattagaaaaatgaaagcctactcattctcatctttaagccagagaatgaaatatatatgaggtctctggatagctatttaaatatttgcatatttatgcaaggtattttgagcccttcagaagacattct

SEQ ID NO: 324669 - DNA, 4767 bp, Artificial Sequence
  derived and/or modified sequence
tcacttctctccccacgccttcccctggttcaccccccttccttcccctttctccccctcggttaagtccctccccctcgccattcaaaagggctggctcggcactggctccttgcagtcggcgaactgtcggggcgggaggagccgtgagcagtagctgcactcagctgcccgcgcggcaaagaggaaggcaagccaaacagagtgcgcagagtggcagtgccagcggcgacacaggcagcacaggcagcccgggctgcctgaatagcctcagaaacaacctcagcgactccggctgctctgcggactgcgagctgtggcggtagagcccgctacagcagtcgcagtctccgtggagcgggcggaagccttttttctccctttcgtttacctcttcattctactctaaaggcatcgttattaggaaaatcctgttgcgaataagaaggattccacagatcacataccggagaggttttgcctcagctgctctcaactttgtaatcttgtgaagaagctgacaagcttggctgattgcagagcactatgaggactgaacgacagtgggttttaattcagatatttcaagtgttgtgcgggttaatacaacaaactgtaacaagtgtacctggtatggacttgttgtccgggacgtacattttcgcggtcctgctagcatgcgtggtgttccactctggcgcccaggagaaaaactacaccatccgagaagaaatgccagaaaacgtcctgataggcgacttgttgaaagaccttaacttgtcgctgattccaaacaagtccttgacaactgctatgcagttcaagctagtgtacaagaccggagatgtgccactgattcgaattgaagaggatactggtgagatcttcactactggcgctcgcattgatcgtgagaaattatgtgctggtatcccaagggatgagcattgcttttatgaagtggaggttgccattttgccggatgaaatatttagactggttaagatacgttttctgatagaagatataaatgataatgcaccattgttcccagcaacagttatcaacatatcaattccagagaactcggctataaactctaaatatactctcccagcggctgttgatcctgacgtaggaataaacggagttcaaaactacgaactaattaagagtcaaaacatttttggcctcgatgtcattgaaacaccagaaggagacaagatgccacaactgattgttcaaaaggagttagatagggaagagaaggatacctacgtgatgaaagtaaaggttgaagatggtggctttcctcaaagatccagtactgctattttgcaagtgagtgttactgatacaaatgacaaccacccagtctttaaggagacagagattgaagtcagtataccagaaaatgctcctgtaggcacttcagtgacacagctccatgccacagatgctgacataggtgaaaatgccaagatccacttctctttcagcaatctagtctccaacattgccaggagattatttcacctcaatgccaccactggacttatcacaatcaaagaaccactggatagggaagaaacaccaaaccacaagttactggttttggcaagtgatggtggattgatgccagcaagagcaatggtgctggtaaatgttacagatgtcaatgataatgtcccatccattgacataagatacatcgtcaatcctgtcaatgacacagttgttctttcagaaaatattccactcaacaccaaaattgctctcataactgtgacggataaggatgcggaccataatggcagggtgacatgcttcacagatcatgaaatccctttcagattaaggccagtattcagtaatcagttcctcctggagactgcagcatatcttgactatgagtccacaaaagaatatgccattaaattactggctgcagatgctggcaaacctcctttgaatcagtcagcaatgctcttcatcaaagtgaaagatgaaaatgacaatgctccagttttcacccagtctttcgtaactgtttctattcctgagaataactctcctggcatccagttgacgaaagtaagtgcaatggatgcagacagtgggcctaatgctaagatcaattacctgctaggccctgatgctccacctgaattcagcctggattgtcgtacaggcatgctgactgtagtgaagaaactagatagagaaaaagaggataaatatttattcacaattctggcaaaagataacggggtaccacccttaaccagcaatgtcacagtctttgtaagcattattgatcagaatgacaatagcccagttttcactcacaatgaatacaacttctatgtcccagaaaaccttccaaggcatggtacagtaggactaatcactgtaactgatcctgattatggagacaattctgcagttacgctctccattttagatgagaatgatgacttcaccattgattcacaaactggtgtcatccgaccaaatatttcatttgatagagaaaaacaagaatcttacactttctatgtaaaggctgaggatggtggtagagtatcacgttcttcaagtgccaaagtaaccataaatgtggttgatgtcaatgacaacaaaccagttttcattgtccctccttccaactgttcttatgaattggttctaccgtccactaatccaggcacagtggtctttcaggtaattgctgttgacaatgacactggcatgaatgcagaggttcgttacagcattgtaggaggaaacacaagagatctgtttgcaatcgaccaagaaacaggcaacataacattgatggagaaatgtgatgttacagaccttggtttacacagagtgttggtcaaagctaatgacttaggacagcctgattctctcttcagtgttgtaattgtcaatctgttcgtgaatgagtcggtgaccaatgctacactgattaatgaactggtgcgcaaaagcactgaagcaccagtgaccccaaatactgagatagctgatgtatcctcaccaactagtgactatgtcaagatcctggttgcagctgttgctggcaccataactgtcgttgtagttattttcatcactgctgtagtaagatgtcgccaggcaccacaccttaaggctgctcagaaaaacaagcagaattctgaatgggctaccccaaacccagaaaacaggcagatgataatgatgaagaaaaagaaaaagaagaagaagcattcccctaagaacttgctgcttaattttgtcactattgaagaaactaaggcagatgatgttgacagtgatggaaacagagtcacactagaccttcctattgatctagaagagcaaacaatgggaaagtacaattgggtaactacacctactactttcaagcccgacagccctgatttggcccgacactacaaatctgcctctccacagcctgccttccaaattcagcctgaaactcccctgaattcgaagcaccacatcatccaagaactgcctctcgataacacctttgtggcctgtgactctatctccaagtgttcctcaagcagttcagatccctacagcgtttctgactgtggctatccagtgacgaccttcgaggtacctgtgtccgtacacaccagaccgactgattccaggacatcaactattgaaatctgcagtgagatataactttctaggaacaacaaaattccattccccttccaaaaaatttcaatgattgtgatttcaaaattaggctaagatcattaattttgtaatctagatttcccattataaaagcaagcaaaaatcatcttaaaaatgatgtcctagtgaaccttgtgctttctttagctgtaatctggcaatggaaatttaaaatttatggaagagacagtgcagcacaataacagagtactctcatgctgtttctctgtttgctctgaatcaacagccatgatgtaatataaggctgtcttggtgtatacacttatggttaatatatcagtcatgaaacatgcaattacttgccctgtctgattgttgaataattaaaacattatctccaggagtttggaagtgagctgaactagccaaactactctctgaaaggtatccagggcaagagacatttttaagaccccaaacaaacaaaaaacaaaaccaaaacactctggttcagtgttttgaaaatattcactaacataatattgctgagaaaatcatttttattacccaccactctgcttaaaagttgagtgggccgggcgcggtggctcacgcctgtaatcccagcactttgggaggccgaggcgggtggatcacgaggtcaggagattgagaccatcctggctaacacggtgaaaccccatctccactaaaaatacaaaaaattagcctggcgtggtggcgggcgcctgtagtcccagctactcgggaggctgaggcaggagaatagcgtgaacccgggaggcggagcttgcagtgagccgagatggcgccactgcactccagcctgggtgacagagcaagactctgtctcaaaaagaaaaaaatgttcaatgatagaaaataattttactaggtttttatgttgattgtactcatgctgttccactccttttaattattaaaaagttatttttggctgggtgtggtggctcacacctgtaatcccagcactttgggaggccgaggtgggtggatcacctgaggtcaggagttcaagaccagtctggccaacat

SEQ ID NO: 324670 - DNA, 3066 bp, Artificial Sequence
  derived and/or modified sequence
atggacctgctgagcggcacctacatcttcgccgtgctgctggcctgcgtggtgttccacagcggcgcccaggagaagaactacaccatcagagaggagatgcccgagaacgtgctgatcggcgacctgctgaaggacctgaacctgagcctgatccccaacaagagcctgaccaccgccatgcagttcaagctggtgtacaagaccggcgacgtgcccctgatcagaatcgaggaggacaccggcgagatcttcaccaccggcgccagaatcgacagagagaagctgtgcgccggcatccccagagacgagcactgcttctacgaggtggaggtggccatcctgcccgacgagatcttcagactggtgaagatcagattcctgatcgaggacatcaacgacaacgcccccctgttccccgccaccgtgatcaacatcagcatccccgagaacagcgccatcaacagcaagtacaccctgcccgccgccgtggaccccgacgtgggcatcaacggcgtgcagaactacgagctgatcaagagccagaacatcttcggcctggacgtgatcgagacccccgagggcgacaagatgccccagctgatcgtgcagaaggagctggacagagaggagaaggacacctacgtgatgaaggtgaaggtggaggacggcggcttcccccagagaagcagcaccgccatcctgcaggtgagcgtgaccgacaccaacgacaaccaccccgtgttcaaggagaccgagatcgaggtgagcatccccgagaacgcccccgtgggcaccagcgtgacccagctgcacgccaccgacgccgacatcggcgagaacgccaagatccacttcagcttcagcaacctggtgagcaacatcgccagaagactgttccacctgaacgccaccaccggcctgatcaccatcaaggagcccctggacagagaggagacccccaaccacaagctgctggtgctggccagcgacggcggcctgatgcccgccagagccatggtgctggtgaacgtgaccgacgtgaacgacaacgtgcccagcatcgacatcagatacatcgtgaaccccgtgaacgacaccgtggtgctgagcgagaacatccccctgaacaccaagatcgccctgatcaccgtgaccgacaaggacgccgaccacaacggcagagtgacctgcttcaccgaccacgagatccccttcagactgagacccgtgttcagcaaccagttcctgctggagaccgccgcctacctggactacgagagcaccaaggagtacgccatcaagctgctggccgccgacgccggcaagccccccctgaaccagagcgccatgctgttcatcaaggtgaaggacgagaacgacaacgcccccgtgttcacccagagcttcgtgaccgtgagcatccccgagaacaacagccccggcatccagctgaccaaggtgagcgccatggacgccgacagcggccccaacgccaagatcaactacctgctgggccccgacgccccccccgagttcagcctggactgcagaaccggcatgctgaccgtggtgaagaagctggacagagagaaggaggacaagtacctgttcaccatcctggccaaggacaacggcgtgccccccctgaccagcaacgtgaccgtgttcgtgagcatcatcgaccagaacgacaacagccccgtgttcacccacaacgagtacaacttctacgtgcccgagaacctgcccagacacggcaccgtgggcctgatcaccgtgaccgaccccgactacggcgacaacagcgccgtgaccctgagcatcctggacgagaacgacgacttcaccatcgacagccagaccggcgtgatcagacccaacatcagcttcgacagagagaagcaggagagctacaccttctacgtgaaggccgaggacggcggcagagtgagcagaagcagcagcgccaaggtgaccatcaacgtggtggacgtgaacgacaacaagcccgtgttcatcgtgccccccagcaactgcagctacgagctggtgctgcccagcaccaaccccggcaccgtggtgttccaggtgatcgccgtggacaacgacaccggcatgaacgccgaggtgagatacagcatcgtgggcggcaacaccagagacctgttcgccatcgaccaggagaccggcaacatcaccctgatggagaagtgcgacgtgaccgacctgggcctgcacagagtgctggtgaaggccaacgacctgggccagcccgacagcctgttcagcgtggtgatcgtgaacctgttcgtgaacgagagcgtgaccaacgccaccctgatcaacgagctggtgagaaagagcaccgaggcccccgtgacccccaacaccgagatcgccgacgtgagcagccccaccagcgactacgtgaagatcctggtggccgccgtggccggcaccatcaccgtggtggtggtgatcttcatcaccgccgtggtgagatgcagacaggccccccacctgaaggccgcccagaagaacaagcagaacagcgagtgggccacccccaaccccgagaacagacagatgatcatgatgaagaagaagaagaagaagaagaagcacagccccaagaacctgctgctgaacttcgtgaccatcgaggagaccaaggccgacgacgtggacagcgacggcaacagagtgaccctggacctgcccatcgacctggaggagcagaccatgggcaagtacaactgggtgaccacccccaccaccttcaagcccgacagccccgacctggccagacactacaagagcgccagcccccagcccgccttccagatccagcccgagacccccctgaacagcaagcaccacatcatccaggagctgcccctggacaacaccttcgtggcctgcgacagcatcagcaagtgcagcagcagcagcagcgacccctacagcgtgagcgactgcggctaccccgtgaccaccttcgaggtgcccgtgagcgtgcacaccagacccgtgggcatccaggtgagcaacaccaccttctag

SEQ ID NO: 324671 - DNA, 3078 bp, Artificial Sequence
  derived and/or modified sequence
atggacctgctgagcggcacctacatcttcgccgtgctgctggcctgcgtggtgttccacagcggcgcccaggagaagaactacaccatcagagaggagatgcccgagaacgtgctgatcggcgacctgctgaaggacctgaacctgagcctgatccccaacaagagcctgaccaccgccatgcagttcaagctggtgtacaagaccggcgacgtgcccctgatcagaatcgaggaggacaccggcgagatcttcaccaccggcgccagaatcgacagagagaagctgtgcgccggcatccccagagacgagcactgcttctacgaggtggaggtggccatcctgcccgacgagatcttcagactggtgaagatcagattcctgatcgaggacatcaacgacaacgcccccctgttccccgccaccgtgatcaacatcagcatccccgagaacagcgccatcaacagcaagtacaccctgcccgccgccgtggaccccgacgtgggcatcaacggcgtgcagaactacgagctgatcaagagccagaacatcttcggcctggacgtgatcgagacccccgagggcgacaagatgccccagctgatcgtgcagaaggagctggacagagaggagaaggacacctacgtgatgaaggtgaaggtggaggacggcggcttcccccagagaagcagcaccgccatcctgcaggtgagcgtgaccgacaccaacgacaaccaccccgtgttcaaggagaccgagatcgaggtgagcatccccgagaacgcccccgtgggcaccagcgtgacccagctgcacgccaccgacgccgacatcggcgagaacgccaagatccacttcagcttcagcaacctggtgagcaacatcgccagaagactgttccacctgaacgccaccaccggcctgatcaccatcaaggagcccctggacagagaggagacccccaaccacaagctgctggtgctggccagcgacggcggcctgatgcccgccagagccatggtgctggtgaacgtgaccgacgtgaacgacaacgtgcccagcatcgacatcagatacatcgtgaaccccgtgaacgacaccgtggtgctgagcgagaacatccccctgaacaccaagatcgccctgatcaccgtgaccgacaaggacgccgaccacaacggcagagtgacctgcttcaccgaccacgagatccccttcagactgagacccgtgttcagcaaccagttcctgctggagaccgccgcctacctggactacgagagcaccaaggagtacgccatcaagctgctggccgccgacgccggcaagccccccctgaaccagagcgccatgctgttcatcaaggtgaaggacgagaacgacaacgcccccgtgttcacccagagcttcgtgaccgtgagcatccccgagaacaacagccccggcatccagctgaccaaggtgagcgccatggacgccgacagcggccccaacgccaagatcaactacctgctgggccccgacgccccccccgagttcagcctggactgcagaaccggcatgctgaccgtggtgaagaagctggacagagagaaggaggacaagtacctgttcaccatcctggccaaggacaacggcgtgccccccctgaccagcaacgtgaccgtgttcgtgagcatcatcgaccagaacgacaacagccccgtgttcacccacaacgagtacaacttctacgtgcccgagaacctgcccagacacggcaccgtgggcctgatcaccgtgaccgaccccgactacggcgacaacagcgccgtgaccctgagcatcctggacgagaacgacgacttcaccatcgacagccagaccggcgtgatcagacccaacatcagcttcgacagagagaagcaggagagctacaccttctacgtgaaggccgaggacggcggcagagtgagcagaagcagcagcgccaaggtgaccatcaacgtggtggacgtgaacgacaacaagcccgtgttcatcgtgccccccagcaactgcagctacgagctggtgctgcccagcaccaaccccggcaccgtggtgttccaggtgatcgccgtggacaacgacaccggcatgaacgccgaggtgagatacagcatcgtgggcggcaacaccagagacctgttcgccatcgaccaggagaccggcaacatcaccctgatggagaagtgcgacgtgaccgacctgggcctgcacagagtgctggtgaaggccaacgacctgggccagcccgacagcctgttcagcgtggtgatcgtgaacctgttcgtgaacgagagcgtgaccaacgccaccctgatcaacgagctggtgagaaagagcaccgaggcccccgtgacccccaacaccgagatcgccgacgtgagcagccccaccagcgactacgtgaagatcctggtggccgccgtggccggcaccatcaccgtggtggtggtgatcttcatcaccgccgtggtgagatgcagacaggccccccacctgaaggccgcccagaagaacaagcagaacagcgagtgggccacccccaaccccgagaacagacagatgatcatgatgaagaagaagaagaagaagaagaagcacagccccaagaacctgctgctgaacttcgtgaccatcgaggagaccaaggccgacgacgtggacagcgacggcaacagagtgaccctggacctgcccatcgacctggaggagcagaccatgggcaagtacaactgggtgaccacccccaccaccttcaagcccgacagccccgacctggccagacactacaagagcgccagcccccagcccgccttccagatccagcccgagacccccctgaacagcaagcaccacatcatccaggagctgcccctggacaacaccttcgtggcctgcgacagcatcagcaagtgcagcagcagcagcagcgacccctacagcgtgagcgactgcggctaccccgtgaccaccttcgaggtgcccgtgagcgtgcacaccagacccaccgacagcagaaccagcaccatcgagatctgcagcgagatctag

SEQ ID NO: 324672 - protein, 745 aa, Artificial Sequence
  derived and/or modified sequence
MGLSTSAIWKNTRVEIVNPYEVKRKVKVNGLKMVDEPMEEGEADSCHDEGVVKEIPITHHVKEGYEKADPAQFELLKVLGQGSFGKVFLVRKKTGPDAGQLYAMKVLKKASLKVRDRVRTKMERDILVEVNHPFIVKLHYAFQTEGKLYLILDFLRGGDVFTRLSKEVLFTEEDVKFYLAELALALDHLHQLGIVYRDLKPENILLDEIGHIKLTDFGLSKESVDQEKKAYSFCGTVEYMAPEVVNRRGHSQSADWWSYGVLMFEMLTGTLPFQGKDRNETMNMILKAKLGMPQFLSAEAQSLLRMLFKRNPANRLGSEGVEEIKRHLFFANIDWDKLYKREVQPPFKPASGKPDDTFCFDPEFTAKTPKDSPGLPASANAHQLFKGFSFVATSIAEEYKITPITSANVLPIVQINGNAAQFGEVYELKEDIGVGSYSVCKRCIHATTNMEFAVKIIDKSKRDPSEEIEILMRYGQHPNIITLKDVFDDGRYVYLVTDLMKGGELLDRILKQKCFSEREASDILYVISKTVDYLHCQGVVHRDLKPSNILYMDESASADSIRICDFGFAKQLRGENGLLLTPCYTANFVAPEVLMQQGYDAACDIWSLGVLFYTMLAGYTPFANGPNDTPEEILLRIGNGKFSLSGGNWDNISDGAKDLLSHMLHMDPHQRYTAEQILKHSWITHRDQLPNDQPKRNDVSHVVKGAMVATYSALTHKTFQPVLEPVAASSLAQRRSMKKRTSTGL

SEQ ID NO: 324673 - DNA, 2238 bp, Artificial Sequence
  derived and/or modified sequence
atgggcctgagcaccagcgccatctggaagaacaccagagtggagatcgtgaacccctacgaggtgaagagaaaggtgaaggtgaacggcctgaagatggtggacgagcccatggaggagggcgaggccgacagctgccacgacgagggcgtggtgaaggagatccccatcacccaccacgtgaaggagggctacgagaaggccgaccccgcccagttcgagctgctgaaggtgctgggccagggcagcttcggcaaggtgttcctggtgagaaagaagaccggccccgacgccggccagctgtacgccatgaaggtgctgaagaaggccagcctgaaggtgagagacagagtgagaaccaagatggagagagacatcctggtggaggtgaaccaccccttcatcgtgaagctgcactacgccttccagaccgagggcaagctgtacctgatcctggacttcctgagaggcggcgacgtgttcaccagactgagcaaggaggtgctgttcaccgaggaggacgtgaagttctacctggccgagctggccctggccctggaccacctgcaccagctgggcatcgtgtacagagacctgaagcccgagaacatcctgctggacgagatcggccacatcaagctgaccgacttcggcctgagcaaggagagcgtggaccaggagaagaaggcctacagcttctgcggcaccgtggagtacatggcccccgaggtggtgaacagaagaggccacagccagagcgccgactggtggagctacggcgtgctgatgttcgagatgctgaccggcaccctgcccttccagggcaaggacagaaacgagaccatgaacatgatcctgaaggccaagctgggcatgccccagttcctgagcgccgaggcccagagcctgctgagaatgctgttcaagagaaaccccgccaacagactgggcagcgagggcgtggaggagatcaagagacacctgttcttcgccaacatcgactgggacaagctgtacaagagagaggtgcagccccccttcaagcccgccagcggcaagcccgacgacaccttctgcttcgaccccgagttcaccgccaagacccccaaggacagccccggcctgcccgccagcgccaacgcccaccagctgttcaagggcttcagcttcgtggccaccagcatcgccgaggagtacaagatcacccccatcaccagcgccaacgtgctgcccatcgtgcagatcaacggcaacgccgcccagttcggcgaggtgtacgagctgaaggaggacatcggcgtgggcagctacagcgtgtgcaagagatgcatccacgccaccaccaacatggagttcgccgtgaagatcatcgacaagagcaagagagaccccagcgaggagatcgagatcctgatgagatacggccagcaccccaacatcatcaccctgaaggacgtgttcgacgacggcagatacgtgtacctggtgaccgacctgatgaagggcggcgagctgctggacagaatcctgaagcagaagtgcttcagcgagagagaggccagcgacatcctgtacgtgatcagcaagaccgtggactacctgcactgccagggcgtggtgcacagagacctgaagcccagcaacatcctgtacatggacgagagcgccagcgccgacagcatcagaatctgcgacttcggcttcgccaagcagctgagaggcgagaacggcctgctgctgaccccctgctacaccgccaacttcgtggcccccgaggtgctgatgcagcagggctacgacgccgcctgcgacatctggagcctgggcgtgctgttctacaccatgctggccggctacacccccttcgccaacggccccaacgacacccccgaggagatcctgctgagaatcggcaacggcaagttcagcctgagcggcggcaactgggacaacatcagcgacggcgccaaggacctgctgagccacatgctgcacatggacccccaccagagatacaccgccgagcagatcctgaagcacagctggatcacccacagagaccagctgcccaacgaccagcccaagagaaacgacgtgagccacgtggtgaagggcgccatggtggccacctacagcgccctgacccacaagaccttccagcccgtgctggagcccgtggccgccagcagcctggcccagagaagaagcatgaagaagagaaccagcaccggcctgtag

SEQ ID NO: 324674 - DNA, 2238 bp, Artificial Sequence
  derived and/or modified sequence
atgggactgagcacgtctgccatttggaaaaacacccgcgtggagattgtgaacccatatgaggtgaagcgaaaagtgaaagtgaacgggttaaaaatggtggatgaaccaatggaagagggtgaagcggacagctgtcacgatgagggcgtggtcaaagagattcccatcactcaccatgtcaaggaggggtacgaaaaagcggaccccgcccagttcgagctcctgaaggttttggggcagggctccttcggtaaggtgttcctagtgcggaaaaagacaggtcctgatgccggacaactgtacgctatgaaagtgctcaaaaaggctagcttgaaggttcgtgatagagtacgtactaaaatggaacgagatatcttagtggaggtcaatcatccattcattgtgaagctccactatgccttccagactgaagggaaactctacttaattctggatttcctcagaggcggagatgtcttcacccgtttgtcgaaggaggtgctgttcacagaggaggacgtgaagttctacttggccgagctagcactggctctcgatcacctccaccagctgggaatcgtgtatcgagacctcaagccggaaaacatccttctggatgagataggtcacattaaactgaccgactttggcctgtctaaagagagcgtggaccaagaaaagaaagcttacagtttctgcggcaccgtggagtatatggcccctgaagtggtaaatagacggggccacagccaaagtgccgactggtggtcttacggagtgttgatgtttgaaatgctgaccggcactcttccatttcagggcaaggaccggaacgagaccatgaacatgatcttgaaagccaagctggggatgcctcagttcctctccgctgaagcccagagtctcctcagaatgttgtttaagagaaatccggcaaatagattaggatcggaaggagtcgaagaaattaaacggcatctatttttcgccaatatagactgggataagctctacaaacgggaagtccagcctccatttaaacccgccagtgggaagcctgatgacacattctgcttcgatccagaatttactgctaagacccccaaggacagccccggccttccggcgtctgctaacgctcaccagctgttcaaggggttttcttttgtagccacgtctatcgcagaggaatacaagattacccccattactagcgcgaacgtactgccaatcgtgcagatcaacgggaacgccgctcaatttggtgaagtatacgagctcaaagaggacataggggtcggttcctactccgtgtgtaagagatgtatccacgccaccacaaatatggaattcgcagtgaagataatcgacaagagcaagagagatccttcagaagaaatcgagatcctcatgaggtacggacagcaccccaacatcattactttaaaagacgtatttgacgatggccgttacgtgtatttagtaactgacctgatgaaaggtggggagctgcttgataggattcttaaacagaaatgctttagtgagcgcgaggcctcagacatcctgtatgtgatcagcaagacagttgactatttgcactgtcagggtgtggtacatagagacctcaaaccttcaaacattctttatatggacgagtctgcttcagcggactccatccgcatttgcgattttggattcgcaaagcagctgcggggggagaatggcctcctcctcacaccatgctacacagccaacttcgtggccccagaggtgctgatgcaacagggctacgacgctgcctgcgacatttggtccctgggcgtgttgttctataccatgctggctgggtacactccttttgctaatgggccgaatgatactcctgaagagatccttctcagaatcggaaacggcaagttcagcctttcaggcggcaattgggataacatctccgatggagccaaagatctgttatctcacatgctccatatggatccacaccagagatatacagcagagcagatccttaagcatagttggatcactcaccgtgatcagttacccaacgaccaacccaagcggaatgacgtcagtcatgtggtaaagggagcgatggtcgctacgtacagcgcattaacccacaagacctttcagcctgtgctggagcccgtggccgcaagctccctagctcagcggcggtcaatgaagaagcggaccagtaccggcctctag

SEQ ID NO: 324675 - DNA, 2238 bp, Artificial Sequence
  derived and/or modified sequence
atgggcctgagcaccagcgccatctggaagaacaccagggtggagatcgtgaacccctatgaggtgaagaggaaggtgaaggtgaatggcctgaagatggtggatgagcccatggaggagggggaggccgacagctgccatgatgagggcgtggtgaaggagatccccatcacccaccacgtgaaggagggctatgagaaggctgaccctgcccagtttgagctgctgaaggtgctgggccagggcagctttgggaaggtgttcctggtgaggaagaagacaggcccagatgctggccagctgtatgccatgaaggtgctgaagaaggccagcctgaaggtgcgggacagagtgaggaccaagatggagcgggacatcctggtggaggtgaaccaccccttcatcgtgaagctgcactacgccttccagacagagggcaagctgtacctgatcctggacttcctgcggggaggagatgtgttcacccggctgagcaaggaggtgctcttcacagaagaagatgtgaagttctacctggccgagctggccctggccctggaccacctgcaccagctgggcatcgtgtacagagacctgaagccagagaacatcctgctggatgaaattggccacatcaagctgacagactttggcctgagcaaggagagcgtggaccaggagaagaaggcctacagcttctgtggcaccgtggagtacatggcccctgaggtggtgaacagaagaggccacagccagagcgctgactggtggagctatggagtgctgatgtttgagatgctgaccggcaccctgcccttccagggcaaggacagaaatgagaccatgaacatgatcctgaaggccaagctgggcatgccccagttcctgtctgctgaggcccagagcctgctgaggatgctgttcaagaggaacccagccaaccggctgggcagcgagggcgtggaggagatcaagaggcacctgttctttgccaacatcgactgggacaagctgtacaagcgggaggtgcagccccccttcaagccagccagcggcaagccagatgacaccttctgctttgatcctgagttcaccgccaagacccccaaggacagccctggcctgcctgccagcgccaatgcccaccagctgttcaagggcttctcctttgtggccaccagcattgctgaggagtacaagatcacccccatcaccagcgccaacgtgctgcccatcgtgcagatcaatggaaatgctgcccagtttggagaggtgtatgagctgaaggaggacatcggcgtgggcagctacagcgtgtgcaagcgctgcatccacgccaccaccaacatggagtttgctgtgaagatcatcgacaagagcaagagggaccccagcgaggagattgagatcctgatgagatatggccagcaccccaacatcatcaccctgaaggatgtgtttgatgatggccgctacgtgtacctggtgacagacctgatgaagggcggggagctgctggaccgcatcctgaagcagaagtgcttcagcgagcgggaggccagtgacatcctgtatgtgatcagcaagacagtggactacctgcactgccagggcgtggtgcaccgggacctgaagcccagcaacatcctgtacatggatgaaagtgccagcgctgacagcatccgcatctgtgactttggatttgccaagcagctgcggggagaaaatggcctgctgctgaccccctgctacacagccaactttgtggcccctgaggtgctgatgcagcagggctatgatgctgcctgtgacatctggagcctgggcgtgctcttctacaccatgctggccggctacaccccatttgccaacggccccaatgacaccccagaggagatcctgctgagaattggaaatggcaagttcagcctgagcggcggcaactgggacaacatcagtgatggagccaaggacctgctgagccacatgctgcacatggacccccaccagcgctacacagctgagcagatcctgaagcacagctggatcacccaccgggaccagctgcccaatgaccagcccaagagaaatgatgtgagccacgtggtgaagggggccatggtggccacctacagcgccctgacccacaagaccttccagcctgtgctggagcctgtggccgccagcagcctggcccagaggaggtccatgaagaagaggaccagcacaggcctgtag

SEQ ID NO: 324676 - DNA, 2238 bp, Artificial Sequence
  derived and/or modified sequence
atgggcctgagcaccagcgccatctggaagaacacccgggtggagatcgtcaatccctacgaggtgaaacgaaaggtcaaggtaaacggcctgaaaatggtggacgagcctatggaggaaggggaggcagactcttgccacgatgagggagtcgtgaaagaaattccgattactcaccatgttaaggaaggctatgaaaaggccgatccagcacagtttgaattacttaaggtacttggacaggggtcctttggaaaggtgttccttgtgcggaagaagaccggtccagatgccgggcaactgtatgccatgaaggtcctaaaaaaagcctcattgaaggtgcgagaccgagtccgcaccaagatggagagagacatcttggtcgaggtgaaccatcccttcatagtgaagctacactacgccttccagacagaaggaaaattgtatcttattctggatttccttcgaggcggggacgtattcactaggttatcaaaagaagtgctgtttaccgaggaggatgtgaagttctatctcgcggaactcgcccttgccttagaccatctccatcagctggggatcgtgtatcgcgatctgaaaccagaaaatatccttcttgatgagatcgggcacatcaagctgacagatttcgggcttagcaaggagtccgtggatcaggagaagaaagcgtattcattctgtggaacggtagagtatatggcccccgaagtggtgaatcgaaggggacattcccagtctgctgactggtggagctacggcgtgttaatgtttgagatgttgacagggacattgccgttccagggtaaagaccgtaatgaaactatgaacatgatcctgaaggcaaaactgggaatgccccagtttctctccgcagaggcccagtctctgctcagaatgctgttcaaaaggaaccctgcgaatcgccttgggtcagagggcgtagaggaaataaaacggcatctgttcttcgccaacattgattgggacaagctctacaaacgagaggtgcagcctccattcaagcccgcaagcggtaagcccgatgacacattttgcttcgatcctgagtttacagccaagacacctaaagattcacctggtctccccgcttctgctaacgctcatcagctgtttaagggcttttcattcgtggccacttctattgctgaagagtacaagatcacgcctatcacatcagcaaatgtcctacccattgtgcagataaatgggaacgcggcacagttcggggaggtctatgaactgaaagaagatataggcgtgggaagctacagtgtgtgcaaacggtgcatacacgcgactacaaatatggagttcgctgtcaagatcattgacaagtcaaaacgggacccatcagaggagatagagattctgatgcgttatggacaacaccccaacattatcactctgaaggacgtgtttgacgatgggcggtacgtttacctggtaacggacctgatgaagggcggtgaactccttgacagaatattgaagcagaagtgttttagtgagcgggaggcctccgatatcctatacgtgataagcaagacagtcgattatctccattgtcagggggtcgtgcacagagacctgaagccctcaaatatactctacatggatgaatctgcctccgcagattccatacgcatatgtgacttcggcttcgccaaacagctgcggggtgagaacggcctgctgctgaccccttgctatacggccaatttcgtcgctccagaggtgttaatgcaacagggctacgacgcagcttgcgacatttggtctctgggagtgctcttttatactatgctggcagggtatacgccctttgcgaacggccccaatgacacacctgaggagatcctgcttcgaatcgggaacggcaagttcagtcttagtggtggcaattgggacaatatctcagacggcgcaaaagatctgctgagccacatgttgcacatggatcctcaccagcggtatactgccgaacagatattgaaacactcatggattactcacagagaccaattgccaaatgatcagcccaagcgcaacgacgtgtcacacgtcgtaaagggggccatggtggccacatattcagccctgacccataaaacgtttcagcctgtattagaacccgtcgccgcatctagccttgcccagagaagatccatgaagaaaagaaccagcacagggctgtag

SEQ ID NO: 324677 - DNA, 2238 bp, Artificial Sequence
  derived and/or modified sequence
atggggttaagcacgagcgcaatttggaaaaacacccgggtggaaattgttaacccctatgaggtgaagcgcaaggtaaaggttaacggactgaaaatggtggatgaaccgatggaggaaggagaggctgatagttgccacgacgagggagtcgtgaaggaaattccgatcacccaccacgtcaaggaggggtatgaaaaggcagacccagctcagttcgaattgcttaaggtgctggggcagggatcctttggaaaagtgttcttggtacgcaagaagaccggccctgacgctgggcagctctatgctatgaaggtcctgaaaaaagcctcattgaaagtgcgcgacagagtgcggaccaaaatggaacgagacatactggttgaagtgaatcacccctttatagttaaactccattatgcattccagactgaaggaaagctgtatttgatactcgactttcttaggggaggagatgtgttcactagactcagcaaagaggtcctgtttactgaagaggatgtaaaattctacctagcagagctggcccttgctctggaccacctgcatcagctcggtattgtgtatagggatctaaaaccggaaaacatattgcttgatgaaatagggcacatcaaattgaccgattttggcctgagtaaagaatcagttgatcaagaaaagaaggcctatagcttctgcggcacagtcgagtacatggctccagaggtagtgaaccggaggggacattctcagagcgcagattggtggtcttacggagtgctgatgtttgaaatgctaaccggaaccctgccttttcagggcaaagaccggaatgagaccatgaacatgattctaaaggctaagctgggaatgcctcagttcctttctgccgaggctcagagccttcttcgtatgctgtttaaaaggaaccctgctaacagactgggtagcgaaggcgtcgaggaaattaagagacatctgttcttcgcaaatattgactgggataaactttacaagagggaggttcaacctccctttaagcctgcatcaggcaaacctgacgataccttctgtttcgatcccgagtttacagctaaaactcccaaagattcccctggattgccagcctctgccaacgctcatcaattattcaagggtttcagctttgtcgctacctcgattgcagaggagtacaagatcactccaatcacctcagctaacgtcctgcccattgtgcagattaacggcaacgcagcccagttcggcgaagtctacgagctgaaagaggatattggcgtcgggtcctacagtgtatgtaagaggtgtatacatgccacgactaacatggagtttgccgtaaagattatcgacaaaagtaagagggaccctagtgaagaaatcgaaattctgatgcggtacgggcagcaccccaatatcattaccttgaaggacgttttcgatgatgggaggtatgtttacctcgttaccgaccttatgaaaggtggagagctcttggaccgtatccttaagcagaaatgcttcagtgagcgagaagcttccgacatattgtatgtgatcagcaaaaccgtggattacctccactgccagggtgtggtgcatagagatctgaaaccttccaatattttatatatggacgaatctgcctcagcagactccatacgaatctgcgatttcggattcgccaagcaactgcggggtgagaatggcttactgctcaccccctgttacaccgccaactttgttgcacctgaagtgttgatgcagcagggctatgacgctgcttgcgacatctggtcactgggagtgctgttctacacgatgctggctggctacactccctttgccaacgggccaaacgatacacctgaggaaattctgctgcggatcggcaatggaaagttttcattatccggcggaaattgggacaatatctctgacggcgcaaaggacctgttgtcccatatgttgcatatggacccccaccagcggtatacggccgagcaaattctgaagcacagctggatcactcaccgtgaccaattacccaatgatcagcctaaaagaaacgatgtgtctcacgttgttaagggagctatggttgcaacttactctgccctcacccacaagactttccagcccgtcctcgaacccgtagccgcatccagtttagcacagcggaggtccatgaagaagagaacctctaccggcctttag

SEQ ID NO: 324678 - DNA, 2515 bp, Artificial Sequence
  derived and/or modified sequence
cctgtttgagtgctcctgaaggggagatgctaccattcgctcctcaggacgagccctgggaccgagaaatggaagtgttcagcggcggcggcgcgagcagcggcgagaaagttggatccttttctgataacttaatcgactgcgtactactccagtagaggccaccatacacctcctaaaaatagttggtgaaattgattcacagtaggatattttgagtatgttttaggtattgtagagatttaacaatgggtctctctacctcagcaatttggaaaaatactcgagtggaaattgttaatccctatgaagtaaaacgaaaggtgaaggtaaatggtcttaaaatggttgatgagccaatggaagagggagaagcagattcttgtcatgatgaaggagttgttaaagaaatccctattactcatcatgttaaggaaggctatgagaaagcagatcctgcacagtttgagttgctcaaggttcttggtcaggggtcatttggaaaggtttttcttgttagaaagaagaccggtcctgatgctgggcagctctatgcaatgaaggtgttaaaaaaagcctctttaaaagttcgagacagagttcggacaaagatggagagggatatactggtggaagtaaatcatccatttattgtcaaattgcactatgcctttcagactgaagggaaactgtacttaatactggattttctcaggggaggagatgttttcacaagattatccaaagaggttctgtttacagaggaagatgtgaaattctacctcgcagaactggcccttgctttggatcatctgcaccaattaggaattgtttatagagacctgaagccagaaaacattttgcttgatgaaataggacatatcaaattaacagattttggactcagcaaggagtcagtagatcaagaaaagaaggcttactcattttgtggtacagtagagtatatggctcctgaagtagtaaataggagaggccattcccagagtgctgattggtggtcatatggtgttcttatgtttgaaatgcttactggtactctgccatttcaaggtaaagacagaaatgagaccatgaatatgatattaaaagcaaaacttggaatgcctcaatttcttagtgctgaagcacaaagtcttctaaggatgttattcaaaaggaatccagcaaatagattgggatcagaaggagttgaagaaatcaaaagacatctgttttttgcaaatattgactgggataaattatataaaagagaagttcaacctcctttcaaacctgcttctggaaaaccagatgatactttttgttttgatcctgaatttactgcaaaaacacctaaagattctcccggtttgccagccagtgcaaatgctcatcagctcttcaaaggattcagctttgttgcaacttctattgcagaagaatataaaatcactcctatcacaagtgcaaatgtattaccaattgttcagataaatggaaatgctgcacaatttggtgaagtatatgaattgaaggaggatattggtgttggctcctactctgtttgcaagcgatgcatacatgcaactaccaacatggaatttgcagtgaagatcattgacaaaagtaagcgagacccttcagaagagattgaaatattgatgcgctatggacaacatcccaacattattactttgaaggatgtctttgatgatggtagatatgtttaccttgttacggatttaatgaaaggaggagagttacttgaccgtattctcaaacaaaaatgtttctcggaacgggaggctagtgatatactatatgtaataagtaagacagttgactatcttcattgtcaaggagttgttcatcgtgatcttaaacctagtaatattttatacatggatgaatcagccagtgcagattcaatcaggatatgtgattttgggtttgcaaaacaacttcgaggagaaaatggacttctcttaactccatgctacactgcaaactttgttgcacctgaggttcttatgcaacagggatatgatgctgcttgtgatatctggagtttaggagtccttttttacacaatgttggctggctacactccatttgctaatggccccaatgatactcctgaagagatactgctgcgtataggcaatggaaaattctctttgagtggtggaaactgggacaatatttcagacggagcaaaggatttgctttcccatatgcttcatatggacccacatcagcggtatactgctgaacaaatattaaagcactcatggataactcacagagaccagttgccaaatgatcagccaaagagaaatgatgtgtcacatgttgttaagggagcaatggttgcaacatactctgccctgactcacaagacctttcaaccagtcctagagcctgtagctgcttcaagcttagcccagcgacggagcatgaaaaagcgaacatcaactggcctgtaagatttgtggtgttcctaggccaaactgga

SEQ ID NO: 324679 - protein, 508 aa, Artificial Sequence
  derived and/or modified sequence
MSPPGMWQPGVQQPGISQQVPSHPDMSQPGMSQQVPSQPGIRQPDTSQSCKNQTDMSQPDANQSSLSDSNQTGIIQPSPSLLGMNQMDMNQWSASLYEMNQVDMKQPSMSQAGMRQSGTNLPDINQPGMKQPGTWQLGRSQPGMWPQSLSELVLSEASISQPGPPQRAPSQSGPRQSSTSQAGTNQSGISQPVMWQLDMRQSGGSQPSMRQVGTSQSGTSQIGMSQPGTWQTGLSQPVPRQPNKSPPGMWQRGMWQPGMSQQVPSQLGMRQPGTSQSSKNQTGMSHPGRGQPGIWEPGPSQPGLSQQDLNQLVLSQPGLSQPGRSQPSVSQMGMRQTSMDYFQIRHAEAGDCPEILRLIKELAACENMLDAMELTAADLLRDGFGDNPLFYCLIAEVNDQQKPSGKLTVGFAMYYFTYDSWTGKVLYLEDFYVTQAYQGLGIGAEMLKRLSQIAITTQCNCMHFLVVIWNQASINYYTSRGALDLSSEEGWHLFRFNREELLDMAWEE

SEQ ID NO: 324680 - DNA, 1527 bp, Artificial Sequence
  derived and/or modified sequence
atgagcccccccggcatgtggcagcccggcgtgcagcagcccggcatcagccagcaggtgcccagccaccccgacatgagccagcccggcatgagccagcaggtgcccagccagcccggcatcagacagcccgacaccagccagagctgcaagaaccagaccgacatgagccagcccgacgccaaccagagcagcctgagcgacagcaaccagaccggcatcatccagcccagccccagcctgctgggcatgaaccagatggacatgaaccagtggagcgccagcctgtacgagatgaaccaggtggacatgaagcagcccagcatgagccaggccggcatgagacagagcggcaccaacctgcccgacatcaaccagcccggcatgaagcagcccggcacctggcagctgggcagaagccagcccggcatgtggccccagagcctgagcgagctggtgctgagcgaggccagcatcagccagcccggccccccccagagagcccccagccagagcggccccagacagagcagcaccagccaggccggcaccaaccagagcggcatcagccagcccgtgatgtggcagctggacatgagacagagcggcggcagccagcccagcatgagacaggtgggcaccagccagagcggcaccagccagatcggcatgagccagcccggcacctggcagaccggcctgagccagcccgtgcccagacagcccaacaagagcccccccggcatgtggcagagaggcatgtggcagcccggcatgagccagcaggtgcccagccagctgggcatgagacagcccggcaccagccagagcagcaagaaccagaccggcatgagccaccccggcagaggccagcccggcatctgggagcccggccccagccagcccggcctgagccagcaggacctgaaccagctggtgctgagccagcccggcctgagccagcccggcagaagccagcccagcgtgagccagatgggcatgagacagaccagcatggactacttccagatcagacacgccgaggccggcgactgccccgagatcctgagactgatcaaggagctggccgcctgcgagaacatgctggacgccatggagctgaccgccgccgacctgctgagagacggcttcggcgacaaccccctgttctactgcctgatcgccgaggtgaacgaccagcagaagcccagcggcaagctgaccgtgggcttcgccatgtactacttcacctacgacagctggaccggcaaggtgctgtacctggaggacttctacgtgacccaggcctaccagggcctgggcatcggcgccgagatgctgaagagactgagccagatcgccatcaccacccagtgcaactgcatgcacttcctggtggtgatctggaaccaggccagcatcaactactacaccagcagaggcgccctggacctgagcagcgaggagggctggcacctgttcagattcaacagagaggagctgctggacatggcctgggaggagtag

SEQ ID NO: 324681 - DNA, 1527 bp, Artificial Sequence
  derived and/or modified sequence
atgagcccccccgggatgtggcagccaggcgtgcagcaacccggcatttctcagcaggtaccatctcatcccgatatgtcccagcctggcatgagccagcaagtcccaagtcagcctggcataagacaaccggacacgtcccagtcctgtaagaaccagacagacatgagccagccagacgctaatcagtcatcactatctgattccaatcagactggcatcattcaaccctctccatcactgctgggaatgaaccaaatggacatgaaccaatggagcgccagcctgtatgagatgaaccaggtcgacatgaaacagcctagcatgagtcaggccggtatgagacaaagcggaacgaacctgcccgatatcaatcaacctggcatgaagcagcctggcacatggcagcttgggcggtcccagccaggaatgtggccccagagcctatccgagctagtgctcagcgaggcctccatctcccaaccaggtccgcctcagagggcccccagtcagtccggaccgagacaaagctctactagccaggccggcaccaatcagtccggtatctcccagcccgtcatgtggcagctagatatgcgtcagtcaggtggaagccagccctcaatgagacaggttgggacctcccagagcggcacttcccaaatcggtatgagccagcctgggacttggcagaccggactctcacaacctgtcccgagacagcctaataagagcccccctggcatgtggcagagagggatgtggcagcctggaatgagtcagcaggttccgagtcaattgggtatgaggcagcccggaaccagtcagagcagcaagaatcagacaggcatgagtcatccgggaaggggccagccgggtatctgggagcctggtcccagtcagcccgggctgagccaacaagacctcaatcagctggtgctgagccagcccgggctgagtcagccagggagaagtcagccatcagtgagtcagatggggatgagacagaccagcatggattactttcagatcaggcacgcagaagcaggcgattgcccggagatactgaggctaatcaaagaactggctgcttgcgagaatatgctggacgcgatggagctgacggctgccgacttactcagagacggtttcggagacaacccccttttctactgcttgatagcagaagtaaatgatcagcagaaaccctcggggaagctgaccgtgggattcgcgatgtactatttcacgtacgacagctggactgggaaagtactatatcttgaggatttctacgttacgcaggcttatcagggactcggcatcggggcagagatgcttaagcgtctgtctcagatagcaattacgacccagtgtaactgcatgcactttcttgttgtcatttggaatcaggcatctataaattattataccagccgaggggcattggacctcagtagcgaagagggatggcatctcttcagattcaatcgggaggagttacttgacatggcctgggaagagtag

SEQ ID NO: 324682 - DNA, 1527 bp, Artificial Sequence
  derived and/or modified sequence
atgagccccccaggcatgtggcagcccggggtgcagcagcccggcatcagccagcaggtgcccagccacccagacatgagccagcccggcatgagccagcaggtgcccagccagcccggcatccggcagcctgacaccagccagagctgcaagaaccagacagacatgagccagccagatgccaaccagagcagcctgagtgacagcaaccagacaggcatcatccagcccagccccagcctgctgggcatgaaccagatggacatgaaccagtggagcgccagcctgtatgagatgaaccaggtggacatgaagcagcccagcatgagccaggccggcatgaggcagagcggcaccaacctgcctgacatcaaccagcccggcatgaagcagcccggcacctggcagctgggccgcagccagcccggcatgtggccccagagcctgtctgagctggtgctgtctgaggccagcatcagccagcccggccccccccagagggcccccagccagagcggcccccggcagagcagcaccagccaggccggcaccaaccagagcggcatcagccagcctgtgatgtggcagctggacatgaggcagagcggcggcagccagcccagcatgaggcaggtgggcaccagccagagcggcaccagccagatcggcatgagccagcccggcacctggcagacaggcctgagccagcctgtgccccggcagcccaacaagagccccccaggcatgtggcagaggggcatgtggcagcccggcatgagccagcaggtgcccagccagctgggcatgaggcagcccggcaccagccagagcagcaagaaccagacaggcatgagccaccctggccggggccagcccggcatctgggagcccggccccagccagcccggcctgagccagcaggacctgaaccagctggtgctgagccagcccggcctgagccagcccggccgcagccagcccagcgtgtcccagatgggcatgaggcagacctccatggactacttccagatcagacatgctgaggccggggactgcccagagatcctgcggctcatcaaggagctggccgcctgtgagaacatgctggatgccatggagctgacagctgctgacctgctgagagatggctttggagacaaccccctcttctactgcctgattgctgaggtgaatgaccagcagaagcccagcggcaagctgactgtgggctttgccatgtactacttcacctatgacagctggacaggcaaggtgctgtacctggaggacttctacgtgacccaggcctaccagggcctgggcatcggggctgagatgctgaagaggctgagccagatcgccatcaccacccagtgcaactgcatgcacttcctggtggtgatctggaaccaggccagcatcaactactacaccagcagaggagccctggacctgagcagcgaggagggctggcacctgttccgcttcaaccgggaggagctgctggacatggcctgggaggagtag

SEQ ID NO: 324683 - DNA, 1527 bp, Artificial Sequence
  derived and/or modified sequence
atgagcccccccggcatgtggcagcccggcgtgcagcagcccggcatctctcagcaagttcctagccatcctgacatgtcccagcctggtatgagccaacaggttccatcgcaacccggaatcaggcagcccgatacttcgcagtcatgcaagaatcaaacagatatgtcacaacctgacgccaaccagtccagtctctccgactccaatcagactggaatcattcagccttctccaagccttctgggcatgaatcagatggacatgaaccagtggtctgcctccttgtatgaaatgaatcaagtggatatgaaacagccctcaatgtcccaggccggaatgaggcagtctgggacgaatcttccagacatcaatcagccaggcatgaaacagcccggcacctggcagctgggacgctctcagcctggcatgtggccgcagagcttatctgaactcgtgctgtccgaggcatctatttcgcagcccggaccaccacaacgtgccccatcccagtccggacccagacaaagttcaaccagtcaggccggtactaatcagagtggcatctctcagcctgtgatgtggcaactcgacatgaggcagtcaggaggaagtcagccgtctatgagacaggtcggaactagtcaaagcggtacttctcaaattggtatgtcccagcctgggacttggcaaaccggcctctctcagcctgtgccacgccagccaaacaagtctcccccaggaatgtggcagagaggcatgtggcaacccggcatgagccaacaggtgcccagccagctgggtatgcgacaacccggaacttctcaatcctcaaagaatcagaccggtatgagccatcccggccggggccaaccgggcatttgggagcccgggccctcccaaccaggcctttcccagcaggatctcaatcaactcgtattgtcccagccaggcctctcccagccgggacggagtcaaccatcagtctctcagatgggcatgcggcaaacaagcatggattatttccaaattaggcacgcagaagcgggagactgtccggagattctgcggctgatcaaggaacttgctgcttgcgagaacatgctggacgccatggaactgaccgccgccgatttacttagggatggtttcggtgacaaccctctattctactgcttgatcgccgaagtgaacgaccagcagaaacccagcgggaaactgaccgtgggcttcgctatgtactatttcacatacgactcctggacaggtaaagtactgtatcttgaggatttttacgtgactcaggcgtatcagggactggggattggagcggagatgctgaaacgtctctctcagatagctatcacaacccagtgtaactgcatgcactttctcgttgtcatctggaatcaggccagtatcaattattacacctctcgcggagcactcgacttgagcagcgaggaggggtggcatctgttccggttcaaccgcgaggagctgctcgatatggcctgggaggagtag

SEQ ID NO: 324684 - DNA, 1527 bp, Artificial Sequence
  derived and/or modified sequence
atgtccccacccggaatgtggcagcctggcgtgcagcagccaggaatctctcagcaagtcccttctcatcctgatatgagccaacccggtatgtcgcagcaagtgccctctcagccagggataagacagcccgacacaagccagagctgtaaaaaccagacagacatgtcccagccagacgccaatcagtcctcactgtccgactccaatcagacagggatcatccagcctagtccttcactcttgggaatgaaccaaatggacatgaaccagtggagcgcctcattgtacgaaatgaatcaagtggatatgaagcaaccatctatgtcccaagccggaatgcgccaatccggtacaaacctgcctgatataaaccagcctggaatgaagcagcccggaacttggcagcttgggcgtagccagcctgggatgtggcctcagagtttgtcagagctagtcctgtcagaggcatcaattagccagccgggaccaccccaaagagctccatcccagtcgggtccgagacagtcttcgacctcccaggccggaaccaaccaatccggcataagccaacctgttatgtggcaactagacatgcgccaatctggtgggagccagcccagcatgagacaggtcgggacctcccagagcggaactagccaaattgggatgtcccagccaggaacgtggcagactggcttgtcccagccagtacctagacaaccaaataagagcccgcctggcatgtggcagcgaggaatgtggcagcctgggatgagccaacaggtgccctctcaactcggcatgcggcagcccggaacgagtcagagcagcaagaatcagactggaatgtcccacccaggtcgcggtcaaccgggtatttgggaaccaggaccaagccagcccggtttgtctcaacaggacctgaatcagttagtcctttcccagccaggactcagtcagccaggtaggagccaaccatcagtgtcccagatgggaatgcgacaaacaagcatggactattttcaaataagacacgcagaagctggggactgtcccgagattcttaggctaataaaggaactcgctgcctgtgaaaatatgttggacgcgatggaattgaccgccgctgatctactccgcgacggcttcggagacaatcccctcttttactgtttgattgcggaagtgaatgaccagcaaaaaccaagtggaaaactcactgttggattcgcaatgtactactttacctatgattcatggaccggtaaggtgctatatctggaggatttctacgtgacgcaggcctatcagggccttggaatcggcgcagagatgctcaaacggctgtcccagattgctatcacaacccaatgtaactgcatgcatttcctggtagtgatatggaatcaggcctccattaattactacacttcccgcggagccctagatctgagctctgaggaaggctggcacctctttcggtttaatcgtgaggaacttctggatatggcttgggaggagtag

SEQ ID NO: 324685 - DNA, 2192 bp, Artificial Sequence
  derived and/or modified sequence
atgaaccaatcaggcacgaaccaatcaagtttatcagactcgaaccaagcaggcataaaccagccaagcacaaactcacttggtatgaaccaaatggacatgaaccaagggagtgcaagcctatatgaaatgaaccaagtggacatgaaacaaccaagcatgagccaagctggcatgaggcaatcaggtacaaacctaccagacataaaccaacccgacatgaaacaaccagacacatggcaattaggtaggagccaaccaggcatgctgcaacaagaactgagccaactagtcctgagcaaagcaggcataagccaaccagacccatcgcaaccaggcccaagccaatcaggccccagccaatcacgcatgaggcaaataggcacgaaccaatcaggtatgagccaaccagtgatgcagcaactagacagccagtcaggtgggagccaaccaagcatgagacaagtaggcaccagccaattaggcacaagccaaataggcatgagccaaccaggcacatggcaaacaggactgagccaaccagtcctgaggcaaccaaacatgagtccaccaggcatgtggcaaccaggcgtgcaacaaccaggcatcagccagcaagtcccaagccacccagacatgagtcaaccaggcatgagccagcaagtccccagccaaccaggcataaggcaaccagacactagccaatcatgtaagaaccaaacagacatgagccaaccagacgcaaaccaatcaagtttatcagattccaaccaaacaggtataatccagccaagcccaagcttacttggtatgaaccaaatggacatgaaccaatggagtgcaagcctatatgaaatgaaccaagtggacatgaaacaaccaagcatgagccaagctggcatgaggcaatcaggtacaaacctaccagacataaaccaacctggcatgaaacaaccaggcacatggcaattaggtaggagccaaccaggcatgtggccacaaagcctgagcgaactagtcctgagtgaagcaagcataagccaaccaggtccaccgcaacgagccccaagccaatcaggccccagacaatcaagcacgagccaagcaggcacaaaccaatcaggtataagccaaccagtgatgtggcaactagacatgagacagtcaggtgggagccaaccaagcatgagacaagtaggcaccagccaatcaggcacaagccaaataggcatgagccaaccaggcacatggcaaacaggcctgagccaaccagtcccgaggcaaccaaacaagagtccaccaggcatgtggcaacgaggcatgtggcaaccaggcatgagccagcaagtccccagccaactaggcatgagacaaccaggcactagccaatcaagtaagaaccaaacaggcatgagccatccaggcaggggccaaccaggcatatgggaaccggggccgagtcagccaggcctgagccaacaagacctgaaccaattagtgctgagccaaccaggcctgagtcaaccaggcaggagccaaccaagtgtgagccaaatgggcatgaggcaaacaagcatggattactttcaaataagacatgcagaggctggagactgcccagaaattttgcgactgattaaagaattggctgcctgtgaaaacatgctagatgcaatggagttaacagcagctgatttactcagagatggctttggggacaatccccttttctactgcctgattgcagaagtaaacgatcaacaaaaaccatcaggcaaactgactgttggatttgccatgtactactttacatacgactcatggactggcaaggtactttacctagaggacttttatgtcacacaagcttaccaaggcctaggtattggagctgaaatgctgaagaggctaagtcagatagccatcacaactcaatgtaactgcatgcactttcttgtcgtcatttggaaccaggcttctatcaactactatactagtcgaggggctttagacctttcctctgaggagggctggcatctcttcaggtttaacagagaagaactcctggacatggcatgggaagaatgaaagaggctttgtaacaactcatcccaacacagcctccaacatttgactgtcacctgagtctaacagcagtttgactttgttgtacaatacagcaagtgatcatc

SEQ ID NO: 324686 - DNA, 1675 bp, Artificial Sequence
  derived and/or modified sequence
tgcctgtatgtctgaggctgggtttgaagcctccagcgtgtttggagttaatccccattaggttggactccgcccctttctcccaaaggtaaagcaaggttttcaggcatcactgcaaagggcagctagtattcccatccttgtctaacaagctgtaaggagaagttgtttctgagatctgagcctgaagagagggaacaagtcagtcagccttcgtggtcagaagagaaacctgtgaccatgaggagcagcctgaccatggtgggaaccctctgggccttcctgtcccttgttactgctgtgaccagttctaccagttacttcctaccttactggctctttggatcccagatggggaagccagtgtcattcagcacattccggaggtgcaactaccctgtgcggggagagggacacagtctgatcatggtggaagaatgtgggcgctatgccagcttcaatgccatcccaagcctggcctggcagatgtgcacagtggtgacaggtgccggctgtgctctgctgctcctggtggcactagctgctgtcctgggttgctgcatggaggagctcatctccagaatgatgggacgttgcatgggagcagcgcagtttgttggagggctgctgataagctcaggctgtgccttataccctttaggatggaatagcccggagataatgcaaacatgtgggaatgtctccaatcaatttcagttaggtacctgtcggcttggctgggcctattactgtgctggaggtggagcagctgcagccatgttgatctgcacctggctctcttgctttgctggaagaaaccccaagcctgtcatattggtggagagcatcatgaggaataccaattcttatgctatggagcttgaccattgcctcaaaccttgagctttgaaagaagattggagagggtgggaaaggggaggagggagccctgaaaagaggtactaaggattaggccatttgtcatctgactgtcattagcatagcctagtgtttgcatgctttttaaactaattgtcgttcattttcacttatctttaagccagtaggtcactggctgtttataaaattcatcagaggaaacattctcagacatttacccaactggcaagtcgtgctaacccgaagacccaaagtacccctttatgcaaaataggatccaaagctaaggctgggtaagaatagttgtgcagggagggagcacgagatgggcagagctggttcctaccactccattcacacagttcatcagttcattcccaagtatttattgtcacccccaaacatctctggagtactactgctcaatttttgtgtcgttatcaggagtataccttggctcttcctttttttctcctgcttccccccgcaccttgtggggaagcttcaggggagcgggggagggtgattcccagtggtggggaaaacattaatcaaggatacttgcatttagcctggagccccttcctcattatgctttagaatattcataggagttccatttgtattctggctgggtgatgagcaaaaaaaatatatagtagcaaatattctctcatcctttagagataaagaaatggtgttcatcaaatgtactgagaatagactagcatttgtggggcactcaataaatttaaattcatggtgacagtgacaa

SEQ ID NO: 324687 - protein, 220 aa, Artificial Sequence
  derived and/or modified sequence
MRSSLTMVGTLWAFLSLVTAVTSSTSYFLPYWLFGSQMGKPVSFSTFRRCNYPVRGEGHSLIMVEECGRYASFNAIPSLAWQMCTVVTGAGCALLLLVALAAVLGCCMEELISRMMGRCMGAAQFVGGLLISSGCALYPLGWNSPEIMQTCGNVSNQFQLGTCRLGWAYYCAGGGAAAAMLICTWLSCFAGRNPKPVILVESIMRNTNSYAMELDHCLKP

SEQ ID NO: 324688 - DNA, 663 bp, Artificial Sequence
  derived and/or modified sequence
atgaggtcgagcctcactatggtgggcaccctctgggccttcttaagcctggttactgccgttacatcatctacaagttatttcctgccgtattggttgtttggcagccaaatggggaaacccgtttcattctctacctttagacggtgcaactacccagttcgtggggaaggtcacagtctgattatggtcgaggaatgcgggcgctacgcatccttcaatgccatcccctccttagcctggcaaatgtgtactgtagttacgggggccggttgcgccctactcctacttgttgctctcgccgcagtattggggtgttgtatggaggagcttatttcccggatgatgggtagatgtatgggcgctgcccagtttgtcggtggtctgctcatctctagtgggtgtgctctgtatcctctaggctggaactcacctgagattatgcaaacctgtgggaacgtgagtaaccagttccagttgggtacttgtcggctaggctgggcttattactgtgccgggggcggcgccgccgcagctatgctgatttgcacctggttaagctgtttcgcgggtaggaacccaaagcctgtaatcttggtggaaagtataatgcgcaacaccaactcatacgcaatggaattggatcattgcctgaaaccctag

SEQ ID NO: 324689 - DNA, 663 bp, Artificial Sequence
  derived and/or modified sequence
atgaggagcagcctgaccatggtgggcaccctgtgggccttcctgagcctggtgacagctgtgaccagcagcaccagctacttcctgccctactggctgtttggcagccagatgggcaagcctgtgtccttcagcaccttccgccgctgcaactaccctgtgcggggggagggccacagcctcatcatggtggaggagtgtggccgctatgccagcttcaatgccatccccagcctggcctggcagatgtgcaccgtggtgactggagctggctgtgccctgctgctgctggtggccctggccgctgtgctgggctgctgcatggaggagctgatcagcaggatgatgggccgctgcatgggcgccgcccagtttgtgggcggcctgctgatcagcagcggctgtgccctgtaccccctgggctggaacagccctgagatcatgcagacctgtggaaatgtgagcaaccagttccagctgggcacctgccgcctgggctgggcctactactgtgccggcggcggcgctgctgctgccatgctgatctgcacctggctgagctgctttgctggcaggaaccccaagcctgtgatcctggtggagagcatcatgaggaacaccaacagctatgccatggagctggaccactgcctgaagccctag

SEQ ID NO: 324690 - DNA, 663 bp, Artificial Sequence
  derived and/or modified sequence
atgcggagcagcctgaccatggtgggcaccctgtgggccttcctgagcctagtgacggctgtcacatcatctactagttactttctgccttattggttattcggctcccaaatgggaaaacccgtgagtttttctacatttagacgctgcaactaccctgttcgaggggagggtcactccttgatcatggtcgaagagtgcggccggtacgcctcctttaacgccatcccaagtcttgcctggcagatgtgcaccgtggttaccggcgctggttgtgctttgcttctgcttgtggccctggccgctgtgcttgggtgttgtatggaagaactgatctcccgcatgatgggcagatgcatgggggctgcccaattcgtgggtggtctgctgattagttccggatgcgcactctaccctttggggtggaatagcccagagattatgcagacatgcggtaacgtctccaatcagttccagctgggaacctgcagattaggatgggcctactattgcgctggcggaggggctgcggcagccatgttaatatgtacttggttgagctgtttcgcaggcaggaatcctaagcccgttatactggtggagtcaattatgcgcaatactaactcatacgccatggagctggaccactgtcttaaaccgtag

SEQ ID NO: 324691 - DNA, 663 bp, Artificial Sequence
  derived and/or modified sequence
atgaggtcatctttaacaatggttggcactctatgggcgtttctgagcctggtaaccgcggtcacctcatccacctcctatttcctcccttactggctgtttggctcacagatgggaaagccggtctccttctcgacctttcgcagatgcaattatcccgtgagaggcgaaggccatagcttgatcatggtggaagagtgtggtaggtacgcgtcctttaacgctatccccagcctcgcctggcaaatgtgtactgtggtcaccggtgccggatgcgccctgctgctgctggtggcccttgcagcggtcctcgggtgttgcatggaggagctgatcagccgaatgatgggtcgatgcatgggagccgctcaatttgtcgggggtctgttgattagttccggctgtgctctgtaccctctgggttggaattctccggaaatcatgcaaacatgcggaaatgtgtcaaaccagtttcagctgggaacgtgccgcctgggatgggcctactactgtgcagggggaggcgcagctgccgctatgctgatttgtacatggctgtcttgtttcgccggtaggaatccaaaacctgtgattttagtggaatcaattatgcgcaatacaaacagctacgccatggaattggatcattgtttaaaaccttag

SEQ ID NO: 324692 - DNA, 663 bp, Artificial Sequence
  derived and/or modified sequence
atgagaagcagcctgaccatggtgggcaccctgtgggccttcctgagcctggtgaccgccgtgaccagcagcaccagctacttcctgccctactggctgttcggcagccagatgggcaagcccgtgagcttcagcaccttcagaagatgcaactaccccgtgagaggcgagggccacagcctgatcatggtggaggagtgcggcagatacgccagcttcaacgccatccccagcctggcctggcagatgtgcaccgtggtgaccggcgccggctgcgccctgctgctgctggtggccctggccgccgtgctgggctgctgcatggaggagctgatcagcagaatgatgggcagatgcatgggcgccgcccagttcgtgggcggcctgctgatcagcagcggctgcgccctgtaccccctgggctggaacagccccgagatcatgcagacctgcggcaacgtgagcaaccagttccagctgggcacctgcagactgggctgggcctactactgcgccggcggcggcgccgccgccgccatgctgatctgcacctggctgagctgcttcgccggcagaaaccccaagcccgtgatcctggtggagagcatcatgagaaacaccaacagctacgccatggagctggaccactgcctgaagccctag

SEQ ID NO: 324693 - protein, 187 aa, Artificial Sequence
  derived and/or modified sequence
MRSSLTMVGTLWAFLSLVTAVTSSTSYFLPYWLFGSQMGKPVSFSTFRRCNYPVRGEGHSLIMVEECGRYASFNAIPSLAWQMCTVVTGAGCALLLLVALAAVLGCCMEELISRMMGRCMGAAQFVGGTCRLGWAYYCAGGGAAAAMLICTWLSCFAGRNPKPVILVESIMRNTNSYAMELDHCLKP

SEQ ID NO: 324694 - DNA, 564 bp, Artificial Sequence
  derived and/or modified sequence
atgcggtcctctttaaccatggtcgggacactgtgggctttcctgagtttggttacagcggttaccagcagtacatcctacttcttgccctattggctctttgggtcccagatgggcaaacccgtgtcattcagcacctttagacggtgtaactatccagtgcggggggaggggcactccctgatcatggttgaagaatgcggcagatacgcaagcttcaacgctattccttccctagcctggcagatgtgtaccgtcgtcacaggcgctgggtgcgctttgctgcttctcgttgctcttgctgctgtccttggatgctgtatggaggaacttatcagtagaatgatgggcaggtgcatgggagctgctcaattcgtgggcggaacctgtcgattgggatgggcgtattattgcgcaggaggaggcgccgccgctgccatgctcatatgcacgtggttgtcttgcttcgccggtcgaaatccaaaacctgtgattctagtcgagagcattatgcggaatacaaatagttacgccatggagctggaccactgtcttaaaccttag

SEQ ID NO: 324695 - DNA, 564 bp, Artificial Sequence
  derived and/or modified sequence
atgaggagcagcctgaccatggtgggcaccctgtgggccttcctgagcctggtgacagctgtgaccagcagcaccagctacttcctgccctactggctgtttggcagccagatgggcaagcctgtgtccttcagcaccttccgccgctgcaactaccctgtgcggggggagggccacagcctcatcatggtggaggagtgtggccgctatgccagcttcaatgccatccccagcctggcctggcagatgtgcaccgtggtgactggagctggctgtgccctgctgctgctggtggccctggccgctgtgctgggctgctgcatggaggagctgatcagcaggatgatgggccgctgcatgggcgccgcccagtttgtgggcggcacctgccgcctgggctgggcctactactgtgccggcggcggcgctgctgctgccatgctgatctgcacctggctgagctgctttgctggaagaaaccccaagcctgtgatcctggtggagagcatcatgaggaacaccaacagctatgccatggagctggaccactgcctgaagccctag

SEQ ID NO: 324696 - DNA, 1666 bp, Artificial Sequence
  derived and/or modified sequence
cacacacacacacacacacacagagctgctttgtccgctgtgaggttggaggtttggggactctgtgcccactaagctactttctatttcaagtgcctgtatgtctgaggctgggtttgaagcctccagcgtgtttggagttaatccccattaggttggactccgcccctttctcccaaaggtaaagcaaggttttcaggcatcactgcaaagggcagctagtattcccatccttgtctaacaagctgtaaggagaagttgtttctgagatctgagcctgaagagagggaacaagtcagtcagccttcgtggtcagaagagaaacctgtgaccatgaggagcagcctgaccatggtgggaaccctctgggccttcctgtcccttgttactgctgtgaccagttctaccagttacttcctaccttactggctctttggatcccagatggggaagccagtgtcattcagcacattccggaggtgcaactaccctgtgcggggagagggacacagtctgatcatggtggaagaatgtgggcgctatgccagcttcaatgccatcccaagcctggcctggcagatgtgcacagtggtgacaggtgccggctgtgctctgctgctcctggtggcactagctgctgtcctgggttgctgcatggaggagctcatctccagaatgatgggacgttgcatgggagcagcgcagtttgttggaggtacctgtcggcttggctgggcctattactgtgctggaggtggagcagctgcagccatgttgatctgcacctggctctcttgctttgctggaagaaaccccaagcctgtcatattggtggagagcatcatgaggaataccaattcttatgctatggagcttgaccattgcctcaaaccttgagctttgaaagaagattggagagggtgggaaaggggaggagggagccctgaaaagaggtactaaggattaggccatttgtcatctgactgtcattagcatagcctagtgtttgcatgctttttaaactaattgtcgttcattttcacttatctttaagccagtaggtcactggctgtttataaaattcatcagaggaaacattctcagacatttacccaactggcaagtcgtgctaacccgaagacccaaagtacccctttatgcaaaataggatccaaagctaaggctgggtaagaatagttgtgcagggagggagcacgagatgggcagagctggttcctaccactccattcacacagttcatcagttcattcccaagtatttattgtcacccccaaacatctctggagtactactgctcaatttttgtgtcgttatcaggagtataccttggctcttcctttttttctcctgcttccccccgcaccttgtggggaagcttcaggggagcgggggagggtgattcccagtggtggggaaaacattaatcaaggatacttgcatttagcctggagccccttcctcattatgctttagaatattcataggagttccatttgtattctggctgggtgatgagcaaaaaaaatatatagtagcaaatattctctcatcctttagagataaagaaatggtgttcatcaaatgtactgagaatagactagcatttgtggggcactcaataaatttaaattcatggtgacagtga

SEQ ID NO: 324697 - DNA, 564 bp, Artificial Sequence
  derived and/or modified sequence
atgcggagcagcctgaccatggtgggcaccctgtgggccttcctgagcctggtgaccgcagtgaccagttctacatcctattttctgccctactggttattcggttcacagatgggcaaacccgtgtcattcagtacctttcgtaggtgtaattatcctgtgaggggcgaagggcatagtctgatcatggtggaggaatgtggccgatacgcctcctttaacgctatccccagcctggcgtggcagatgtgcacagtcgtgaccggggctgggtgcgctctactgcttcttgtagccctggctgcagtcttggggtgttgcatggaggagctaatatcccgcatgatggggcggtgtatgggggccgcacagtttgttggaggcacctgcaggttgggatgggcttactactgtgccggcggcggcgccgctgccgctatgcttatttgcacatggctttcttgctttgcaggcaggaatccgaagcccgtcattctcgtggagtccataatgagaaacactaactcttatgccatggagctcgaccattgcctgaaaccttag

SEQ ID NO: 324698 - DNA, 564 bp, Artificial Sequence
  derived and/or modified sequence
atgcgctcctccctaacaatggtcgggactctctgggccttcctgagtttggtcactgctgttacgagtagtacctcctattttctgccatactggttatttgggagtcagatgggaaagcccgtgagtttctctacatttcggaggtgcaactaccctgtgaggggcgaggggcactcgctgataatggtggaggagtgcggcagatatgcatcttttaacgcaatccccagcttagcatggcagatgtgcaccgtggttacaggtgctggatgtgccttgctcctgcttgtggctttagcagctgttttaggatgctgcatggaggagctcatcagtaggatgatggggagatgtatgggagctgcgcagttcgtgggtggaacctgccggctcgggtgggcctactattgcgctggtggaggcgcagctgcggctatgttgatctgtacttggctgagctgctttgccggacgcaaccctaaacccgtcattctcgtggagtccatcatgagaaacaccaacagttacgccatggaactcgatcactgcttgaaaccctag

SEQ ID NO: 324699 - DNA, 564 bp, Artificial Sequence
  derived and/or modified sequence
atgagaagcagcctgaccatggtgggcaccctgtgggccttcctgagcctggtgaccgccgtgaccagcagcaccagctacttcctgccctactggctgttcggcagccagatgggcaagcccgtgagcttcagcaccttcagaagatgcaactaccccgtgagaggcgagggccacagcctgatcatggtggaggagtgcggcagatacgccagcttcaacgccatccccagcctggcctggcagatgtgcaccgtggtgaccggcgccggctgcgccctgctgctgctggtggccctggccgccgtgctgggctgctgcatggaggagctgatcagcagaatgatgggcagatgcatgggcgccgcccagttcgtgggcggcacctgcagactgggctgggcctactactgcgccggcggcggcgccgccgccgccatgctgatctgcacctggctgagctgcttcgccggcagaaaccccaagcccgtgatcctggtggagagcatcatgagaaacaccaacagctacgccatggagctggaccactgcctgaagccctag

SEQ ID NO: 324700 - protein, 290 aa, Artificial Sequence
  derived and/or modified sequence
MFRLLSSCCSCLRTTEETRRNVTIPIIGLNNSGKTVLVEAFQKLLPSKTDHCMKSELTTLLLDEYELSIYDLNGDLKGREAWPNYYAQAHGLVFVLDSSDIRRMQEVKIILTHLLSDKRVAGKPILILANKQDKKKALMPCDIIDYLLLKKLVKENKCPCRVEPCSAIRNLERRNHQPIVEGLRWLLAVIDTCQLPPTSSISISKNNTGSGERCSSHSFSTRTGMSKEKRQHLEQCSIEAKPLKSILQKEGTRLWSKKNMSVTFALDEPMKEGECSRRMRAQNTTKLCYN

SEQ ID NO: 324701 - DNA, 873 bp, Artificial Sequence
  derived and/or modified sequence
atgttcagactgctgagcagctgctgcagctgcctgagaaccaccgaggagaccagaagaaacgtgaccatccccatcatcggcctgaacaacagcggcaagaccgtgctggtggaggccttccagaagctgctgcccagcaagaccgaccactgcatgaagagcgagctgaccaccctgctgctggacgagtacgagctgagcatctacgacctgaacggcgacctgaagggcagagaggcctggcccaactactacgcccaggcccacggcctggtgttcgtgctggacagcagcgacatcagaagaatgcaggaggtgaagatcatcctgacccacctgctgagcgacaagagagtggccggcaagcccatcctgatcctggccaacaagcaggacaagaagaaggccctgatgccctgcgacatcatcgactacctgctgctgaagaagctggtgaaggagaacaagtgcccctgcagagtggagccctgcagcgccatcagaaacctggagagaagaaaccaccagcccatcgtggagggcctgagatggctgctggccgtgatcgacacctgccagctgccccccaccagcagcatcagcatcagcaagaacaacaccggcagcggcgagagatgcagcagccacagcttcagcaccagaaccggcatgagcaaggagaagagacagcacctggagcagtgcagcatcgaggccaagcccctgaagagcatcctgcagaaggagggcaccagactgtggagcaagaagaacatgagcgtgaccttcgccctggacgagcccatgaaggagggcgagtgcagcagaagaatgagagcccagaacaccaccaagctgtgctacaactag

SEQ ID NO: 324702 - DNA, 1535 bp, Artificial Sequence
  derived and/or modified sequence
gacaagaaggctagaaagctcaatgcgtcttcctattactctgcatatcttatgtcttccatccaaaaagaatcaacttatcagataaataaccacctcatgaactaagatgaatcatgttccggcttttgtcctcctgctgctcttgcctaaggacaacagaagagacacgaaggaatgtgaccatccctatcattggcttgaacaactctggcaaaactgttcttgtggaggcattccaaaaattacttcccagtaagacagaccattgcatgaaatcggaactgactacacttttgttagatgagtatgaactttccatctatgacctgaatggagacctgaagggccgggaagcatggccaaactactatgcacaggcccatgggcttgttttcgtcctggattccagtgacataagacgcatgcaggaagtgaagatcatcttaacacatctgctgtccgataaaagagtggcagggaaacccatcttaattttagcaaacaaacaagacaagaagaaagccctcatgccttgtgatattattgactatctacttctaaagaagctagtgaaagagaataagtgcccatgccgagtagagccatgttcagccatcagaaaccttgaaagaagaaaccatcagcccatagttgaaggactgcgctggctattagctgtcattgatacttgccaactaccacctacctcgagcatctcaatctccaagaataacacaggctctggagaaagatgctcatcacacagcttctccaccagaacaggaatgtcaaaggagaaaagacagcatctagaacaatgctcaatcgaagctaagcctctaaagtcaatcctacagaaagaaggtacgagattatggtctaaaaagaatatgtcagtaacatttgctttagatgaacccatgaaagaaggtgaatgttctaggagaatgagagctcagaatactacgaagctttgctacaattgaaggagtggcttatagactccagctccatatgctgatgacaatatttttgaagagaaagtaaaagaaagtaacagagaaagtaaagagaaaaacagagggaaaccaaaagaaacagttgatatccctcccttagcaaacaggttcatctccagaactatcaggactacccggtttttaaatttccatttgataatatttctacactccccatacaactccacctactctaatatcacatccctgagaacccctgttgttcctgtatatctatattctagccatcaaatcaatcctatactcactgagaggctcaagaagagtgagatggcatccattgagaatgaagaccaccttggtaaaaaagaacagagactttacatctttgtaccgagatgctgctgacaaagcttgtggacaataagtcatgggtgatcaaccaaaactgagccttagaaatacagggttcatttagaaataagtatttttttctttaaggttcttaggcagaaaaggattggcaaaaataaatagaacttctttgctgag

SEQ ID NO: 324703 - DNA, 873 bp, Artificial Sequence
  derived and/or modified sequence
atgttcaggctcctctctagttgctgcagttgtctgagaactactgaggagacccgcagaaatgtgaccattccgatcattggcttgaacaattctggtaaaaccgttctggtcgaagctttccagaaactcttgccaagcaagaccgatcattgtatgaagtctgagcttaccacattgctactcgacgagtacgagctctctatctacgacctgaacggagatttgaagggaagggaagcttggccgaactactacgcccaagcacatggtctggtgtttgtgctggactcttcagacatcagacgcatgcaggaggtcaagattatcttgacccatcttctttccgataaacgggtcgctggcaagccgatcctaatcctggctaataagcaagacaaaaagaaagcgctgatgccctgtgatataatcgattacctgttgctgaagaagctggtgaaagagaacaaatgtccttgtagagtagagccctgcagtgccatacggaatctggaaaggagaaatcaccagcccatcgtcgaaggccttcggtggcttttggcagtgattgatacatgtcagctgcctccaacctcctccatctccatcagtaagaataacacaggtagcggagaacgctgcagcagtcacagctttagcacacgaacaggaatgtcgaaagagaaaagacagcacttagaacaatgcagtatcgaagccaaacctctaaaatcaatcctgcagaaggagggaactagactatggagtaagaaaaacatgtcggtcacattcgctttggatgagccgatgaaagagggggagtgtagccggagaatgcgtgctcagaataccaccaagctgtgctacaactag

SEQ ID NO: 324704 - DNA, 873 bp, Artificial Sequence
  derived and/or modified sequence
atgttccggctgctgagcagctgctgcagctgcctgcggaccacagaggagaccaggagaaatgtgaccatccccatcatcggcctgaacaacagcggcaagacagtgctggtggaggccttccagaagctgctgcccagcaagacagaccactgcatgaagtctgagctgaccaccctgctgctggatgaatatgagctgagcatctatgacctgaatggagacctgaagggccgggaggcctggcccaactactatgcccaggcccacggcctggtgtttgtgctggacagcagtgacatccggaggatgcaggaggtgaagatcatcctgacccacctgctgagtgacaagagggtggccggcaagcccatcctgatcctggccaacaagcaggacaagaagaaggccctgatgccctgtgacatcatcgactacctgctgctgaagaagctggtgaaggaaaataaatgtccctgccgggtggagccctgcagcgccatccggaacctggagaggaggaaccaccagcccatcgtggagggcctgcgctggctgctggccgtcatcgacacctgccagctgccccccaccagcagcatcagcatcagcaagaacaacacaggcagcggggagcgctgcagcagccacagcttcagcaccaggacaggcatgagcaaggagaagaggcagcacctggagcagtgcagcattgaggccaagcccctgaagagcatcctgcagaaggagggcacccggctgtggagcaagaagaacatgtctgtgacctttgccctggatgagcccatgaaggagggggagtgcagcaggaggatgagggcccagaacaccaccaagctgtgctacaactag

SEQ ID NO: 324705 - DNA, 873 bp, Artificial Sequence
  derived and/or modified sequence
atgttccggctgctgagcagctgctgcagctgcctgcggaccaccgaagaaacccgcagaaatgtcacgatacctataatcgggctgaacaacagcgggaagaccgtgctcgtggaggctttccagaaattattgcccagcaaaactgaccactgcatgaagtccgaacttacaaccctcctgctggacgagtacgagctttccatctatgatctgaacggagatcttaagggaagagaggcctggccaaactattacgcacaagcccacggattggtttttgtgctggactcttcagacatccgaagaatgcaggaggtgaagattattctgacccatctgctctctgacaagcgggtggccggaaagcccatcttaatcctcgctaataagcaggacaagaaaaaggcccttatgccctgtgacatcattgactacctactcttgaaaaaactggtcaaggagaataaatgcccatgccgcgtcgaaccatgcagtgctatcaggaatctggaaagaagaaaccatcagccaatcgttgaaggtctgcgctggctcctggcggtcattgacacctgccagcttccacctacaagttcgataagcatctccaaaaataacaccggctccggagagcggtgtagtagtcattctttttccacaaggactgggatgagcaaggaaaagagacagcacctggaacaatgttcaatcgaggcaaaaccgctgaaaagcatcctgcagaaggaggggacgaggttatggtccaagaaaaacatgtccgtcacctttgcattagatgagcctatgaaagagggagaatgctcaaggcgtatgagggcgcagaataccaccaagctgtgctataactag

SEQ ID NO: 324706 - DNA, 873 bp, Artificial Sequence
  derived and/or modified sequence
atgttccggctcctgtcgtcatgctgttcgtgtctgagaactacagaagagacacgacgtaatgtgacgatccctattatcggactgaataattccggtaagaccgtgttggtggaggcgtttcagaagctcctgccaagcaagacggatcattgcatgaagagcgagctgacgactctcttgctcgacgagtacgagctcagcatctacgatttgaacggagatcttaagggaagggaggcttggccaaattattacgcacaggctcacggtcttgtctttgtacttgattctagtgacattcgcagaatgcaggaagtcaagatcatcctgacccacctcctttcagataaacgggtcgccggaaaacccatcctcatcttggcgaataaacaggacaagaagaaggcgttaatgccatgcgatatcatcgactatctcctgctcaagaaactggtcaaggaaaacaaatgcccctgtagggtggaaccctgttcggccatccgaaacctggagcggaggaaccaccagcccattgtggaggggctgaggtggctgctcgcagtgattgacacatgtcagcttcctcccacatcctctatatccatcagtaagaataatacaggctctggtgagaggtgcagcagccactcattcagcacccgtaccggtatgtctaaggaaaagcgccagcatctggaacaatgcagtatcgaggctaagcctcttaagagcatcctacagaaggagggaacaaggctctggagtaaaaagaatatgtccgttacattcgccctagacgaacccatgaaggagggggaatgttcaaggcggatgagggcccagaacactaccaaactgtgctacaactag

SEQ ID NO: 324707 - protein, 802 aa, Artificial Sequence
  derived and/or modified sequence
MGHPPLEFSDCYLDSPDFRERLKCYEQELERTNKFIKDVIKDGNALISAMRNYSSAVQKFSQTLQSFQFDFIGDTLTDDEINIAESFKEFAELLNEVENERMMMVHNASDLLIKPLENFRKEQIGFTKERKKKFEKDGERFYSLLDRHLHLSSKKKESQLQEADLQVDKERHNFFESSLDYVYQIQEVQESKKFNIVEPVLAFLHSLFISNSLTVELTQDFLPYKQQLQLSLQNTRNHFSSTREEMEELKKRMKEAPQTCKLPGQPTIEGYLYTQEKWALGISWVKYYCQYEKETKTLTMTPMEQKPGAKQGPLDLTLKYCVRRKTESIDKRFCFDIETNERPGTITLQALSEANRRLWMEAMDGKEPIYHSPITKQQEMELNEVGFKFVRKCINIIETKGIKTEGLYRTVGSNIQVQKLLNAFFDPKCPGDVDFHNSDWDIKTITSSLKFYLRNLSEPVMTYRLHKELVSAAKSDNLDYRLGAIHSLVYKLPEKNREMLELLIRHLVNVCEHSKENLMTPSNMGVIFGPTLMRAQEDTVAAMMNIKFQNIVVEILIEHFGKIYLGPPEESAAPPVPPPRVTARRHKPITISKRLLRERTVFYTSSLDESEDEIQHQTPNGTITSSIEPPKPPQHPKLPIQRSGETDPGRKSPSRPILDGKLEPCPEVDVGKLVSRLQDGGTKITPKATNGPMPGSGPTKTPSFHIKRPAPRPLAHHKEGDADSFSKVRPPGEKPTIIRPPVRPPDPPCRAATPQKPEPKPDIVAGNAGEITSSVVASRTRFFETASRKTGSSQGRLPGDES

SEQ ID NO: 324708 - protein, 74 aa, Artificial Sequence
  derived and/or modified sequence
MLELLIRHLVNVCEHSKENLMTPSNMGVIFGPTLMRAQEDTVAAMMNIKFQNIVVEILIEHFGKISSFFLHRSI

SEQ ID NO: 324709 - DNA, 2409 bp, Artificial Sequence
  derived and/or modified sequence
atggggcacccgccgctcgagttcagcgactgctacctggattctcccgatttcagggagagactgaagtgctatgagcaggagctggagaggaccaacaaatttatcaaagatgtgatcaaagatggtaacgccttaatcagtgctatgagaaactactccagtgcagtgcagaagttttcgcagacattacagagcttccagtttgactttattggggatactttgaccgacgacgagattaatatcgcagagagctttaaagagtttgccgagctactgaatgaggtggaaaacgagaggatgatgatggtccacaacgcctccgatcttctgataaagcctctcgagaacttccgcaaagagcaaatcggttttacgaaagagcgaaagaagaagttcgagaaggacggcgaaagattttactccttattagacaggcacctgcatctctcctccaaaaagaaagagagccagttgcaggaagcagacctgcaggtggataaagagcgtcataattttttcgagtcctccctggattatgtgtaccaaattcaggaggtccaggaatccaaaaaattcaatattgtggaacccgtgctggcttttctacattcactcttcatttctaactctctgaccgtggagctgacacaggacttcctaccgtataaacaacagttgcaactgtccctccaaaatacaagaaatcacttctcttccaccagggaagagatggaggagctgaagaaacgaatgaaagaagcacctcaaacctgcaagctgcccggacagcctaccatcgagggttacctatacacccaggagaagtgggccttgggaatatcttgggtgaagtattattgccagtatgagaaggaaaccaagacactgacaatgacgccaatggagcagaagcctggcgctaaacaggggccccttgatctgacgctgaagtactgcgtacgcagaaagacagaatcaatcgataaacgattctgctttgatattgaaacgaatgagcggcctggcacaataacgctccaggcactgagcgaggctaaccgcaggttatggatggaagcgatggacggcaaggaaccaatttatcacagtccaatcaccaaacagcaggagatggaactgaacgaagtcggcttcaaattcgttagaaagtgcatcaatatcatcgagacaaaaggcatcaagaccgagggtctataccgcacggtcggaagtaacatacaggtgcagaagctgctgaatgcctttttcgaccccaagtgtcccggcgatgtggatttccataatagcgattgggatatcaagaccatcactagctctttgaagttttacctccgtaacttaagcgaaccagttatgacatatcggctgcataaagagcttgtaagcgcggctaagagcgataacctggattatcggctaggtgctattcactctctggtctataaactgccagagaaaaatcgggaaatgttggaattattgattaggcacttagttaatgtttgtgagcattccaaggaaaatctgatgacacctagtaatatgggcgtcatattcgggccgaccctgatgagggcgcaagaagatacagttgcagcaatgatgaacattaagttccagaatattgttgtggaaatactaatcgaacatttcggcaaaatttacttgggaccgcccgaggagtccgccgcaccacctgtaccacctcccagggttaccgcacgacgccataagccaattacaatatcaaagcggttgttgagagaaaggaccgtgttttatacgtcttctctggacgagtcagaggacgaaatccaacaccagactccgaacgggacgataacttctagcatagagcctcccaagccaccacagcatccgaaacttcctattcagcgctcaggggaaacggatcctgggagaaagagtccaagtcggcctattctcgatgggaagctggaaccttgtcccgaggtggatgttggaaaactggtgagccggctccaggacggggggacaaagataactcctaaagcaactaatggacctatgccgggcagcgggcccaccaaaacgccaagtttccacatcaagcggcctgcccctcggccacttgcacaccacaaggaaggagatgccgacagtttttctaaggttcggccaccaggggaaaagcccaccattatccggcctcccgtacgcccccctgaccccccctgtcgcgctgccacccctcagaagcccgaaccaaagcccgatatagtagcaggaaacgcaggagagatcacatcaagtgtggtggcatctcgcacccgattcttcgaaacagcttcacggaagacaggctctagccaggggcgcttgcctggcgatgaaagttag

SEQ ID NO: 324710 - DNA, 2409 bp, Artificial Sequence
  derived and/or modified sequence
atgggccacccccccctggagttcagtgactgctacctggacagcccagacttccgggagcggctgaagtgctatgagcaggagctggagaggaccaacaagttcatcaaggatgtgatcaaggatggaaatgccctgatcagcgccatgaggaactacagcagcgctgtgcagaagttcagccagaccctgcagagcttccagtttgacttcatcggggacaccctgacagatgatgagatcaacattgctgagagcttcaaggagtttgctgagctgctgaatgaggtggagaatgaaagaatgatgatggtgcacaatgccagtgacctgctgatcaagcccctggagaacttcaggaaggagcagatcggcttcaccaaggagaggaagaagaagtttgagaaggatggagagcgcttctacagcctgctggacagacacctgcacctgagcagcaagaagaaggagagccagctgcaggaggccgacctgcaggtggacaaggagcggcacaacttctttgagagcagcctggactatgtgtaccagatccaggaggtgcaggagagcaagaagttcaacatcgtggagcctgtgctggccttcctgcacagcctcttcatcagcaacagcctgactgtggagctgacccaggacttcctgccctacaagcagcagctgcagctgagcctgcagaacaccaggaaccacttcagcagcacccgggaggagatggaggagctgaagaagaggatgaaggaggccccccagacctgcaagctgcccggccagcccaccatcgagggctacctgtacacccaggagaagtgggccctgggcatctcctgggtgaagtactactgccagtatgagaaggagaccaagaccctgaccatgacccccatggagcagaagccaggggccaagcagggccccctggacctgaccctgaagtactgtgtgcggaggaagacagagagcattgacaagcgcttctgctttgatattgagaccaatgaaagacctggcaccatcaccctgcaggccctgtctgaggccaacagaaggctgtggatggaggccatggatggcaaggagcccatctaccacagccccatcaccaagcagcaggagatggagctgaatgaggtgggcttcaagtttgtgaggaagtgcatcaacatcatcgagaccaagggcatcaagacagagggcctgtacagaacagtgggcagcaacatccaggtgcagaagctgctgaatgccttctttgaccccaagtgccctggagatgtggacttccacaacagcgactgggacatcaagaccatcaccagcagcctgaagttctacctgaggaacctgtctgagcctgtgatgacctaccgcctgcacaaggagctggtgtctgctgccaagagtgacaacctggactaccgcctgggcgccatccacagcctggtgtacaagctgcctgagaagaaccgggagatgctggagctgctgatccgccacctggtgaatgtgtgtgagcacagcaaggagaacctgatgacccccagcaacatgggcgtcatcttcggccccaccctgatgagggcccaggaggacacagtggccgccatgatgaacatcaagttccagaacatcgtggtggagatcctgattgagcactttgggaagatctacctgggccccccagaggagagcgctgcccctcctgtgcccccaccccgggtgacagcccggcggcacaagcccatcaccatcagcaagaggctgctgcgggagaggacagtgttctacaccagcagcctggatgaaagtgaagatgagatccagcaccagacccccaacggcaccatcaccagcagcattgagccccccaagccaccccagcaccccaagctgcccatccagaggtctggagaaacagaccccggcaggaagagccccagccggcccatcctggatggcaagctggagccctgcccagaggtggatgtgggcaagctggtgtcccggctgcaggacggcggcaccaagatcacccccaaggccaccaacggccccatgcctggcagcggccccaccaagacccccagcttccacatcaagaggcctgccccccggcccctggcccaccacaaggagggagatgctgacagcttcagcaaggtgcggcccccaggagagaagcccaccatcatccggccccctgtgcggcccccagaccccccctgcagagctgccaccccccagaagccagagcccaagccagacatcgtggccggaaatgctggggagatcaccagctctgtggtggccagcaggacccgcttctttgaaacagccagcaggaagacaggcagcagccagggccgcctgcctggagatgagagctag

SEQ ID NO: 324711 - DNA, 2409 bp, Artificial Sequence
  derived and/or modified sequence
atgggccacccccccctggagttcagcgactgctacctggacagccccgattttagagaaaggctgaagtgctacgagcaagaattggaacgtactaacaaatttattaaagatgtgattaaggatggaaacgcattaatctccgcgatgagaaactactcttccgccgtacagaaattctcgcagactctgcaatccttccagttcgacttcatcggagacacgctcaccgacgatgagatcaatatagcggagtcgtttaaggagtttgcggaactattaaatgaggtggagaatgagaggatgatgatggtgcacaacgcaagtgacttgttgatcaaacctctagaaaatttcagaaaagagcagattggattcaccaaggagagaaagaagaagtttgaaaaggatggggaaaggttctactctctgcttgaccgccatcttcacctttcgtccaaaaagaaggaatcacagctccaggaagcagatctacaggtcgataaggagcgacacaacttctttgagagctctctggactatgtatatcaaatacaggaggtgcaggaaagcaagaaatttaacatcgtcgagccggtgctggcctttctgcattccctcttcataagcaattctttaactgttgaactgacccaggactttctcccttataagcagcagcttcagctcagcctgcagaacacccgcaatcacttcagctcgacacgggaagaaatggaggagttgaagaagcgcatgaaagaggcaccccagacatgcaaacttcctggacagcccaccatcgaaggatatctgtatactcaagaaaagtgggccttaggaatttcctgggttaagtattactgccagtacgagaaagaaacaaagaccttgacaatgacaccaatggagcagaagcccggagctaaacaggggccactcgacttgacattaaaatattgcgtccggcggaagacggagtccatcgacaagcgattctgttttgatattgagaccaacgagagacccgggaccattaccctccaggccctctctgaggccaatcggcgactgtggatggaggctatggacggaaaggaaccaatctatcacagcccaatcactaaacagcaagaaatggagctgaatgaggttgggtttaaatttgtaaggaaatgcattaacattatcgaaacaaagggtatcaaaacggaaggcctataccgcacagtgggctccaacatacaggttcagaagctgctgaacgcctttttcgaccctaaatgtcctggggacgttgactttcacaattctgattgggacatcaagacgatcaccagttctctgaaattctatctccggaacctcagtgaacccgtaatgacctacagactgcataaggagctggtaagtgctgctaagtctgataatctggattaccgtcttggagctatccactcacttgtttataagttacccgaaaaaaacagagagatgctggaacttcttatcaggcacctggttaacgtctgtgagcacagcaaggagaatttgatgactcctagcaacatgggcgttattttcggtcctacattgatgcgcgcccaagaggacaccgttgccgccatgatgaatatcaagtttcagaatatcgtggtagaaatcttgattgagcatttcggcaaaatctaccttggcccccccgaggaatccgccgctcctccagtgcccccccctagagtgaccgccagaagacacaagcccattaccatttccaaaagactgttacgagaaaggacggtgttttatacttcaagcttggacgagtccgaagatgagattcagcatcaaacccctaacgggacgattacatccagtatcgagccacccaagcccccccagcatcctaagctgccgatccaacgcagcggtgagacggacccgggaagaaaaagtccttccaggcctatcctggacggaaagctcgagccttgccctgaggtggacgtgggtaaactggtatctagacttcaggatggaggcaccaagattactccaaaggccacaaacggtcccatgcccggctcaggccccactaaaacgccttcctttcacattaagcgacctgccccaaggccactcgctcaccacaaggaaggggacgccgattcgttttccaaggtgaggccgcctggcgaaaagccaacgattatcaggccgcctgtgcgccctccagatcccccttgccgcgctgcaactcctcaaaagcctgaaccaaagccagacattgtagcaggaaatgccggcgagatcacaagctctgtggtggccagtaggacacggttcttcgaaacggcctctaggaagactggctcaagccagggccgcctgccaggcgacgagagctag

SEQ ID NO: 324712 - DNA, 7879 bp, Artificial Sequence
  derived and/or modified sequence
tgtgcgtcgcgctctcgccctcctcttcccgctgcagtgtctatggagcgaggctacgtttcattgccgccctggcttaacccttccggcgcctaaaaggacggccggccggccggctcccttgcaccaggaagaagtcttagcagccagcgggccctggtcaggaaactctaaggtacaaggaaaacagttgaggaaggagccagagcgctccggtttggtcctcgggcttcgctggggcggggcgcaggcgttggctttaagaaaggggaggggacagtgcaatccgggttgcccgcggagttcggccaaggaagtcttccgctcgctccggagcgaggagcctgtagagaggctgttcccagctccagctctaacctcgcctacaccttgggcgggcccaagtgtcacgtttgcaattgctcaggaaggatccggcccgtctccggaggcaagtcgggctgcggtttttgctgcttatctgggaaggcgatgcctaagggacatgctgcttgctaggcagcaccctgccgggatccgactgcgatagttagctctccctggccctgaagccatcgccggggcgcctgttctctgtccggaccagccagcgctcctcaggagtctcactgaaacagaaccatgggtcatcccccgctggagttcagcgactgctacctggacagccccgatttccgcgagaggctcaagtgttatgagcaggaactggagaggaccaacaaattcatcaaagacgtaatcaaagacggcaacgcgcttatcagcgctatgagaaattattcttctgctgttcagaaattttcccagacgctgcagtcatttcagtttgatttcattggagacactctgactgatgatgaaattaacatcgctgaatccttcaaggaatttgctgaattgctcaacgaggtagaaaatgagaggatgatgatggtacacaatgctagtgatttgctgattaaacccttggaaaatttccggaaggaacaaataggcttcaccaaggagcggaaaaagaaatttgaaaaggatggtgagaggttttattctttactggatcggcacttacacctgtcttcaaaaaagaaagaatctcagttacaagaggcagacctacaggtggacaaggagaggcacaattttttcgagtcctctcttgattatgtttatcaaatccaggaagttcaggagtccaagaagttcaatattgtggagcctgtcttggcctttcttcatagtctgttcatttctaacagcctgactgtggagctcacacaggatttcctcccatacaaacaacagctccaactcagtttacagaatacaagaaatcatttctccagtacccgggaagagatggaagaacttaagaaaaggatgaaagaagctccccagacatgcaaacttccaggacagccaactattgaaggctatctctatacacaagagaaatgggctttaggaatatcctgggtgaaatactattgccagtatgagaaagagaccaaaacactgaccatgacgcctatggagcagaagccaggtgctaagcaggggcccttggacttaacactgaagtactgtgtgagaaggaagacggagtctatcgacaagaggttctgttttgacatagaaactaatgaaaggccaggaaccatcactctgcaggccctttcagaagctaacagaaggctatggatggaagccatggatgggaaagaacctatctaccacagccctataacaaaacagcaagaaatggagctaaatgaagtgggcttcaagtttgtcaggaagtgcatcaatattattgagaccaaagggatcaagacagaagggttgtaccgcactgtgggcagcaatattcaggttcagaagctgctgaatgccttttttgatcctaaatgcccaggagatgttgattttcataatagtgactgggacattaagacaatcaccagctccttgaaattctacctcaggaatctttctgaacctgtcatgacctatagacttcacaaagagctggtctctgctgccaagtctgacaacctggattaccgcctaggagctattcactccctggtatataagctaccagaaaagaaccgagagatgctggaacttctgataagacacttggtcaatgtgtgtgagcacagcaaagagaatcttatgaccccctccaacatgggagtaatctttgggcccaccctgatgagagctcaggaggacactgtggccgccatgatgaacatcaaattccagaacatagtggtggaaatactaatcgagcactttggcaagatctatttaggtccacctgaggaaagcgctgcaccgccagtgcctccgcctcgggtgacagcaagaaggcacaaaccaatcacgatttcaaagcgcttgctgcgagaaaggacggttttctatacttcttccctggatgaaagcgaagatgaaatccaacatcaaacaccgaatggtactatcaccagcagcatagaaccccccaagccaccacaacaccccaaactacctattcagaggagtggggaaactgatcctgggaggaagtccccaagcaggcctattttggatggcaagttggagccctgcccagaggtggacgtggggaagttggtgtctaggctgcaggatggagggaccaagatcaccccaaaggccaccaatggacccatgccaggctctgggcccaccaagaccccctctttccacataaagagaccagctccccggcccctggcccaccacaaggagggggatgctgacagtttcagcaaagtgcggcctccaggagaaaagccaaccatcatccgccccccagtgaggcccccagatcctccctgccgggcagctactccccaaaagccagaaccaaagccagatattgtggctggcaatgcgggggaaatcacatcatctgtggtggcttccaggaccaggttttttgaaacagcttcccggaaaacaggaagttctcaaggcagacttcctggagatgaaagttgaggctacaggttttaaaagccttggcctcagaggaccctttccaggttctgaaagagtctttcttcttcaaacctttgtgtgcggagtcattttgtgttgaagagcagctccttcctagccttgcactttcagactctctctgggaggccataaaataaggagcatatgtcctagacaggtgtttatatctcctttgtattctgtcttcatcccctcagaaggtctgttttgagttcctataacactgtgaagagctggactccctcaagccagactctgccaaaaccaagatatccacttacctgagttgaagaggggagctcagttttcaactcttccctgaacttcctgcttcctcagagggccattgaactctgagagatttggggctaaagactgatctcaggggtcttaccttgaactgaaggccacttgagttggggccattgcttaccttggttggaagggaatagaaatgtttgctgaacattggagaatctcaacatgtctcctactgaggatatggacactggtgccatgtcagcgctctggtgctgcagtatgttgccaagagcccgtctgctcctgcgaggctatgagtgggatgagtgatgcccccacagcacctccatgtggacttaggaaggtggccttcctgctgttacatgcagccacttaggacaaatctgcaaagcatgttttgcatgtaaaagcctaggtctatttggattattctttctccttttttttgacagcttcctgtcaagcaatcaagaaacaaacaaaagctgaacacatttctttttaaaaaaaggagactgtgtttggtcctgtaggagttctattttggggtcaaatgctagaaaaattgttaaggtggattgaggccaggcagctgtcactgctgcttcatgtttgccttctgcacataaactcttttatctcctgaaaaaagcagttcttaacccagtgtccatggactcagaaactccatgatgcccctgagatggtatgcacaattccatgacaatatgccctttctggggagatagtccataatgttctgctaaatttcaaatgggctcgtgacccaaaaaagtcaagaaccacagcacttgagtaaaatactctttttacaatccatataagcccttgattggaagggcttttcaaaatcatttagtctaacaactgcccagtttccagtcgggggaactgaggcagagcaaggtagtgatcacaccagtacaagatctcaggtcccaggctcctatgcaagttttttttccccattatatcacacttatctagcaagggaccttgtggtttgtggctttagtggccatcatttctgggggttggcttttaccctttttcttgaatatttgccaccaagtgaaaaatgttaggacataaacccttgccaggtccctttcatttgctatctctattattggaaaggacctaaaaattggtgtaatggggcagaaatctgaggaatggacatttctaattcctgtttgttgaagggaagttgctggaaagagcatcagtacttgtttctatgcagatgcctgggccgtagcttgtctgtagcgtctgtataattataatgttgcccagtgtgagggaaagagctttcctacttgcactcttctaccaaggccctgttagtgcactgattatagtactgacagataaacctagataaagagatagagagtgagtacatgcacactcatgtgcaaacccactcagagatgcatttggaacagtgctactgaaaggcagtagtcattttcaagactgaattccaaacatggtttattggtgagttaggaacatgtaaggccaagtacactgagagcctttttgaaagtaattgagtggaaacttgatgccattctaaatcaaggcatatccaggtggcccggttgaactcactccactgtacccagtctcaaaggccaggttgctaagaaaccaggagtaaaagagtcaagtgaccatcatttcacctgctgcttgcccccaatagtagtctctgtgaggccttactgacctcacctaggaagtgatttttgagcccttgtttcagggctgtggcctccctgctctatcctgaataaagcagacaggtgtgcagattttggccatgaaagcatggctaatagggccacagtccctttaaagaaacatggtttgactctggttttcttgggggaaaataccacaatcaccgatgcaaacattggaagattattgagagccctagaaagctgctgtgatcccagtagaaaatatgtcccagaaatgtcatgagattgctgtgtgttgcctgggacacagatcaagggcctatcttggagagctggggaccagcagtctgcctggaggccagggagcagtggctgagtagctctgcctttgctctggtctataccttaagaatgccaaagaatgaatttcaacgcctgcctttggcactctgacttaaagtgcaaaaagcttctgtggcgaggcatgctatcatggaatgagactggcttgccctaggcttaatggatgggcagtcattttgcagaggctatgggaagagggtgataatagaagagtggcagctataggaaattatcaacataccttggccagcaagttagagaatctggcaatggatgaactgaaagtgatgaactggcagggataacaaagaacctaacatttattaagcacgtatttattaactgctcagtgtttcatattcatgcaagtattctcattttacagagaaagaaattatggcccagggggctaaagtaaacaactcaagggcacatagaaagtaaataaaaggactgtgatttgaatccaggccactcttagcccatgctgttttccctttgccacactgtggtaggtgtttgaacagaggccacattactagagttggcatgactcttgactcttgcctgcctaacaaaatattgaaaggcaaacatttgaaggagggagggggtgcaggttcagtttatatggaaatgcaaactgggctggaagatattcctgagttaggctttctcttcatattcagcttgcacatttggtaatgtttttaagatgatcatctaattttattttgtgaagtgaaggatttgtgttttagttggcagttgttaagtccttggcttgccatttttcaaaaagtaaaaaggtcctcacaggtgtctccatacttcgccaaggttgtagcatgggcagtttcagtttcagcctaagagactggtgacatccacaaatgcagttttagaagcagaaaaggtcttggtgcctctgcagtacttgatgtattggggtcaaatctctacaaatttttctgtggtgatagcaaaatcaagagatggcttacaaaaagaaatattgaatttttatttttgaagtttttgttttttaaaaggttgggggtgttcagccactgagggacaaaacttagcatctaatttcaattatagtgtcatgcagagtatttctaaagtaattggttatcatgggaaagtattctcttttcaagaagttctttgattctgtaataactagaacaaataaagtagtaaaagaagaaatagttctgtgactaggaaaaaattgcttttgagagaacatagatcaattatactacttctaaggtagctgcagataagtggccttgacacattacaagcctggaaaaaaacatcagaaataataaaaaatttcagagagaatcaagatacctttttttttcttttttttttcttttttttattatactctaagttttagggtacatgtgcacattgtgcaggttagttacatatgtatacatgtgccatgctggtgcgctgcacccactaatgtgtcatctagcattaggtatatctcccagtgctatccctcccccctcccccgaccccaccacagtccccagagtgtgatattccccttcctgtgtccatgtgatctcattgttcaattcccacctatgagtgagaatatgcggtgtttggttttttgttcttgcgatagtttactgagaatgatggtttccaatttcatccatgtccctacaaaggatatgaactcatcattttttatggctgcatagtattccatggtgtatatgtgccacattttcttaatccagtctatcattgttggacatttgggttggttccaagtctttgctattgtgaatagtgccgcaataaacatacgtgtgcatgtgtctttatagcagcatgatttatactcatttgggtatatacccagtaatgggatggctgggtcaaatggtatttctagttctagatccctgaggaatcgccacactgacttccacaatggttgaactagtttacagtccaaccaacagtgtaaaagtgttcctatttctccgcatcctctccagcacctgttgtttcctgactttttaatgattgccattctaactggtgtgagatgatatctcatagtggttttgatttgcatttctctgatggccagtgatgatgagcatttcttcatgtgttttttggctgcataaatgtcttcttttgagaagtgtctgttcatgtccttcgcgaaggacaagataccttaaagataagttttcgataaagaaaagccttcattttcctgggggaaatgaagcacttgatgccaaggacattagtagagggctagaaagattgcctgtgtgaaagacatatgctatatccaaataataaaacaaacgagatcctggggctcattcatgtgactttcaataaagtatgtagactgtctaatataa

SEQ ID NO: 324713 - DNA, 582 bp, Artificial Sequence
  derived and/or modified sequence
ataatgcgtctttgttgaaacaagggagctttgttctttacttctgggctctctcagtgattttaacaggaatccagaggcagcagcacacttctcagtaccacaaggaaggtggatgggaataggtttccagctggaagtttatctagtctgacaacctggattaccgcctaggagctattcactccctggtatataagctaccagaaaagaaccgagagatgctggaacttctgataagacacttggtcaatgtgtgtgagcacagcaaagagaatcttatgaccccctccaacatgggagtaatctttgggcccaccctgatgagagctcaggaggacactgtggccgccatgatgaacatcaaattccagaacatagtggtggaaatactaatcgagcactttggcaagatatcttccttctttctccacagatctatttaggtccacctgaggaaagcgctgcaccgccagtgcctccgcctcgggtgacagcaagaaggcacaaaccaatcacgatttcaaagcgcttgctgcgagaaaggacggttttctatacttcttccctggatgaaagcga

SEQ ID NO: 324714 - DNA, 2409 bp, Artificial Sequence
  derived and/or modified sequence
atggggcacccccctttggaattctctgactgctatctagacagtcccgatttcagggaaaggctgaagtgctacgaacaggaactggaacgcactaataaatttatcaaggatgtgataaaagacggcaatgcccttatcagtgctatgcgcaattattcgtccgcggtacagaagttctcccagaccctgcagtcttttcagttcgattttataggggacacgctgacagacgatgagatcaatatcgccgagtccttcaaagagtttgctgaattgttaaatgaggtcgaaaacgagcgaatgatgatggtgcataacgcaagcgacttacttatcaagcccctggaaaacttccgcaaggaacagatagggttcacaaaggagagaaagaagaagttcgaaaaggatggggaaaggttctacagcctgctggatcggcacctgcatctctcttccaagaagaaggagtcgcagctgcaggaagctgatttgcaggttgataaggagcgccacaattttttcgaatcctcgctggactacgtgtaccaaatccaggaggtgcaggagagcaaaaagtttaacattgttgagccggtcttagcctttctgcatagtctttttataagcaatagcctgacagtggaactcacccaggatttccttccctacaagcaacagcttcagctaagtctccagaacacacgaaaccacttctcatccactcgggaagagatggaggagctcaagaaacggatgaaggaggcaccacagacttgcaagctcccagggcagcccaccatcgaagggtacctgtacacgcaggaaaagtgggctctggggatcagttgggtgaaatactactgtcagtacgaaaaagagacgaaaaccctgacgatgactcccatggagcaaaaacctggagctaagcaaggtccactggacctgaccttaaagtactgcgtgcgccgtaaaaccgagtccatcgacaaacgtttctgttttgatatcgagacaaatgaaaggccaggcaccattactctgcaggccctgagcgaggctaaccgcagactgtggatggaggctatggatggaaaggagcctatctatcacagtcctattacaaagcagcaagagatggagctcaacgaagttggattcaagttcgtccggaaatgcattaacattatagagaccaagggcatcaaaaccgagggcctgtaccgtaccgtcggctccaacatccaggtacaaaaacttctgaacgcgttcttcgatcccaagtgcccaggcgacgtggacttccacaatagcgactgggacatcaaaacaatcacttctagcctgaagttttacctgaggaacctctccgagccagttatgacctatcggttgcacaaagaattggtgtcagccgctaagtctgacaatctcgactataggctgggcgctattcacagcctggtctataagctccccgaaaaaaatagagaaatgttggagctactcattagacacctggtgaatgtgtgcgagcatagcaaggagaacctgatgaccccttccaatatgggtgtgatctttggacctaccctgatgagagctcaggaagacacagtggcagcgatgatgaacataaagtttcagaatattgtcgttgaaatccttattgagcatttcggaaagatctacctggggccacccgaggaaagtgccgcaccccctgttcccccacctcgggttactgccagacgccacaaacccattactatcagtaaacggctgttgagagaaaggaccgttttctacacttcttctctggacgaaagcgaggatgaaattcagcatcaaacgccaaacgggactattacctcatccattgaacctccaaagcctcctcagcaccctaagcttcccatccagcggtctggagaaacagacccaggaaggaaatctcctagcaggcccatcctcgacggaaagctggagccctgtcccgaggtcgacgtcggaaagttagtttctcgtctgcaggacggcggaactaagatcacacccaaggccacaaacgggccaatgcctgggagtggtcccaccaagaccccaagcttccatataaagagacctgcccctcggcctctggcccaccacaaagaaggggatgctgacagcttttcgaaggttcggccacccggtgagaagcctaccattattcgacccccagtaaggccccctgacccgccatgccgcgctgccaccccccagaaacctgagcccaagcctgatatagtggctgggaacgccggtgagatcacgtcctccgtggtcgcctcccgtacgaggttttttgagacagctagcaggaagactggctcctcacaagggagactaccgggtgatgaatcctag

SEQ ID NO: 324715 - DNA, 2409 bp, Artificial Sequence
  derived and/or modified sequence
atgggccacccccccctggagttcagcgactgctacctggacagccccgacttcagagagagactgaagtgctacgagcaggagctggagagaaccaacaagttcatcaaggacgtgatcaaggacggcaacgccctgatcagcgccatgagaaactacagcagcgccgtgcagaagttcagccagaccctgcagagcttccagttcgacttcatcggcgacaccctgaccgacgacgagatcaacatcgccgagagcttcaaggagttcgccgagctgctgaacgaggtggagaacgagagaatgatgatggtgcacaacgccagcgacctgctgatcaagcccctggagaacttcagaaaggagcagatcggcttcaccaaggagagaaagaagaagttcgagaaggacggcgagagattctacagcctgctggacagacacctgcacctgagcagcaagaagaaggagagccagctgcaggaggccgacctgcaggtggacaaggagagacacaacttcttcgagagcagcctggactacgtgtaccagatccaggaggtgcaggagagcaagaagttcaacatcgtggagcccgtgctggccttcctgcacagcctgttcatcagcaacagcctgaccgtggagctgacccaggacttcctgccctacaagcagcagctgcagctgagcctgcagaacaccagaaaccacttcagcagcaccagagaggagatggaggagctgaagaagagaatgaaggaggccccccagacctgcaagctgcccggccagcccaccatcgagggctacctgtacacccaggagaagtgggccctgggcatcagctgggtgaagtactactgccagtacgagaaggagaccaagaccctgaccatgacccccatggagcagaagcccggcgccaagcagggccccctggacctgaccctgaagtactgcgtgagaagaaagaccgagagcatcgacaagagattctgcttcgacatcgagaccaacgagagacccggcaccatcaccctgcaggccctgagcgaggccaacagaagactgtggatggaggccatggacggcaaggagcccatctaccacagccccatcaccaagcagcaggagatggagctgaacgaggtgggcttcaagttcgtgagaaagtgcatcaacatcatcgagaccaagggcatcaagaccgagggcctgtacagaaccgtgggcagcaacatccaggtgcagaagctgctgaacgccttcttcgaccccaagtgccccggcgacgtggacttccacaacagcgactgggacatcaagaccatcaccagcagcctgaagttctacctgagaaacctgagcgagcccgtgatgacctacagactgcacaaggagctggtgagcgccgccaagagcgacaacctggactacagactgggcgccatccacagcctggtgtacaagctgcccgagaagaacagagagatgctggagctgctgatcagacacctggtgaacgtgtgcgagcacagcaaggagaacctgatgacccccagcaacatgggcgtgatcttcggccccaccctgatgagagcccaggaggacaccgtggccgccatgatgaacatcaagttccagaacatcgtggtggagatcctgatcgagcacttcggcaagatctacctgggcccccccgaggagagcgccgccccccccgtgcccccccccagagtgaccgccagaagacacaagcccatcaccatcagcaagagactgctgagagagagaaccgtgttctacaccagcagcctggacgagagcgaggacgagatccagcaccagacccccaacggcaccatcaccagcagcatcgagccccccaagcccccccagcaccccaagctgcccatccagagaagcggcgagaccgaccccggcagaaagagccccagcagacccatcctggacggcaagctggagccctgccccgaggtggacgtgggcaagctggtgagcagactgcaggacggcggcaccaagatcacccccaaggccaccaacggccccatgcccggcagcggccccaccaagacccccagcttccacatcaagagacccgcccccagacccctggcccaccacaaggagggcgacgccgacagcttcagcaaggtgagaccccccggcgagaagcccaccatcatcagaccccccgtgagaccccccgaccccccctgcagagccgccaccccccagaagcccgagcccaagcccgacatcgtggccggcaacgccggcgagatcaccagcagcgtggtggccagcagaaccagattcttcgagaccgccagcagaaagaccggcagcagccagggcagactgcccggcgacgagagctag

SEQ ID NO: 324716 - protein, 351 aa, Artificial Sequence
  derived and/or modified sequence
MLPVWFTANLDIVATYIQEPNEDCLYLNVYVPTEDGSGAKKQGEDLADNDGDEDEDIRDSGAKPVMVYIHGGSYMEGTGNMIDGSILASYGNVIVITLNYRVGVLGFLSTGDQAAKGNYGLLDQIQALRWVSENIAFFGGDPRRITVFGSGIGASCVSLLTLSHHSEGLFQRAIIQSGSALSSWAVNYQPVKYTSLLADKVGCNVLDTVDMVDCLRQKSAKELVEQDIQPARYHVAFGPVIDGDVIPDDPEILMEQGEFLNYDIMLGVNQGEGLKFVEGVVDPEDGVSGTDFDYSVSILWTICMAILRVRTPCERPSSSCIQTGQTVTTLRPAVKHWWHSSLTTSGWSPQW

SEQ ID NO: 324717 - DNA, 1056 bp, Artificial Sequence
  derived and/or modified sequence
atgctgcccgtgtggttcactgcaaatctggatatcgtcgcaacttatatccaagaacctaatgaagactgcttatacctaaatgtttacgtacctaccgaagacggatctggggcaaagaaacagggcgaagatttagccgacaacgacggagatgaggacgaagacattagagattccggagctaaacccgtgatggtctacatccacgggggaagctacatggaaggaactggtaatatgatcgacggttcaattctggcgagttatggtaacgtcattgttataacactgaattacagagtcggggttcttggttttcttagtaccggcgaccaagctgccaaaggcaattatgggctgctggaccagatccaggcattacgatgggtctctgaaaacattgctttcttcggaggagaccccagacgtatcaccgtgttcggatcgggcattggcgcatcctgcgtgtcactccttacactcagtcaccactccgaaggattgttccaacgggccatcatccagagcggctcggcactcagcagctgggccgtgaattatcagcctgttaaatacacaagtctccttgcagacaaggtgggttgtaatgtactagacacagtggacatggttgattgcctccgccagaagagcgctaaagagctggttgagcaagatattcagccagcgcggtaccacgtcgcattcgggccagtcatcgatggagatgtgattccggatgaccccgaaattctgatggaacagggagagttcctgaactatgatattatgttgggggtgaatcagggagaaggattgaaattcgtggaaggggttgtcgaccccgaagatggagtctcaggaaccgactttgactatagcgtctctatcctttggacgatctgcatggcaattctcagagtccggaccccatgtgaacgccccagcagttcctgcatccagacggggcaaaccgtgacaaccttgcgacccgcagttaaacactggtggcactctagtttgacaacaagcggctggagtccacagtggtag

SEQ ID NO: 324718 - DNA, 1056 bp, Artificial Sequence
  derived and/or modified sequence
atgctgcctgtgtggttcaccgccaacctggacatcgtggccacctacatccaggagcccaatgaagactgcctgtacctgaatgtgtatgtgcccacagaagatggcagcggggccaagaagcagggcgaggacctggccgacaatgatggagatgaagatgaggacatccgggacagcggggccaagcctgtgatggtgtacatccacggcggcagctacatggagggcaccggcaacatgattgatggcagcatcctggccagctatggaaatgtcatcgtcatcaccctgaactacagagtgggcgtgctgggcttcctgagcactggagaccaggccgccaagggcaactacggcctgctggaccagatccaggccctgcgctgggtgtctgaaaatattgccttcttcggcggggacccccggcgcatcaccgtgtttggcagcggcatcggggccagctgtgtgtccctgctgaccctgagccaccacagcgagggcctcttccagagggccatcatccagagcggcagcgccctgagctcctgggccgtgaactaccagcctgtgaagtacaccagcctgctggccgacaaggtgggctgcaatgtgctggacacagtggacatggtggactgcctgcggcagaagagcgccaaggagctggtggagcaggacatccagcctgcccgctaccacgtggcctttggacctgtgattgatggagatgtgatcccagatgatcctgagatcctgatggagcagggcgagttcctgaactatgacatcatgctgggcgtgaaccagggcgagggcctgaagtttgtggagggcgtggtggaccctgaagatggagtgtctggaacagactttgactacagcgtgtccatcctgtggaccatctgcatggccatcctgcgggtgaggaccccctgtgagcggcccagcagcagctgcatccagacaggccagacagtgaccaccctgcggcctgctgtgaagcactggtggcacagcagcctgaccaccagcggctggagcccccagtggtag

SEQ ID NO: 324719 - DNA, 1056 bp, Artificial Sequence
  derived and/or modified sequence
atgctgcccgtgtggttcaccgccaacctggacatcgtggccacctatatccaggaaccgaacgaggactgtctgtatttaaacgtgtacgtgccgacagaggatggctccggagcgaagaaacagggggaggatctggccgataacgatggcgatgaagacgaggatatccgggattctggagccaagcccgtgatggtttacattcatggagggtcatacatggaaggcactgggaacatgatcgatgggtctattctcgccagctatggcaacgtgattgtgatcactctgaactatcgggttggtgtgctcggatttctctccaccggagatcaggccgccaaggggaactacgggttgctggatcaaatccaagcattgagatgggtaagcgagaacatcgcgttttttggcggagatcctcgacgaatcacagtcttcggttccggcataggggccagctgtgtgagtcttctgaccctcagccaccacagcgagggattatttcagagagccattatacagtccggtagcgcacttagctcctgggctgtgaactaccagcctgttaaatatacaagtttgctagccgacaaagtgggttgcaatgtgcttgacaccgtagacatggttgactgtctgcggcagaaatctgcgaaggagttagtcgagcaagacatacagcccgcccgttatcacgtagccttcggccccgtgatcgacggcgatgtgatacccgacgatccagagatcctgatggaacagggcgagttcctcaactatgatatcatgcttggcgtcaaccagggggagggactgaagtttgtggaaggagtggtggaccctgaggatggggtttcaggtaccgactttgattatagcgtgtctattctatggacgatttgtatggcaattttgagagtacgcactccatgcgagagaccttcctcaagctgtattcagacaggccagactgttaccaccctacgtcctgcagtgaagcactggtggcacagctcgcttacaaccagtggatggagcccacagtggtag

SEQ ID NO: 324720 - DNA, 1056 bp, Artificial Sequence
  derived and/or modified sequence
atgcttcctgtctggttcacagccaacctggatattgttgctacctacatccaggaacctaatgaagattgtctctatctcaacgtgtacgtacccactgaggatggctccggtgcgaagaaacagggcgaggatctcgccgataacgacggagatgaggatgaggatatccgggactccggggctaaacctgtgatggtgtatatacatgggggatcctacatggagggaaccggtaatatgatagatggctccatcttggctagctacggcaatgtaatagtgatcaccctgaattaccgggtaggggtgctcggattcctttctacaggagatcaggccgcaaagggtaactacggcctgctcgaccagattcaagctctgcgttgggtgagcgagaacattgctttctttggcggagatccacgaaggattacagtctttggctcaggaatcggcgcatcatgcgtgtcgctgctgacattgagccaccacagtgaagggctgtttcagcgggctatcatacagtccggcagcgccctatcttcgtgggcggtgaactatcagcctgttaagtatacaagtttgctggccgataaggtgggatgcaacgtattggatactgttgatatggtcgattgcctgaggcaaaagtctgcgaaagagctggtagaacaggacatccagcccgcaaggtaccatgtggccttcggtcctgtcatcgacggagatgtgattccggacgaccctgagatcctgatggaacagggtgagttccttaactacgacatcatgctgggagtgaaccaaggagagggtctcaaatttgtggagggtgtagtggatcctgaagacggagtgtccggcaccgacttcgactacagcgttagcatcctctggaccatctgtatggctattctgcgggtccggacaccatgcgagcgtcctagttcttcctgtatccagaccggtcagaccgtcaccacactgaggcccgctgtcaaacactggtggcattcatctctaactaccagcggttggtccccccagtggtag

SEQ ID NO: 324721 - DNA, 1056 bp, Artificial Sequence
  derived and/or modified sequence
atgctgcccgtgtggttcaccgccaacctggacatcgtggccacctacatccaggagcccaacgaggactgcctgtacctgaacgtgtacgtgcccaccgaggacggcagcggcgccaagaagcagggcgaggacctggccgacaacgacggcgacgaggacgaggacatcagagacagcggcgccaagcccgtgatggtgtacatccacggcggcagctacatggagggcaccggcaacatgatcgacggcagcatcctggccagctacggcaacgtgatcgtgatcaccctgaactacagagtgggcgtgctgggcttcctgagcaccggcgaccaggccgccaagggcaactacggcctgctggaccagatccaggccctgagatgggtgagcgagaacatcgccttcttcggcggcgaccccagaagaatcaccgtgttcggcagcggcatcggcgccagctgcgtgagcctgctgaccctgagccaccacagcgagggcctgttccagagagccatcatccagagcggcagcgccctgagcagctgggccgtgaactaccagcccgtgaagtacaccagcctgctggccgacaaggtgggctgcaacgtgctggacaccgtggacatggtggactgcctgagacagaagagcgccaaggagctggtggagcaggacatccagcccgccagataccacgtggccttcggccccgtgatcgacggcgacgtgatccccgacgaccccgagatcctgatggagcagggcgagttcctgaactacgacatcatgctgggcgtgaaccagggcgagggcctgaagttcgtggagggcgtggtggaccccgaggacggcgtgagcggcaccgacttcgactacagcgtgagcatcctgtggaccatctgcatggccatcctgagagtgagaaccccctgcgagagacccagcagcagctgcatccagaccggccagaccgtgaccaccctgagacccgccgtgaagcactggtggcacagcagcctgaccaccagcggctggagcccccagtggtag

SEQ ID NO: 324722 - DNA, 333 bp, Artificial Sequence
  derived and/or modified sequence
atgtcctgccagcaaagccagcaacagtgtcaaccacccccgaaatgcactccgaaatgcccccctaagtgtccaacccccaaatgtccccccaagtgtccccccaaatgccccccagtctccagctgctgtagtgtgagctccggcgggtgttgcggcagttcatcaggaggcgggtgctcaagcggtggtggcggatgttgccttagccatcaccggcggcacaggtcccacagacaccgcttgcaaagcagtgggtgttgtagccaacccagcgggggctcctcctgttgcggaggagatagcggacaacactccggaggatgctgttag

SEQ ID NO: 324723 - protein, 272 aa, Artificial Sequence
  derived and/or modified sequence
MEEPEEPADSGQSLVPVYIYSPEYVSMCDSLAKIPKRASMVHSLIEAYALHKQMRIVKPKVASMEEMATFHTDAYLQHLQKVSQEGDDDHPDSIEYGLGYDCPATEGIFDYAAAIGGATITAAQCLIDGMCKVAINWSGGWHHAKKDEASGFCYLNDAVLGILRLRRKFERILYVDLDLHHGDGVEDAFSFTSKVMTVSLHKFSPGFFPGKSDVSDVGLGKGRYYSVNVPIQDGIQDEKYYQICESVRTSCPKSRPVEAAAAACLPHLHSLV

SEQ ID NO: 324724 - protein, 146 aa, Artificial Sequence
  derived and/or modified sequence
MEEPEEPADSGQSLVPVYIYSPEYVSMCDSLAKIPKRASMVHSLIEAYALHKQMRIVKPKVASMEEMATFHTDAYLQHLQKVSQEGDDDHPDSIEYGLGYDCPATEGIFDYAAAIGGATITAAQCLIDGMCKVAINWSGGWHHAKK

SEQ ID NO: 324725 - DNA, 1085 bp, Artificial Sequence
  derived and/or modified sequence
gtgacgaatcacgtcccggctctctgcactgcggggcggggcccacgctttgctgcccgccctgccggccccacccccagcctggttagcagtcgctttctgatcccggaaaggaccctgagctgggaaatagcgagaggcggggatgttggggattttaaaacttatgtagatcaggcatgtagagctgctgaggagtttgtcaatatttactatgagacaatggataaaagaagacgggcactaaccaggctgtatctggacaaggccaccttaatatggaatggaaatgctgtttcagggctggatgccctaaataatttttttgacacattgccttctagtgagttccaggtcaatatgttagattgccaaccagttcatgagcaagcaactcagtcccaaactacagttcttgttgtgaccagtggaactgtgaagtttgatggaaacaaacaacatttcttcaaccagaacttcctgctgactgctcagtccactcccaacaatactgtgtggaagattgcaagtgattgcttccgttttcaagattggtctagtagttaaaggggcaaaagtccattctcatttggtccattagttccagcaattgaaatttatgtgaattattttgattgtagaagcactataatatgtgctgaaactaaatttctttaatattttctattcctgtcagcaccttttctagcagctgccagtttggagcattgccctctaagagctttaaaactatttttttacatgccttatatacattccactaatgacattcttataataatattaaacacatgatcttggtactaacatactcactgtgaacccagcctattgcaaaaataaaatctttttataatattatctatgggatgtcagcacaatataacactctgggaagaagtggagttttttggttattaggttaattttctagtaaaacacgttgcctgttttcagttaacactggtaatgccattttaatatatggctttttcaaatcagttcagtgaaaatagtacagatttaggtttacataactactctgacatactggaattgcatat

SEQ ID NO: 324726 - protein, 397 aa, Artificial Sequence
  derived and/or modified sequence
MRRNTQDENMRKWFKVTIPYGIKYDKAWLMNSIQSNCSVPFTPVDFHYIRNRACFFVQVASAASALKDVSYKIYDDENQKICIFVSHFTAPYSVKNKLKPGQMEMLKLTMNKRYNVSQQALDLQNLRFDPDLMGRDIDIILNRRNCMAATLKITERNFPELLSLNLCNNKLYQLDGLSDITEKAPKVKTLNLSKNKLESAWELGKVKGLKLEELWLEGNPLCSTFSDQSAYVSAIRDCFPKLLRLDGRELSAPVIVDIDSSETMKPCKENFTGSETLKHLVLQFLQQSNLCKYFKDSRNIKILKDPYLQRKLLKHTKCPRNVDSLSALPETQHDFTSILVDMWYQTVNTCFLPRAGPESQRWWCLLSLKWKDGLRVLILPSCGPSSLPLAAIPVCAS

SEQ ID NO: 324727 - protein, 318 aa, Artificial Sequence
  derived and/or modified sequence
MDCQENEYWDQWGRCVTCQRCGPGQELSKDCGYGEGGDAYCTACPPRRYKSSWGHHRCQSCITCAVINRVQKVNCTATSNAVCGDCLPRFYRKTRIGGLQDQECIPCTKQTPTSEVQCAFQLSLVEADTPTVPPQEATLVALVSSLLVVFTLAFLGLFFLYCKQFFNRHCQREKLIIFSDPVPASLNLIPEFAGGLLQFEADKTAKEESLFPVPPSKETSAESQVSENIFQTQPLNPILEDDCSSTSGFPTQESFTMASCTSESHSHWVHSPIECTELDLQKFSSSASYTGAETLGGNTVESTGDRLELNVPFEVPSP

SEQ ID NO: 324728 - DNA, 957 bp, Artificial Sequence
  derived and/or modified sequence
atggactgccaggagaacgagtactgggaccagtggggcagatgcgtgacctgccagagatgcggccccggccaggagctgagcaaggactgcggctacggcgagggcggcgacgcctactgcaccgcctgcccccccagaagatacaagagcagctggggccaccacagatgccagagctgcatcacctgcgccgtgatcaacagagtgcagaaggtgaactgcaccgccaccagcaacgccgtgtgcggcgactgcctgcccagattctacagaaagaccagaatcggcggcctgcaggaccaggagtgcatcccctgcaccaagcagacccccaccagcgaggtgcagtgcgccttccagctgagcctggtggaggccgacacccccaccgtgcccccccaggaggccaccctggtggccctggtgagcagcctgctggtggtgttcaccctggccttcctgggcctgttcttcctgtactgcaagcagttcttcaacagacactgccagagagagaagctgatcatcttcagcgaccccgtgcccgccagcctgaacctgatccccgagttcgccggcggcctgctgcagttcgaggccgacaagaccgccaaggaggagagcctgttccccgtgccccccagcaaggagaccagcgccgagagccaggtgagcgagaacatcttccagacccagcccctgaaccccatcctggaggacgactgcagcagcaccagcggcttccccacccaggagagcttcaccatggccagctgcaccagcgagagccacagccactgggtgcacagccccatcgagtgcaccgagctggacctgcagaagttcagcagcagcgccagctacaccggcgccgagaccctgggcggcaacaccgtggagagcaccggcgacagactggagctgaacgtgcccttcgaggtgcccagcccctag

SEQ ID NO: 324729 - DNA, 957 bp, Artificial Sequence
  derived and/or modified sequence
atggattgtcaggagaacgagtattgggaccagtgggggcggtgtgtgacttgtcaaagatgcggccctggccaggagctctccaaggactgcggctatggggaaggaggtgacgcttattgcaccgcgtgtccgccaagaagatataagtcctcttggggtcaccaccggtgtcagtcctgtatcacgtgcgccgtgattaatcgagttcagaaggtgaattgcaccgcaacaagcaacgccgtctgcggagactgccttcctagattctataggaaaacacgaattggcggcctgcaggaccaagaatgcatcccctgcacaaagcaaacacctacaagcgaggtgcaatgtgcttttcagctgtccttagtagaagcagatacgcctactgttcctcctcaggaggccacactcgtggccctggtgtcatccctcctagttgtgtttaccctagcttttctggggctatttttcctgtactgtaagcagttctttaatcggcactgccagagggagaagctgatcatcttctcagatcccgtgcctgccagcctcaatctgattccagagtttgcaggcggtctgcttcaattcgaggcggacaaaacggccaaggaagagagcttgttccctgtgccgccttctaaagaaaccagcgccgagagtcaagtgtccgagaacattttccaaacccagccactgaaccccattctggaggacgactgctcctcgacaagcggatttcccacacaggagtcatttactatggcctcctgcacctctgagagtcattcccactgggtccattccccgattgagtgcactgagcttgatctgcagaagttctcctcaagcgcatcatacaccggcgcagagacattgggaggcaacaccgtcgagtcaacgggagaccgcctcgaactcaatgttccattcgaggttccctcaccttag

SEQ ID NO: 324730 - DNA, 957 bp, Artificial Sequence
  derived and/or modified sequence
atggactgtcaagaaaacgaatattgggaccagtggggtagatgcgtgacctgccaaaggtgcggccctggccaggaactgagtaaggattgcggctacggagaggggggagacgcctactgtaccgcttgccctccacgacgttacaaatctagctggggccaccacagatgccagtcttgcattacgtgtgccgttattaacagagtccaaaaggtcaactgcacagccacgagcaatgccgtgtgcggtgattgccttccccggttctacaggaaaactagaattggcgggctgcaggatcaggaatgtattccgtgcaccaaacagacaccaacctcggaggtacagtgtgccttccagttgtcccttgtagaggccgacactcctacagtcccgcctcaggaggctaccctcgttgctctggtgtcctcactcctcgtcgtttttaccctggcctttctggggctgtttttcctgtactgcaaacagtttttcaatagacattgtcagagagagaagctgatcatatttagtgatcccgtaccagcttccctcaatttgattccggagttcgccgggggacttcttcagtttgaagccgataaaactgccaaagaggagtcacttttccctgttcccccctccaaagaaaccagcgccgagagccaggtttctgagaacatcttccagacccagccactaaatccaatactcgaggatgactgttcgagcacctccgggttccccacccaagagtctttcaccatggcctcgtgcacatccgaatctcactcccactgggttcatagcccaatagaatgcaccgaacttgatctccagaaattttctagtagcgcctcctacaccggagctgagacactcggcgggaataccgtagagtcaaccggtgacagactggaactaaatgtgccatttgaagttccgagcccttag

SEQ ID NO: 324731 - DNA, 957 bp, Artificial Sequence
  derived and/or modified sequence
atggactgccaggagaatgagtactgggaccagtggggccgctgtgtgacctgccagagatgtggccctggccaggagctgagcaaggactgtggctatggagagggcggagatgcctactgcacagcctgccccccccggcgctacaagagctcctggggccaccaccgctgccagagctgcatcacctgtgctgtgatcaacagagtgcagaaggtgaactgcacagccaccagcaatgctgtgtgtggggactgcctgccccgcttctacaggaagacccgcatcggcggcctgcaggaccaggagtgcatcccctgcaccaagcagacccccaccagcgaggtgcagtgtgccttccagctgagcctggtggaggccgacacccccaccgtgcccccccaggaggccaccctggtggccctggtgagcagcctgctggtggtgttcaccctggccttcctgggcctcttcttcctgtactgcaagcagttcttcaacagacactgccagcgggagaagctgatcatcttcagtgaccctgtgcctgccagcctgaacctgatccctgagtttgctgggggcctgctgcagtttgaagctgacaagacagccaaggaggagagcctcttccctgtgccccccagcaaggagaccagcgctgagagccaggtgtctgagaacatcttccagacccagcccctgaaccccatcctggaggatgactgcagcagcaccagcggcttccccacccaggagagcttcaccatggccagctgcaccagcgagagccacagccactgggtgcacagccccatcgagtgcacagagctggacctgcagaagttcagcagcagcgccagctacaccggggctgagaccctgggcggcaacacagtggagagcactggagaccggctggagctgaatgtgccctttgaggtgcccagcccctag

SEQ ID NO: 324732 - DNA, 957 bp, Artificial Sequence
  derived and/or modified sequence
atggactgccaggagaacgagtactgggaccagtggggccggtgcgtgacttgccagcggtgtggcccgggccaggaattatctaaagattgtggttatggtgagggtggggacgcctattgcactgcctgtcctccccggcgatacaagagttcatggggtcaccacaggtgccagtcttgtattacctgtgccgtcataaaccgggtgcagaaggtaaactgtacagccacctctaatgccgtgtgtggggactgcctgcctagattctatagaaagacaagaatcgggggcttgcaagaccaagagtgcataccatgtacgaaacaaacccctacgtccgaagtgcagtgcgcctttcagctgtctttagtggaggccgataccccgacagtcccaccccaagaggctaccttggtggctctcgtctccagtcttctggtggtctttaccctagcatttttgggcctgttctttttatactgcaagcaattcttcaaccgtcactgccaaagggaaaagctgatcatcttttcagaccccgtccccgcttcactgaacctgatacctgaattcgcaggaggccttctgcagttcgaagctgataaaacagcaaaggaagaaagcctcttcccagtccctccttccaaggagaccagcgccgagtcacaggtgtctgagaatatctttcaaacccagccactcaacccaatcctcgaggatgattgcagttccacctccggattcccaactcaggagtcttttacaatggcctcgtgcacatccgaatcgcactcccactgggtgcatagtcccatcgagtgtacagaactagatctacagaaattttcatcaagtgcctcatataccggagccgaaaccctcggaggtaataccgttgaatccactggcgatcggctggaattgaacgtacccttcgaagtgccctccccttag

SEQ ID NO: 324733 - DNA, 957 bp, Artificial Sequence
  derived and/or modified sequence
atggactgccaggagaacgagtactgggaccagtggggccggtgcgtcacctgccaacggtgtggcccagggcaggaactttctaaggactgtggctacggagaaggcggcgacgcctactgcacggcctgtcctcctcgccgctacaagagttcatggggacaccacaggtgccagtcctgcatcacctgtgcagtaattaaccgcgtgcaaaaagtaaactgcacagccacttcaaatgccgtttgcggggactgtctcccgaggttttaccgcaaaacccgcatcggcggtctgcaggatcaggagtgtatcccttgtacgaaacaaacccctacctctgaagtccagtgcgctttccagctgagtctagtagaggcagatacccctactgtccctccccaagaggccactctagtagccctggtatcgagtctcttagtggtttttacacttgcctttctgggcctgttttttctgtactgcaagcagtttttcaaccgccactgtcagcgggagaaattgattattttttcagacccggtgccagcttcattgaatttaattcctgagtttgcggggggactccttcagtttgaggccgataaaaccgccaaggaagaaagtcttttccccgtgcccccaagcaaggagaccagcgcggagagccaggtgtctgagaacatttttcaaactcaacctctgaatccaatattagaagacgattgcagttccacttccggctttcccacccaggagagcttcacgatggcgagttgcacaagcgagagtcattctcactgggtgcacagccctatcgagtgtaccgagttggatctccagaagttctccagcagtgcctcctacaccggagccgagaccctgggaggaaacaccgtggagagcacaggtgaccgtcttgaattgaacgtgccttttgaagtccctagcccgtag

SEQ ID NO: 324734 - DNA, 957 bp, Artificial Sequence
  derived and/or modified sequence
atggactgccaggagaacgaatattgggatcagtggggccgatgcgtgacctgccagagatgcgggccagggcaggagctgagtaaagactgcgggtatggtgagggaggtgatgcctattgcactgcctgtcctcccaggcggtacaaaagttcttggggtcaccaccgctgtcagagttgcatcacttgcgccgtaatcaacagagtgcagaaggtgaactgcactgccacatctaatgcagtctgcggagactgtttaccgagattctacaggaagacccgcattggaggcctgcaggaccaagagtgtatcccatgcaccaaacaaacacccacctcagaagtgcagtgcgccttccagctttccttagtagaggccgacactcccacagttccccctcaggaagccactttagtcgccctcgtgtcgtctttgctggtggttttcacactagccttcttgggactgttctttctctactgcaagcagttttttaatcgccactgccagcgcgagaagttgatcatcttcagtgacccagttcctgcctctctaaacctgattcctgagtttgctggaggcctcctccagttcgaggccgataaaaccgccaaagaggaatcactgttccccgtcccgcctagcaaggaaacttcagcagagagtcaggtgtcggagaatatcttccaaacccagccacttaatcccattctggaggacgactgttcttcaacttccggatttccgacccaggagtcgttcaccatggcttcgtgtacatctgaaagtcactcacactgggttcactcacctattgagtgcacagagctggatctgcagaagttctcatccagtgctagctacactggagctgaaactcttggcggtaacaccgttgaatctacgggagatcggcttgagttaaacgtgccattcgaagtgccctccccctag

SEQ ID NO: 324735 - DNA, 957 bp, Artificial Sequence
  derived and/or modified sequence
atggactgtcaagagaacgaatattgggaccagtggggtcggtgcgtgacttgccagagatgcggtcccggacaagagctgtccaaggactgcggttacggcgaaggaggagatgcatattgtacagcatgccctccaaggcggtacaagagcagctggggacaccatcgctgtcaatcttgcatcacctgtgcagtgattaatcgagtgcagaaggtcaattgtactgcgacctccaatgcggtatgcggggattgccttccccgattctaccgcaaaactcgcatcgggggactccaggatcaggagtgcataccctgcacgaagcaaacgcctacttcggaagttcaatgtgccttccagctctcacttgtcgaggccgatacccctaccgtaccaccccaagaagccaccttagtcgcgctcgtatccagccttctggtggtcttcaccttagcatttctgggcctattcttcctctattgcaagcagttctttaaccgtcactgtcagcgggaaaaactgatcattttctccgacccggtgccagcttctcttaaccttatcccagaattcgccggagggctgcttcaattcgaagccgataaaaccgcaaaggaggagtctctgtttcctgttccgccaagtaaagagacatctgctgaaagccaggtttccgaaaatatctttcaaacgcagcccttaaacccaattttagaagatgattgtagcagcacctctggctttcctactcaggagagttttactatggcaagttgcacaagcgagtcacactctcactgggtacactcgccaattgaatgtacagagctggacctccaaaagttctcatccagcgccagttatacaggagcagagactttaggtggcaacaccgtcgaatctacgggcgatagattagagctgaacgtccctttcgaagtgccatcaccttag

SEQ ID NO: 324736 - DNA, 957 bp, Artificial Sequence
  derived and/or modified sequence
atggattgccaagaaaatgagtactgggaccaatggggacggtgtgtcacctgccaacggtgtggtcctggacaggagctatccaaggattgtggttatggagagggtggagatgcctactgcacagcctgccctcctcgcaggtacaaaagcagctggggccaccacagatgtcagagttgcatcacctgtgctgtcatcaatcgtgttcagaaggtcaactgcacagctacctctaatgctgtctgtggggactgtttgcccaggttctaccgaaagacacgcattggaggcctgcaggaccaagagtgcatcccgtgcacgaagcagacccccacctctgaggttcaatgtgccttccagttgagcttagtggaggcagatacacccacagtgccccctcaggaggccacacttgttgcactggtgagcagcctgctagtggtgtttaccctggccttcctggggctcttcttcctctactgcaagcagttcttcaacagacattgccagcgtgagaaattgattattttctctgatccagtaccagctagcctcaatctgatacctgaatttgcaggaggtttgctgcagtttgaggctgataaaacagcaaaggaggaatctctcttccccgtgccacccagcaaggagaccagtgctgagtcccaagtgagtgagaacatctttcagacccagccacttaaccctatcctcgaggacgactgcagctcgactagtggcttccccacacaggagtcctttaccatggcctcctgcacctcagagagccactcccactgggtccacagccccatcgaatgcacagagctggacctgcaaaagttttccagctctgcctcctatactggagctgagaccttggggggaaacacagtcgaaagcactggagacaggctggagctcaatgtgccctttgaagttcccagcccttaa

SEQ ID NO: 324737 - DNA, 1014 bp, Artificial Sequence
  derived and/or modified sequence
ccggagtcccatttgggagcaagagccatctactcgtccgttaccggccttcccaccatggattgccaagaaaatgagtactgggaccaatggggacggtgtgtcacctgccaacggtgtggtcctggacaggagctatccaaggattgtggttatggagagggtggagatgcctactgcacagcctgccctcctcgcaggtacaaaagcagctggggccaccacagatgtcagagttgcatcacctgtgctgtcatcaatcgtgttcagaaggtcaactgcacagctacctctaatgctgtctgtggggactgtttgcccaggttctaccgaaagacacgcattggaggcctgcaggaccaagagtgcatcccgtgcacgaagcagacccccacctctgaggttcaatgtgccttccagttgagcttagtggaggcagatacacccacagtgccccctcaggaggccacacttgttgcactggtgagcagcctgctagtggtgtttaccctggccttcctggggctcttcttcctctactgcaagcagttcttcaacagacattgccagcgtgagaaattgattattttctctgatccagtaccagctagcctcaatctgatacctgaatttgcaggaggtttgctgcagtttgaggctgataaaacagcaaaggaggaatctctcttccccgtgccacccagcaaggagaccagtgctgagtcccaagtgagtgagaacatctttcagacccagccacttaaccctatcctcgaggacgactgcagctcgactagtggcttccccacacaggagtcctttaccatggcctcctgcacctcagagagccactcccactgggtccacagccccatcgaatgcacagagctggacctgcaaaagttttccagctctgcctcctatactggagctgagaccttggggggaaacacagtcgaaagcactggagacaggctggagctcaatgtgccctttgaagttcccagcccttaa

SEQ ID NO: 324738 - protein, 173 aa, Artificial Sequence
  derived and/or modified sequence
MSTGTNGDGVSPANGVVLDRSYPRCLPVELSGGRYTHSAPSGGHTCCTGGLLQFEADKTAKEESLFPVPPSKETSAESQVSENIFQTQPLNPILEDDCSSTSGFPTQESFTMASCTSESHSHWVHSPIECTELDLQKFSSSASYTGAETLGGNTVESTGDRLELNVPFEVPSP

SEQ ID NO: 324739 - DNA, 522 bp, Artificial Sequence
  derived and/or modified sequence
atgagcaccggcaccaacggcgacggcgtgagccccgccaacggcgtggtgctggacagaagctaccccagatgcctgcccgtggagctgagcggcggcagatacacccacagcgcccccagcggcggccacacctgctgcaccggcggcctgctgcagttcgaggccgacaagaccgccaaggaggagagcctgttccccgtgccccccagcaaggagaccagcgccgagagccaggtgagcgagaacatcttccagacccagcccctgaaccccatcctggaggacgactgcagcagcaccagcggcttccccacccaggagagcttcaccatggccagctgcaccagcgagagccacagccactgggtgcacagccccatcgagtgcaccgagctggacctgcagaagttcagcagcagcgccagctacaccggcgccgagaccctgggcggcaacaccgtggagagcaccggcgacagactggagctgaacgtgcccttcgaggtgcccagcccctag

SEQ ID NO: 324740 - DNA, 522 bp, Artificial Sequence
  derived and/or modified sequence
atgtcaacaggaaccaatggtgacggcgtctcccccgctaatggcgtggtgctggaccggagttaccctcgctgtctccctgtggagcttagcgggggaaggtacacgcattccgcgccatccgggggacacacttgttgtacaggcggcctattacagtttgaagccgataaaactgcaaaagaggaaagccttttcccagttcctccctctaaggaaacttctgctgagtcgcaagtcagcgagaatatcttccagactcagccgttaaatcccatattagaagatgattgcagctccacttctgggttccctacacaggagtccttcacaatggcatcctgtaccagtgagtcccacagtcattgggttcattccccgatagagtgcaccgaactggatctgcaaaagttctctagctccgcttcttacaccggtgctgaaaccttgggcggtaatacggtggaaagtactggagacaggctagaactaaatgtcccctttgaggttccttctccatag

SEQ ID NO: 324741 - DNA, 522 bp, Artificial Sequence
  derived and/or modified sequence
atgagcacaggcaccaatggagatggagtgtccccagccaacggggtggtgctggacaggagctacccccgctgcctgcctgtggagctgagcggcggccgctacacccacagcgcccccagcggcggccacacctgctgcaccggcggcctgctgcagtttgaggccgacaagacagccaaggaggagagcctcttccctgtgccccccagcaaggagaccagcgctgagagccaggtgtctgagaacatcttccagacccagcccctgaaccccatcctggaggatgactgcagcagcaccagcggcttccccacccaggagagcttcaccatggccagctgcaccagcgagagccacagccactgggtgcacagccccattgaatgtacagagctggacctgcagaagttcagcagcagcgccagctacacaggagctgagaccctgggcggcaacacagtggagagcactggagaccggctggagctgaatgtgccctttgaggtgcccagcccctag

SEQ ID NO: 324742 - DNA, 522 bp, Artificial Sequence
  derived and/or modified sequence
atgagcaccggcaccaacggcgacggcgtgagccccgccaacggcgtagtgctggaccgctcttacccccggtgcctgccagtggagctgtctggcgggcgctatacgcatagcgccccctccggcgggcatacctgctgcacaggcggtctgttgcagtttgaagccgacaaaacagcaaaggaggaaagccttttccccgtgcctcctagtaaggagacgtccgctgagtctcaggtgtctgaaaacatattccagactcagccgttaaacccaattctggaagacgactgctccagcacctccggattccccacacaagaaagtttcaccatggccagttgcacatccgagagtcatagccactgggttcactcccctattgaatgcaccgagctcgacctgcagaagttcagttcgtccgcaagttacactggggcagaaaccctgggtggtaacacagttgaaagcacaggagataggctagagctgaacgttcccttcgaggtaccatccccatag

SEQ ID NO: 324743 - DNA, 522 bp, Artificial Sequence
  derived and/or modified sequence
atgtcaaccggcacaaacggggacggcgtttcacccgcaaatggcgttgtgctcgaccgctcgtatccaaggtgcctgccggtggaactatccgggggtcgctacacccacagcgccccttccggaggtcatacatgttgcacgggcggacttctgcaatttgaggccgataaaacagccaaggaggagtcactctttcctgtgcccccatctaaagagacatcagctgagtcccaggtgtccgagaacattttccaaacacagccactgaaccctatcctcgaagatgattgttcatccactagtggctttccaacccaggagtcgttcactatggcctcgtgcaccagcgaatcacatagccactgggttcacagccctatagagtgcaccgaattggacctacagaagttctcttcttctgccagttacactggggcagagaccctgggtggcaacaccgtggagtctacgggtgatcggctggagttgaacgtgccatttgaggtcccgagcccttag

SEQ ID NO: 324744 - DNA, 930 bp, Artificial Sequence
  derived and/or modified sequence
ggatttgtaccggagtcccatttgggagcaagagccatctactcgtccgttaccggccttcccaccatggattgccaagaaaatgagtactgggaccaatggggacggtgtgtcacctgccaacggtgtggtcctggacaggagctatccaaggtgccttccagttgagcttagtggaggcagatacacccacagtgccccctcaggaggccacacttgttgcactggaggtttgctgcagtttgaggctgataaaacagcaaaggaggaatctctcttccccgtgccacccagcaaggagaccagtgctgagtcccaagtgagtgagaacatctttcagacccagccacttaaccctatcctcgaggacgactgcagctcgactagtggcttccccacacaggagtcctttaccatggcctcctgcacctcagagagccactcccactgggtccacagccccatcgaatgcacagagctggacctgcaaaagttttccagctctgcctcctatactggagctgagaccttggggggaaacacagtcgaaagcactggagacaggctggagctcaatgtgccctttgaagttcccagcccttaactctaatgaggtctcttgggcccctggcagccttgcccagttgttctctctggactctgttcctataccacaacagcagcaggggcctgaaatgtgatgtccacaagagctaataccctacagatggggcatatcctatcccatcccaccagaggattgattctccatttcacaaggactgatctggagcatttcttgcttcccttttgtagtctggggagccagattccacattcatgggactaccagacatgttcctagctcaacttgattatagagaagaggagagaggacagtgaatggggtagggttttcatgtctgcatt

SEQ ID NO: 324745 - DNA, 549 bp, Artificial Sequence
  derived and/or modified sequence
atggccgtgaccggcgtgcagtgcagcgagagatgcaagcagaccagaagagtggacagcagcagcggcaagtggctggccacccccctgatctgggagaagctgaactggcccagcagaagccagagccagaacctgcaccccttcagaatcctgcccaacggcctgaccctgcccggcgcccaggagagacccggctacctgctggccgccctgcccaacccctgcgcccccagaccctaccaggtgcactgggtgcacgtggccgtgctgatcgccgtgctgctgcagcagctgccccagagcagatgcctgagactgcccctgcccggcggcggcggcggccagagagccctgcagggcagactgaagacccaggccggcaagagaggcgtgagaaagagaggcggctggagagagagagagagacccagcgccgaccccggcgagagaggcctgagagtgggcgcccaggtgcagaaccccagagcccccagaaagatcttcgccatccccgccaccagcaaggtgcagctgagacccatgtag

SEQ ID NO: 324746 - protein, 691 aa, Artificial Sequence
  derived and/or modified sequence
MDGCKKELPRLQEPEEDEDCYILNVQSSSDDTSGSSVARRAPKRQASCILNVQSRSGDTSGSSVARRAPKRQASSVVVIDSDSDEECHTHEEKKAKLLEINSDDESPECCHVKPAIQEPPIVISDDDNDDDNGNDLEVPDDNSDDSEAPDDNSDDSEAPDDNSDDSEAPDDNSDDSEAPDDNSDDSDVPDDNSDDSSDDNSDDSSDDNSDDSDVPDDKSDDSDVPDDSSDDSDVPDDSSDDSEAPDDSSDDSEAPDDSSDDSEAPDDSSDDSEAPDDSSDDSEASDDSSDDSEASDDSSDDSEAPDDKSDDSDVPEDKSDDSDVPDDNSDDLEVPVPAEDLCNEGQIASDEEELVEAAAAVSQHDSSDDAGEQDLGENLSKPPSDPEANPEVSERKLPTEEEPAPVVEQSGKRKSKTKTIVEPPRKRQTKTKNIVEPPRKRQTKTKNIVEPLRKRKAKTKNVSVTPGHKKRGPSKKKPGAAKVEKRKTRTPKCKVPGCFLQDLEKSKKYSGKNLKRNKDELVQRIYDLFNRSVCDKKLPEKLRIGWNNKMVKTAGLCSTGEMWYPKWRRFAKIQIGLKVCDSADRIRDTLIHEMCHAASWLIDGIHDSHGDAWKYYARKSNRIHPELPRVTRCHNYKINYKVHYECTGCKTRIGCYTKSLDTSRFICAKCKGSLVMVPLTQKDGTRIVPHV

SEQ ID NO: 324747 - DNA, 2076 bp, Artificial Sequence
  derived and/or modified sequence
atggacgggtgcaaaaaggagctgcctagactgcaggagccagaagaggatgaggactgttatattctgaacgttcaatcttcatccgatgatacaagcgggagctccgtggcccggcgagcacccaagaggcaggcaagctgcattctgaacgtgcagtcgcgcagtggggacacctctggatccagtgtggcacgaagagcacccaaacggcaggccagttcggtggttgtgattgacagcgatagcgatgaagaatgtcatacgcatgaggaaaagaaagctaagctgctcgaaatcaactccgatgacgagagtcctgagtgttgccacgtgaaaccagctattcaagagcctcccatcgtcataagtgatgatgataatgacgatgacaatggaaacgacctggaggtgcctgacgataactccgacgattcggaagcacctgatgataattcagatgattctgaagctcctgacgataacagtgacgattccgaagcaccagacgacaacagcgacgactctgaggcacccgacgacaactctgatgactctgatgtccccgatgacaacagcgacgactcatcggatgacaattcggacgactcctctgatgacaatagcgatgattcagacgtgcctgatgacaaatccgacgactctgatgtgcccgatgactcctctgatgattcggatgtgccggatgatagtagtgacgatagcgaagccccagatgattcatctgacgattctgaggcacccgacgacagctcagatgacagtgaggctccagatgactccagcgacgactctgaggctccagatgatagctccgacgatagcgaagcctctgacgatagcagtgatgacagcgaggcgagcgatgactccagtgacgatagtgaagcccccgacgataagtccgacgattctgatgttccagaggacaagtctgacgatagtgatgtccccgacgataattcagacgacctggaggttcctgttcccgctgaggacctctgtaatgaggggcaaatcgcctcagatgaagaagagctggtggaggcagccgcagcagtgtctcagcatgactcatctgacgacgcaggggagcaagatttgggggagaacttatcgaagccaccttccgaccccgaggccaacccagaggtaagtgaaaggaagctgcccaccgaagaagaaccagcaccagtggtggagcaatctggcaaacgcaagagcaagacaaagacaattgtggaacccccacgtaagcggcagacgaaaacaaagaacattgtggaaccacctcggaagagacagacaaagactaagaatatcgtagagcccctgaggaaacgtaaagcgaaaaccaagaacgtgtcagtgaccccaggccacaagaaaagggggcctagcaaaaaaaaaccaggcgcagctaaggtggaaaagcgaaagacaaggactcccaaatgtaaagttcctggatgtttcctccaggatcttgagaagagcaagaagtacagcggcaagaacttgaagcgtaacaaggacgaattggttcagcgtatctacgacctgtttaaccgtagcgtgtgtgacaaaaagttgcccgaaaaactacgtattggatggaacaacaaaatggttaagacagccgggctttgcagcactggggaaatgtggtaccctaagtggcggaggttcgccaagatacagattgggctgaaggtatgtgactccgcggacaggataagggacacactgatccatgaaatgtgtcatgctgcatcttggctcatcgacggtatccacgatagccatggcgacgcttggaagtactacgcccggaagagcaatagaattcaccccgagctaccccgcgtcactcgatgtcacaactataagattaactacaaggttcactatgagtgcacaggttgcaagacccgaattggctgctacaccaaatccctcgatacaagccggtttatctgcgcaaaatgtaaaggcagcctggtaatggtaccccttacacagaaggatggaacccgtatcgtcccacacgtgtag

SEQ ID NO: 324748 - DNA, 2076 bp, Artificial Sequence
  derived and/or modified sequence
atggatgggtgcaaaaaggagcttccgaggcttcaggaaccagaggaagatgaggactgctatatcttgaatgtgcaatcttctagcgatgacacgtctggctcctctgtggccaggagggcccctaaaaggcaggccagctgtatcctcaacgtgcaatcgagaagtggagatacaagcgggtctagcgtggcacgtagagcacctaagaggcaagcctcatcagtggtggtaattgactccgactctgacgaggaatgtcatacacacgaggaaaaaaaggctaaactgctggagataaacagcgatgacgagagcccagagtgctgtcacgtgaaacctgctatccaggagccgcccatcgtgatttctgatgacgacaatgatgatgacaacggcaatgacttagaggtgcctgatgacaatagcgacgacagcgaagcccccgatgataacagtgatgatagcgaagctcctgacgataatagtgacgacagtgaagcacctgatgacaactcagacgattctgaggccccagatgataacagcgacgattccgatgtgccagatgacaactctgacgactcctctgatgacaactccgatgatagcagcgatgacaattccgacgactcagatgtccctgacgacaagagcgacgactctgatgtccccgatgacagcagcgatgatagcgacgtgcctgatgactcttctgacgattctgaggcgccagatgattcctctgacgacagcgaagcccctgatgattccagcgacgattcggaagccccagacgactccagtgatgattcagaagctccggatgacagtagcgacgacagcgaggcgtcagacgactcctcagatgactcagaagccagcgacgactcctccgacgattctgaggctcctgacgataagtctgacgactcagatgtccccgaagataagagcgatgactctgatgtgcccgatgacaattctgacgatttggaggtccccgttcctgccgaagacctttgtaatgagggtcagattgcttccgatgaagaggagctggtcgaagctgctgctgccgtgtctcagcacgactcctccgatgatgctggagagcaagatctcggcgaaaacttatccaagccaccgagtgatccagaggctaaccctgaagtctcagagaggaaactgcccacagaggaggagcctgcccctgtggtggagcagagtggtaaacgaaagagtaaaactaaaacaattgttgaaccgcctcgcaagcgccagacgaagactaagaacatcgtggaacccccacggaagcggcaaacaaagactaagaatatcgtggaaccactgcgaaaaagaaaggccaaaacgaaaaacgtgtccgtcactccaggtcataaaaaacgaggacccagtaagaaaaagcctggcgccgctaaagtggagaagaggaaaacgcgcaccccgaagtgtaaggtgccaggatgctttcttcaggaccttgaaaagagcaagaaatacagcggaaaaaaccttaaacggaataaggacgaactggtccagcgaatttacgaccttttcaatcgttcagtgtgtgataaaaaactgcccgaaaagcttaggattggatggaacaataaaatggtcaaaaccgccgggctctgttccacaggcgaaatgtggtaccccaagtggcgccgcttcgccaagatccagatcggactcaaggtttgcgactcagcagacagaattcgagataccctcatccacgagatgtgccacgcggcaagttggttgatagatggcatccatgattcccatggtgacgcctggaagtattacgcccgcaaatctaaccgaatccatcctgaacttcccagagtcacccgttgccacaactacaaaatcaactataaagtccattacgaatgtacagggtgtaagacacgtatcggttgctatacaaaaagcctggacacttcccgctttatatgcgccaaatgcaaaggaagcctggtgatggtgcccctaacacagaaggacggcactagaattgtcccacacgtttag

SEQ ID NO: 324749 - DNA, 2076 bp, Artificial Sequence
  derived and/or modified sequence
atggatggctgcaagaaggagctgccccggctgcaggagcctgaggaggatgaggactgctacatcctgaatgtgcagagcagcagtgatgacaccagcggcagctctgtggcccggcgggcccccaagaggcaggccagctgcatcctgaatgtgcagagccgcagcggggacaccagcggcagctctgtggcccggcgggcccccaagaggcaggccagctctgtggtggtgattgacagcgacagtgatgaggagtgccacacccatgaggagaagaaggccaagctgctggagatcaacagtgatgatgagagccctgagtgctgccacgtgaagccagccatccaggagccccccatcgtcatcagtgatgatgacaatgatgatgacaatggaaatgacctggaggtgcctgatgacaacagtgatgacagcgaggccccagatgacaacagtgatgacagcgaggccccagatgacaacagtgatgacagcgaggccccagatgacaacagtgatgacagcgaggccccagatgacaacagtgatgacagtgatgtgcctgatgacaacagtgatgacagcagtgatgacaacagtgatgacagcagtgatgacaacagtgatgacagtgatgtgcctgatgacaagagtgatgacagtgatgtgcctgatgacagcagtgatgacagtgatgtgcctgatgacagcagtgatgacagcgaggccccagatgacagcagtgatgacagcgaggccccagatgacagcagtgatgacagcgaggccccagatgacagcagtgatgacagcgaggccccagatgacagcagtgatgacagcgaggccagtgatgacagcagtgatgacagcgaggccagtgatgacagcagtgatgacagcgaggccccagatgacaagagtgatgacagtgatgtgcctgaggacaagagtgatgacagtgatgtgcctgatgacaacagtgatgacctggaggtgcctgtgcctgctgaggacctgtgcaatgaaggccagatcgccagtgatgaggaggagctggtggaggccgctgctgctgtgtcccagcacgacagcagtgatgatgctggggagcaggacctgggggagaacctgagcaagccacccagcgaccctgaggccaaccctgaggtgtctgagaggaagctgcccacagaggaggagcccgcccctgtggtggagcagagcggcaagaggaagagcaagaccaagaccatcgtggagccccccaggaagaggcagaccaagaccaagaacatcgtggagccccccaggaagaggcagaccaagaccaagaacatcgtggagcccctgaggaagaggaaggccaagaccaagaatgtgtctgtgaccccaggccacaagaagaggggccccagcaagaagaagccaggggccgccaaggtggagaagaggaagaccaggacccccaagtgcaaggtgcccggctgcttcctgcaggacctggagaagagcaagaagtacagcggcaagaacctgaagaggaacaaggatgagctggtgcagaggatctatgacctcttcaacagatctgtgtgtgacaagaagctgcctgagaagctgcgcatcggctggaacaacaagatggtgaagacagctggcctgtgcagcactggagagatgtggtaccccaagtggaggagatttgccaagatccagatcggcctgaaggtgtgtgacagcgctgaccgcatccgggacaccctcatccacgagatgtgccacgccgcctcctggctgattgatggcatccatgacagccatggagatgcctggaagtactatgccaggaagagcaaccgcatccaccctgagctgccccgggtgacccgctgccacaactacaagatcaactacaaggtgcactatgaatgtacaggctgcaagaccagaattggctgctacaccaagagcctggacaccagccgcttcatctgtgccaagtgcaagggcagcctggtgatggtgcccctgacccagaaggatggcaccagaattgtgccccacgtgtag

SEQ ID NO: 324750 - DNA, 2076 bp, Artificial Sequence
  derived and/or modified sequence
atggacggctgcaagaaggagctgccccggctgcaggagcccgaggaggacgaggattgctacatcctgaatgttcaaagctccagcgacgatacgtcgggtagctcagttgccagacgggcccccaaaaggcaggcctcttgcatcctgaacgtacagtctcgcagcggggatacatcaggatccagcgttgctcgtcgcgcacctaagcgtcaagccagcagtgtggtggtcatagactcagactctgacgaggagtgccacacacacgaagaaaaaaaggcaaagctgttggagatcaacagcgatgacgaaagccccgaatgctgtcatgtgaagcctgcaatccaggagccacctattgtcatttcggatgacgacaatgacgatgacaatgggaacgatcttgaggttcctgacgataacagcgacgactcagaagcgcccgacgataattcagacgattccgaagcacctgacgacaactccgacgactccgaagcccccgatgacaactccgacgattctgaggcacccgatgacaatagtgacgactcagatgtgcccgatgataactctgacgattcttcagatgataacagcgacgacagctctgacgacaattccgatgactcggacgtgcctgatgataagtccgatgatagtgacgtcccagatgacagcagtgacgatagcgatgtgcccgacgactccagtgacgactcggaggctcctgatgacagctccgacgacagtgaggccccggacgattcctctgatgattccgaagcgcccgatgacagcagtgatgacagcgaagcgccagatgattcctccgatgatagtgaagcaagtgatgattctagtgatgacagcgaggccagtgacgactcttcagatgactctgaagccccagacgataaatcggacgactctgatgtccccgaagataaatccgatgacagcgacgtcccagatgacaactctgatgacctcgaggtgccagtgcccgcagaagacctgtgtaacgagggacagattgccagcgatgaagaagagctagtggaggcggccgctgcagtctctcagcacgattcaagcgacgatgcgggagagcaggacctgggcgaaaacctatctaaacccccaagcgatcccgaggctaaccccgaagtgagcgaaaggaagctgcctacagaggaagagcctgctccagtggtcgaacagtcaggcaaaagaaagagcaagactaaaaccatcgtcgaaccaccccggaaacgtcaaacaaaaaccaaaaacattgtggagccgccacgtaaacggcaaacaaaaaccaagaacatcgtagagccactgagaaaacggaaagccaaaactaagaacgtgtcggtaacccctggccataagaaacgtggcccatctaaaaagaaacctggggctgctaaagtggagaagagaaagaccaggacccctaaatgtaaagttcctggttgttttctgcaagaccttgaaaagtctaagaaatattcaggaaaaaatctcaagagaaacaaagacgagcttgtgcagcggatttatgacctgttcaatcggtctgtttgcgacaaaaaactgccagaaaagctacggatcggttggaacaacaagatggttaaaactgctggcctatgttccacgggtgagatgtggtatcccaagtggcgcaggtttgcaaagattcagatcggcctcaaggtatgtgattccgcggaccgcatccgcgacactctgattcacgaaatgtgccatgcagcctcttggctcatcgatggtatacacgactcccacggagacgcgtggaagtattatgcccgcaaatccaaccgaatccaccccgagttaccaagagtgactcgctgtcataattataaaattaactacaaagttcactacgaatgcactggatgcaaaacccgaattgggtgctatacaaagtctctcgatactagtagattcatctgtgccaagtgcaaaggaagtctggtcatggttcctctgacacagaaggacgggactcgtattgtgccccacgtctag

SEQ ID NO: 324751 - DNA, 2076 bp, Artificial Sequence
  derived and/or modified sequence
atggacggctgcaagaaggagctgccccggctgcaggagcccgaggaggacgaagattgctacatactcaatgttcagtctagctccgacgacacatctggctctagcgtcgcacggagagccccgaagaggcaagccagctgcattctgaacgtccagagcagatccggggacacatctggtagctccgtggctagaagggccccaaagcggcaagcctcgtctgtggtagtgatagactccgattcagatgaggagtgccacacacatgaagagaagaaagcaaaacttttggaaattaactcagacgacgaaagtcctgagtgttgtcacgtgaagccagccattcaggagcctcccatagtgatcagcgatgatgacaatgatgacgacaatggaaatgatctggaagtccctgatgacaattcggatgacagcgaggcacccgacgacaactcagatgacagcgaagcccctgacgataactctgatgacagtgaggccccagatgacaatagcgacgactccgaagcacctgacgacaacagtgatgattctgacgttcccgatgataatagtgatgacagttctgacgacaattcggatgactctagcgatgacaactctgacgactctgatgtgccagacgataaaagtgatgatagcgatgtacctgacgactctagcgacgacagcgatgtccccgatgactcgtctgacgatagtgaagcaccagacgattccagcgatgattccgaggccccagacgattcgagcgacgattccgaggccccagatgattcttctgatgacagcgaggcgccagacgacagctcagacgattcagaagccagcgatgattcatctgacgattctgaagcatccgacgacagtagcgatgactctgaggccccagacgataagagtgacgactcagatgtgccagaggacaagtcggacgactccgatgtgccagatgataattctgatgatttagaagttcccgtccctgccgaggacctgtgcaacgagggccagatcgcgtccgatgaagaagagctggttgaggcagctgctgcagtgtcgcagcacgattccagtgatgatgctggagagcaggatctgggggagaacctgtccaagccaccctcagatcccgaagccaaccctgaggtgtccgagcgcaagttgccaaccgaagaggagccagcgcccgtagtggaacagtcgggaaaacgaaagagcaagacaaaaactatagtagagcctccgagaaaacggcagaccaagaccaagaacattgtagagccccctaggaaacggcaaacgaaaaccaaaaacattgtcgagcccctgcggaagcgaaaagccaaaacgaagaatgtgtccgtgactccgggacataaaaagcgtggtccctccaagaaaaaacccggggccgccaaggtggagaaaagaaagacacggacaccaaaatgcaaggtgccaggctgcttcctgcaggacctggaaaagagcaaaaaatactctgggaagaatttgaaaagaaataaggacgaactggttcaacggatctacgacctgtttaatagaagtgtgtgcgataaaaaactgccagaaaagctgagaattggctggaataataagatggttaagacggcaggcctgtgtagcaccggggagatgtggtatcccaaatggcgccggttcgctaaaatacagattggactcaaagtgtgcgacagtgccgaccgtatccgcgataccttgattcacgagatgtgtcatgccgcctcatggcttatcgatgggatacacgattctcacggggatgcctggaaatattatgcccggaagtccaaccggatccatcccgaacttccccgcgtcactcgatgccataactacaaaatcaactataaggtgcattatgaatgcacgggatgcaaaactcgtataggatgctacaccaaaagtctggatacttcacggtttatctgcgcaaagtgcaaggggagcctggttatggtccccctgactcagaaggacggtacaaggatagtgcctcacgtatag

SEQ ID NO: 324752 - DNA, 2076 bp, Artificial Sequence
  derived and/or modified sequence
atggacgggtgtaaaaaggagctaccgcgacttcaggaaccagaagaagacgaggattgttacattctgaatgtgcagagttcatccgacgatactagcggatcctcagttgccagacgggctccaaagcggcaggcaagctgtatcctgaacgtgcaaagtaggtccggagataccagtggatcaagcgttgctaggcgtgcccctaaaagacaggcgagcagcgtggtagttattgattctgatagcgacgaggaatgccacactcacgaagagaaaaaagccaaactgctggagatcaatagcgatgatgaatcccccgaatgctgtcacgtgaagcccgctattcaagagcctcctatcgtgatctcagacgacgataatgacgatgacaacggtaacgatctggaagtacccgatgataactccgacgattccgaagctcctgatgataattccgacgactctgaggctcctgacgacaattccgacgactccgaagcccctgacgacaattcagacgactccgaggctcctgacgacaatagcgatgattccgatgttcctgacgacaattccgacgattcaagcgatgacaatagcgatgacagttctgacgacaactccgatgattccgatgtccccgatgataagagtgacgactctgacgtccctgatgatagctccgacgattccgacgtgccagatgatagctctgacgacagcgaagctcctgacgattccagcgatgacagcgaggcacctgacgactcgtctgatgacagcgaggcacctgacgacagctcagatgactccgaagcacctgacgattcttctgatgacagcgaggctagtgatgattcctcggatgattctgaggcgagcgacgacagctcagacgatagtgaggcacccgacgacaaatcagatgactctgacgtgcccgaggataaaagcgatgacagcgatgtccccgatgacaattcagatgacttggaggtccctgttcccgctgaggacttgtgcaacgaagggcagatcgcctccgatgaggaggagctcgtggaggccgctgccgcagtctctcaacacgactcttctgacgacgccggagagcaggacctcggagaaaacctgtctaagcccccaagcgatcccgaggccaatcccgaggtgtctgaacggaagctccctacagaggaggagcctgctccagtagtcgaacaatcagggaaacgcaaaagcaagactaaaactatagtggagccacctaggaaacgccagaccaagactaagaacatagtggagccaccacggaaaaggcagaccaaaacaaagaatatcgtggaaccactgaggaagcggaaggctaagactaagaacgtaagcgtgactccagggcacaagaagcggggtccgtcaaagaagaaacccggtgctgcgaaagttgaaaagcggaagactcgaacccctaagtgcaaggtgccaggctgtttcttgcaggacctggaaaaatcaaagaaatattcaggcaagaatctgaagcgcaacaaagacgaactggttcagcggatctacgatcttttcaatagatccgtctgcgataagaaattgccggagaaacttcgaattggctggaacaataaaatggtgaagactgccggtctgtgcagcaccggcgagatgtggtaccccaaatggcgcagatttgccaagattcaaattggactgaaggtctgcgactcagcagacaggattagagataccctcattcacgaaatgtgccatgctgcaagctggctcattgatggtatccacgacagtcacggtgatgcctggaaatattacgccagaaagtctaatcgtatccatccagagcttcccagggttactcggtgccacaattacaagataaactataaagtgcactatgagtgtactggctgcaagacccgcataggatgttatacaaagtcactggatacatcccgctttatctgtgccaaatgtaaaggcagcttggtgatggtgccactgacacagaaggatgggacgcggatcgttccgcatgtttag

SEQ ID NO: 324753 - DNA, 2076 bp, Artificial Sequence
  derived and/or modified sequence
atggacggttgtaagaaagagctgcccaggctacaggagcctgaggaggatgaagattgttacattctcaatgttcagagttctagcgatgacacctcaggcagctctgtagcacgacgggctcccaagcgccaggcttcctgcattttgaatgtgcagagccgctccggcgacactagtggatcaagcgtggcccgacgggctccaaagcggcaggcctcctctgttgtcgtgattgactccgatagtgatgaggagtgccacactcacgaggaaaagaaggcaaaactgttggaaattaactcggatgacgagtcacccgagtgctgccatgtcaagcccgctattcaggagccacccatcgtgataagtgatgatgacaacgatgacgacaatggcaatgatctggaggttcctgatgataattcagatgactcggaagctccggatgataatagtgatgattcagaagctcctgacgacaatagcgacgacagtgaggctcctgacgataactccgacgacagcgaagcaccagatgacaactctgacgattccgatgtacccgacgataattccgacgactcgtcagatgataattccgatgactcgtctgatgacaattctgacgactctgacgtcccagacgacaaatccgatgacagtgatgttccagacgacagctctgacgattccgatgtccccgatgattcttcagatgattccgaggctcccgacgactcctcagacgacagtgaggcaccggacgactccagcgacgattcagaggcacccgacgactctagtgacgacagcgaagcccctgacgacagctcagacgattccgaggcctccgacgacagctcagacgactcagaagcttctgatgattcctctgacgactcagaagcccctgatgacaaaagtgatgatagtgacgttcccgaggacaagtcagatgattctgatgtccccgacgataatagtgacgacctggaggttccagtccctgcagaagacttgtgcaatgaaggtcagattgcttccgacgaggaagagctggttgaagctgccgctgctgtatcccagcacgactcctcagatgatgctggagagcaggacctgggcgagaatctgagcaaacctccaagtgatccggaggctaatcctgaggtctccgagcgcaagcttcctacagaggaggagcctgcaccagttgttgaacagagcggcaaacgcaaatccaagacaaaaacgatagtagaaccacccaggaagagacagacaaagactaagaacatcgtagagccccctcgaaaacgacagacaaagacaaagaacatcgttgagcctctgaggaagcgcaaggctaaaactaaaaatgtatcagtcacacctgggcacaagaagcgcggaccttccaaaaagaaacctggcgctgctaaggtggagaagcgaaagacccggacacctaagtgtaaagtgccaggctgctttttacaagacctcgagaagtctaaaaagtatagcgggaagaacctcaagcggaataaagacgaactggtccaaagaatatacgacctgtttaacagatctgtgtgtgataagaagctccctgaaaagcttcgaattgggtggaataataagatggtgaaaacagcagggttgtgctcaacaggcgagatgtggtatccaaagtggcgcaggttcgctaagattcagattggattgaaagtgtgcgacagcgcggatcgaattcgcgacactcttatccatgagatgtgtcatgctgcaagttggctgattgatggcatccacgatagtcacggagatgcatggaagtattatgcaaggaaatcgaatagaatccaccccgaactgccgagggtgacaaggtgtcacaactataagatcaactacaaagtgcactacgaatgtacgggctgtaaaacccgcatcggatgctacacaaagtcgcttgataccagtcgatttatttgcgcgaagtgcaagggaagtctggtgatggtgcctttaacacaaaaagacggtactaggatcgttccgcacgtgtag

SEQ ID NO: 324754 - DNA, 3213 bp, Artificial Sequence
  derived and/or modified sequence
gattggggtggtagaggcctgagtgggaaaagtttgcaacaaaacaaatttaaatccttttcattttgcagagcaaagtttcggctttaaggtggggaagatacccaaagataaatgcagaatgtaaatgtagagatgtctctgcttttgagttctggctttcttttttttttctttttattttattttctttttctttttcttttttgagatggagtctagctctgtggcccaggctggagtgcagtggcacaatctcggctcactgcaagctctgcctcccgggttcacgccattttcctgcctcagcctctcgagtagctgggactacaggcgcccgccaccacgcctggctaattttttgtatttttaatagagatagggtttcaccgtgttagccaggatggtctcgatctcatgacattgtgatctgcccgcctcggcctcccaaagtgctgggattataggcgtgagccactgcgcccggccgagttctggctttcttaagaaagtgtatctttgtctttcactacagacatggatgggtgcaaaaaagagctgccccgcttgcaagagccggaggaggacgaggattgttacatccttaatgttcagtcaagcagtgatgacaccagtgggtcttctgtggccagaagagctccgaagagacaggcgagttgcatccttaatgtccagtcaaggagtggtgacaccagtgggtcttctgtggccagaagagctccgaagagacaggcgagctccgtggtagtgattgactctgattctgatgaggaatgtcacacccatgaagagaagaaagctaagttattggaaataaacagcgacgatgagagtccggagtgttgtcatgtgaagcctgccatccaggaacctccaatagttattagtgatgatgacaatgacgatgacaacggtaatgatttggaagttcccgacgacaacagtgatgattcagaagctcccgacgacaacagtgatgattcggaagctcctgacgacaacagtgatgattcggaagctcccgacgacaacagtgatgattcggaagctcccgacgacaatagtgatgattcggatgttcccgacgacaacagtgatgattcatccgacgacaacagtgatgattcatccgacgacaacagtgatgattcggatgttcccgacgacaagagtgatgattcggatgttcccgacgacagcagtgatgattcggatgttcccgacgacagcagtgatgattcggaagctcccgacgacagcagtgatgattcggaagctcccgacgacagcagtgatgattcggaagctcccgacgacagcagtgatgattcggaagctcccgacgacagcagtgatgattcggaagcttccgacgacagcagtgatgattcggaagcttccgacgacagcagtgatgattcggaagctcccgacgacaagagtgatgattcggatgttcccgaagacaagagtgatgattcggatgttcccgatgacaatagtgatgatttggaagttcctgtgccagcagaagatttgtgtaatgaaggccaaattgcttcagatgaagaagagctggttgaggctgctgctgctgtctcccagcatgattcatctgatgatgctggtgagcaggatcttggtgagaatctcagcaaaccaccaagtgatcctgaggctaaccctgaagtttcagagagaaagctgccaactgaggaagagcctgcacctgtggtggaacaatcagggaaaaggaagtcaaaaaccaaaactattgtggagccaccgaggaaaaggcagacaaagaccaaaaatatagtggagccaccaaggaaaaggcagacaaagaccaaaaatatagtggagccactgaggaagaggaaggcgaaaaccaaaaatgtatctgtgacacctggacataagaagcgtgggccttcaaagaagaaacccggtgcagcaaaagttgaaaaacgcaagactaggactcctaaatgcaaagtccctggatgtttcttgcaagaccttgaaaagtcaaagaaatactctggaaaaaatttaaagcgaaataaggatgaattggttcagagaatctacgacctgtttaacagatccgtctgtgataaaaagctgccagagaaactacgcataggctggaataacaagatggtgaaaactgctggcttatgcagcactggtgagatgtggtacccaaagtggcggcgctttgccaagatccagattggcttgaaagtctgcgactctgcagaccgaatccgggataccttgatccatgaaatgtgccatgctgcctcctggctgattgatggtatccatgattctcatggtgacgcatggaagtattatgccaggaaatccaacaggatacacccggagctgcccagggtcacccgttgccataactataagattaactacaaggtccattatgaatgtactggatgcaaaacgaggattggctgctacaccaaatcgttggacaccagccgcttcatctgtgccaaatgcaaggggtctctggtcatggtgccattaactcagaaagatgggacccgtattgtgccccacgtgtgaccatttgctgtgtatgtgcagaagtattatagaaaaattatgcaggagatggctaggattagccttggggatgtgatgaaaacacttggcaggaattacaaggcaatgaagaattcttaaggttatcttagagtatattaatgtgagctatatcctttactggtaagaagttttagaaaagtttgttttgtgaagttaggaatattagaatttaggtactgttaagtaagtaatgttagaatttaagattcatgttattaacgatgattgaccttaaatagggactctattgctaaccattctgtgcccttgacagggtatttctgaagcccttgggatctaccttgggtcttacttgagttccatatttttcacatgtagaacaaaatgcaaaagaaaagtgagttttcaagagtggcaggttgagagaggagaatgctggaaagaggacaagtttgagaggcaacacttaaacactagggctactgtggcatctatgtagacaggaaagacaaacgtgtttcataaaattcgttgttgatggtattgattgaaactatctgagccatgtaatcaaaaaataaaagttttctgcatctt

SEQ ID NO: 324755 - DNA, 2791 bp, Artificial Sequence
  derived and/or modified sequence
aaaggggcctgcgcctggcgttgttcatcgcagttgctccggatctttgcacacactccacgggcagttggaggtgagctgctgccggccacgccagaggctgcaacaccagacatggatgggtgcaaaaaagagctgccccgcttgcaagagccggaggaggacgaggattgttacatccttaatgttcagtcaagcagtgatgacaccagtgggtcttctgtggccagaagagctccgaagagacaggcgagttgcatccttaatgtccagtcaaggagtggtgacaccagtgggtcttctgtggccagaagagctccgaagagacaggcgagctccgtggtagtgattgactctgattctgatgaggaatgtcacacccatgaagagaagaaagctaagttattggaaataaacagcgacgatgagagtccggagtgttgtcatgtgaagcctgccatccaggaacctccaatagttattagtgatgatgacaatgacgatgacaacggtaatgatttggaagttcccgacgacaacagtgatgattcagaagctcccgacgacaacagtgatgattcggaagctcctgacgacaacagtgatgattcggaagctcccgacgacaacagtgatgattcggaagctcccgacgacaatagtgatgattcggatgttcccgacgacaacagtgatgattcatccgacgacaacagtgatgattcatccgacgacaacagtgatgattcggatgttcccgacgacaagagtgatgattcggatgttcccgacgacagcagtgatgattcggatgttcccgacgacagcagtgatgattcggaagctcccgacgacagcagtgatgattcggaagctcccgacgacagcagtgatgattcggaagctcccgacgacagcagtgatgattcggaagctcccgacgacagcagtgatgattcggaagcttccgacgacagcagtgatgattcggaagcttccgacgacagcagtgatgattcggaagctcccgacgacaagagtgatgattcggatgttcccgaagacaagagtgatgattcggatgttcccgatgacaatagtgatgatttggaagttcctgtgccagcagaagatttgtgtaatgaaggccaaattgcttcagatgaagaagagctggttgaggctgctgctgctgtctcccagcatgattcatctgatgatgctggtgagcaggatcttggtgagaatctcagcaaaccaccaagtgatcctgaggctaaccctgaagtttcagagagaaagctgccaactgaggaagagcctgcacctgtggtggaacaatcagggaaaaggaagtcaaaaaccaaaactattgtggagccaccgaggaaaaggcagacaaagaccaaaaatatagtggagccaccaaggaaaaggcagacaaagaccaaaaatatagtggagccactgaggaagaggaaggcgaaaaccaaaaatgtatctgtgacacctggacataagaagcgtgggccttcaaagaagaaacccggtgcagcaaaagttgaaaaacgcaagactaggactcctaaatgcaaagtccctggatgtttcttgcaagaccttgaaaagtcaaagaaatactctggaaaaaatttaaagcgaaataaggatgaattggttcagagaatctacgacctgtttaacagatccgtctgtgataaaaagctgccagagaaactacgcataggctggaataacaagatggtgaaaactgctggcttatgcagcactggtgagatgtggtacccaaagtggcggcgctttgccaagatccagattggcttgaaagtctgcgactctgcagaccgaatccgggataccttgatccatgaaatgtgccatgctgcctcctggctgattgatggtatccatgattctcatggtgacgcatggaagtattatgccaggaaatccaacaggatacacccggagctgcccagggtcacccgttgccataactataagattaactacaaggtccattatgaatgtactggatgcaaaacgaggattggctgctacaccaaatcgttggacaccagccgcttcatctgtgccaaatgcaaggggtctctggtcatggtgccattaactcagaaagatgggacccgtattgtgccccacgtgtgaccatttgctgtgtatgtgcagaagtattatagaaaaattatgcaggagatggctaggattagccttggggatgtgatgaaaacacttggcaggaattacaaggcaatgaagaattcttaaggttatcttagagtatattaatgtgagctatatcctttactggtaagaagttttagaaaagtttgttttgtgaagttaggaatattagaatttaggtactgttaagtaagtaatgttagaatttaagattcatgttattaacgatgattgaccttaaatagggactctattgctaaccattctgtgcccttgacagggtatttctgaagcccttgggatctaccttgggtcttacttgagttccatatttttcacatgtagaacaaaatgcaaaagaaaagtgagttttcaagagtggcaggttgagagaggagaatgctggaaagaggacaagtttgagaggcaacacttaaacactagggctactgtggcatctatgtagacaggaaagacaaacgtgtttcataaaattcgttgttgatggtattgattgaaactatctgagccatgtaatcaaaaaataaaagttttctgcatcttg

SEQ ID NO: 324756 - DNA, 2076 bp, Artificial Sequence
  derived and/or modified sequence
atggacggctgcaagaaggagctgcccagactgcaggagcccgaggaggacgaggactgctacatcctgaacgtgcagagcagcagcgacgacaccagcggcagcagcgtggccagaagagcccccaagagacaggccagctgcatcctgaacgtgcagagcagaagcggcgacaccagcggcagcagcgtggccagaagagcccccaagagacaggccagcagcgtggtggtgatcgacagcgacagcgacgaggagtgccacacccacgaggagaagaaggccaagctgctggagatcaacagcgacgacgagagccccgagtgctgccacgtgaagcccgccatccaggagccccccatcgtgatcagcgacgacgacaacgacgacgacaacggcaacgacctggaggtgcccgacgacaacagcgacgacagcgaggcccccgacgacaacagcgacgacagcgaggcccccgacgacaacagcgacgacagcgaggcccccgacgacaacagcgacgacagcgaggcccccgacgacaacagcgacgacagcgacgtgcccgacgacaacagcgacgacagcagcgacgacaacagcgacgacagcagcgacgacaacagcgacgacagcgacgtgcccgacgacaagagcgacgacagcgacgtgcccgacgacagcagcgacgacagcgacgtgcccgacgacagcagcgacgacagcgaggcccccgacgacagcagcgacgacagcgaggcccccgacgacagcagcgacgacagcgaggcccccgacgacagcagcgacgacagcgaggcccccgacgacagcagcgacgacagcgaggccagcgacgacagcagcgacgacagcgaggccagcgacgacagcagcgacgacagcgaggcccccgacgacaagagcgacgacagcgacgtgcccgaggacaagagcgacgacagcgacgtgcccgacgacaacagcgacgacctggaggtgcccgtgcccgccgaggacctgtgcaacgagggccagatcgccagcgacgaggaggagctggtggaggccgccgccgccgtgagccagcacgacagcagcgacgacgccggcgagcaggacctgggcgagaacctgagcaagccccccagcgaccccgaggccaaccccgaggtgagcgagagaaagctgcccaccgaggaggagcccgcccccgtggtggagcagagcggcaagagaaagagcaagaccaagaccatcgtggagccccccagaaagagacagaccaagaccaagaacatcgtggagccccccagaaagagacagaccaagaccaagaacatcgtggagcccctgagaaagagaaaggccaagaccaagaacgtgagcgtgacccccggccacaagaagagaggccccagcaagaagaagcccggcgccgccaaggtggagaagagaaagaccagaacccccaagtgcaaggtgcccggctgcttcctgcaggacctggagaagagcaagaagtacagcggcaagaacctgaagagaaacaaggacgagctggtgcagagaatctacgacctgttcaacagaagcgtgtgcgacaagaagctgcccgagaagctgagaatcggctggaacaacaagatggtgaagaccgccggcctgtgcagcaccggcgagatgtggtaccccaagtggagaagattcgccaagatccagatcggcctgaaggtgtgcgacagcgccgacagaatcagagacaccctgatccacgagatgtgccacgccgccagctggctgatcgacggcatccacgacagccacggcgacgcctggaagtactacgccagaaagagcaacagaatccaccccgagctgcccagagtgaccagatgccacaactacaagatcaactacaaggtgcactacgagtgcaccggctgcaagaccagaatcggctgctacaccaagagcctggacaccagcagattcatctgcgccaagtgcaagggcagcctggtgatggtgcccctgacccagaaggacggcaccagaatcgtgccccacgtgtag

SEQ ID NO: 324757 - DNA, 3483 bp, Artificial Sequence
  derived and/or modified sequence
atgtgggccatggaaagtggccacttactgtgggcgctgctgtttatgcagagtctgtggcctcagctcaccgacggggccacaagggtctattacctcggaataagggatgtgcaatggaattatgcccctaaggggcgcaacgtgattacaaaccagccgctggatagcgacatcgttgccagtagcttccttaagtctgataagaatcgtatcggcggtacttataagaagactatttacaaagaatacaaagacgacagctacactgatgaggtggcacagccagcatggctgggttttctcgggcccgttcttcaggcggaagttggagatgttattttaatacacttgaagaattttgcaacaaggccatacacaatccatccgcatggcgtattctacgaaaaagactctgagggctccctgtatcccgatggatctagcggacctctcaaggccgacgattctgtgccaccgggagggagtcacatctacaactggacaatccccgagggtcacgcaccgaccgatgcagaccccgcgtgcctcacatggatttaccattctcacgtggacgctccccgcgacatcgcaaccgggctgattggaccacttattacatgcaaacgcggcgcactcgacggaaatagtccacctcagagacaggacgtggaccacgacttctttctcctcttctctgtggtggatgaaaacttgtcctggcatttaaacgaaaacatcgcaacttactgttcagaccctgcctcggtggataaagaagacgaaacattccaagagtccaatcggatgcacgcgatcaacggattcgttttcgggaacctgcctgagctgaacatgtgtgcgcaaaagcgagtggcctggcatttatttgggatgggtaacgagatcgatgtacatacagcatttttccatgggcagatgttaacgacacgcggacaccacactgatgtcgcgaacatctttccagcaaccttcgtgaccgccgagatggtaccctgggagccgggtacatggctcatatcctgtcaggtgaattcacattttcgagatggaatgcaggcactgtacaaagtgaagagctgctctatggcgcctcccgtggatctgctgactgggaaggtccgccaatattttatagaggcccatgagattcagtgggattatggccccatgggccacgatgggtccacaggaaagaacctcagagaacccggtagcattagcgataaatttttccagaagagctcaagtcgaatcggaggcacgtattggaaagtccggtacgaagcttttcaagatgagactttccaggagaagatgcacctggaggaagatcgccacctcggaatattgggacctgtcatccgtgccgaggtcggagatacgatccaagtagtcttctataatagagctagccagcctttctctatgcagccacatggcgtcttctacgagaaggattacgaagggacagtgtacaatgatggttcatcctaccccggccttgtagcaaagcccttcgagaaggtcacctaccgctggacggtcccccctcacgctggtccaacagcacaagaccccgcctgtctgacatggatgtacttctcggctgctgaccctatccgggatacgaactctgggctggtaggccctttgctggtctgtcgagctggagcgctcggagcagacggcaaacagaaaggcgtcgacaaagaatttttcttgttatttactgtgctcgatgaaaacaagagttggtattccaacgccaaccaggcagccgctatgttagacttcaggttgttatccgaggacattgaaggatttcaagactctaatagaatgcatgccattaacggattcctgttttctaatctcccccggcttgatatgtgtaaaggggatactgtggcttggcatctgctgggcctcgggactgaaacagatgtccacggggttatgtttcaggggaacaccgtgcagctgcagggtatgcgtaagggcgctgccatgctgtttcctcacaccttcgttatggccataatgcagcccgataatctgggaacttttgaaatctactgtcaagcgggcagccacagggaagctgggatgcgagccatatataacgtgagccagtgcccaggccatcaggccactccccgtcagcgttatcaggctgcgaggatctactacataatggccgaagaagtggagtgggattattgtccggatcgctcatgggaaagggagtggcacaaccagtctgagaaggattcatatggctacattttcctgagcaacaaggacggcctcctgggctcacgctacaaaaaggccgtgtttcgagagtacaccgatggcacatttcgaataccacgtccccggacaggtcctgaggaacatctgggtatcctggggccgctgatcaaaggggaggtaggcgacatcctcacagtagtcttcaagaacaatgcttcacggccgtactctgttcatgcacacggagtactggagtccaccactgtgtggccacttgcagccgagccaggcgaagtcgtcacttaccagtggaacataccagaaagaagcggcccagggccaaatgatagtgcttgtgtctcttggatctattacagtgctgtagacccgatcaaggacatgtactcaggtctggtgggaccccttgccatctgccagaagggtattctggagcctcacggcgggaggtccgacatggatcgtgaatttgccctcctattcctcatttttgacgaaaacaaatcttggtatttagaggagaacgtggcaacgcacgggtctcaggacccagggagcatcaacctgcaggatgagaccttcctcgagtcaaacaagatgcatgccattaacggtaagctctacgcaaacttaagaggccttacgatgtaccaaggggaaagggtggcttggtacatgttggctatgggtcaggacgtggacttgcacactattcatttccacgcagagagctttttatatcggaacggagagaattatcgcgccgatgtggtggatttgttccctggaacctttgaagttgtggagatggtggcctcgaatcctgggacttggctcatgcactgccatgtcactgatcatgtgcacgcaggaatggaaacactgtttactgtcttctcccgcaccgagcacttatcgccactgaccgtgatcaccaaggagactgaaaaagtccctccacgtgatattgaggaagggaatgttaaaatgctgggaatgcagattcccattaagaacgtggaaatgctggcttccgtgctggtcgctatcagcgtaacgctgctgcttgttgtgctcgcactcgggggcgtggtgtggtaccagcacaggcagcgcaaactccgtagaaaccgtaggtcgattctggacgactcctttaaactgctctctttcaaacagtag

SEQ ID NO: 324758 - DNA, 4310 bp, Artificial Sequence
  derived and/or modified sequence
ggccctgtaaccaagatactgactgaacatggctggcggactcaggctggggtctgcagtgcagcattaatgggccgctgacatgaatatggagtagttttctctagcaaagagtaatgtgggccatggagtcaggccacctcctctgggctctgctgttcatgcagtccttgtggcctcaactgactgatggagccactcgagtctactacctgggcatccgggatgtgcagtggaactatgctcccaagggaagaaatgtcatcacgaaccagcctctggacagtgacatagtggcttccagcttcttaaagtctgacaagaaccggatagggggaacctacaagaagaccatctataaagaatacaaggatgactcatacacagatgaagtggcccagcctgcctggttgggcttcctggggccagtgttgcaggctgaagtgggggatgtcattcttattcacctgaagaattttgccactcgtccctataccatccaccctcatggtgtcttctacgagaaggactctgaaggttccctatacccagatggctcctctgggccactgaaagctgatgactctgttcccccggggggcagccatatctacaactggaccattccagaaggccatgcacccaccgatgctgacccagcgtgcctcacctggatctaccattctcatgtagatgctccacgagacattgcaactggcctaattgggcctctcatcacctgtaaaagaggagccctggatgggaactcccctcctcaacgccaggatgtagaccatgatttcttcctcctcttcagtgtggtagatgagaacctcagctggcatctcaatgagaacattgccacttactgctcagatcctgcttcagtggacaaagaagatgagacatttcaggagagcaataggatgcatgcaatcaatggctttgtttttgggaatttacctgagctgaacatgtgtgcacagaaacgtgtggcctggcacttgtttggcatgggcaatgaaattgatgtccacacagcatttttccatggacagatgctgactacccgtggacaccacactgatgtggctaacatctttccagccacctttgtgactgctgagatggtgccctgggaacctggtacctggttaattagctgccaagtgaacagtcactttcgagatggcatgcaggcactctacaaggtcaagtcttgctccatggcccctcctgtggacctgctcacaggcaaagttcgacagtacttcattgaggcccatgagattcaatgggactatggcccgatggggcatgatgggagtactgggaagaatttgagagagccaggcagtatctcagataagtttttccagaagagctccagccgaattgggggcacttactggaaagtgcgatatgaagcctttcaagatgagacattccaagagaagatgcatttggaggaagataggcatcttggaatcctggggccagtgatccgggctgaggtgggtgacaccattcaggtggtcttctacaaccgtgcctcccagccattcagcatgcagccccatggggtcttttatgagaaagactatgaaggcactgtgtacaatgatggctcatcttaccctggcttggttgccaagccctttgagaaagtaacataccgctggacagtcccccctcatgccggtcccactgctcaggatcctgcttgtctcacttggatgtacttctctgctgcagatcccataagagacacaaattctggcctggtgggcccgctgctggtgtgcagggctggtgccttgggtgcagatggcaagcagaaaggggtggataaagaattctttcttctcttcactgtgttggatgagaacaagagctggtacagcaatgccaatcaagcagctgctatgttggatttccgactgctttcagaggatattgagggcttccaagactccaatcggatgcatgccattaatgggtttctgttctctaacctgcccaggctggacatgtgcaagggtgacacagtggcctggcacctgctcggcctgggcacagagactgatgtgcatggagtcatgttccagggcaacactgtgcagcttcagggcatgaggaagggtgcagctatgctctttcctcatacctttgtcatggccatcatgcagcctgacaaccttgggacatttgagatttattgccaggcaggcagccatcgagaagcagggatgagggcaatctataatgtctcccagtgtcctggccaccaagccacccctcgccaacgctaccaagctgcaagaatctactatatcatggcagaagaagtagagtgggactattgccctgaccggagctgggaacgggaatggcacaaccagtctgagaaggacagttatggttacattttcctgagcaacaaggatgggctcctgggttccagatacaagaaagctgtattcagggaatacactgatggtacattcaggatccctcggccaaggactggaccagaagaacacttgggaatcttgggtccacttatcaaaggtgaagttggtgatatcctgactgtggtattcaagaataatgccagccgcccctactctgtgcatgctcatggagtgctagaatctactactgtctggccactggctgctgagcctggtgaggtggtcacttatcagtggaacatcccagagaggtctggccctgggcccaatgactctgcttgtgtttcctggatctattattctgcagtggatcccatcaaggacatgtatagtggcctggtggggcccttggctatctgccaaaagggcatcctggagccccatggaggacggagtgacatggatcgggaatttgcattgttgttcttgatttttgatgaaaataagtcttggtatttggaggaaaatgtggcaacccatgggtcccaggatccaggcagtattaacctacaggatgaaactttcttggagagcaataaaatgcatgcaatcaatgggaaactctatgccaaccttaggggtcttaccatgtaccaaggagaacgagtggcctggtacatgctggccatgggccaagatgtggatctacacaccatccactttcatgcagagagcttcctctatcggaatggcgagaactaccgggcagatgtggtggatctgttcccagggacttttgaggttgtggagatggtggccagcaaccctgggacatggctgatgcactgccatgtgactgaccatgtccatgctggcatggagaccctcttcactgttttttctcgaacagaacacttaagccctctcaccgtcatcaccaaagagactgaaaaagtgccccccagagacattgaagaaggcaatgtgaagatgctgggcatgcagatccccataaagaatgttgagatgctggcctctgttttggttgccattagtgtcacccttctgctcgttgttctggctcttggtggagtggtttggtaccaacatcgacagagaaagctacgacgcaataggaggtccatcctggatgacagcttcaagcttctgtctttcaaacagtaacatctggagcctggagatatcctcaggaagcacatctgtagtgcactcccagcaggccatggactagtcactaaccccacactcaaaggggcatgggtggtggagaagcagaaggagcaatcaagcttatctggatatttctttctttatttattttacatggaaataatatgatttcactttttctttagtttctttgctctacgtgggcacctggcactaagggagtaccttattatcctacatcgcaaatttcaacagctacattatatttccttctgacacttggaaggtattgaaatttctagaaatgtatccttctcacaaagtagagaccaagagaaaaactcattgattgggtttctacttctttcaaggactcaggaaatttcactttgaactgaggccaagtgagctgttaagataacccacacttaaactaaaggctaagaatataggcttgatgggaaattgaaggtaggctgagtattgggaatccaaattgaattttgattctccttggcagtgaactactttgaagaagtggtcaatgggttgttgctgccatgagcatgtacaacctctggagctagaagctcctcaggaaagccagttctccaagttcttaacctgtggcactgaaaggaatgttgagttacctcttcatgttttagacagcaaaccctatccattaaagtacttgttagaaca

SEQ ID NO: 324759 - DNA, 3483 bp, Artificial Sequence
  derived and/or modified sequence
atgtgggccatggagagcggccacctgctgtgggccctgctcttcatgcagagcctgtggccccagctgacagatggagccaccagggtgtactacctgggcatcagagatgtgcagtggaactatgcccccaagggcagaaatgtcatcaccaaccagcccctggacagcgacatcgtggccagcagcttcctgaagagtgacaagaaccgcatcggcggcacctacaagaagaccatctacaaggagtacaaggatgacagctacacagatgaggtggcccagcctgcctggctgggcttcctgggccctgtgctgcaggccgaggtgggagatgtgatcctgatccacctgaagaactttgccacccggccctacaccatccacccccatggagtcttctatgagaaggacagcgagggcagcctgtacccagatggcagcagcggccccctgaaggcagatgattctgtgcccccaggcggcagccacatctacaactggaccatccctgagggccacgcccccacagatgctgaccctgcctgcctgacctggatctaccacagccacgtggatgccccccgggacatcgccaccggcctgattggccccctcatcacctgcaagagaggagccctggatggcaacagccccccccagaggcaggatgtggaccatgacttcttcctgctcttctctgtggtggatgagaacctgtcctggcacctgaatgaaaacatcgccacctactgcagcgaccctgcctctgtggacaaggaggatgagaccttccaggagagcaacaggatgcacgccatcaatggatttgtgtttggaaacctgcctgagctgaacatgtgtgcccagaagagggtggcctggcacctgtttggcatgggaaatgaaattgatgtgcacacagccttcttccacggccagatgctgaccacccggggccaccacacagatgtggccaacatcttccctgccacctttgtgacagctgagatggtgccctgggagcccggcacctggctgatcagctgccaggtgaacagccacttcagagatggcatgcaggccctgtacaaggtgaagagctgcagcatggcccctcctgtggacctgctgaccgggaaggtgcggcagtacttcatcgaggcccacgagatccagtgggactatggccccatgggccatgatggcagcacaggcaagaacctgcgggagcccggcagcatcagtgacaagttcttccagaagagcagcagcagaattggaggcacctactggaaggtgcgctatgaggccttccaggatgagaccttccaggagaagatgcacctggaggaggacagacacctgggcatcctgggccctgtgatccgggcagaggtgggggacaccatccaggtggtgttctacaacagagccagccagcccttctccatgcagccccacggcgtcttctatgagaaggactatgagggcaccgtgtacaatgatggcagcagctacccaggcctggtggccaagccctttgagaaggtgacctaccgctggacagtgccccctcatgctggccccacagcccaggaccctgcctgcctgacctggatgtacttctctgctgctgaccccatccgggacaccaacagcggcctggtgggccccctgctggtgtgcagagctggggccctgggcgcagatggcaagcagaagggcgtggacaaggagttcttcctgctcttcaccgtgctggatgagaacaagtcctggtacagcaatgccaaccaggccgccgccatgctggacttccggctgctgtctgaggacatcgagggcttccaggacagcaacaggatgcacgccatcaatggcttcctgttcagcaacctgccccggctggacatgtgcaagggggacacagtggcctggcacctgctgggcctgggcacagaaacagatgtgcatggagtgatgttccagggcaacacagtgcagctgcagggcatgaggaaaggagctgccatgctgttcccccacacctttgtgatggccatcatgcagcctgacaacctgggcacctttgagatctactgccaggccggcagccaccgggaggccggcatgagggccatctacaacgtgtcccagtgccccggccaccaggccaccccccggcagcgctaccaggccgcccgcatctactacatcatggccgaggaggtggagtgggactactgcccagaccgctcctgggagcgggagtggcacaaccagagcgagaaggacagctatggctacatcttcctgagcaacaaggatggcctgctgggcagccgctacaagaaggctgtgttccgggagtacacagatggcaccttccgcatcccccggcccaggacaggccctgaggagcacctgggcatcctgggccccctcatcaagggggaggtgggggacatcctgactgtggtgttcaagaacaatgccagccggccctacagcgtgcacgcccacggcgtgctggagagcaccaccgtgtggcccctggccgctgagcctggagaggtggtgacctaccagtggaacatccctgagaggagcggccctggccccaatgacagcgcctgtgtgtcctggatctactacagcgctgtggaccccatcaaggacatgtacagcggcctggtgggccccctggccatctgccagaagggcatcctggagccccacggcggccgcagtgacatggaccgggagtttgccctgctcttcctgatctttgatgagaacaagtcctggtacctggaggagaatgtggccacccacggcagccaggaccccggcagcatcaacctgcaggatgagaccttcctggagagcaacaagatgcacgccatcaatggcaagctgtatgccaacctgcggggcctgaccatgtaccagggcgagcgggtggcctggtacatgctggccatgggccaggatgtggacctgcacaccatccacttccacgccgagagcttcctgtacagaaatggagagaactacagagcagatgtggtggacctcttccctggcacctttgaggtggtggagatggtggccagcaaccctggcacctggctgatgcactgccacgtgacagaccacgtgcatgctggcatggagaccctcttcaccgtcttcagcaggacagagcacctgagccccctgaccgtcatcaccaaggagacagagaaggtgcccccccgggacatcgaggagggcaatgtgaagatgctgggcatgcagatccccatcaagaatgtggagatgctggcctctgtgctggtggccatctctgtgaccctgctgctggtggtgctggccctgggcggcgtggtgtggtaccagcaccggcagaggaagctgcggaggaacagaagaagcatcctggatgacagcttcaagctgctgtccttcaagcagtag

SEQ ID NO: 324760 - DNA, 3483 bp, Artificial Sequence
  derived and/or modified sequence
atgtgggccatggagagcggccacctgctgtgggccctgctgttcatgcagagcctatggccccaactcactgatggcgcaaccagggtgtattatctggggatacgcgatgtccagtggaattacgctccaaaaggtagaaatgttatcactaatcaaccactggattcagacatagtcgcttcgtccttcctcaagtcagacaagaaccggattggcggtacatacaagaaaacaatttacaaagagtacaaagatgactcctacaccgatgaggtggcacagcccgcatggctgggattcctgggtcccgttctccaggcagaggtgggagacgtgattctgattcacctcaagaattttgctacgcgtccatacaccatccatccacacggcgtgttctatgaaaaagattccgaaggcagcttatacccagatggctcatcaggccctctgaaggccgatgattcagttcctccaggaggtagtcatatctacaactggaccattcctgaagggcacgcacccaccgatgctgacccagcatgtctgacctggatctaccactcacacgttgacgcccctcgcgacatcgccactgggctgatcggcccacttataacttgcaaaaggggtgcactggatggcaactccccaccccagcgccaggacgtcgatcacgactttttcctgctctttagcgtggtggatgagaatctgtcatggcacttgaacgaaaatatcgctacctactgttccgaccccgccagtgtggataaggaagacgagacattccaggagagcaaccgcatgcacgccattaatggcttcgtctttggcaatcttcctgaactgaacatgtgcgctcagaaaagggttgcatggcacctgttcggcatgggaaacgaaatagatgtccacacagctttcttccacgggcaaatgctgacaacgcggggtcaccacaccgatgtcgccaatatctttcctgccacgttcgtgacagccgaaatggtaccatgggaacccggtacgtggcttataagctgccaggtgaattcacactttagagatggcatgcaggccttgtataaggtgaagtcctgtagcatggctccccctgttgatcttctcaccggaaaagtgcggcagtactttatcgaagctcatgaaatccagtgggattacgggcccatgggtcacgacgggtccacagggaaaaacctcagagaaccaggaagcatttcggacaagttcttccaaaagtcatcctcacggattggtggtacgtattggaaggtccggtatgaagctttccaagacgagacctttcaagaaaagatgcatctcgaggaggataggcacctaggcatcctgggaccagttatccgagctgaggttggagatacgatccaggttgtcttttacaacagagcaagccagccattcagcatgcagccccacggggtcttttatgagaaggactatgagggcacagtgtataatgatggctcgtcctaccctggtcttgtggcaaagccttttgaaaaggttacataccgttggactgtcccaccacatgctgggcccacagcacaagatccagcatgcctgacgtggatgtacttcagcgctgctgaccctatcagggacaccaacagtggtctggtgggtcctctcctcgtttgccgggcaggagccctcggagccgacgggaaacaaaagggggtcgataaggagttctttttgctgtttactgttctggatgagaataaaagttggtacagcaatgccaatcaagctgcggccatgctggactttagactgctgtccgaggacatcgagggatttcaagactccaacagaatgcacgctattaatggcttcctcttttccaacttaccaagactggatatgtgtaaaggggacaccgtggcctggcatctgctgggcctgggaactgaaacggacgtgcacggagtcatgttccagggcaatactgtacaattgcagggcatgcgtaaaggcgcggctatgctgtttccccacacctttgtgatggccattatgcagcctgataatctcgggaccttcgagatctattgccaggctggatctcatagagaagccggcatgagggcaatctacaatgtgtctcaatgtccgggtcaccaagccaccccacggcagcgatatcaagccgctagaatttactacattatggccgaggaggtggagtgggattactgtccagatcgaagctgggaacgggagtggcataaccagagcgaaaaggacagctacgggtacatctttctgtcaaacaaggacggactgctcggatcacggtataaaaaagctgttttccgagagtacactgacggaacattcaggatacctcgccccagaacggggccagaggaacacttaggcattctaggaccactcatcaaaggggaggttggggacatcctgactgttgtcttcaagaataacgcctcccgcccctactccgtccatgctcacggcgtcctcgagagcacaacagtatggccactcgccgccgaacctggcgaggtagtaacataccaatggaacatccccgaaaggagcggccctggccccaacgactctgcctgtgtatcgtggatttattatagcgccgttgaccctatcaaagatatgtactcaggactggtcggcccgctcgccatctgccagaagggcatcctcgagccacatggtggccgctcagacatggatcgcgagtttgcactgctgttcctgattttcgatgaaaacaagtcctggtacctggaagagaacgtggccacgcatggctcgcaggatccaggctctataaatctgcaggacgagaccttcttggaatccaacaagatgcatgccattaatgggaagctctatgcaaacctgcgcggattaacaatgtaccagggggaaagagtggcatggtacatgctcgccatggggcaggacgtggatctccataccatccacttccacgcagaaagtttcctttacaggaatggcgagaactaccgcgcagacgtggtagacctctttcctggaacatttgaggtggtcgagatggtggcttcaaaccctgggacatggcttatgcactgccacgtaacagaccatgtgcacgcaggcatggaaacgctgttcacggtattctcccggactgagcatctgagtccactgaccgtgattaccaaagagaccgagaaagttcctccacgagatatagaagagggcaacgtcaagatgctgggcatgcaaatcccaatcaaaaacgtcgaaatgcttgctagcgtgcttgtcgcaattagcgtgactctgctattggtggtcctggcccttgggggagtcgtgtggtaccaacatcgtcaaagaaagcttaggcgtaatagacggtctatattagatgattcatttaagttgttgtcatttaaacagtag

SEQ ID NO: 324761 - DNA, 3483 bp, Artificial Sequence
  derived and/or modified sequence
atgtgggctatggaaagcggtcacctgctgtgggcactcctgtttatgcaaagtctgtggcctcaactgactgacggggcaaccagagtgtactacttaggtattagggacgtgcagtggaactacgctcctaagggtaggaatgtgatcactaaccagccattggattccgatattgtggcctcctctttcctaaagtctgacaaaaaccgcatcgggggaacctacaagaagactatctataaagaatataaagatgacagctatactgacgaggtggcgcagccagcatggctcgggtttctgggccctgtactgcaggccgaggtcggagatgtgatcttgatccacctgaagaactttgctactaggccttacaccatccaccctcacggagtgttttacgagaaagacagcgagggatctttatatcctgatggaagcagcggcccactgaaggccgacgatagcgtaccacccggaggcagtcacatatacaactggactattcccgaaggccacgcacctactgatgctgatcccgcttgccttacctggatctaccatagtcatgtagatgctcccagggacatcgcaaccggactaattgggccacttattacctgtaaaaggggggctttggatggcaatagccccccacagcgccaggacgtggatcatgattttttccttctctttagtgtggtggacgagaacttaagttggcacctcaacgaaaatattgccacctactgtagcgaccctgcctctgtcgataaagaggacgaaacctttcaggagagcaatagaatgcacgctatcaacggcttcgtctttggcaatttgcctgaacttaacatgtgtgcacagaagcgggtggcctggcatctcttcggaatgggcaacgagattgatgtacataccgccttcttccatggccaaatgcttactacccgagggcatcatactgacgtggccaatatttttccagcgaccttcgtgacggcggagatggtaccctgggagccaggaacctggctgatttcctgccaggtgaatagtcatttccgggacgggatgcaggcactgtataaggtcaagagctgttcgatggcacctcctgttgatctgctcacgggtaaggtcaggcagtatttcatcgaggcccacgagattcagtgggactatgggccaatgggtcacgatggatccactgggaaaaatctgcgggagccaggtagtatctcagacaagttcttccagaaatcatcatcacggatcggagggacatactggaaggtcaggtacgaagcctttcaggacgagacttttcaggagaaaatgcacctcgaagaagaccgccacctcggcatcctggggccagtaatccgggcagaggtcggtgatactatccaggtggtcttttataatagggccagccaaccattttcaatgcagcctcatggagtgttctacgaaaaagactatgaggggacagtatataacgacggatcatcatatcccggtctggtcgccaagcctttcgaaaaggttacatatagatggaccgttccaccccacgccggtcccactgctcaggacccagcgtgtctaacatggatgtatttcagtgctgcggacccaatcagggacacaaacagtgggctcgtagggccactccttgtatgccgcgctggcgcactgggggctgacggcaaacagaaaggtgttgacaaggaattctttctcctgttcacggtgctggacgaaaacaagtcgtggtactctaatgcaaaccaagctgccgcaatgctggacttccggttgctgtctgaagacattgagggattccaggactcgaaccggatgcacgctattaacgggtttctgttcagcaacctgcccagactggatatgtgcaagggcgacactgtggcttggcaccttctcggtttggggactgagactgacgtccacggcgtgatgtttcaggggaatacagtacagctgcaggggatgcgcaagggagccgctatgctgttccctcacacgttcgttatggccatcatgcagcctgacaatcttggtacgtttgagatctattgccaggcaggctcccaccgagaagctggcatgcgtgcaatctacaatgtgtcccagtgccccggtcatcaagcgacccctcgccagaggtatcaggctgcaagaatctattacattatggccgaagaggtcgaatgggattactgccctgatcggtcctgggagagagagtggcacaatcagagcgagaaagacagttacggctatatcttcctgagcaacaaagacggccttttaggaagtagatacaagaaggcggtctttcgcgagtacactgacggaacattccgcattcccagacctaggacgggaccagaggagcatctcggcatactcggcccactgatcaagggcgaggtgggagacatattaactgtcgtatttaagaataatgccagccgcccatacagtgtgcatgcccatggggtcctcgaaagcaccaccgtctggcctttggcggctgagccaggcgaagtggtgacttaccaatggaatatacctgagagaagcggaccgggtccaaatgacagcgcctgtgtctcttggatatattattctgccgtggatccaataaaggacatgtacagtggattggtgggtcctcttgctatttgtcagaaaggcatcctggagccccacgggggacgctctgatatggatcgagaatttgcgttgttattcctcatcttcgatgagaacaagtcctggtatctcgaagaaaacgtggccacacacggcagtcaagacccagggtctataaatctgcaggacgaaacgtttttggagtctaacaagatgcatgctattaacggcaagctatatgccaatctgcggggactgactatgtaccaaggtgaacgagtcgcctggtacatgcttgctatgggacaggacgtggatttacataccattcatttccacgccgaatcgttcctgtaccgtaatggagagaactacagggctgatgttgtcgatctctttccagggactttcgaggtggtggaaatggtggcctctaacccaggcacatggcttatgcactgtcatgttaccgaccatgtgcacgccggtatggaaacgttattcacagtgttctctaggactgaacacctctctcccttgaccgttattacgaaagaaacagagaaagtgcccccacgtgatatagaagaagggaatgtcaagatgctgggcatgcagattcccattaagaacgtggagatgctcgcaagtgttttagtggctatcagcgttacactcttactggtagtacttgccttgggaggagttgtgtggtatcagcatcgccagaggaaactgagacgcaacagacgctctattctagacgactctttcaagctgcttagtttcaaacagtag

SEQ ID NO: 324762 - DNA, 3483 bp, Artificial Sequence
  derived and/or modified sequence
atgtgggccatggagagcggccacctgctgtgggccctgctgttcatgcagagcctgtggccccagctgaccgacggcgccaccagagtgtactacctgggcatcagagacgtgcagtggaactacgcccccaagggcagaaacgtgatcaccaaccagcccctggacagcgacatcgtggccagcagcttcctgaagagcgacaagaacagaatcggcggcacctacaagaagaccatctacaaggagtacaaggacgacagctacaccgacgaggtggcccagcccgcctggctgggcttcctgggccccgtgctgcaggccgaggtgggcgacgtgatcctgatccacctgaagaacttcgccaccagaccctacaccatccacccccacggcgtgttctacgagaaggacagcgagggcagcctgtaccccgacggcagcagcggccccctgaaggccgacgacagcgtgccccccggcggcagccacatctacaactggaccatccccgagggccacgcccccaccgacgccgaccccgcctgcctgacctggatctaccacagccacgtggacgcccccagagacatcgccaccggcctgatcggccccctgatcacctgcaagagaggcgccctggacggcaacagccccccccagagacaggacgtggaccacgacttcttcctgctgttcagcgtggtggacgagaacctgagctggcacctgaacgagaacatcgccacctactgcagcgaccccgccagcgtggacaaggaggacgagaccttccaggagagcaacagaatgcacgccatcaacggcttcgtgttcggcaacctgcccgagctgaacatgtgcgcccagaagagagtggcctggcacctgttcggcatgggcaacgagatcgacgtgcacaccgccttcttccacggccagatgctgaccaccagaggccaccacaccgacgtggccaacatcttccccgccaccttcgtgaccgccgagatggtgccctgggagcccggcacctggctgatcagctgccaggtgaacagccacttcagagacggcatgcaggccctgtacaaggtgaagagctgcagcatggccccccccgtggacctgctgaccggcaaggtgagacagtacttcatcgaggcccacgagatccagtgggactacggccccatgggccacgacggcagcaccggcaagaacctgagagagcccggcagcatcagcgacaagttcttccagaagagcagcagcagaatcggcggcacctactggaaggtgagatacgaggccttccaggacgagaccttccaggagaagatgcacctggaggaggacagacacctgggcatcctgggccccgtgatcagagccgaggtgggcgacaccatccaggtggtgttctacaacagagccagccagcccttcagcatgcagccccacggcgtgttctacgagaaggactacgagggcaccgtgtacaacgacggcagcagctaccccggcctggtggccaagcccttcgagaaggtgacctacagatggaccgtgcccccccacgccggccccaccgcccaggaccccgcctgcctgacctggatgtacttcagcgccgccgaccccatcagagacaccaacagcggcctggtgggccccctgctggtgtgcagagccggcgccctgggcgccgacggcaagcagaagggcgtggacaaggagttcttcctgctgttcaccgtgctggacgagaacaagagctggtacagcaacgccaaccaggccgccgccatgctggacttcagactgctgagcgaggacatcgagggcttccaggacagcaacagaatgcacgccatcaacggcttcctgttcagcaacctgcccagactggacatgtgcaagggcgacaccgtggcctggcacctgctgggcctgggcaccgagaccgacgtgcacggcgtgatgttccagggcaacaccgtgcagctgcagggcatgagaaagggcgccgccatgctgttcccccacaccttcgtgatggccatcatgcagcccgacaacctgggcaccttcgagatctactgccaggccggcagccacagagaggccggcatgagagccatctacaacgtgagccagtgccccggccaccaggccacccccagacagagataccaggccgccagaatctactacatcatggccgaggaggtggagtgggactactgccccgacagaagctgggagagagagtggcacaaccagagcgagaaggacagctacggctacatcttcctgagcaacaaggacggcctgctgggcagcagatacaagaaggccgtgttcagagagtacaccgacggcaccttcagaatccccagacccagaaccggccccgaggagcacctgggcatcctgggccccctgatcaagggcgaggtgggcgacatcctgaccgtggtgttcaagaacaacgccagcagaccctacagcgtgcacgcccacggcgtgctggagagcaccaccgtgtggcccctggccgccgagcccggcgaggtggtgacctaccagtggaacatccccgagagaagcggccccggccccaacgacagcgcctgcgtgagctggatctactacagcgccgtggaccccatcaaggacatgtacagcggcctggtgggccccctggccatctgccagaagggcatcctggagccccacggcggcagaagcgacatggacagagagttcgccctgctgttcctgatcttcgacgagaacaagagctggtacctggaggagaacgtggccacccacggcagccaggaccccggcagcatcaacctgcaggacgagaccttcctggagagcaacaagatgcacgccatcaacggcaagctgtacgccaacctgagaggcctgaccatgtaccagggcgagagagtggcctggtacatgctggccatgggccaggacgtggacctgcacaccatccacttccacgccgagagcttcctgtacagaaacggcgagaactacagagccgacgtggtggacctgttccccggcaccttcgaggtggtggagatggtggccagcaaccccggcacctggctgatgcactgccacgtgaccgaccacgtgcacgccggcatggagaccctgttcaccgtgttcagcagaaccgagcacctgagccccctgaccgtgatcaccaaggagaccgagaaggtgccccccagagacatcgaggagggcaacgtgaagatgctgggcatgcagatccccatcaagaacgtggagatgctggccagcgtgctggtggccatcagcgtgaccctgctgctggtggtgctggccctgggcggcgtggtgtggtaccagcacagacagagaaagctgagaagaaacagaagaagcatcctggacgacagcttcaagctgctgagcttcaagcagtag

SEQ ID NO: 324763 - protein, 811 aa, Artificial Sequence
  derived and/or modified sequence
MESGHLLWALLFMQSLWPQLTDGATRVYYLGIRDVQWNYAPKGRNVITNQPLDSDIVASSFLKSDKNRIGGTYKKTIYKEYKDDSYTDEVAQPAWLGFLGPVLQAEVGDVILIHLKNFATRPYTIHPHGVFYEKDSEGSLYPDGSSGPLKADDSVPPGGSHIYNWTIPEGHAPTDADPACLTWIYHSHVDAPRDIATGLIGPLITCKRGALDGNSPPQRQDVDHDFFLLFSVVDENLSWHLNENIATYCSDPASVDKEDETFQESNRMHAINGFVFGNLPELNMCAQKRVAWHLFGMGNEIDVHTAFFHGQMLTTRGHHTDVANIFPATFVTAEMVPWEPGTWLISCQVNSHFRDGMQALYKVKSCSMAPPVDLLTGKVRQYFIEAHEIQWDYGPMGHDGSTGKNLREPGSISDKFFQKSSSRIGGTYWKVRYEAFQDETFQEKMHLEEDRHLGILGPVIRAEVGDTIQVVFYNRASQPFSMQPHGVFYEKDYEGTVYNDDPIRDTNSGLVGPLLVCRAGALGADGKQKGVDKEFFLLFTVLDENKSWYSNANQAAAMLDFRLLSEDIEGFQDSNRMHAINGFLFSNLPRLDMCKGDTVAWHLLGLGTETDVHGVMFQGNTVQLQGMRKGAAMLFPHTFVMAIMQPDNLGTFEIYCQAGSHREAGMRAIYNVSQCPGHQATPRQRYQAARIYYIMAEEVEWDYCPDRSWEREWHNQSEKDSYGYIFLSNKDGLLGSRYKKAVFREYTDGTFRIPRPRTGPEEHLGILGPLIKGEVGDILTVVFKNNASRPYSVHAHGVLESTTVWPLAAEP

SEQ ID NO: 324764 - protein, 208 aa, Artificial Sequence
  derived and/or modified sequence
MESGHLLWALLFMQSLWPQLTDGATRVYYLGIRDVQWNYAPKGRNVITNQPLDSDIVASSFLKSDKNRIGGTYKKTIYKEYKDDSYTDEVAQPAWLGFLGPVLQAEVGDVILIHLKNFATRPYTIHPHGVFYEKDSEGSLYPDGSSGPLKADDSVPPGGSHIYNWTIPEGHAPTDADPACLTWIYHSHVDAPRDIATGLIGPLITCKR

SEQ ID NO: 324765 - DNA, 2436 bp, Artificial Sequence
  derived and/or modified sequence
atggaatcaggtcatttgctttgggcactgctcttcatgcagtcattgtggccccagttaacagacggcgccactagagtttactatttaggaattcgtgatgtccagtggaactacgccccaaaaggcagaaacgtcataacaaaccaaccccttgacagcgacatcgtggcatccagtttcctcaagtccgacaaaaacagaatcggcggtacttacaaaaagactatctacaaggagtacaaagacgattcgtatacggatgaggtggcccaaccagcatggttgggctttctgggcccagtgcttcaagctgaggtcggtgacgtgattttaatccacctcaaaaacttcgctacgaggccgtatacaattcatccccatggcgtcttctatgaaaaagacagcgagggaagtctttacccagatggaagcagcggccccctgaaagcagacgactccgtgcctccaggcggcagccacatctacaactggacaatcccagagggacatgccccaacggacgcagaccccgcttgcttgacttggatctatcacagccatgtagacgcccctcgcgatattgcaaccggactaataggcccacttattacttgtaagagaggcgcactggatggcaactcaccaccacagcgacaggatgtggatcacgatttcttcctgcttttctccgttgtggatgaaaacctctcatggcatctgaacgaaaacatcgctacttactgttctgacccagcttcagttgacaaggaagacgaaacattccaggaatccaacagaatgcatgccatcaatggtttcgtctttgggaacctgcccgagttgaacatgtgtgctcaaaagagggttgcctggcatctctttgggatgggtaacgagattgacgttcataccgctttcttccacggccagatgctcacaacaaggggccaccatacagacgttgctaatatttttcccgcgacatttgtcactgccgaaatggttccatgggaacctggcacctggctaatttcttgccaggtgaactcgcacttcagagacggaatgcaggccctctataaggtaaaatcttgctccatggcacccccggtcgatttgctgacaggaaaggtccggcagtacttcatcgaagcacatgagatccagtgggattacggacccatggggcatgacggcagtactggcaagaacctccgcgaaccaggctcaataagcgataagtttttccaaaaatcgagcagccggattggtgggacctattggaaggtaagatatgaagcttttcaggacgaaacctttcaggaaaagatgcacttggaagaagacaggcatctggggatcctgggaccggtgattagagccgaagttggcgatacaatccaggtagtattctataaccgcgcatctcagcccttcagcatgcagcctcacggcgttttctacgaaaaagattatgaggggacagtctacaatgatgatcccatccgggacacgaacagtggtctggtgggaccattgctcgtctgtagggctggcgctctgggagcagacggaaagcagaaaggtgttgacaaggaattctttctactcttcacagtgctggacgagaacaaatcctggtactctaatgctaaccaagccgccgcgatgttggattttcggctgctgtccgaggatatagagggctttcaagactctaataggatgcatgccattaacggtttcctgtttagcaacctccctcggttggacatgtgtaaaggggacaccgtggcctggcacctcctggggctgggaacggagacagatgtgcacggggtgatgtttcagggaaataccgttcaactgcaaggaatgagaaagggagccgctatgcttttcccccacaccttcgttatggccattatgcagccagacaacctgggaacttttgagatctattgccaggccggatcccaccgcgaggccgggatgcgagctatttataacgtatctcagtgccctggacatcaggctacacccaggcagaggtaccaggcagcgaggatatattacataatggccgaagaggtcgagtgggattattgcccggacagaagctgggagagggaatggcataaccagtccgaaaaagacagctacggatacatatttctgtcaaataaagatggtctcctcggatcccgctataagaaagccgtttttagagagtacactgacggtacatttaggataccacggccgagaacgggccccgaagaacatctgggaattttgggacccctcatcaagggtgaagttggtgacatcctgacagtggtgttcaaaaacaatgcaagccgcccttactccgtacatgctcacggggtccttgagtccaccactgtgtggccgctggcagctgagccttag

SEQ ID NO: 324766 - DNA, 2459 bp, Artificial Sequence
  derived and/or modified sequence
cctgtttcccagagtaatgtgggccatggagtcaggccacctcctctgggctctgctgttcatgcagtccttgtggcctcaactgactgatggagccactcgagtctactacctgggcatccgggatgtgcagtggaactatgctcccaagggaagaaatgtcatcacgaaccagcctctggacagtgacatagtggcttccagcttcttaaagtctgacaagaaccggatagggggaacctacaagaagaccatctataaagaatacaaggatgactcatacacagatgaagtggcccagcctgcctggttgggcttcctggggccagtgttgcaggctgaagtgggggatgtcattcttattcacctgaagaattttgccactcgtccctataccatccaccctcatggtgtcttctacgagaaggactctgaaggttccctatacccagatggctcctctgggccactgaaagctgatgactctgttcccccggggggcagccatatctacaactggaccattccagaaggccatgcacccaccgatgctgacccagcgtgcctcacctggatctaccattctcatgtagatgctccacgagacattgcaactggcctaattgggcctctcatcacctgtaaaagaggagccctggatgggaactcccctcctcaacgccaggatgtagaccatgatttcttcctcctcttcagtgtggtagatgagaacctcagctggcatctcaatgagaacattgccacttactgctcagatcctgcttcagtggacaaagaagatgagacatttcaggagagcaataggatgcatgcaatcaatggctttgtttttgggaatttacctgagctgaacatgtgtgcacagaaacgtgtggcctggcacttgtttggcatgggcaatgaaattgatgtccacacagcatttttccatggacagatgctgactacccgtggacaccacactgatgtggctaacatctttccagccacctttgtgactgctgagatggtgccctgggaacctggtacctggttaattagctgccaagtgaacagtcactttcgagatggcatgcaggcactctacaaggtcaagtcttgctccatggcccctcctgtggacctgctcacaggcaaagttcgacagtacttcattgaggcccatgagattcaatgggactatggcccgatggggcatgatgggagtactgggaagaatttgagagagccaggcagtatctcagataagtttttccagaagagctccagccgaattgggggcacttactggaaagtgcgatatgaagcctttcaagatgagacattccaagagaagatgcatttggaggaagataggcatcttggaatcctggggccagtgatccgggctgaggtgggtgacaccattcaggtggtcttctacaaccgtgcctcccagccattcagcatgcagccccatggggtcttttatgagaaagactatgaaggcactgtgtacaatgatgatcccataagagacacaaattctggcctggtgggcccgctgctggtgtgcagggctggtgccttgggtgcagatggcaagcagaaaggggtggataaagaattctttcttctcttcactgtgttggatgagaacaagagctggtacagcaatgccaatcaagcagctgctatgttggatttccgactgctttcagaggatattgagggcttccaagactccaatcggatgcatgccattaatgggtttctgttctctaacctgcccaggctggacatgtgcaagggtgacacagtggcctggcacctgctcggcctgggcacagagactgatgtgcatggagtcatgttccagggcaacactgtgcagcttcagggcatgaggaagggtgcagctatgctctttcctcatacctttgtcatggccatcatgcagcctgacaaccttgggacatttgagatttattgccaggcaggcagccatcgagaagcagggatgagggcaatctataatgtctcccagtgtcctggccaccaagccacccctcgccaacgctaccaagctgcaagaatctactatatcatggcagaagaagtagagtgggactattgccctgaccggagctgggaacgggaatggcacaaccagtctgagaaggacagttatggttacattttcctgagcaacaaggatgggctcctgggttccagatacaagaaagctgtattcagggaatacactgatggtacattcaggatccctcggccaaggactggaccagaagaacacttgggaatcttgggtccacttatcaaaggtgaagttggtgatatcctgactgtggtattcaagaataatgccagccgcccctactctgtgcatgctcatggagtgctagaatctactactgtctggccactggctgctgagcctg

SEQ ID NO: 324767 - DNA, 2436 bp, Artificial Sequence
  derived and/or modified sequence
atggagagcggccacctgctgtgggccctgctcttcatgcagagcctgtggccccagctgacagatggagccaccagggtgtactacctgggcatcagagatgtgcagtggaactatgcccccaagggcagaaatgtcatcaccaaccagcccctggacagcgacatcgtggccagcagcttcctgaagagtgacaagaacagaattggaggcacctacaagaagaccatctacaaggagtacaaggatgacagctacacagatgaggtggcccagcctgcctggctgggcttcctgggccctgtgctgcaggccgaggtgggagatgtgatcctgatccacctgaagaactttgccacccggccctacaccatccacccccacggcgtcttctatgagaaggacagcgagggcagcctgtacccagatggcagcagcggccccctgaaggcagatgacagcgtgcccccaggcggcagccacatctacaactggaccatccctgagggccacgcccccacagatgctgaccctgcctgcctgacctggatctaccacagccacgtggatgccccccgggacatcgccaccggcctcatcggccccctcatcacctgcaagagaggagccctggatggcaacagccccccccagaggcaggatgtggaccatgacttcttcctgctcttctctgtggtggatgagaacctgtcctggcacctgaatgaaaatattgccacctactgcagcgaccctgcctctgtggacaaggaggatgagaccttccaggagagcaacaggatgcacgccatcaatggatttgtgtttggaaacctgcctgagctgaacatgtgtgcccagaagagggtggcctggcacctgtttggcatgggaaatgaaattgatgtgcacacagccttcttccacggccagatgctgaccacccggggccaccacacagatgtggccaacatcttccctgccacctttgtgacagctgagatggtgccctgggagcccggcacctggctgatcagctgccaggtgaacagccacttcagagatggcatgcaggccctgtacaaggtgaagagctgcagcatggcccctcctgtggacctgctgaccgggaaggtgcggcagtacttcatcgaggcccacgagatccagtgggactatggccccatgggccatgatggcagcacaggcaagaacctgcgggagcccggcagcatcagtgacaagttcttccagaagagcagcagccgcatcggcggcacctactggaaggtgcgctatgaggccttccaggatgagaccttccaggagaagatgcacctggaggaggacagacacctgggcatcctgggccctgtgatccgggcagaggtgggggacaccatccaggtggtgttctacaacagagccagccagcccttctccatgcagccccatggagtcttctatgagaaggactatgagggcaccgtgtacaatgatgaccccatccgggacaccaacagcggcctggtgggccccctgctggtgtgcagagctggggccctgggcgcagatggcaagcagaagggcgtggacaaggagttcttcctgctcttcaccgtgctggatgagaacaagtcctggtacagcaatgccaaccaggccgccgccatgctggacttccggctgctgtctgaggacatcgagggcttccaggacagcaacaggatgcacgccatcaatggcttcctgttcagcaacctgccccggctggacatgtgcaagggggacacagtggcctggcacctgctgggcctgggcacagaaacagatgtgcatggagtgatgttccagggcaacacagtgcagctgcagggcatgaggaaaggagctgccatgctgttcccccacacctttgtgatggccatcatgcagcctgacaacctgggcacctttgagatctactgccaggccggcagccaccgggaggccggcatgagggccatctacaacgtgtcccagtgccccggccaccaggccaccccccggcagcgctaccaggccgcccgcatctactacatcatggccgaggaggtggagtgggactactgcccagaccgctcctgggagcgggagtggcacaaccagagcgagaaggacagctatggctacatcttcctgagcaacaaggatggcctgctgggcagccgctacaagaaggctgtgttccgggagtacacagatggcaccttccgcatcccccggcccaggacaggccctgaggagcacctgggcatcctgggccccctcatcaagggggaggtgggggacatcctgactgtggtgttcaagaacaatgccagccggccctacagcgtgcacgcccacggcgtgctggagagcaccaccgtgtggcccctggccgctgagccctag

SEQ ID NO: 324768 - DNA, 2436 bp, Artificial Sequence
  derived and/or modified sequence
atggagagcggccacctgctgtgggccctgctgttcatgcagagcttgtggcctcagcttactgacggagcgaccagagtgtattaccttggtatccgggatgtgcaatggaattacgcccctaagggtcgtaacgtgattaccaaccaaccattggattccgatatcgtcgcttcttctttcctgaagtcagacaagaataggattggggggacttataaaaagaccatttacaaagagtataaagatgactcctacacagacgaagttgctcagccagcatggctgggatttctgggccctgtgcttcaggccgaggtaggcgacgtcatcctgatccacttaaaaaatttcgctaccagaccatacaccatccatccccatggcgtattttatgagaaggactccgaaggttctctgtaccccgacggtagttccggccctctcaaggccgacgattccgtgccgcccggaggtagccacatttacaactggactattcccgaaggccacgctcctaccgacgccgaccccgcctgtctcacctggatctatcactcacacgtagacgcccctagggatatcgcgaccggcctgatcggtcctctcataacttgtaagaggggagcactcgatggtaattcgccccctcagaggcaggacgtagatcacgactttttcctcctgttttcagtggtcgacgaaaatctgtcttggcatcttaacgagaatatagcaacatattgctcagatcccgcttccgtggataaggaagacgaaactttccaagagtctaaccgcatgcacgccataaacggctttgtgttcgggaacttgcctgagctgaatatgtgtgcccagaagagagtggcatggcacttgttcggcatgggtaatgagatcgatgtccataccgcctttttccatgggcagatgcttacaactcgggggcatcacactgatgttgccaacatcttccctgctaccttcgtcaccgccgaaatggtcccttgggagcctggaacatggttgatttcctgccaagtgaactcccacttcagagacgggatgcaagccctctacaaggtgaaaagttgttccatggctccaccggttgatcttctcacaggtaaagttcgccagtacttcattgaagctcatgagattcaatgggattacggtcccatgggacacgacggctccacaggcaagaatttaagggagccaggcagtattagcgacaaattctttcagaagagctcttcgcgcatcggggggacctactggaaagtaagatacgaggctttccaagatgagactttccaggagaaaatgcatctggaagaagacaggcacctgggtatcctgggacccgtcatccgggcggaggtgggtgatactatacaggttgtcttctataatagggccagccagcccttttcaatgcaacctcatggcgtgttctatgaaaaggattacgaggggactgtctacaatgacgatcccatccgggacactaattccggcctggtgggtcctctcctagtgtgtagggccggagcattgggtgcggatgggaagcagaagggtgtcgacaaggagtttttcctgctctttacagtgctggacgaaaacaaatcttggtatagcaatgctaaccaggccgccgcgatgctggacttccggctcctgtccgaggatatagaaggatttcaagactccaatcggatgcacgcaataaacggttttcttttttcaaatctcccccgccttgatatgtgtaaaggagacaccgtcgcctggcatctcttaggacttggcactgagacagatgttcatggggtcatgtttcaggggaacactgttcagctgcagggcatgcgcaaaggagcggctatgctatttccacatacgttcgtgatggcgatcatgcagccggataatctgggcacatttgagatctattgtcaagctggctcgcaccgcgaagcgggcatgagggccatttacaacgtttctcagtgccccggccaccaggcaaccccccggcagcgctaccaagctgcgaggatctactacataatggccgaagaagtcgaatgggactattgccctgacaggtcatgggaacgtgagtggcataaccagtctgaaaaagacagctatggctacatcttcttgtccaacaaggacggattgttgggcagcaggtacaaaaaagccgtgtttagggagtacaccgatggcaccttccggataccccgcccacgcaccggacccgaggagcatctcgggatactggggccgttaataaaaggagaagttggggacatactgacggtggtctttaaaaacaacgctagtcgcccatacagtgtgcacgctcatggggtgctggaaagtaccacagtttggcccctggctgctgaaccttag

SEQ ID NO: 324769 - DNA, 2436 bp, Artificial Sequence
  derived and/or modified sequence
atggaaagtgggcacttgctgtgggccctgctctttatgcaatccttatggccccaactcacggacggtgccactcgggtgtattatctgggcatccgggacgtgcaatggaactatgctccgaaaggtcggaatgtgattacaaaccagcccctagatagcgacatcgtggctagtagcttcctgaaatctgataagaaccgtattggcggaacatataagaaaacaatctataaagaatataaagacgactcgtatactgacgaagtcgctcagcctgcctggctagggtttctgggtcccgtgcttcaggccgaggttggggacgtcatcctaatccatttgaaaaacttcgccacccgcccatacacaatccatccacatggagtgttctacgaaaaggattccgagggctccctctaccctgatggcagtagcggaccactgaaggcagatgatagtgtccccccagggggaagccacatttataattggacaattccggaaggccacgctcctacggatgctgaccctgcatgtttgacatggatttaccattcccacgtggacgcaccgagggatattgcaacagggctgattggaccccttattacctgcaaacggggagcgctagacgggaattccccaccgcagagacaggatgtggatcacgactttttcttactgttctcagtcgtggacgaaaatctgtcctggcacctgaatgagaatatagccacctattgtagtgaccccgcttcggtcgacaaggaggatgaaaccttccaggagtccaacagaatgcatgctatcaatggcttcgtttttggaaacctccctgaactcaacatgtgtgcccagaaacgcgtggcatggcacctgtttgggatgggaaacgaaattgatgtgcatactgcctttttccacggacaaatgctgactactcgtggtcaccatacagatgtggccaacatattcccagctaccttcgtgactgccgagatggtgccatgggaacccggaacctggctgatctcctgccaggtgaattcccatttccgggacggcatgcaagccctctataaggtgaagagctgttctatggcccctccagtggacttgctgacaggcaaagtaaggcaatactttattgaggctcacgagattcagtgggactatggacccatgggccacgacggctccactgggaagaaccttagggaacctggctcaatctccgacaagttttttcaaaaatcgtcgtctcggataggcggtacctactggaaggtccggtacgaagccttccaggatgagactttccaggagaaaatgcacctagaggaagaccgacacctgggaatcttagggcctgtcatcagggcagaggtcggtgacacaatccaagttgttttttacaaccgggcaagccagcccttttcaatgcaaccacatggagtattttacgagaaggactatgaagggactgtgtataacgacgacccaatcagagacaccaactccggtcttgtcggacccctgctggtttgccgcgctggagccctgggcgctgacggtaaacagaaaggagttgacaaggagttttttctgctctttactgtgctagatgaaaataaatcgtggtacagcaacgccaaccaggccgctgcgatgctggattttagacttctgtcagaggacatagagggcttccaggatagtaatcgaatgcacgcgattaacggattccttttttctaatttaccccgacttgatatgtgtaagggcgacactgtggcatggcatttgctaggccttggaaccgagacagacgttcacggcgtaatgttccaggggaataccgtgcagctgcaggggatgcgtaaaggcgctgcgatgctcttcccacacaccttcgtgatggctattatgcagcctgataacctgggaacatttgaaatctattgccaggcaggaagccaccgcgaggccggtatgcgagctatctacaacgtgtcccagtgccctggccaccaggccactcctaggcagcggtaccaggctgctcgaatttactatattatggcggaagaggtcgagtgggactactgccctgacaggagctgggagagggaatggcacaatcagtccgagaaggattcctacgggtacatatttttatccaataaagatggattattgggatcacgctacaagaaagccgtgtttcgagaatacaccgacggcactttccgaatcccaagaccccgaactggtcctgaagaacacctggggatccttggccctctgattaagggcgaggtaggcgacatccttactgtcgtgttcaaaaataacgccagccgtccatactctgtgcacgcacacggcgtgctggagagtactaccgtgtggccactggccgctgaaccatag

SEQ ID NO: 324770 - DNA, 2436 bp, Artificial Sequence
  derived and/or modified sequence
atggagagcggccacctgctgtgggccctgctgttcatgcagagcctgtggccccagctgaccgacggcgccaccagagtgtactacctgggcatcagagacgtgcagtggaactacgcccccaagggcagaaacgtgatcaccaaccagcccctggacagcgacatcgtggccagcagcttcctgaagagcgacaagaacagaatcggcggcacctacaagaagaccatctacaaggagtacaaggacgacagctacaccgacgaggtggcccagcccgcctggctgggcttcctgggccccgtgctgcaggccgaggtgggcgacgtgatcctgatccacctgaagaacttcgccaccagaccctacaccatccacccccacggcgtgttctacgagaaggacagcgagggcagcctgtaccccgacggcagcagcggccccctgaaggccgacgacagcgtgccccccggcggcagccacatctacaactggaccatccccgagggccacgcccccaccgacgccgaccccgcctgcctgacctggatctaccacagccacgtggacgcccccagagacatcgccaccggcctgatcggccccctgatcacctgcaagagaggcgccctggacggcaacagccccccccagagacaggacgtggaccacgacttcttcctgctgttcagcgtggtggacgagaacctgagctggcacctgaacgagaacatcgccacctactgcagcgaccccgccagcgtggacaaggaggacgagaccttccaggagagcaacagaatgcacgccatcaacggcttcgtgttcggcaacctgcccgagctgaacatgtgcgcccagaagagagtggcctggcacctgttcggcatgggcaacgagatcgacgtgcacaccgccttcttccacggccagatgctgaccaccagaggccaccacaccgacgtggccaacatcttccccgccaccttcgtgaccgccgagatggtgccctgggagcccggcacctggctgatcagctgccaggtgaacagccacttcagagacggcatgcaggccctgtacaaggtgaagagctgcagcatggccccccccgtggacctgctgaccggcaaggtgagacagtacttcatcgaggcccacgagatccagtgggactacggccccatgggccacgacggcagcaccggcaagaacctgagagagcccggcagcatcagcgacaagttcttccagaagagcagcagcagaatcggcggcacctactggaaggtgagatacgaggccttccaggacgagaccttccaggagaagatgcacctggaggaggacagacacctgggcatcctgggccccgtgatcagagccgaggtgggcgacaccatccaggtggtgttctacaacagagccagccagcccttcagcatgcagccccacggcgtgttctacgagaaggactacgagggcaccgtgtacaacgacgaccccatcagagacaccaacagcggcctggtgggccccctgctggtgtgcagagccggcgccctgggcgccgacggcaagcagaagggcgtggacaaggagttcttcctgctgttcaccgtgctggacgagaacaagagctggtacagcaacgccaaccaggccgccgccatgctggacttcagactgctgagcgaggacatcgagggcttccaggacagcaacagaatgcacgccatcaacggcttcctgttcagcaacctgcccagactggacatgtgcaagggcgacaccgtggcctggcacctgctgggcctgggcaccgagaccgacgtgcacggcgtgatgttccagggcaacaccgtgcagctgcagggcatgagaaagggcgccgccatgctgttcccccacaccttcgtgatggccatcatgcagcccgacaacctgggcaccttcgagatctactgccaggccggcagccacagagaggccggcatgagagccatctacaacgtgagccagtgccccggccaccaggccacccccagacagagataccaggccgccagaatctactacatcatggccgaggaggtggagtgggactactgccccgacagaagctgggagagagagtggcacaaccagagcgagaaggacagctacggctacatcttcctgagcaacaaggacggcctgctgggcagcagatacaagaaggccgtgttcagagagtacaccgacggcaccttcagaatccccagacccagaaccggccccgaggagcacctgggcatcctgggccccctgatcaagggcgaggtgggcgacatcctgaccgtggtgttcaagaacaacgccagcagaccctacagcgtgcacgcccacggcgtgctggagagcaccaccgtgtggcccctggccgccgagccctag

SEQ ID NO: 324771 - protein, 136 aa, Artificial Sequence
  derived and/or modified sequence
MDDWKSRLVIKSMLPHFAMVGNRQEPRKLQESGKKPSWMEEEDLSFLYKSSPGRKHQGTVKRRQEEDHFQFPDMADGGYPNKIKRPCLEDVTLAMGPGAHPSTACAELQVPPLTINPSPAAMGVAGQSLLLENNPM

SEQ ID NO: 324772 - DNA, 411 bp, Artificial Sequence
  derived and/or modified sequence
atggatgactggaagtctaggctggtgatcaagtccatgctgccacactttgctatggtgggaaacagacaagagcccaggaaactgcaggagtctggcaaaaagccctcttggatggaggaagaagacctgtcattcctgtataagagttctccaggccgcaagcaccaaggtacagtcaaacgacgccaggaagaggaccactttcagtttcccgacatggccgatggtgggtatcctaataaaatcaaaaggccgtgcttggaagacgtaacactggccatggggccgggcgcgcatccctcgaccgcctgcgccgaactgcaagttcctcccctgacaataaatccttctccggctgccatgggcgtggcaggtcagtccctcctgctggagaacaatccaatgtag

SEQ ID NO: 324773 - DNA, 411 bp, Artificial Sequence
  derived and/or modified sequence
atggatgactggaagagccggctggtgatcaagtccatgctgccccactttgccatggtgggcaaccggcaggagcccaggaagctgcaggagagcggcaagaagcccagctggatggaggaggaggacctgtccttcctgtacaagagcagccctggcaggaagcaccagggcaccgtgaagaggcggcaggaggaggaccacttccagttcccagacatggctgatggcggctaccccaacaagatcaagaggccctgcctggaggatgtgaccctggccatgggccctggggcccaccccagcacagcctgtgccgagctgcaggtgccccccctgaccatcaaccccagccctgctgccatgggcgtggccggccagagcctgctgctggagaacaaccccatgtag

SEQ ID NO: 324774 - DNA, 591 bp, Artificial Sequence
  derived and/or modified sequence
aatcaagcctgggcaatggcgggcgcccctcccccagcctcgctgctgccttgcagtttgatctgactgctgtgctagcaatcagcgagactccgtgggcgtaggaccctctgagccagccctgtgtctaggtcgtttgggaaacgccttggagagtcaagaataaatttgcaggtcaaacaatggatgactggaaaagtcggcttgtaatcaagagcatgcttccccatttcgccatggtgggaaatcgtcaggagcccagaaagctccaggaatcgggaaagaagccctcgtggatggaggaagaagatttatcttttctctacaagagcagcccaggaagaaagcatcagggaactgttaagaggagacaagaagaagaccacttccagtttccagacatggctgatgggggctaccctaataaaattaagaggccttgccttgaagatgtcacccttgcaatgggcccaggtgctcatcctagtactgcttgtgcagaactgcaggtccctccattgacaataaatcctagccctgcggctatgggagtggctggccagtcattactgctggagaataaccctatga

SEQ ID NO: 324775 - DNA, 411 bp, Artificial Sequence
  derived and/or modified sequence
atggacgactggaagagccggctggtgatcaagagcatgctgccccactttgccatggtcggtaacagacaagagcccaggaagttacaggaaagcgggaagaagccttcttggatggaagaggaggatctttcattcctgtataaatcttcccctggccgcaaacatcagggaactgtcaagagacgacaggaagaggaccatttccaattccccgacatggcagacggcggttaccccaacaaaattaagcggccatgtcttgaggacgtcacattggccatgggtcctggagcccatccatccactgcttgcgccgaactacaggtcccgcccttaacaattaatccatccccggcagcaatgggtgtggcaggccagagcctgctgctggagaataacccaatgtag

SEQ ID NO: 324776 - DNA, 411 bp, Artificial Sequence
  derived and/or modified sequence
atggacgactggaagagtagactcgtgattaaatccatgctgccacactttgccatggtgggaaaccgacaggagcctaggaagttacaggagtcaggtaaaaaaccttcctggatggaggaagaagatctgtcctttctgtacaagagctccccaggcaggaagcaccagggtactgtcaagaggaggcaggaagaagaccacttccaatttcccgatatggctgatggcggataccctaataagataaaacggccttgtctggaggatgtgaccctggcgatggggcctggagcacatcccagcaccgcctgcgccgagctgcaggtgcccccactcactatcaatccctcccctgccgcaatgggggtcgcaggtcaaagcctgttacttgagaataatcctatgtag

SEQ ID NO: 324777 - DNA, 411 bp, Artificial Sequence
  derived and/or modified sequence
atggacgactggaagagcagactggtgatcaagagcatgctgccccacttcgccatggtgggcaacagacaggagcccagaaagctgcaggagagcggcaagaagcccagctggatggaggaggaggacctgagcttcctgtacaagagcagccccggcagaaagcaccagggcaccgtgaagagaagacaggaggaggaccacttccagttccccgacatggccgacggcggctaccccaacaagatcaagagaccctgcctggaggacgtgaccctggccatgggccccggcgcccaccccagcaccgcctgcgccgagctgcaggtgccccccctgaccatcaaccccagccccgccgccatgggcgtggccggccagagcctgctgctggagaacaaccccatgtag

SEQ ID NO: 324778 - protein, 214 aa, Artificial Sequence
  derived and/or modified sequence
MIMQQGMASSSPGATEPFTFGNTKPLSHFVSEPGPQKMPSMPTTSRQPSLLHYLQQPTPTQASSATASSTATATLQLQQQQQQQQQQPDHSSFLLQQMMQQPQRFQRSVASDSMPALPRQTHVDKACKLGEARHPQVSLGRQPPSCQALGSESFLPGSSFAHELARVTSSYSTSEAAPWGSWDPKAWRQVPAPLLPSCDATARGTEIRSYGNDP

SEQ ID NO: 324779 - DNA, 645 bp, Artificial Sequence
  derived and/or modified sequence
atgataatgcagcagggaatggcatcgtcgagtccaggtgcgacggaacccttcacttttgggaataccaagcccctatcccatttcgtgagtgagccaggaccgcagaagatgcctagtatgcctaccacctctagacagcctagccttctccattatctgcaacagccaaccccaacccaggcaagttctgcaactgcttcgtccaccgccacagccactttgcagctccagcagcagcagcaacagcagcagcagcagccggaccattcgtcgtttctcctccaacagatgatgcaacagccgcagaggttccagaggtcggtagcctcagactctatgccagccctgccacgccaaacccacgtggacaaggcctgtaagcttggcgaggcacggcacccacaggtgagcttgggacgccagccgccctcttgtcaggcattaggctccgagtccttcctgccaggatcctcctttgcccatgagcttgctcgggtgacgtcttcctactccactagtgaagctgccccatggggaagctgggacccaaaggcatggcgccaggtaccagcccctttattaccctcctgtgatgctaccgcccgaggcaccgaaatacgcagttacggtaatgacccatag

SEQ ID NO: 324780 - DNA, 645 bp, Artificial Sequence
  derived and/or modified sequence
atgatcatgcagcagggcatggccagcagcagccctggggccacagagcccttcaccttcggcaacaccaagcccctgagccactttgtgtctgagcccggcccccagaagatgcccagcatgcccaccaccagccggcagcccagcctgctgcactacctgcagcagcccacccccacccaggccagcagcgccacagccagcagcacagccacagccaccctgcagctgcagcagcagcagcagcagcagcagcagcagcctgaccacagcagcttcctgctgcagcagatgatgcagcagccccagcgcttccagaggtctgtggccagtgacagcatgcctgccctgccccggcagacccacgtggacaaggcctgcaagctgggggaggcccggcacccccaggtgtccctgggccggcagccccccagctgccaggccctgggcagcgagagcttcctgcccggcagcagctttgcccacgagctggcccgggtgaccagcagctacagcaccagcgaggccgccccctggggctcctgggaccccaaggcctggaggcaggtgcctgcccccctgctgcccagctgtgatgccacagcccggggcacagagatccgctcctatggaaatgacccctag

SEQ ID NO: 324781 - DNA, 1051 bp, Artificial Sequence
  derived and/or modified sequence
ctgatccgaagcctcactcccaccagtaatcttctaagccagcaacagcagcagcagcagcagcagcagcaagcaaatgtgatctttaagcccataagcagcaactcatccaaaaccctgagcatgatcatgcagcaggggatggcaagctccagcccaggagccacggagccatttacttttggcaacaccaagcccttgtcccattttgtttctgagccgggtccccagaagatgccctccatgcctaccacctctaggcagccttccctgctccactacctgcagcagccgacaccaacgcaggcctcctcagccactgcctcctccacggccactgccaccttgcagctgcagcagcagcagcagcaacagcagcagcagcctgaccattcttcattccttctgcagcagatgatgcagcaaccccagcgttttcagcgatcagtggcctcagattccatgcctgctctgcccagacagactcatgtagacaaagcctgcaagcttggggaagccaggcacccccaggtcagcctcgggcgacagcccccgtcctgccaggccctggggagtgagtccttcctgcccggcagctcctttgctcatgagctggcccgagtcacctcctcgtacagcacctcagaggcagcgccctggggcagctgggatccgaaggcctggaggcaggtgcccgctccactactgcctagctgcgacgccacagcaagaggaacagagatcaggtcttatggcaatgacccctgaacggcagaatgcatatatctcccaacagatgagtccatttgaagccgtccaagaacaagtcacctccaagtgtagccggatcaaggcaagccccccatctagcaagcacttgatgccacccagaactgggcttcttcagaacaatctgagtccaggaatgatcccactcaccaggcaccagagctgcgagggcatgggagtgatctcaccaactctggggaagcggcaaggaattttcacctccagcccccagtgtcccatcctctcacactcaggccagact

SEQ ID NO: 324782 - DNA, 645 bp, Artificial Sequence
  derived and/or modified sequence
atgatcatgcagcagggcatggccagcagcagccccggcgccaccgagccgttcacttttggcaacactaaacccctaagccactttgtaagcgaacccggcccccagaaaatgccttccatgccaacaacttcccgtcagcccagcctactgcattatcttcaacagcctactccaacccaagcctctagtgccaccgcttcttccaccgcaacggcaaccttacagcttcagcaacagcagcagcagcagcagcagcaaccagatcactccagcttcttgttacagcaaatgatgcagcaaccccagagatttcaacgatcagtggcctccgatagcatgcctgcactcccacggcagacccatgtggataaggcgtgcaaactcggggaggcccgacatccacaggtgagtctgggaaggcagccccctagctgtcaggcgctgggatctgagtccttcctcccgggaagctcgtttgcccacgagctggccagggtgacaagctcttactcgacctcagaggctgctccctggggcagctgggaccccaaagcttggcggcaggtgcctgcaccgctccttccctcatgcgacgccacagcccgggggaccgagatacgtagctacggcaacgacccctag

SEQ ID NO: 324783 - DNA, 645 bp, Artificial Sequence
  derived and/or modified sequence
atgattatgcagcagggaatggcctcgtcgagtccgggagctacagagccatttaccttcggtaacactaagccactgagtcacttcgtaagtgaacctggcccacagaagatgcctagcatgccaacaacctccaggcagccgtctctgctgcactaccttcagcagccgacacccacacaggcttcatccgccactgcctcatctacagctacggcaactttgcagttgcaacagcaacagcagcagcagcaacaacagcctgatcacagcagctttctcctgcaacaaatgatgcagcagcctcagagatttcagcgatctgtggctagcgatagcatgcccgctctcccgcgtcagactcacgtagacaaagcctgcaaattaggggaagccagacacccacaagtaagtctggggaggcagcccccatcatgccaggctctgggaagcgagagctttctgcccggatctagcttcgctcacgagctagctcgcgtcacaagcagctattcgacatctgaggctgcgccttggggttcatgggatcccaaagcttggcgccaggtgcccgcacccttgctgccgagttgcgatgccacagccagaggcaccgaaatcaggtcatatggcaatgatccgtag

SEQ ID NO: 324784 - DNA, 645 bp, Artificial Sequence
  derived and/or modified sequence
atgatcatgcagcagggcatggccagcagcagccccggcgccaccgagcccttcaccttcggcaacaccaagcccctgagccacttcgtgagcgagcccggcccccagaagatgcccagcatgcccaccaccagcagacagcccagcctgctgcactacctgcagcagcccacccccacccaggccagcagcgccaccgccagcagcaccgccaccgccaccctgcagctgcagcagcagcagcagcagcagcagcagcagcccgaccacagcagcttcctgctgcagcagatgatgcagcagccccagagattccagagaagcgtggccagcgacagcatgcccgccctgcccagacagacccacgtggacaaggcctgcaagctgggcgaggccagacacccccaggtgagcctgggcagacagccccccagctgccaggccctgggcagcgagagcttcctgcccggcagcagcttcgcccacgagctggccagagtgaccagcagctacagcaccagcgaggccgccccctggggcagctgggaccccaaggcctggagacaggtgcccgcccccctgctgcccagctgcgacgccaccgccagaggcaccgagatcagaagctacggcaacgacccctag

SEQ ID NO: 324785 - protein, 587 aa, Artificial Sequence
  derived and/or modified sequence
MSAGDAVCTGWLVKSPPERKLQRYAWRKRWFVLRRGRMSGNPDVLEYYRNKHSSKPIRVIDLSECAVWKHVGPSFVRKEFQNNFVFIVKTTSRTFYLVAKTEQEMQVWVHSISQVCNLGHLEDGAADSMESLSYTPSSLQPSSASSLLTAHAASSSLPRDDPNTNAVATEETRSESELLFLPDYLVLSNCETGRLHHTSLPTRCDSWSNSDRSLEQASFDDVFVDCLQPLPSSHLVHPSCHGSGAQEVPSSRPQAALIWSREINGPPRDHLSSSPLLESSLSSTIQVDKNQGSLPCGAKELDIMSNTPPPRPPKPSHLSERRQEEWSTHSGSKKPECTLVPRRISLSGLDNMRTWKADVEGQSLRHRDKRLSLNLPCRFSPMYPTASASIEDSYVPMSPQAGASGLGPHCSPDDYIPMNSGSISSPLPELPANLEPPPVNRDLKPQRKSRPPPLDLRNLSIIREHASLTRTRTVPCSRTSFLSPERNGINSARFFANPVSREDEESYIEMEEHRTASSLSSGALTWTKKFSLDYLALDFNSASPAPMQQKLLLSEEQRVDYVQVDEQKTQALQSTKQEWTDERQSKV

SEQ ID NO: 324786 - DNA, 2028 bp, Artificial Sequence
  derived and/or modified sequence
cttctgccgcgggcggctggcccagctggaggaagcggcggcggcggccacgatgagtgcgggcgacgcagtgtgcaccggctggctcgttaagtcgccccccgagaggaagctacagcgctacgcctggcgcaagcgctggtttgtcctccggcgaggccgcatgagcggcaaccccgatgtcttggagtactacaggaacaagcactccagcaagcccatccgggtgatagacctcagcgagtgtgcagtgtggaagcatgtgggccccagctttgttcggaaggaatttcagaataatttcgtgttcattgtcaagactacttcccgtacattctacctggtggccaaaactgagcaagaaatgcaggtgtgggtgcacagcatcagtcaggtctgcaaccttggccacctggaggatggtgcagcagattccatggagagcctctcttacacgccctcctccctgcagccatcctctgccagctcccttcttaccgcccatgctgccagctcctctttgccaagagatgacccaaacactaatgccgtagccactgaggaaaccagaagtgagtcagagcttctcttccttccagattatctggttttgtccaactgcgagactggaagactgcaccataccagtctacccaccagatgtgatagctggtcaaactcagaccgttcattggaacaggcttcatttgatgatgtttttgttgactgcctgcagccgctcccctccagtcatttggtccacccctcatgccatggcagtggagctcaggaggtgccatcctcgaggcctcaggctgccctgatctggagtagagaaatcaatgggccacccagggaccacttgtcttcttcaccattgctggaaagttccttaagttccaccattcaggtagataaaaatcaaggttccttaccctgtggagcaaaagaactagacattatgtccaacactccacctccccgcccccctaagccaagccatctgtctgaacggcgccaagaggagtggagtacacacagtggtagcaagaagccagaatgcactctggttccaagaagaatctccctctctggtttagacaacatgagaacctggaaagctgatgtagaaggccaatccttaagacaccgagacaagcggcttagtttgaatttgccatgcaggttctccccgatgtaccccacagcttcagccagtatcgaagacagctatgtgcccatgagcccccaggctggtgcctctggtcttggaccccactgcagccctgatgactacattccaatgaactcaggaagcatctcaagcccgttgcctgagctgcctgcaaacctggaacctcccccagtgaatagagatctcaagcctcagaggaaatcacggccacctcctctggacctgagaaacctctcgatcatccgggaacatgcatctcttaccaggacccgcactgtgccttgcagtcgaaccagctttctctctccagaaagaaatggtattaattctgcaagattttttgctaatcctgtttccagagaagacgaagaaagctacatcgaaatggaggagcaccgaacagccagttccctgagcagtggtgcccttacgtggacaaagaaattcagcctagattatttggccctggacttcaattcagcatcaccagcccccatgcagcagaaacttctcctttcagaagaacaaagagtagactatgtccaagtggatgagcagaagacacaggctctccagagcacaaaacaggagtggacggatgaaaggcaatccaaagtatgagaggtgcgggcttgtgccatgtgtgaaacagggaagcttggggctcagtttgagttttttcttttttttttttttttgtccactaaaaacacactgatggtcaacacaggtcaaaaccaagagagaatgtgtagttttcaaggtcttggccagaacctttaggaaagaagacctgtttatacattgaaggaagaaaagaaggaagcagttgc

SEQ ID NO: 324787 - protein, 343 aa, Artificial Sequence
  derived and/or modified sequence
MLLLKKHTEDISSVYEIRERLGSGAFSEVVLAQERGSAHLVALKCIPKKALRGKEALVENEIAVLRRISHPNIVALEDVHESPSHLYLAMELVTGGELFDRIMERGSYTEKDASHLVGQVLGAVSYLHSLGIVHRDLKPENLLYATPFEDSKIMVSDFGLSKIQAGNMLGTACGTPGYVAPELLEQKPYGKAVDVWALGVISYILLCGYPPFYDESDPELFSQILRASYEFDSPFWDDISESAKDFIRHLLERDPQKRFTCQQALRHLWISGDTAFDRDILGSVSEQIRKNFARTHWKRAFNATSFLRHIRKLGQIPEGEGASEQGMARHSHSGLRAGQPPKW

SEQ ID NO: 324788 - protein, 43 aa, Artificial Sequence
  derived and/or modified sequence
MLLLKKHTEDISSVYEIRERLGSGAFSEVVLAQERGSAHLVAL

SEQ ID NO: 324789 - protein, 224 aa, Artificial Sequence
  derived and/or modified sequence
MLLLKKHTEDISSVYEIRERLGSGAFSEVVLAQERGSAHLVALKCIPKKALRGKEALVENEIAVLRRISHPNIVALEDVHESPSHLYLAMELVTGGELFDRIMERGSYTEKDASHLVGQVLGAVSYLHSLGIVHRDLKPENLLYATPFEDSKIMVSDFGLSKIQAGNMLGTACGTPGYVAPELLEQKPYGKAVDVWALGVISYILLCGYPPFYDESDPELFSQI

SEQ ID NO: 324790 - protein, 86 aa, Artificial Sequence
  derived and/or modified sequence
MLLLKKHTEDISSVYEIRERLGSGAFSEVVLAQERGSAHLVALKCIPKKALRGKEALVENEIAVLRRISHPNIVALEDVHESPSHL

SEQ ID NO: 324791 - protein, 81 aa, Artificial Sequence
  derived and/or modified sequence
  misc_feature (1)..(1): Xaa can be any naturally occurring amino acid
XISGDTAFDRDILGSVSEQIRKNFARTHWKRAFNATSFLRHIRKLGQIPEGEGASEQGMARHSHSGGPQGLSFLHGCCVLR

SEQ ID NO: 324792 - protein, 226 aa, Artificial Sequence
  derived and/or modified sequence
MLLLKKHTEDISSVYEIRERLGSGAFSEVVLAQERGSAHLVALKCIPKKALRGKEALVENEIAVLRRISHPNIVALEDVHESPSHLYLAMELVTGGELFDRIMERGSYTEKDASHLVGQVLGAVSYLHSLGIVHRDLKPENLLYATPFEDSKIMVSDFGLSKIQAGNMLGTACGTPGYVAPELLEQKPYGKAVDVWALGVISYILLCGYPPFYDESDPELFSQILR

SEQ ID NO: 324793 - DNA, 390 bp, Artificial Sequence
  derived and/or modified sequence
atgcccagaagaggcagatggctgagctgcagccccgaggccgagggcatcagaagagtgggcagcagagccgccctgagagtgcaccccctggagcacagacccagatggggcacccccggcggcatgaccaagggcagcagattcctggcccccgagagcgagctgagctggggccccggcgacgccacccccggcctgtggttcttcatcagcgacggcgtgggcgaggacctgtggaacagcgccggctggagcagcgtgcccgagggcttcggccagagaatgagaggccccggcctgaccccccacaccgacgccggcggcgacggcaacaagagaagacacagcgagagactgtgcagagccagcgtgctgcagcccccctag

SEQ ID NO: 324794 - DNA, 390 bp, Artificial Sequence
  derived and/or modified sequence
atgccccggcggggccgctggctgagctgcagccctgaggccgagggcatccggcgggtgggcagccgggccgccctgcgggtgcaccccctggagcaccggccccgctggggcacccctgggggcatgaccaagggcagccgcttcctggcccctgagagcgagctgtcctggggccctggagatgccaccccaggcctgtggttcttcatcagtgatggagtgggggaggacctgtggaacagcgctggctggagctctgtgcctgagggcttcggccagaggatgaggggccctggcctgaccccccacacagatgctggaggagatggcaacaagaggaggcacagcgagcggctgtgccgggcctctgtgctgcagcccccatag

SEQ ID NO: 324795 - DNA, 561 bp, Artificial Sequence
  derived and/or modified sequence
ctttctccccgctcctggcaggctgcagccgtctcctcccggtgctccctccttccttgagctctctccaccgctgcccactgggggctacagcttcccggctaccctggaagctggaggccgggaccagctcttcagacatgctgctgctgaagaaacacacggaggacatcagcagcgtctacgagatccgcgagaggctcggctcgggtgccttctccgaggtggtgctggcccaggagcggggctccgcacacctcgtggccctcaagtgcatccccaagaaggccctccggggcaaggaggccctggtggagaacgagatcgcagtgctccgtaggatcagtcaccccaacatcgtcgctctggaggatgtccacgagagcccttcccacctctacctggccatggaactgtgaggagggcctgggcaggctgtgggagccggggagggactgagcagtgagtggggctgaaggccaggctgagtgcctgggtcagccaaacccctggcacccccagggtgacgggtggcgagctgtttgaccgcatcatggagcg

SEQ ID NO: 324796 - DNA, 1525 bp, Artificial Sequence
  derived and/or modified sequence
atgatctcaataaaaggaatgctctggctgctgggtagagaagaaagcgaggacatgctgctgctgaagaaacacacggaggacatcagcagcgtctacgagatccgcgagaggctcggctcgggtgccttctccgaggtggtgctggcccaggagcggggctccgcacacctcgtggccctcaagtgcatccccaagaaggccctccggggcaaggaggccctggtggagaacgagatcgcagtgctccgtaggatcagtcaccccaacatcgtcgctctggaggatgtccacgagagcccttcccacctctacctggccatggaactggtgacgggtggcgagctgtttgaccgcatcatggagcgcggctcctacacagagaaggatgccagccatctggtgggtcaggtccttggcgccgtctcctacctgcacagcctggggatcgtgcaccgggacctcaagcccgaaaacctcctgtatgccacgccctttgaggactcgaagatcatggtctctgactttggactctccaaaatccaggctgggaacatgctaggcaccgcctgtgggacccctggatatgccgagccagtgacactgagcggcatggctgcgtgtgtgcctgtgcgtgcgtctgtctgtctctggcccccagccccagagctcttggagcagaaaccctacgggaaggccgtagatgtgtgggccctgggcgtcatctcctacatcctgctgtgtgggtacccccccttctacgacgagagcgaccctgagctcttcagccagatcctgagggccagctatgagtttgactctcctttctgggatgacatctcagaatcagccaaagacttcatccggcaccttctggagcgagacccccagaagaggttcacctgccaacaggccttgcggcacctttggatctctggggacacagccttcgacagggacatcttaggctctgtcagtgagcagatccggaagaactttgctcggacacactggaagcgagccttcaatgccacctcgttcctgcgccacatccggaagctggggcagatcccagagggcgagggggcctctgagcagggcatggcccgccacagccactcaggcctccgtgctggccagccccccaagtggtgatgcccaggcagatgccgaggccaagtggactgacccccagatttccttcccttggatgctttcggtcccctcccccaacccctccccctggggctggcctctgctggattttgagatttgagggtgtggcgcatggcgctggggttggaatggggcacccccaagtctgtccccaggctctgccctgcctgggggcagtggctcccctcccctgttgcctctcccgcccctgccccccccgccccgccaaaagccgagggggtgctggcaggcgggcctcaggggctgtctttcctgcacggctgttgtgtgcttcgctgagtgtgggtggtcctgcttgtgtcatggtcatggccttccagccccctcc

SEQ ID NO: 324797 - DNA, 754 bp, Artificial Sequence
  derived and/or modified sequence
ctggaaagcggccggatgtgtggaggcagagaggcagcatccaggcgctggtcgccttcggggtgcgggggaggacatgctgctgctgaagaaacacacggaggacatcagcagcgtctacgagatccgcgagaggctcggctcgggtgccttctccgaggtggtgctggcccaggagcggggctccgcacacctcgtggccctcaagtgcatccccaagaaggccctccggggcaaggaggccctggtggagaacgagatcgcagtgctccgtaggatcagtcaccccaacatcgtcgctctggaggatgtccacgagagcccttcccacctctacctggccatggaactggtgacgggtggcgagctgtttgaccgcatcatggagcgcggctcctacacagagaaggatgccagccatctggtgggtcaggtccttggcgccgtctcctacctgcacagcctggggatcgtgcaccgggacctcaagcccgaaaacctcctgtatgccacgccctttgaggactcgaagatcatggtctctgactttggactctccaaaatccaggctgggaacatgctaggcaccgcctgtgggacccctggatatgtggccccagagctcttggagcagaaaccctacgggaaggccgtagatgtgtgggccctgggcgtcatctcctacatcctgctgtgtgggtacccccccttctacgacgagagcgaccctgagctcttcagccagatcctgagg

SEQ ID NO: 324798 - DNA, 498 bp, Artificial Sequence
  derived and/or modified sequence
ggaggcgcccggcccggccaccgagcggcagcggcggacgaggggcggccccgacccccgcgtgcccgggggccacccgttgcccggacttcacccctccgcggcggctccgggggtcgggcgggggccggcggcctgctgggggaggaggccgcggcgggcgggggaactcacctccgccgttcttgtagcacagacatgctgctgctgaagaaacacacggaggacatcagcagcgtctacgagatccgcgagaggctcggctcgggtgccttctccgaggtggtgctggcccaggagcggggctccgcacacctcgtggccctcaagtgcatccccaagaaggccctccggggcaaggaggccctggtggagaacgagatcgcagtgctccgtaggatcagtcaccccaacatcgtcgctctggaggatgtccacgagagcccttcccacctctacctggccatggaactgtgaggagggcctgggcaggctgtg

SEQ ID NO: 324799 - protein, 366 aa, Artificial Sequence
  derived and/or modified sequence
MLLLKKHTEDISSVYEIRERLGSGAFSEVVLAQERGSAHLVALKCIPKKALRGKEALVENEIAVLRRISHPNIVALEDVHESPSHLYLAMELVTGGELFDRIMERGSYTEKDASHLVGQVLGAVSYLHSLGIVHRDLKPENLLYATPFEDSKIMVSDFGLSKIQAGNMLGTACGTPGYAEPVTLSGMAACVPVRASVCLWPPAPELLEQKPYGKAVDVWALGVISYILLCGYPPFYDESDPELFSQILRASYEFDSPFWDDISESAKDFIRHLLERDPQKRFTCQQALRHLWISGDTAFDRDILGSVSEQIRKNFARTHWKRAFNATSFLRHIRKLGQIPEGEGASEQGMARHSHSGLRAGQPPKW

SEQ ID NO: 324800 - DNA, 1032 bp, Artificial Sequence
  derived and/or modified sequence
atgctgctgctaaaaaagcacaccgaagacatttcttcggtatacgaaattagggagcgcctgggctcaggtgcatttagtgaggtggtcttagcccaagagcgggggagcgctcacctggtagctctgaagtgtatacctaaaaaggcactgcgggggaaagaagctctggttgagaacgaaatagccgtgctgcgccgcattagccacccgaatattgtggccctcgaggacgtccatgagtctccaagtcacctgtacctggccatggaactagttactggaggcgagttattcgatagaattatggagaggggatcctacacggagaaggatgcaagccatctggtgggacaggtcctgggcgctgttagttatctccatagcttaggaatagtccaccgcgacttaaagcccgaaaacctgctgtacgctacaccctttgaggattctaaaattatggtttcagatttcggcctgtccaagattcaagctggtaacatgctcggcactgcgtgcggcacacctggctatgtggcccctgaattgctggaacaaaaaccatatggcaaggccgttgacgtctgggctttaggcgtcatcagctatatattgctgtgtggctatcctccattctacgatgaatcggaccccgaactgtttagccagattctgcgcgccagttatgagttcgactcaccgttctgggacgatatttccgaatccgcgaaagactttatccgccatctgttagagagggaccctcagaagcgttttacctgccagcaggcactccgacatctatggatcagcggcgacacagccttcgatcgtgacatcctcgggagtgtgagcgagcagatccggaaaaattttgccagaacccactggaaacgggcatttaatgccacgagttttttgcgccacatccgcaagttaggccagatccctgagggcgaaggggccagtgaacaaggcatggctcggcacagtcacagcggcctccgagccgggcagccccccaagtggtag

SEQ ID NO: 324801 - DNA, 1101 bp, Artificial Sequence
  derived and/or modified sequence
atgctcctcctgaagaaacataccgaagacatcagctccgtgtatgaaatccgagagcggttaggctcaggagcatttagcgaggtggtcctggcacaggagcgtgggagcgcccacctcgtggcgctgaaatgcatccccaaaaaggccctgcggggcaaagaagccttggtggaaaatgagattgctgtgttgcggcgcattagccatccaaacatcgtcgcactggaagacgtccatgaaagtcccagccatctgtacctggctatggagctggtgacagggggagagctattcgacagaataatggagagggggtcctataccgagaaagatgcatcccacctggtgggccaggttttaggtgccgtgagctatctgcactctctgggcattgttcacagagaccttaagcctgaaaacctgttgtacgcaacacccttcgaagacagcaagataatggtgtctgattttggactgtctaagattcaggccgggaacatgctagggacggcctgcggtacgcccggatatgccgaacccgtaacactgagcgggatggccgcatgcgttcctgtgagggcaagcgtgtgtctttggccgccagcccctgagcttttagagcagaaaccgtatgggaaggctgttgatgtctgggccctgggcgtgatcagctatatccttctgtgtggataccctccattctacgatgagtccgatccagagcttttctcccagatcttgagagcatcttatgagttcgattcccctttttgggacgatatctcagaatccgccaaagatttcattcgacacctccttgagcgcgatccccagaaaaggtttacttgccagcaggccctgaggcatctctggattagtggcgacaccgcttttgatcgtgatatcctgggctcagtaagtgagcagattcgcaagaattttgctagaacccactggaaaagagcttttaatgctacatccttcttgcggcacattagaaaactgggtcaaattccggagggcgaaggcgcttcagaacaaggtatggctcggcattcacattcaggccttagagctggtcaaccacctaagtggtag

SEQ ID NO: 324802 - DNA, 1032 bp, Artificial Sequence
  derived and/or modified sequence
atgctgctgctcaaaaagcatactgaggacataagctctgtgtatgagattcgggaacgactcgggtcaggagcctttagcgaggttgtgttagctcaggagagaggatccgcacacctcgtagccttaaaatgtattcctaagaaagcgctaaggggaaaggaagcactggttgagaacgaaatcgcagtcctaagaagaatctctcatccaaatatcgtggcactagaggacgtgcacgaatcaccaagccatctctacctggcgatggaactagtaactgggggcgagttgttcgatagaatcatggaacgcggaagctacactgaaaaggatgcatcccacctggtgggccaggttctgggggctgtgtcctatcttcactccctaggcatcgtacatcgcgatctaaaacccgagaacctactctacgccacaccttttgaggatagcaaaatcatggtctcggacttcgggctgagtaaaatccaggctggtaatatgctgggaacagcctgtggtacgcctggatacgttgcgccagaacttttggaacagaaaccctatggcaaggccgtggatgtttgggcactgggcgtcatcagctacatactgctgtgtggttatcctcccttctacgatgagtcagatcccgagctgtttagtcaaatcctgcgcgccagttatgagttcgattcccctttctgggatgacatcagtgaatctgccaaagactttatccgccatcttttggaaagagacccgcagaagaggttcacttgccaacaggctcttagacatctctggatctcgggtgatacagcattcgatcgagacatactcgggtctgtgtccgagcaaatcagaaagaacttcgccagaacccattggaagcgggccttcaacgcgacttcttttttaaggcatatcaggaaattaggccagatccctgagggcgaaggagctagcgagcaaggcatggctcgccactctcattccgggcttcgcgccggccagccacctaaatggtag

SEQ ID NO: 324803 - DNA, 1101 bp, Artificial Sequence
  derived and/or modified sequence
atgctcctgcttaagaaacacaccgaggacattagctccgtgtacgagatcagggaaaggctgggatcaggggcattcagtgaggtcgtcctcgctcaagagagaggttctgcccacctcgtcgcgttgaagtgcattcccaagaaagctctccgtggcaaggaggcgctcgtggaaaatgaaattgccgtcctcaggaggatcagtcaccccaacattgtggccctggaagatgtgcacgagtcaccatcccatctgtacttagctatggaattagttacgggcggagaactgtttgataggattatggagcgaggatcttacacagagaaagatgcctcgcatcttgtgggccaggtgctgggggcagtgtcatacctgcatagcctcggtatagtccatagggacctgaaacctgaaaatctgctgtatgcaacgccattcgaggatagtaaaatcatggtgtcggattttggcctctctaagatccaagccggtaacatgctggggactgcctgtggcacacccggatacgcagaaccagtgactttgtccggtatggccgcatgcgtccctgttagggcatctgtgtgcttatggccacctgcaccagaactgctggagcagaagccatacggcaaggccgtggacgtctgggccttgggggtgataagttatatcttgttatgtggctatcctcccttttatgacgaatcagaccccgagcttttttcccaaattctgcgcgcctcctatgagttcgactcacccttttgggacgacatttctgagagtgccaaggactttattagacacctgttggaacgcgacccccaaaaaagattcacatgtcagcaagccttgcgacacctgtggatctccggcgatacagcctttgacagggatatcttgggaagcgttagcgaacagatccgaaagaacttcgcaagaacacactggaaacgggcgtttaatgccacctccttcctgcgacatatcaggaagctcggccagatcccagaaggggaaggggcatccgaacaaggaatggcaaggcacagtcattcaggactgagggcaggacagccccctaagtggtag

SEQ ID NO: 324804 - DNA, 132 bp, Artificial Sequence
  derived and/or modified sequence
atgctccttctgaagaaacacacagaggacatttcatccgtgtatgaaatacgggaaagactcggctccggtgccttcagtgaagtggttctagcccaggagcgggggagtgcacaccttgtcgctctctag

SEQ ID NO: 324805 - DNA, 675 bp, Artificial Sequence
  derived and/or modified sequence
atgttacttctgaagaagcatacagaggatatcagttctgtgtacgagattagggaaagactcggaagcggcgctttttccgaggtggtgcttgcccaggaacgaggttccgcccatttggtggccctgaagtgtatcccgaagaaggctctgcgagggaaagaagccctggtggagaacgagatcgctgtccttaggcgtatatcccacccgaatatcgtggcactggaggacgtacatgagagtccctcacatctttacctggctatggaacttgtgactggtggtgagctcttcgacaggattatggaaaggggaagttacaccgaaaaggacgcctctcacctcgtgggccaagtcctgggcgctgtgtcctatttgcattccctgggtattgtgcaccgggaccttaagcctgaaaaccttctatatgccaccccgtttgaagactcaaaaattatggtgtcagatttcggcctgtctaagatacaggcaggcaacatgctgggaacggcttgcggcacccctggatacgtggccccagaattactggagcagaagccttacgggaaggcagtggacgtctgggccctcggggtgatctcttatattttgctttgcggttatcctcctttttatgatgagtctgaccccgagctattttcccaaatttag

SEQ ID NO: 324806 - DNA, 132 bp, Artificial Sequence
  derived and/or modified sequence
atgctgcttttgaaaaagcatacggaagacattagcagcgtgtacgagatccgagaaaggctaggttccggggccttttctgaagttgtattagcccaggagagaggttctgcccaccttgttgccctgtag

SEQ ID NO: 324807 - DNA, 132 bp, Artificial Sequence
  derived and/or modified sequence
atgctcttgctgaaaaagcacactgaagatatttcaagcgtttacgagatccgagaaaggctcggttccggcgcattctcagaagtcgtattggcgcaggagaggggttcagcacacctggtggctctctag

SEQ ID NO: 324808 - DNA, 261 bp, Artificial Sequence
  derived and/or modified sequence
atgcttctactgaaaaaacacaccgaagacatcagtagtgtctacgagatcagagagcgcctcggcagcggagccttctctgaggttgttctggcacaagagaggggttctgcacacttggtggccctgaagtgtatacctaagaaggctctgcgtgggaaggaagctctagtagaaaacgagattgctgtgttgagaagaatcagtcaccctaatatcgttgccctcgaggatgttcacgaatctccatcccatctgtag

SEQ ID NO: 324809 - DNA, 246 bp, Artificial Sequence
  derived and/or modified sequence
tgaatttcgggtgataccgcattcgatagggacattctgggtagcgtgagtgagcagatcagaaagaatttcgccaggacccactggaagcgggcattcaacgccacttcattcttgcgacacatccggaaactgggtcagatcccagagggagagggagcaagtgagcaaggaatggcccggcactcccattccggcggaccccagggactgagcttcttgcatgggtgctgtgttcttaggtag

SEQ ID NO: 324810 - DNA, 681 bp, Artificial Sequence
  derived and/or modified sequence
atgctcctccttaaaaaacacacagaggatatctcttctgtgtacgagattcgggagcgtctgggctctggcgccttctcggaggttgtcttagcacaggaacggggcagcgcacatttggtcgcgttgaagtgcatcccgaaaaaggcactccgagggaaggaggcccttgtcgagaatgaaatagctgtgttgcgccgcatcagccaccctaacatagttgctttggaagacgtgcacgaaagtcctagccacctgtacctagccatggagttggtaacaggaggcgagctgttcgataggatcatggagagaggctcttacacggaaaaggacgccagccaccttgtgggccaagtgctgggcgccgtttcgtatttacacagtctggggatagtgcacagggatctgaaacccgagaacctcctgtacgccacaccttttgaagactccaagataatggtaagcgactttggcctgtctaagattcaggcagggaacatgctggggactgcttgcgggacacccggctacgttgcccctgagctgctggaacagaagccctatggaaaagcggtggatgtgtgggcgctaggggtcatctcatatatcctcttgtgtggttatcctcctttttacgacgaatccgatcccgagttattcagccaaatactcagatag

SEQ ID NO: 324811 - DNA, 132 bp, Artificial Sequence
  derived and/or modified sequence
atgctccttcttaagaaacatacagaagacatttccagcgtatacgagatacgggagagactgggaagcggcgccttctccgaagtggtcctggctcaggaaagaggttctgctcatctcgtggccttatag

SEQ ID NO: 324812 - DNA, 1032 bp, Artificial Sequence
  derived and/or modified sequence
atgctgctgctgaagaagcacacagaggacatcagctctgtgtatgagatccgggagcggctgggcagcggggccttcagcgaggtggtgctggcccaggagcggggcagcgcccacctggtggccctgaagtgcatccccaagaaggccctgcggggcaaggaggccctggtggagaatgaaattgctgtgctgcggcgcatcagccaccccaacatcgtggccctggaggatgtgcatgagagccccagccacctgtacctggccatggagctggtgactggaggagagctgtttgaccgcatcatggagcggggcagctacacagagaaggatgccagccacctggtgggccaggtgctgggcgctgtgtcctacctgcacagcctgggcatcgtgcaccgggacctgaagccagagaacctgctgtatgccaccccatttgaggacagcaagatcatggtgtctgactttggcctgagcaagatccaggccggcaacatgctgggcacagcctgtggcaccccaggctacgtggcccctgagctgctggagcagaagccctacggcaaggctgtggatgtgtgggccctgggcgtcatctcctacatcctgctgtgtggctacccacccttctatgatgaaagtgaccctgagctgttcagccagatcctgcgggccagctatgaatttgacagccccttctgggatgacatcagcgagagcgccaaggacttcatccgccacctgctggagcgggacccccagaagcgcttcacctgccagcaggccctgcggcacctgtggatcagcggggacacagcctttgaccgggacatcctgggctctgtgtctgagcagatcaggaagaactttgcccggacccactggaagagggccttcaatgccaccagcttcctgcggcacatcaggaagctgggccagatccctgagggggagggcgccagcgagcagggcatggcccggcacagccacagcggcctgcgggccggccagccccccaagtggtag

SEQ ID NO: 324813 - DNA, 1101 bp, Artificial Sequence
  derived and/or modified sequence
atgctgctgctgaagaagcacacagaggacatcagctctgtgtatgagatccgggagcggctgggcagcggggccttcagcgaggtggtgctggcccaggagcggggcagcgcccacctggtggccctgaagtgcatccccaagaaggccctgcggggcaaggaggccctggtggagaatgaaattgctgtgctgcggcgcatcagccaccccaacatcgtggccctggaggatgtgcatgagagccccagccacctgtacctggccatggagctggtgactggaggagagctgtttgaccgcatcatggagcggggcagctacacagagaaggatgccagccacctggtgggccaggtgctgggcgctgtgtcctacctgcacagcctgggcatcgtgcaccgggacctgaagccagagaacctgctgtatgccaccccatttgaggacagcaagatcatggtgtctgactttggcctgagcaagatccaggccggcaacatgctgggcacagcctgtggcaccccaggctatgcagagcctgtgaccctgagcggcatggccgcctgtgtgcctgtgcgggcctctgtgtgcctgtggcccccagcccctgagctgctggagcagaagccctacggcaaggctgtggatgtgtgggccctgggcgtcatctcctacatcctgctgtgtggctacccacccttctatgatgaaagtgaccctgagctgttcagccagatcctgcgggccagctatgaatttgacagccccttctgggatgacatcagcgagagcgccaaggacttcatccgccacctgctggagcgggacccccagaagcgcttcacctgccagcaggccctgcggcacctgtggatcagcggggacacagcctttgaccgggacatcctgggctctgtgtctgagcagatcaggaagaactttgcccggacccactggaagagggccttcaatgccaccagcttcctgcggcacatcaggaagctgggccagatccctgagggggagggcgccagcgagcagggcatggcccggcacagccacagcggcctgcgggccggccagccccccaagtggtag

SEQ ID NO: 324814 - DNA, 132 bp, Artificial Sequence
  derived and/or modified sequence
atgctgctgctgaagaagcacacagaggacatcagctctgtgtatgagatccgggagcggctgggcagcggggccttcagcgaggtggtgctggcccaggagcggggcagcgcccacctggtggccctgtag

SEQ ID NO: 324815 - DNA, 675 bp, Artificial Sequence
  derived and/or modified sequence
atgctgctgctgaagaagcacacagaggacatcagctctgtgtatgagatccgggagcggctgggcagcggggccttcagcgaggtggtgctggcccaggagcggggcagcgcccacctggtggccctgaagtgcatccccaagaaggccctgcggggcaaggaggccctggtggagaatgaaattgctgtgctgcggcgcatcagccaccccaacatcgtggccctggaggatgtgcatgagagccccagccacctgtacctggccatggagctggtgactggaggagagctgtttgaccgcatcatggagcggggcagctacacagagaaggatgccagccacctggtgggccaggtgctgggcgctgtgtcctacctgcacagcctgggcatcgtgcaccgggacctgaagccagagaacctgctgtatgccaccccatttgaggacagcaagatcatggtgtctgactttggcctgagcaagatccaggccggcaacatgctgggcacagcctgtggcaccccaggctacgtggcccctgagctgctggagcagaagccctacggcaaggctgtggatgtgtgggccctgggcgtcatctcctacatcctgctgtgtggctacccacccttctatgatgaaagtgaccctgagctgttcagccagatctag

SEQ ID NO: 324816 - DNA, 261 bp, Artificial Sequence
  derived and/or modified sequence
atgctgctgctgaagaagcacacagaggacatcagctctgtgtatgagatccgggagcggctgggcagcggggccttcagcgaggtggtgctggcccaggagcggggcagcgcccacctggtggccctgaagtgcatccccaagaaggccctgcggggcaaggaggccctggtggagaatgaaattgctgtgctgcggcgcatcagccaccccaacatcgtggccctggaggatgtgcatgagagccccagccacctgtag

SEQ ID NO: 324817 - DNA, 246 bp, Artificial Sequence
  derived and/or modified sequence
tgaatttctggggacacagcctttgaccgggacatcctgggctctgtgtctgagcagatcaggaagaactttgcccggacccactggaagagggccttcaatgccaccagcttcctgcggcacatcaggaagctgggccagatccctgagggggagggcgccagcgagcagggcatggcccggcacagccacagcggcggcccccagggcctgtccttcctgcacggctgctgcgtgctgaggtag

SEQ ID NO: 324818 - DNA, 681 bp, Artificial Sequence
  derived and/or modified sequence
atgctgctgctgaagaagcacacagaggacatcagctctgtgtatgagatccgggagcggctgggcagcggggccttcagcgaggtggtgctggcccaggagcggggcagcgcccacctggtggccctgaagtgcatccccaagaaggccctgcggggcaaggaggccctggtggagaatgaaattgctgtgctgcggcgcatcagccaccccaacatcgtggccctggaggatgtgcatgagagccccagccacctgtacctggccatggagctggtgactggaggagagctgtttgaccgcatcatggagcggggcagctacacagagaaggatgccagccacctggtgggccaggtgctgggcgctgtgtcctacctgcacagcctgggcatcgtgcaccgggacctgaagccagagaacctgctgtatgccaccccatttgaggacagcaagatcatggtgtctgactttggcctgagcaagatccaggccggcaacatgctgggcacagcctgtggcaccccaggctacgtggcccctgagctgctggagcagaagccctacggcaaggctgtggatgtgtgggccctgggcgtcatctcctacatcctgctgtgtggctacccacccttctatgatgaaagtgaccctgagctgttcagccagatcctgaggtag

SEQ ID NO: 324819 - DNA, 1032 bp, Artificial Sequence
  derived and/or modified sequence
atgctgctgctgaagaagcacaccgaggacatcagcagcgtgtacgagatccgggaacggctgggctctggggctttctctgaggtggtacttgcccaggagcggggctctgcacatctggtggctttaaagtgtatccccaagaaagcactgagaggcaaagaggctcttgtcgagaacgaaatcgccgtcctcaggcgcatctctcatcccaatatcgtggccctagaggacgtgcacgaaagtcccagccacttatacttggccatggaactagtgactgggggcgagctctttgatcggataatggagagaggtagttatacagagaaggacgcgtctcatctcgtgggacaggtcttgggggctgtcagctacctgcacagtttggggatcgttcacagagacctgaagccagaaaatctcctgtacgcaacaccatttgaagattccaagataatggtgagtgacttcggattgtcgaagatccaagccggcaatatgttggggacagcctgcggcacacccggatatgtggcacccgagcttctggaacagaaaccttatggcaaggcagttgacgtgtgggcattaggcgtgataagttatattctgctatgcggatacccccccttttatgacgaaagcgatcctgaactcttttcacaaatcctacgcgccagctatgaatttgattcccccttttgggacgacattagcgagtctgcgaaagacttcatccgtcaccttttggagagagacccccaaaagaggtttacttgtcagcaggcgcttaggcacctttggattagtggagacaccgccttcgaccgcgatatcctcggctctgtgagtgaacagatcaggaagaactttgcgaggacccactggaagcgtgccttcaacgctacaagtttcctccgccatatcaggaagttgggccagatccccgaaggggaaggcgccagcgagcagggcatggcacgtcacagccacagcggtttgagagcaggacagcctccaaagtggtag

SEQ ID NO: 324820 - DNA, 1101 bp, Artificial Sequence
  derived and/or modified sequence
atgctgctgctgaagaagcacaccgaggacatcagcagcgtgtacgaaatcagagaacgattaggatctggagcattctcggaggtggtactcgctcaggagcgcgggtctgcacatctggtcgccctgaagtgcattcctaagaaggctctcagagggaaggaagcgctggtcgaaaatgagatcgccgtcttgagaagaattagtcatcccaatatagtggccctggaggatgtgcatgaatcccccagtcatctgtatctggccatggagttagtgactggcggagagctgtttgacaggattatggaacgggggagttacacagaaaaagatgctagtcatctggtgggccaggttctcggagctgttagctatcttcatagtttgggcatcgtgcaccgagacctgaagcccgagaatctgctgtatgcaacccccttcgaggattccaaaatcatggtaagcgactttggtttgagcaaaattcaggccggcaatatgctgggtactgcttgtgggacgcctggttatgccgaacccgtcaccctctccggaatggccgcatgcgtacctgtgcgcgcttcagtgtgtctctggcctccagcaccagagctgcttgaacagaagccatacgggaaggccgtcgacgtgtgggccctcggcgttattagctatatcctcctgtgcggctaccctccgttttatgacgagagtgatcccgagctctttagccagatactgagagcctcttatgagtttgattcccctttctgggatgacataagcgagtcagccaaggattttatccgacatctactggagcgcgacccccagaaacggttcacttgccaacaggccctccgccatctgtggattagcggagacactgcgtttgaccgtgacattttaggtagcgtctcggagcagatcaggaaaaacttcgcgaggacccactggaagagagcattcaatgctacttcctttctgaggcatattcggaagctgggtcagataccagagggcgaaggcgcaagcgagcaggggatggcaaggcactcccactctggcttgcgggccgggcagcctccaaagtggtag

SEQ ID NO: 324821 - DNA, 1032 bp, Artificial Sequence
  derived and/or modified sequence
atgctgctgctgaagaagcacaccgaggacatcagcagcgtgtacgaaatcagagagagactgggcagtggggccttttcagaagttgtgctcgcccaggaacgtggctctgcccatctggtggcgcttaagtgcatcccaaagaaggcccttaggggcaaagaggccctggttgaaaacgagattgcagtccttaggcgcatttctcatcctaacatagtggctcttgaggacgtgcacgaatccccaagccacctctacctagctatggagctggttaccggtggtgaactgttcgataggattatggaaagggggtcctatacggagaaggacgcttcccacctggttggccaggtcttgggggctgtatcataccttcactctctgggcatcgttcaccgagacttgaagcccgagaacctgctgtatgcaactcccttcgaagacagcaagatcatggtgagcgactttgggctatcaaaaattcaggccggaaacatgttgggaactgcctgcggaacccctggctacgtggcccccgagctgttggagcagaagccctacggtaaggctgtcgatgtgtgggccctgggcgtgatctcctatatactgctgtgcggctacccccccttctatgatgagtccgacccagaactcttctctcaaatactgcgggcaagttacgaattcgattctcccttctgggacgacatttccgagtctgctaaagacttcattcggcatttactggagagggatcctcagaagcggttcacctgtcagcaagccctgcggcacctttggatctcaggggatactgctttcgacagggacattctggggtctgtatccgagcagattcgcaagaacttcgcacggacccactggaagcgggccttcaacgcaaccagcttcttgcgacacatccggaagctgggccagataccggaaggggagggagcaagcgagcagggaatggctcgacattcccacagtggcctccgggctggtcagcctcctaagtggtag

SEQ ID NO: 324822 - DNA, 1101 bp, Artificial Sequence
  derived and/or modified sequence
atgctgctgctgaagaagcacaccgaggacatcagcagcgtgtacgaaattcgggagagactgggatcgggcgcatttagcgaggtggttctggcacaagagcgcggaagtgcacacctggtggcacttaagtgcattcctaaaaaggcactaagggggaaggaggcactggtcgagaatgagattgccgtgctgcgaagaatatcgcacccaaacatcgtcgccttggaagacgttcatgagtctccatcccatctgtacctcgctatggagttagttacgggcggcgaactgttcgaccggatcatggagagagggagttacaccgagaaagatgcctcccacctggttggccaggtgcttggcgcagtgtcctatcttcacagcctggggatcgtgcacagggacctgaaacccgagaatcttctgtatgcgacgccatttgaagactctaaaatcatggttagcgactttggcctatcgaagattcaggcgggtaatatgctcggcactgcctgtggcactcccgggtacgctgagcctgtgacattatccgggatggccgcctgcgtgcccgtgcgggccagcgtctgcctatggccacctgcccctgagctgctggaacaaaaaccctacggtaaggctgtagacgtgtgggcgctcggcgttataagttatattctgctttgtggataccctcctttctatgacgaaagcgatcctgagctgttttctcaaatcttgcgagcgagttatgagtttgacagccccttttgggacgatatctccgagtccgctaaagatttcatcaggcacctgcttgagcgagatccacagaagcgattcacgtgccagcaagctcttcggcacctgtggattagcggagataccgcttttgaccgtgatatattggggtctgtgtctgaacaaattcgaaaaaacttcgcccgcacacactggaagcgggccttcaacgccacaagctttttacgtcatattcgtaaactgggacagattccagagggcgaaggagcctcagaacagggcatggcacgacactcccactccggcctcagggcaggccagccacccaagtggtag

SEQ ID NO: 324823 - DNA, 132 bp, Artificial Sequence
  derived and/or modified sequence
atgctgctgctgaagaagcacaccgaggacatcagcagcgtgtacgagattcgcgaaaggttgggctcaggggccttcagcgaggtcgtgctcgcgcaggaaagaggttctgcccacctggtggcgctctag

SEQ ID NO: 324824 - DNA, 675 bp, Artificial Sequence
  derived and/or modified sequence
atgctgctgctgaagaagcacaccgaggacatcagcagcgtgtacgagattcgcgaacggctgggcagcggagcctttagtgaggtggtactggcgcaggagagggggtccgcgcatctggtggcgctcaaatgtattccaaagaaggctctccgggggaaggaagctctggtagagaatgagattgcagtgttgcggcggatctctcatccgaacattgtggcattggaagacgtgcacgagagtccgagccatttatacctcgcgatggaactggtaactggcggtgaactgttcgatcgtattatggaaaggggaagctacacagaaaaggatgcctcacacctcgttggccaggtacttggtgccgtctcataccttcactcacttggtatcgttcatcgagacctcaagcctgagaatctgttatatgccacccccttcgaagatagcaagattatggtgagtgattttggactgtctaagatacaggcaggtaatatgctaggaactgcttgtggtaccccaggatacgtggcacctgagctcctcgaacaaaaaccctacggcaaagccgtcgacgtttgggccctgggagttatcagctacattctgctgtgtggctacccgcctttctatgacgaatctgaccctgagctgttttcccaaatttag

SEQ ID NO: 324825 - DNA, 132 bp, Artificial Sequence
  derived and/or modified sequence
atgctgctgctgaagaagcacaccgaggacatcagcagcgtgtacgaaatacgagagcggctcggaagcggtgccttttccgaggtggtgctcgcacaagagcgtggaagtgcgcatctggttgccctatag

SEQ ID NO: 324826 - DNA, 132 bp, Artificial Sequence
  derived and/or modified sequence
atgctgctgctgaagaagcacaccgaggacatcagcagcgtgtacgaaattcgggaacgcctcggctctggggcattcagtgaagtggtgctggcccaggagagagggtctgcacacctggtcgccctgtag

SEQ ID NO: 324827 - DNA, 261 bp, Artificial Sequence
  derived and/or modified sequence
atgctgctgctgaagaagcacaccgaggacatcagcagcgtgtacgagatcagggagaggctaggaagcggagctttctccgaagtagtgctggcccaagagagaggttcagctcatctggtggccttaaaatgtatccccaagaaggcacttaggggcaaagaagccctggtcgaaaatgagatcgcagtcttgagacgaatatcacatccaaatattgtggctctggaagacgtgcacgaatctccctctcatctctag

SEQ ID NO: 324828 - DNA, 246 bp, Artificial Sequence
  derived and/or modified sequence
tgaatcagcggcgacaccgccttcgaccgggacatcctgggcagcgttagtgaacagatcagaaaaaacttcgccagaactcactggaaaagggccttcaatgcaacctctttcctgcggcacatccgcaagttaggccagattccagagggcgagggcgcttctgagcaaggtatggcaagacactcacattctggcggcccacaaggtctgtcctttctgcatggttgttgcgttctgcgctag

SEQ ID NO: 324829 - DNA, 681 bp, Artificial Sequence
  derived and/or modified sequence
atgctgctgctgaagaagcacaccgaggacatcagcagcgtgtacgagatccgcgagcgactaggatcgggtgctttttctgaggtcgtgttggcccaggagcgcggctcagctcatctcgtcgccctcaaatgtattcccaagaaagccctacgcggaaaagaggccctagtcgagaacgagattgccgtactgcgcaggatcagccaccccaacattgtggcattagaggacgtccacgaaagcccctcccacctgtatctggctatggagctggttactggcggcgaactcttcgatcggataatggaacgcggctcctataccgagaaagatgcctctcacctcgttggccaggtcctgggcgccgtgagttaccttcatagcctgggaatcgtccaccgggatctcaaacctgaaaacctgctgtacgcgactcccttcgaggactctaagatcatggtgagcgattttggcctgagcaagatccaggcgggaaatatgcttggcaccgcctgtggcacaccaggctatgttgcccctgaactgcttgagcaaaaaccatacggaaaggctgtagacgtttgggccctgggggtaatcagttatatactactttgtggctaccctcccttctacgatgaaagcgaccctgaattgttttcccagatcctgcggtag

SEQ ID NO: 324830 - DNA, 132 bp, Artificial Sequence
  derived and/or modified sequence
atgctgctgctgaagaagcacaccgaggacatcagcagcgtgtacgagatacgcgaaaggttgggcagcggcgcctttagcgaggttgtcctcgcgcaagagagaggaagcgctcacctagttgccttgtag

SEQ ID NO: 324831 - DNA, 1508 bp, Artificial Sequence
  derived and/or modified sequence
ggggcgcgggcggggggcttggcgctgcggccactgcgcggcacgacgctgcggcacccgctccagacatgctgctgctgaagaaacacacggaggacatcagcagcgtctacgagatccgcgagaggctcggctcgggtgccttctccgaggtggtgctggcccaggagcggggctccgcacacctcgtggccctcaagtgcatccccaagaaggccctccggggcaaggaggccctggtggagaacgagatcgcagtgctccgtaggatcagtcaccccaacatcgtcgctctggaggatgtccacgagagcccttcccacctctacctggccatggaactggtgacgggtggcgagctgtttgaccgcatcatggagcgcggctcctacacagagaaggatgccagccatctggtgggtcaggtccttggcgccgtctcctacctgcacagcctggggatcgtgcaccgggacctcaagcccgaaaacctcctgtatgccacgccctttgaggactcgaagatcatggtctctgactttggactctccaaaatccaggctgggaacatgctaggcaccgcctgtgggacccctggatatgtggccccagagctcttggagcagaaaccctacgggaaggccgtagatgtgtgggccctgggcgtcatctcctacatcctgctgtgtgggtacccccccttctacgacgagagcgaccctgagctcttcagccagatcctgagggccagctatgagtttgactctcctttctgggatgacatctcagaatcagccaaagacttcatccggcaccttctggagcgagacccccagaagaggttcacctgccaacaggccttgcggcacctttggatctctggggacacagccttcgacagggacatcttaggctctgtcagtgagcagatccggaagaactttgctcggacacactggaagcgagccttcaatgccacctcgttcctgcgccacatccggaagctggggcagatcccagagggcgagggggcctctgagcagggcatggcccgccacagccactcaggcctccgtgctggccagccccccaagtggtgatgcccaggcagatgccgaggccaagtggactgacccccagatttccttcccttggatgctttcggtcccctcccccaacccctccccctggggctggcctctgctggattttgagatttgagggtgtggcgcatggcgctggggttggaatggggcacccccaagtctgtccccaggctctgccctgcctgggggcagtggctcccctcccctgttgcctctcccgcccctgccccccccgccccgccaaaagccgagggggtgctggcaggcgggcctcaggggctgtctttcctgcacggctgttgtgtgcttcgctgagtgtgggtggtcctgcttgtgtcatggtcatggccttccagccccctccagttttccccaaaccaataaagaaagatacagcaatgg

SEQ ID NO: 324832 - DNA, 326 bp, Artificial Sequence
  derived and/or modified sequence
gatctctggggacacagccttcgacagggacatcttaggctctgtcagtgagcagatccggaagaactttgctcggacacactggaagcgagccttcaatgccacctcgttcctgcgccacatccggaagctggggcagatcccagagggcgagggggcctctgagcagggcatggcccgccacagccactcaggcgggcctcaggggctgtctttcctgcacggctgttgtgtgcttcgctgagtgtgggtggtcctgcttgtgtcatggtcatggccttccagccccctccagttttccccaaaccaataaagaaagatacagc

SEQ ID NO: 324833 - DNA, 1032 bp, Artificial Sequence
  derived and/or modified sequence
atgctactgctgaaaaagcacaccgaggacatatcaagcgtgtacgaaattcgggagcggctgggcagtggcgctttttctgaggttgtcctggcccaggaacgtggtagtgctcatctggtggcgttgaaatgcatccccaaaaaagccctgcggggtaaagaagcgctcgtggagaatgagatcgccgtcctgagacgcatcagccacccaaacattgtagccctggaggacgtgcatgaatcaccctcccacctatatctcgccatggagctggtcaccggaggcgagttgttcgatcgtattatggaacgtggttcctacactgaaaaagacgcgagtcatcttgttgggcaagttcttggtgcagtgagttacctgcactctctgggaatcgtgcacagggatctgaaacccgagaacctgctatatgccactccctttgaggactctaaaatcatggtgtccgactttggcctttctaaaatccaggcaggaaacatgctgggcaccgcatgcgggaccccaggctacgtcgcccctgagctgctggagcagaagccatacggtaaagccgtggacgtgtgggctctaggcgtgatctcgtacatcctattatgcgggtatccccctttttacgatgagtccgatccagagctgttttcacagatcctcagagcttcctacgagtttgattcacctttctgggatgacatctccgaaagtgcaaaggatttcatcagacatctgctcgagcgggatcctcagaaacggttcacatgccagcaagccctaaggcatttatggataagtggcgacactgccttcgaccgcgacatcctgggtagcgtatctgagcagattaggaaaaattttgccaggactcattggaagagggccttcaacgcaaccagctttttgagacacattagaaaactgggccaaattcccgaaggtgaaggggcttccgaacaaggcatggcccgacatagccatagtgggctcagagctgggcagcctccaaaatggtag

SEQ ID NO: 324834 - DNA, 1101 bp, Artificial Sequence
  derived and/or modified sequence
atgcttctcctgaaaaagcacactgaggacattagttccgtgtacgagattagagagcggctgggctccggtgcattctcggaggttgtactcgcacaggaaaggggttcggctcacttagtggccctcaaatgcatcccaaagaaggcccttagagggaaggaggctcttgtggaaaacgagatcgcagtattacggagaatcagtcaccccaacattgtggctctggaggatgttcatgagtccccttctcacctgtatctggcgatggaattggttaccgggggagagctgttcgataggattatggagcggggtagttacacagaaaaagacgcttcccatctggtagggcaggtgctgggagctgtgtcctacttacactctctgggcatcgtgcacagggatctgaagccagaaaacctcttgtacgccaccccatttgaggactctaaaatcatggtctccgattttggcctatctaaaatccaggcgggtaacatgctgggcactgcctgtggaacaccagggtacgctgaaccagtgacattgtctggaatggctgcgtgcgtgcccgtgcgagccagcgtgtgtttgtggccaccagctcctgaactgctggagcagaagccttatggaaaagcggttgatgtgtgggccctgggggtgatcagctacattctgctgtgcggataccctcctttctatgacgaatcagacccagagctgttctctcagattttgcgggcatcctatgaattcgattcacccttttgggacgatattagcgagtctgctaaagatttcatcaggcacctgctggaacgcgatcctcagaagcggttcacctgccaacaagcacttcgccatctgtggatttcaggtgacacagcctttgacagggatatcctcgggagtgtctccgaacagatacggaagaatttcgctagaacccactggaagcgggcttttaacgccacgagcttcctgcgtcacattaggaagctcggccaaatccccgagggcgaaggggctagtgagcaaggcatggccagacactctcactctggcttgagggccggacaacccccaaagtggtag

SEQ ID NO: 324835 - DNA, 1032 bp, Artificial Sequence
  derived and/or modified sequence
atgctcctcctgaagaaacataccgaggacatttcatcagtatacgagattagggagcgtctcggaagtggcgcatttagcgaggtagtcttggctcaggaaagaggaagcgcccatctagtggccctgaaatgtatccctaagaaggcactacgcggtaaagaggccctcgttgaaaatgaaatagcagtgttgcggaggatcagtcaccctaacatcgtcgctctggaagatgtgcatgagtccccctcccacttatacctggccatggagctggtgactgggggagaattatttgatcggatcatggaacggggatcatataccgagaaagatgccagccatctggtcggccaggtgttaggcgctgtgagctacttgcattctctgggcatcgtacatcgggacctcaaacctgagaacctgctatatgcgactccatttgaggactcgaaaattatggtctcagattttgggctctctaaaattcaggccggaaatatgcttgggaccgcctgtggtactcctggttacgtggcccctgaactgctggaacagaaaccttatggcaaggcagtggacgtctgggcccttggcgtcatctcgtatattttgttatgtggttatccccctttctacgatgaaagcgacccagagctcttctcccaaatcctccgcgcatcctatgagttcgacagcccattttgggatgatatttcggagagtgccaaagacttcatccgacacctgttagagcgggatccccagaagcggtttacctgccagcaagcgctgcgccacctttggatcagcggggacacggcctttgacagagacattctcggtagtgtcagcgagcagatacgcaagaacttcgcacgcacacactggaagagggcttttaatgctaccagctttctcaggcacatccgaaaactcggccagattcctgagggagaaggagcatccgaacaggggatggctcggcactctcactccggactccgagcaggtcagcctcctaagtggtag

SEQ ID NO: 324836 - DNA, 1101 bp, Artificial Sequence
  derived and/or modified sequence
atgttgcttttgaagaaacatacggaggacatctcctccgtttacgagatccgggaacggctgggctcaggcgcattttccgaagtagtgctagctcaagaacgcggaagcgcccatttggtcgccctgaaatgcatccctaagaaggccctgagaggcaaggaagcattagtggagaacgaaatagcagtgctgaggcgtatttcacatcctaatattgtggctctggaagacgtgcacgagtctccctcacacctgtatttggccatggagctcgttactggcggtgaactgttcgacagaatcatggaaagaggttcctacacagaaaaggacgctagccatctggtggggcaggtgctgggcgcagtgtcttacctgcactccctggggatcgtgcaccgggacctgaagcccgaaaatctcctgtacgcaactccttttgaggacagcaaaatcatggtttctgattttggtttgagcaaaatccaagcgggaaatatgttgggtactgcctgcggcacccccggatatgccgaacccgtgactctgagtggaatggcggcatgtgtccccgtcagagcttccgtctgcctctggccacccgctccagaactgctggaacaaaaaccttatgggaaagcagtggacgtctgggccctgggggtcatttcatatatactgctgtgtggatacccacccttctacgatgagagcgaccccgagctgttctcccaaattctgcgtgccagttatgaatttgatagcccattctgggatgacatttctgagtcagctaaagatttcatccgacatctcctcgagagagatccccagaagagatttacatgccagcaagctcttcggcatctttggatctcaggagacacagcctttgacagggatatattgggcagcgtcagcgagcagattagaaagaatttcgccagaactcactggaagcgggctttcaacgcaacatctttcctgcgccatattaggaagctggggcagataccagaaggcgagggcgctagcgaacaaggaatggccaggcactcccattccgggctccgcgcaggacagccaccgaagtggtag

SEQ ID NO: 324837 - DNA, 132 bp, Artificial Sequence
  derived and/or modified sequence
atgctgctgctgaagaaacatacagaggatatctccagcgtgtacgaaatccgcgagcgcttaggatccggcgcattttccgaggtggttctggctcaggagagagggagcgctcacttagtcgccttgtag

SEQ ID NO: 324838 - DNA, 675 bp, Artificial Sequence
  derived and/or modified sequence
atgctcttactgaaaaagcataccgaagatatttcatccgtgtacgagattcgcgagcgtctgggcagtggggctttcagtgaggtggtgctcgcgcaagaaagaggttctgctcacttagtggccctgaaatgcatccctaaaaaagccctgcggggtaaggaggcactagtggagaacgagatagctgtgctgaggcgaatctcccacccaaatattgtggccctggaagacgtccacgagagtccctctcatctttacctggccatggaattggtcacaggcggtgaattgttcgacaggatcatggaaaggggatcttataccgaaaaggatgcatctcacctcgttggccaggtcctgggcgcagtctcatacctgcactccctgggtatcgtgcatagggacctgaaacctgagaatctcctgtacgccaccccgtttgaagactctaagatcatggtttccgatttcggactgtccaaaatacaggccggtaacatgctgggcaccgcatgtgggacaccgggatatgttgctccagaactgctggagcagaagccctatggcaaagcagtggatgtgtgggctctgggtgtgatatcatatattctgctgtgcggctatcctccattttacgatgaatcagaccctgaattattttctcaaatttag

SEQ ID NO: 324839 - DNA, 132 bp, Artificial Sequence
  derived and/or modified sequence
atgctgctgttgaaaaagcacaccgaagacatttcttcagtgtatgagataagagagcgactgggctctggcgcattttctgaggtggttttggcccaggaaagggggagcgctcacctagtggcactgtag

SEQ ID NO: 324840 - DNA, 132 bp, Artificial Sequence
  derived and/or modified sequence
atgcttctccttaagaaacataccgaagatattagcagcgtgtacgaaatccgcgaaaggctgggatcaggagctttctctgaggttgtgctggcacaagaaagaggctcagcccacctggtggcgctctag

SEQ ID NO: 324841 - DNA, 261 bp, Artificial Sequence
  derived and/or modified sequence
atgctgctgctaaaaaaacatacagaagatataagcagtgtgtatgagattagggaaagactggggtcaggggctttctccgaggttgtgttagcacaggaacgtggatccgcacatctagtggcgctgaagtgcattcctaagaaggccctgcgagggaaggaagctctagttgagaacgagattgctgtgctgcggaggatatcacacccaaacatcgtcgcgcttgaggacgttcatgagagtccttcccacttgtag

SEQ ID NO: 324842 - DNA, 246 bp, Artificial Sequence
  derived and/or modified sequence
tgaatatctggtgacacagcatttgatagggacattcttggatctgtttccgagcagattagaaaaaactttgcccgaactcactggaaacgtgcttttaatgcaaccagtttcctgaggcatatccgcaaactggggcagataccagagggggagggggcttctgaacagggtatggcgcgacacagccacagcggtggccctcagggtctttccttcctccacgggtgctgcgtgctgcggtag

SEQ ID NO: 324843 - DNA, 681 bp, Artificial Sequence
  derived and/or modified sequence
atgctgttactgaagaagcacacggaagatatttcgtccgtgtatgaaattagggaaaggcttggcagtggtgcattctctgaggtggtgctcgctcaggagcgcggtagcgctcatttggttgcattgaagtgcatacccaagaaggcactcaggggaaaagaggccctggttgagaatgagattgctgttttgagaagaatatctcaccccaacatcgttgcactggaggacgtgcatgaatctccatctcacctgtaccttgccatggaactggttacaggaggcgaactttttgaccgaatcatggaacggggttcctacaccgagaaggatgctagtcacttggtcggccaggtgctgggagccgtgagctacctgcatagcctaggcatagtgcatagggatctgaaaccggaaaacctgttgtatgcgacaccatttgaggattcaaagatcatggtatcagatttcgggctctctaaaatccaggctggaaacatgcttggtaccgcgtgtggcactcccggatatgtcgcacctgaactcctggagcagaagccttacggtaaggctgtggatgtctgggctcttggcgtgatctcttacatccttctctgcggttatcccccattttacgacgaaagtgatcctgaacttttctcacaaatccttagatag

SEQ ID NO: 324844 - DNA, 132 bp, Artificial Sequence
  derived and/or modified sequence
atgctgctgctcaaaaaacacaccgaagacatcagctcagtgtatgagatacgcgagcgcctaggaagcggcgcattcagcgaagtcgtattggcccaggagagggggtccgcacatctggtggccttatag

SEQ ID NO: 324845 - DNA, 1032 bp, Artificial Sequence
  derived and/or modified sequence
atgctgctgctgaagaagcacaccgaggacatcagcagcgtgtacgagatcagagagagactgggcagcggcgccttcagcgaggtggtgctggcccaggagagaggcagcgcccacctggtggccctgaagtgcatccccaagaaggccctgagaggcaaggaggccctggtggagaacgagatcgccgtgctgagaagaatcagccaccccaacatcgtggccctggaggacgtgcacgagagccccagccacctgtacctggccatggagctggtgaccggcggcgagctgttcgacagaatcatggagagaggcagctacaccgagaaggacgccagccacctggtgggccaggtgctgggcgccgtgagctacctgcacagcctgggcatcgtgcacagagacctgaagcccgagaacctgctgtacgccacccccttcgaggacagcaagatcatggtgagcgacttcggcctgagcaagatccaggccggcaacatgctgggcaccgcctgcggcacccccggctacgtggcccccgagctgctggagcagaagccctacggcaaggccgtggacgtgtgggccctgggcgtgatcagctacatcctgctgtgcggctacccccccttctacgacgagagcgaccccgagctgttcagccagatcctgagagccagctacgagttcgacagccccttctgggacgacatcagcgagagcgccaaggacttcatcagacacctgctggagagagacccccagaagagattcacctgccagcaggccctgagacacctgtggatcagcggcgacaccgccttcgacagagacatcctgggcagcgtgagcgagcagatcagaaagaacttcgccagaacccactggaagagagccttcaacgccaccagcttcctgagacacatcagaaagctgggccagatccccgagggcgagggcgccagcgagcagggcatggccagacacagccacagcggcctgagagccggccagccccccaagtggtag

SEQ ID NO: 324846 - DNA, 1101 bp, Artificial Sequence
  derived and/or modified sequence
atgctgctgctgaagaagcacaccgaggacatcagcagcgtgtacgagatcagagagagactgggcagcggcgccttcagcgaggtggtgctggcccaggagagaggcagcgcccacctggtggccctgaagtgcatccccaagaaggccctgagaggcaaggaggccctggtggagaacgagatcgccgtgctgagaagaatcagccaccccaacatcgtggccctggaggacgtgcacgagagccccagccacctgtacctggccatggagctggtgaccggcggcgagctgttcgacagaatcatggagagaggcagctacaccgagaaggacgccagccacctggtgggccaggtgctgggcgccgtgagctacctgcacagcctgggcatcgtgcacagagacctgaagcccgagaacctgctgtacgccacccccttcgaggacagcaagatcatggtgagcgacttcggcctgagcaagatccaggccggcaacatgctgggcaccgcctgcggcacccccggctacgccgagcccgtgaccctgagcggcatggccgcctgcgtgcccgtgagagccagcgtgtgcctgtggccccccgcccccgagctgctggagcagaagccctacggcaaggccgtggacgtgtgggccctgggcgtgatcagctacatcctgctgtgcggctacccccccttctacgacgagagcgaccccgagctgttcagccagatcctgagagccagctacgagttcgacagccccttctgggacgacatcagcgagagcgccaaggacttcatcagacacctgctggagagagacccccagaagagattcacctgccagcaggccctgagacacctgtggatcagcggcgacaccgccttcgacagagacatcctgggcagcgtgagcgagcagatcagaaagaacttcgccagaacccactggaagagagccttcaacgccaccagcttcctgagacacatcagaaagctgggccagatccccgagggcgagggcgccagcgagcagggcatggccagacacagccacagcggcctgagagccggccagccccccaagtggtag

SEQ ID NO: 324847 - DNA, 132 bp, Artificial Sequence
  derived and/or modified sequence
atgctgctgctgaagaagcacaccgaggacatcagcagcgtgtacgagatcagagagagactgggcagcggcgccttcagcgaggtggtgctggcccaggagagaggcagcgcccacctggtggccctgtag

SEQ ID NO: 324848 - DNA, 675 bp, Artificial Sequence
  derived and/or modified sequence
atgctgctgctgaagaagcacaccgaggacatcagcagcgtgtacgagatcagagagagactgggcagcggcgccttcagcgaggtggtgctggcccaggagagaggcagcgcccacctggtggccctgaagtgcatccccaagaaggccctgagaggcaaggaggccctggtggagaacgagatcgccgtgctgagaagaatcagccaccccaacatcgtggccctggaggacgtgcacgagagccccagccacctgtacctggccatggagctggtgaccggcggcgagctgttcgacagaatcatggagagaggcagctacaccgagaaggacgccagccacctggtgggccaggtgctgggcgccgtgagctacctgcacagcctgggcatcgtgcacagagacctgaagcccgagaacctgctgtacgccacccccttcgaggacagcaagatcatggtgagcgacttcggcctgagcaagatccaggccggcaacatgctgggcaccgcctgcggcacccccggctacgtggcccccgagctgctggagcagaagccctacggcaaggccgtggacgtgtgggccctgggcgtgatcagctacatcctgctgtgcggctacccccccttctacgacgagagcgaccccgagctgttcagccagatctag

SEQ ID NO: 324849 - DNA, 261 bp, Artificial Sequence
  derived and/or modified sequence
atgctgctgctgaagaagcacaccgaggacatcagcagcgtgtacgagatcagagagagactgggcagcggcgccttcagcgaggtggtgctggcccaggagagaggcagcgcccacctggtggccctgaagtgcatccccaagaaggccctgagaggcaaggaggccctggtggagaacgagatcgccgtgctgagaagaatcagccaccccaacatcgtggccctggaggacgtgcacgagagccccagccacctgtag

SEQ ID NO: 324850 - DNA, 246 bp, Artificial Sequence
  derived and/or modified sequence
tgaatcagcggcgacaccgccttcgacagagacatcctgggcagcgtgagcgagcagatcagaaagaacttcgccagaacccactggaagagagccttcaacgccaccagcttcctgagacacatcagaaagctgggccagatccccgagggcgagggcgccagcgagcagggcatggccagacacagccacagcggcggcccccagggcctgagcttcctgcacggctgctgcgtgctgagatag

SEQ ID NO: 324851 - DNA, 681 bp, Artificial Sequence
  derived and/or modified sequence
atgctgctgctgaagaagcacaccgaggacatcagcagcgtgtacgagatcagagagagactgggcagcggcgccttcagcgaggtggtgctggcccaggagagaggcagcgcccacctggtggccctgaagtgcatccccaagaaggccctgagaggcaaggaggccctggtggagaacgagatcgccgtgctgagaagaatcagccaccccaacatcgtggccctggaggacgtgcacgagagccccagccacctgtacctggccatggagctggtgaccggcggcgagctgttcgacagaatcatggagagaggcagctacaccgagaaggacgccagccacctggtgggccaggtgctgggcgccgtgagctacctgcacagcctgggcatcgtgcacagagacctgaagcccgagaacctgctgtacgccacccccttcgaggacagcaagatcatggtgagcgacttcggcctgagcaagatccaggccggcaacatgctgggcaccgcctgcggcacccccggctacgtggcccccgagctgctggagcagaagccctacggcaaggccgtggacgtgtgggccctgggcgtgatcagctacatcctgctgtgcggctacccccccttctacgacgagagcgaccccgagctgttcagccagatcctgagatag

SEQ ID NO: 324852 - protein, 384 aa, Artificial Sequence
  derived and/or modified sequence
MEGLGRSCLWLRRELSPPRPRLLLLDCRSRELYESARIGGALSVALPALLLRRLRRGSLSVRALLPGPPLQPPPPAPVLLYDQGGGRRRRGEAEAEAEEWEAESVLGTLLQKLREEGYLAYYLQGGFSRFQAECPHLCETSLAGRAGSSMAPVPGPVPVVGLGSLCLGSDCSDAESEADRDSMSCGLDSEGATPPPVGLRASFPVQILPNLYLGSARDSANLESLAKLGIRYILNVTPNLPNFFEKNGDFHYKQIPISDHWSQNLSRFFPEAIEFIDEALSQNCGVLVHCLAGVSRSVTVTVAYLMQKLHLSLNDAYDLVKRKKSNISPNFNFMGQLLDFERSLRLEERHSQEQGSGGQASAASNPPSFFTTPTSDGAFELAPT

SEQ ID NO: 324853 - DNA, 2433 bp, Artificial Sequence
  derived and/or modified sequence
agtttccaaggtggaagctgggtccggctgccaggaagcggccggtgcgcgggctgcgcgggctgcgcggggctcggcttccacgtgcgagcctgcaccgccgccccgccctctcctggcggccaggcctggggactctctgccgcgggacggcgcctcgcgttccgccgtggcagtggccgtggccagaacgtccacgcgcggtcgtccaccgccggatctcgctccagcgcccgtggtccagcgtgtagggagccgatcgcccatggagggtctgggccgctcgtgcctgtggctgcgtcgggagctgtcgcccccgcggccgcggctcctgctcctggactgccgcagccgcgagctgtacgagtcggcgcgcatcggtggggcgctgagcgtggccctgccggcgctcctgctgcgccgcctgcggaggggcagcctgtcggtgcgcgcgctcctgcctgggccgccgctgcagccgcccccgcctgcccccgtgctcctgtacgaccagggcgggggccggcgccggcgcggggaggccgaggccgaggccgaggagtgggaggccgagtcggtgctgggcaccctgctgcagaagctgcgagaggaaggctacctggcctactacctccagggaggcttcagcagattccaggccgagtgccctcacctgtgtgagaccagccttgctggccgtgccggctccagcatggcgccggtgcccggtccagtgcccgtggtggggttgggcagcctgtgcctgggctccgactgctctgatgcggaatccgaggctgaccgcgactccatgagctgtggcctggattcggagggtgccacacccccaccagtggggctgcgggcatccttccctgtccagatcctgcccaacctctatctgggcagtgcccgggattccgccaatttggagagcctggccaaactgggcatccgctacatcctcaatgtcacccccaacctcccaaacttcttcgagaagaatggtgactttcactacaagcagatccccatctccgaccactggagccagaacctgtcgcggttctttccggaggccattgagttcattgatgaggccttgtcccagaactgcggggtgctcgtccactgcttggcgggggtcagccgttctgtcaccgtcactgtggcctacctcatgcagaagctccacctctctctcaacgatgcctatgacctggtcaagaggaagaagtctaacatctcccccaacttcaacttcatggggcagttgctggactttgagcgcagcttgcggctggaggagcgccactcgcaggagcagggcagtggggggcaggcatctgcggcctccaacccgccctccttcttcaccacccccaccagtgatggcgccttcgagctggcccccacctagggccccgtggccggcaggccggcccctgccccacccccacccacgggtgtccctgcccactcgtgtggcaagggaggggagggcaggagggctcggcctgagcagggtgctggggggagagcgcaatacctcacgcgggctgccgtcctaatcaacgtgcctatggcgggaccacgctcggagcctgcctcttctgcgactgttactttttctttgcgggatgggggtgggggttccctctccaggtggttgtccaggcccatgtcccggccctgggtgctcagccagctcggctaggccctgcgcctccctgcgcttcccccttcaggaagggtgtgtgccacctcgttgcactggatcccagtggctgcttgggggagaggcgtttgccatcactggtgttgtcacctccctgtttctccaccaagggcttgggcctctcggggctggggcctcccaggggatggggacccagagtgcagtggccgcccacatccatggcctaggagctactgggcaggttcccggccacacatctggtgggctgttttgttttttttttttcctcttcccccagatgtcttgacgggatcactggggctctttgtgagtgagggtggccaaactaccgccggaggagatggggtctcagagcgagagctgcggagggggaggggaagaagaaggcctcacttttgctgctgcggggcccacacagccgctgctactttggggggtggggaaggggccaagctgcagacacacacagtcattcatttctgtccacacccctgtgggtggcgggtgtgcgtgtgtgtgcttgtgtgtgcgcacgtgtcggcgctcacacacacatgctagcccactgatgcacccagcccagggctggcagtctttgcagcgtggggccgtctcaccctggagcctggagaggatctatgcttgtttgtttttgtaatccatatcatagttgctttctttaattgttccttctgaataaacagtttatttaa

SEQ ID NO: 324854 - DNA, 2289 bp, Artificial Sequence
  derived and/or modified sequence
cgcttcccgccgcccgagcttcggaaacttcccggccgcgacgcagggaaccggcgcggagaaccgagcagagcggagcgcccgtggtccagcgtgtagggagccgatcgcccatggagggtctgggccgctcgtgcctgtggctgcgtcgggagctgtcgcccccgcggccgcggctcctgctcctggactgccgcagccgcgagctgtacgagtcggcgcgcatcggtggggcgctgagcgtggccctgccggcgctcctgctgcgccgcctgcggaggggcagcctgtcggtgcgcgcgctcctgcctgggccgccgctgcagccgcccccgcctgcccccgtgctcctgtacgaccagggcgggggccggcgccggcgcggggaggccgaggccgaggccgaggagtgggaggccgagtcggtgctgggcaccctgctgcagaagctgcgagaggaaggctacctggcctactacctccagggaggcttcagcagattccaggccgagtgccctcacctgtgtgagaccagccttgctggccgtgccggctccagcatggcgccggtgcccggtccagtgcccgtggtggggttgggcagcctgtgcctgggctccgactgctctgatgcggaatccgaggctgaccgcgactccatgagctgtggcctggattcggagggtgccacacccccaccagtggggctgcgggcatccttccctgtccagatcctgcccaacctctatctgggcagtgcccgggattccgccaatttggagagcctggccaaactgggcatccgctacatcctcaatgtcacccccaacctcccaaacttcttcgagaagaatggtgactttcactacaagcagatccccatctccgaccactggagccagaacctgtcgcggttctttccggaggccattgagttcattgatgaggccttgtcccagaactgcggggtgctcgtccactgcttggcgggggtcagccgttctgtcaccgtcactgtggcctacctcatgcagaagctccacctctctctcaacgatgcctatgacctggtcaagaggaagaagtctaacatctcccccaacttcaacttcatggggcagttgctggactttgagcgcagcttgcggctggaggagcgccactcgcaggagcagggcagtggggggcaggcatctgcggcctccaacccgccctccttcttcaccacccccaccagtgatggcgccttcgagctggcccccacctagggccccgtggccggcaggccggcccctgccccacccccacccacgggtgtccctgcccactcgtgtggcaagggaggggagggcaggagggctcggcctgagcagggtgctggggggagagcgcaatacctcacgcgggctgccgtcctaatcaacgtgcctatggcgggaccacgctcggagcctgcctcttctgcgactgttactttttctttgcgggatgggggtgggggttccctctccaggtggttgtccaggcccatgtcccggccctgggtgctcagccagctcggctaggccctgcgcctccctgcgcttcccccttcaggaagggtgtgtgccacctcgttgcactggatcccagtggctgcttgggggagaggcgtttgccatcactggtgttgtcacctccctgtttctccaccaagggcttgggcctctcggggctggggcctcccaggggatggggacccagagtgcagtggccgcccacatccatggcctaggagctactgggcaggttcccggccacacatctggtgggctgttttgttttttttttttcctcttcccccagatgtcttgacgggatcactggggctctttgtgagtgagggtggccaaactaccgccggaggagatggggtctcagagcgagagctgcggagggggaggggaagaagaaggcctcacttttgctgctgcggggcccacacagccgctgctactttggggggtggggaaggggccaagctgcagacacacacagtcattcatttctgtccacacccctgtgggtggcgggtgtgcgtgtgtgtgcttgtgtgtgcgcacgtgtcggcgctcacacacacatgctagcccactgatgcacccagcccagggctggcagtctttgcagcgtggggccgtctcaccctggagcctggagaggatctatgcttgtttgtttttgtaatccatatcatagttgctttctttaattgttccttctgaataaacagtttatttaagatactga

SEQ ID NO: 324855 - protein, 156 aa, Artificial Sequence
  derived and/or modified sequence
MLGSPCGPQLSDRDADEDQCSREFRGRRSRRPPRRTMLRGKSRLNVEWLGYSPGLLLEHRPLLAGRTPRSHRRNESSLASTLKTLLFFTALMITVPIGLYFTTKSYIFEGALGMSNRDSYFYAAIVAVVAVHVVLALFVYVAWNEGSRQWREGKQD

SEQ ID NO: 324856 - DNA, 471 bp, Artificial Sequence
  derived and/or modified sequence
atgctgggcagcccctgcggcccccagctgagcgacagagacgccgacgaggaccagtgcagcagagagttcagaggcagaagaagcagaagaccccccagaagaaccatgctgagaggcaagagcagactgaacgtggagtggctgggctacagccccggcctgctgctggagcacagacccctgctggccggcagaacccccagaagccacagaagaaacgagagcagcctggccagcaccctgaagaccctgctgttcttcaccgccctgatgatcaccgtgcccatcggcctgtacttcaccaccaagagctacatcttcgagggcgccctgggcatgagcaacagagacagctacttctacgccgccatcgtggccgtggtggccgtgcacgtggtgctggccctgttcgtgtacgtggcctggaacgagggcagcagacagtggagagagggcaagcaggactag

SEQ ID NO: 324857 - DNA, 471 bp, Artificial Sequence
  derived and/or modified sequence
atgctgggatctccttgtgggcctcagctcagcgatcgagacgctgatgaggaccagtgctcacgcgaatttcgaggcagaagaagccgcagacctcccagacgaaccatgttgagaggaaagagccgactgaatgtggaatggctaggctacagccccggcctgctgttagagcatcgtccacttctggctgggagaaccccccggtctcatcggcggaatgaatccagcctagcttccaccctaaagacactgctgttcttcactgcactgatgatcacagttcctatcggattgtatttcaccactaagtcttacatttttgagggcgccttgggcatgtccaatcgggactcctatttctatgcagctattgtggccgtcgtggcggttcatgtggttctggcgctcttcgtctatgtcgcgtggaatgaaggctccaggcaatggagggagggcaagcaggattag

SEQ ID NO: 324858 - DNA, 471 bp, Artificial Sequence
  derived and/or modified sequence
atgctgggcagcccctgtggcccccagctgagtgacagagatgctgatgaggaccagtgcagccgggagttccggggcagaagaagccggcggccccccaggaggaccatgctgcggggcaagagccggctgaatgtggagtggctgggctacagccctggcctgctgctggagcaccggcccctgctggccggccgcacccccaggagccacagaagaaatgaaagcagcctggccagcaccctgaagaccctgctcttcttcaccgccctgatgatcaccgtgcccatcggcctgtacttcaccaccaagagctacatctttgagggcgccctgggcatgagcaacagagacagctacttctatgctgccatcgtggccgtggtggccgtgcacgtggtgctggccctgtttgtgtatgtggcctggaatgaaggcagccggcagtggagggagggcaagcaggactag

SEQ ID NO: 324859 - DNA, 471 bp, Artificial Sequence
  derived and/or modified sequence
atgctgggcagcccctgcggcccccagctgagcgaccgggacgccgacgaagaccaatgtagcagagaattccgggggcggcgaagtcggcgcccaccccgacgcacaatgctaagaggaaaatcccggctgaatgtggaatggctgggctactcacccggcctgcttctagagcatagaccgcttcttgctgggcgcacgccccgttctcaccggaggaatgagtcatcacttgcatccacactgaaaacattgctgttcttcacggcacttatgatcaccgtacctattggcttgtatttcacaacaaagtcatacatcttcgagggcgctctgggtatgagcaaccgagatagctacttctatgctgccatcgtcgcagtggtggctgttcatgtcgtgctagccttgtttgtgtacgtagcttggaatgaaggcagccgacagtggcgtgaggggaaacaggactag

SEQ ID NO: 324860 - DNA, 471 bp, Artificial Sequence
  derived and/or modified sequence
atgttgggttcgccctgcggcccacagctgagtgatagggacgcggacgaggatcagtgcagccgagaatttcgcggtcgtaggagtaggcgccctccccgacgaaccatgctgcgcggtaagtcacggttaaatgtggaatggctgggatactctcctgggttgctgctagaacaccgcccactgctggccggaagaacgccgaggagccaccgccgtaatgagagttccctggcatcaacactgaagactctgctattctttacagcgctcatgatcaccgtgcccattggcctttacttcactacaaagagttatatattcgaaggcgctctcggcatgtcaaatagagacagttacttttatgcggctatagtcgccgtggttgcggtacacgttgttctggccttgttcgtgtacgttgcgtggaacgaggggtctcgacagtggagggagggcaaacaggattag

SEQ ID NO: 324861 - DNA, 693 bp, Artificial Sequence
  derived and/or modified sequence
gggtcactggcatcgagtctggaacagtcattctcagcaagagctctttgaactctgacattctctagttttacggactcggcaccacagccctctggctggtagtccctcttcgcggctcatatgctcgggtctccttgcggcccccagctcagcgaccgagacgcagacgaggaccagtgttcacgcgagttcagggggcggcgtagccgccgcccgcccaggaggaccatgttgcgcggcaagtcccggctcaacgtggagtggctgggctactcgccaggcctgctcctcgagcacaggcccctcctggcagggcgcacgccgcggagccaccgccgaaatgaaagctcattagcatctacactgaagacgctcctgttcttcacagctttaatgatcactgttcctattgggttatatttcacaactaaatcttacatatttgaaggcgcccttgggatgtccaatagggacagctatttttacgctgctattgttgcagtggtcgccgtccatgtggtgctggccctctttgtgtatgtggcctggaatgaaggctcacgacagtggcgtgaaggcaaacaggattaaagtgaacatcacctttttatagcattaaattcattttttaaaatgataaatgctggagggggccatctgatttgaataaagttgaaagaacatgttaaa

SEQ ID NO: 324862 - protein, 780 aa, Artificial Sequence
  derived and/or modified sequence
MPSGKVAQPTITDNKDGTVTVRYAPSEAGLHEMDIRYDNMHIPGSPLQFYVDYVNCGHVTAYGPGLTHGVVNKPATFTVNTKDAGEGDDSMRMSHLKVGSAADIPINISETDLSLLTATVVPPSGREEPCLLKRLRNGHVGISFVPKETGEHLVHVKKNGQHVASSPIPVVISQSEIGDASRVRVSGQGLHEGHTFEPAEFIIDTRDAGYGGLSLSIEGPSKVDINTEDLEDGTCRVTYCPTEPGNYIINIKFADQHVPGSPFSVKVTGEGRVKESITRRRRAPSVANVGSHCDLSLKIPEISIQDMTAQVTSPSGKTHEAEIVEGENHTYCIRFVPAEMGTHTVSVKYKGQHVPGSPFQFTVGPLGEGGAHKVRAGGPGLERAEAGVPAEFSIWTREAGAGGLAIAVEGPSKAEISFEDRKDGSCGVAYVVQEPGDYEVSVKFNEEHIPDSPFVVPVASPSGDARRLTVSSLQESGLKVNQPASFAVSLNGAKGAIDAKVHSPSGALEECYVTEIDQDKYAVRFIPRENGVYLIDVKFNGTHIPGSPFKIRVGEPGHGGDPGLVSAYGAGLEGGVTGNPAEFVVNTSNAGAGALSVTIDGPSKVKMDCQECPEGYRVTYTPMAPGSYLISIKYGGPYHIGGSPFKAKVTGPRLVSNHSLHETSSVFVDSLTKATCAPQHGAPGPGPADASKVVAKGLGLSKAYVGQKSSFTVDCSKAGNNMLLVGVHGPRTPCEEILVKHVGSRLYSVSYLLKDKGEYTLVVKWGDEHIPGSPYRVVVP

SEQ ID NO: 324863 - DNA, 3223 bp, Artificial Sequence
  derived and/or modified sequence
aaggacgccggggagggcctgctggctgtccagatcacggatcccgaaggcaagccgaagaagacacacatccaagacaaccatgacggcacgtatacagtggcctacgtgccagacgtgacaggtcgctacaccatcctcatcaagtacggtggtgacgagatccccttctccccgtaccgcgtgcgtgccgtgcccaccggggacgccagcaagtgcactgtcacaggtgctggcatcggccccaccattcagattggggaggagacggtgatcactgtggacactaaggcggcaggcaaaggcaaagtgacgtgcaccgtgtgcacgcctgatggctcagaggtggatgtggacgtggtggagaatgaggacggcactttcgacatcttctacacggccccccagccgggcaaatacgtcatctgtgtgcgctttggtggcgagcacgtgcccaacagccccttccaagtgacggctctggctggggaccagccctcggtgcagccccctctacggtctcagcagctggccccacagtacacctacgcccagggcggccagcagacttgggccccggagaggcccctggtgggtgtcaatgggctggatgtgaccagcctgaggccctttgaccttgtcatccccttcaccatcaagaagggcgagatcacaggggaggttcggatgccctcaggcaaggtggcgcagcccaccatcactgacaacaaagacggcaccgtgaccgtgcggtatgcacccagcgaggctggcctgcacgagatggacatccgctatgacaacatgcacatcccaggaagccccttgcagttctatgtggattacgtcaactgtggccatgtcactgcctatgggcctggcctcacccatggagtagtgaacaagcctgccaccttcaccgtcaacaccaaggatgcaggagagggtgacgactccatgcgtatgtcccacctaaaggtcggctctgctgccgacatccccatcaacatctcagagacggatctcagcctgctgacggccactgtggtcccgccctcgggccgggaggagccctgtttgctgaagcggctgcgtaatggccacgtggggatttcattcgtgcccaaggagacgggggagcacctggtgcatgtgaagaaaaatggccagcacgtggccagcagccccatcccggtggtgatcagccagtcggaaattggggatgccagtcgtgttcgggtctctggtcagggccttcacgaaggccacacctttgagcctgcagagtttatcattgatacccgcgatgcaggctatggtgggctcagcctgtccattgagggccccagcaaggtggacatcaacacagaggacctggaggacgggacgtgcagggtcacctactgccccacagagccaggcaactacatcatcaacatcaagtttgccgaccagcacgtgcctggcagccccttctctgtgaaggtgacaggcgagggccgggtgaaagagagcatcacccgcaggcgtcgggctccttcagtggccaacgttggtagtcattgtgacctcagcctgaaaatccctgaaattagcatccaggatatgacagcccaggtgaccagcccatcgggcaagacccatgaggccgagatcgtggaaggggagaaccacacctactgcatccgctttgttcccgctgagatgggcacacacacagtcagcgtgaagtacaagggccagcacgtgcctgggagccccttccagttcaccgtggggcccctaggggaagggggagcccacaaggtccgagctgggggccctggcctggagagagctgaagctggagtgccagccgaattcagtatctggacccgggaagctggtgctggaggcctggccattgctgtcgagggccccagcaaggctgagatctcttttgaggaccgcaaggacggctcctgtggtgtggcttatgtggtccaggagccaggtgactacgaagtctcagtcaagttcaacgaggaacacattcccgacagccccttcgtggtgcctgtggcttctccgtctggcgacgcccgccgcctcactgtttctagccttcaggagtcagggctaaaggtcaaccagccagcctcttttgcagtcagcctgaacggggccaagggggcgatcgatgccaaggtgcacagcccctcaggagccctggaggagtgctatgtcacagaaattgaccaagataagtatgctgtgcgcttcatccctcgggagaatggcgtttacctgattgacgtcaagttcaacggcacccacatccctggaagccccttcaagatccgagttggggagcctgggcatggaggggacccaggcttggtgtctgcttacggagcaggtctggaaggcggtgtcacagggaacccagctgagttcgtcgtgaacacgagcaatgcgggagctggtgccctgtcggtgaccattgacggcccctccaaggtgaagatggattgccaggagtgccctgagggctaccgcgtcacctatacccccatggcacctggcagctacctcatctccatcaagtacggcggcccctaccacattgggggcagccccttcaaggccaaagtcacaggcccccgtctcgtcagcaaccacagcctccacgagacatcatcagtgtttgtagactctctgaccaaggccacctgtgccccccagcatggggccccgggtcctgggcctgctgacgccagcaaggtggtggccaagggcctggggctgagcaaggcctacgtaggccagaagagcagcttcacagtagactgcagcaaagcaggcaacaacatgctgctggtgggggttcatggcccaaggaccccctgcgaggagatcctggtgaagcacgtgggcagccggctctacagcgtgtcctacctgctcaaggacaagggggagtacacactggtggtcaaatggggggacgagcacatcccaggcagcccctaccgcgttgtggtgccctgagtctggggcccgtgccagccggcagcccccaagcctgccccgctacccaagcagccccgccctcttcccctcaaccccggcccaggccgccctggccgcccgcctgtcactgcagccgcccctgccctgtgccgtgctgcgctcacctgcctccccagccagccgctgacctctcggctttcacttgggcaga

SEQ ID NO: 324864 - DNA, 2343 bp, Artificial Sequence
  derived and/or modified sequence
atgcccagtggaaaagtggcacaaccaaccatcacggacaacaaggacgggaccgttacggtgagatacgccccctccgaggccggcctccacgaaatggatatccggtatgataacatgcatatacccggttcccctctccagttttacgtggactacgtgaactgcggacatgtcactgcctacggccccggtctcacccacggagtggtgaacaagccggctacctttactgtcaacacaaaagacgctggcgaaggggatgacagtatgcggatgtcacatttgaaggttggctccgcggctgatatcccaatcaacatctcggagaccgatctgtcactgctgaccgctaccgttgttccccctagtgggcgcgaggagccatgcctcctgaagcggttaagaaacggccatgtaggcatctcctttgtgccgaaggagaccggtgagcatttggtgcacgtgaagaagaatggtcagcatgtggcgtccagccccattccggtggtgatatctcaaagcgagattggggacgcaagcagagttcgggtgagcggacagggccttcacgagggtcacaccttcgagcccgcggagttcataatagacactcgcgacgctggctatggtggcctcagcctctctatagaggggccttccaaagttgatatcaatactgaggatcttgaagatggtacttgccgggtgacgtactgtccgaccgaacccggcaattatattattaatattaagttcgccgaccagcatgtgccagggagcccgttcagcgtcaaggtcacaggagaaggcagggttaaggaatccattaccagacgccgtagggcccctagcgtcgcaaatgttggcagccattgcgatctttccctcaaaattccagagatctcaatacaagatatgactgctcaggttacttccccttcgggaaagactcatgaagccgagatcgtggaaggggagaatcacacttactgcatccgctttgtgcctgctgaaatggggacccacactgtgtctgtgaagtataaagggcagcatgtgcccggctctccttttcagtttaccgtgggccccctcggcgagggaggggctcacaaagttagagcaggtggccccggactcgagcgggccgaagctggggtgccagctgagttctctatctggacacgagaagccggcgcgggcggactcgccatagctgtggagggtccaagtaaagccgagattagtttcgaggataggaaggacggcagctgtggtgtggcctacgtggtccaggagcctggggactacgaggtaagcgtcaagttcaatgaggaacatatacctgactccccgttcgtggtcccagtagcctctcccagcggcgacgctaggcggttgacagtctcctccctgcaggaaagtggattaaaagttaaccaaccagcctccttcgcagtgtcacttaatggagccaaaggggccattgatgccaaggttcactccccatccggagcactggaggaatgctacgtcacggaaatcgatcaggacaagtatgccgttcgctttatcccaagggaaaacggcgtataccttattgacgttaagttcaacggcactcatatcccagggagcccatttaaaattcgagtcggcgaaccaggacacgggggggatcctgggctggtttccgcatacggtgcaggtctggagggcggagtgaccgggaacccagcagaattcgttgtcaataccagcaacgctggagcgggggcattgagcgtgacaatcgatggaccgtctaaagtgaagatggattgtcaggagtgccctgagggctatcgggtgacatacactcctatggcccctggatcttacttaatttctattaagtacgggggcccctaccacatcggagggtctccttttaaggccaaagtaacaggaccgaggctggtcagtaatcactccctccacgagactagttccgttttcgtcgatagtctcaccaaggctacgtgtgctccgcaacatggcgctccgggacccgggcccgccgatgcttcaaaggtagtcgcaaaaggtctggggctgtctaaggcctatgttggtcaaaaaagctctttcacagttgactgcagcaaggcggggaacaatatgctactcgtcggagtccatggcccaaggactccctgtgaggaaatcttggtgaaacatgtaggttccaggctgtactctgtgtcctatctgttaaaagacaaaggcgagtataccctggtcgtaaaatggggcgatgaacacatccccggttcaccctatcgggtggttgtgccttag

SEQ ID NO: 324865 - DNA, 2343 bp, Artificial Sequence
  derived and/or modified sequence
atgcccagcggcaaggtggcccagcccaccatcacagacaacaaggatggcaccgtgacagtgcgctatgcccccagcgaggccggcctgcacgagatggacatccgctatgacaacatgcacatccctggcagccccctgcagttctacgtggactatgtgaactgtggccacgtgacagcctacggccctggcctgacccacggcgtggtgaacaagccagccaccttcaccgtgaacaccaaggatgctggggagggagatgacagcatgaggatgagccacctgaaggtgggcagcgctgctgacatccccatcaacatcagcgagacagacctgagcctgctgacagccaccgtggtgccccccagcggccgggaggagccctgcctgctgaagaggctgagaaatggacatgtgggcatcagctttgtgcccaaggagactggagagcacctggtgcacgtgaagaagaatggccagcacgtggccagcagccccatccctgtggtgatcagccagagcgagattggagatgccagccgggtgcgggtgtctggccagggcctgcacgagggccacacctttgagcctgctgagttcatcatcgacaccagagatgctggctacggcggcctgagcctgagcattgagggccccagcaaggtggacatcaacacagaggacctggaggatggcacctgccgggtgacctactgccccacagagcccggcaactacatcatcaacatcaagtttgctgaccagcacgtgcccggcagccccttctctgtgaaggtgactggagagggccgggtgaaggagagcatcaccaggagaagaagagcccccagcgtggccaacgtgggcagccactgtgacctgagcctgaagatccctgagatcagcatccaggacatgacagcccaggtgaccagccccagcggcaagacccatgaagctgagatcgtggagggggagaaccacacctactgcatccgctttgtgcctgctgagatgggcacccacacagtgtctgtgaagtacaagggccagcacgtgcccggcagccccttccagttcaccgtgggccccctgggggagggcggggcccacaaggtgcgggccggcggccctggcctggagcgggcagaggccggcgtgcctgctgagttcagcatctggacccgggaggccggggccggcggcctggccatcgctgtggagggccccagcaaggccgagatcagctttgaggacaggaaggatggcagctgtggggtggcctacgtggtgcaggagcccggggactatgaggtgtctgtgaagttcaatgaggagcacatcccagacagcccctttgtggtgcctgtggccagccccagcggagatgcccggcggctgactgtgagcagcctgcaggagagcggcctgaaggtgaaccagcctgccagctttgctgtgtccctgaatggagccaagggggccattgatgccaaggtgcacagccccagcggggccctggaggagtgctacgtgacagaaattgaccaggacaagtatgctgtgcgcttcatccccagagaaaatggagtgtacctgattgatgtgaagttcaacggcacccacatccctggcagccccttcaagatccgggtgggggagcccggccacggcggggaccccggcctggtgtctgcctacggggccggcctggagggcggcgtgactggaaatcctgctgagtttgtggtgaacaccagcaatgctggggccggggccctgtctgtgaccattgatggccccagcaaggtgaagatggactgccaggagtgcccagagggctacagagtgacctacacccccatggcccctggcagctacctgatcagcatcaagtatggaggcccctaccacatcggcggcagccccttcaaggccaaggtgacaggcccccggctggtgagcaaccacagcctgcacgagaccagctctgtgtttgtggacagcctgaccaaggccacctgtgccccccagcacggggcccctggccctggccctgcagatgccagcaaggtggtggccaagggcctgggcctgagcaaggcctacgtgggccagaagagcagcttcaccgtggactgcagcaaggccggcaacaacatgctgctggtgggcgtgcacggccccaggaccccctgtgaggagatcctggtgaagcacgtgggcagccggctgtacagcgtgtcctacctgctgaaggacaagggggagtacaccctggtggtgaagtggggagatgagcacatccctggcagcccctacagagtggtggtgccctag

SEQ ID NO: 324866 - DNA, 2343 bp, Artificial Sequence
  derived and/or modified sequence
atgcccagcggcaaggtggcccagcccaccatcaccgacaacaaggacggcactgttacagtgcggtatgcaccttccgaagccggcttacatgaaatggacataaggtacgacaacatgcatatccctggaagccctctccaattctatgtggattatgtgaactgcgggcacgtcactgcatatggcccgggcctgacgcacggagtggtgaacaagcccgccacattcacagtcaataccaaggacgccggggaaggcgatgattctatgaggatgagccatctgaaggtcggctctgctgctgacattccaatcaatattagcgaaactgacctgtcattactgacagctacggttgtacctccctccggtcgggaggaaccctgtctactgaagaggttgcggaatggccatgtggggatttcgttcgtccccaaggagacaggcgagcacttggttcacgtgaagaaaaatggacaacatgtggctagctcgccaataccagtcgttatcagccagtccgaaattggcgacgccagcagagtgcgagtgtctggccagggcttgcacgaggggcatactttcgaacccgcagaattcatcatcgatacaagggacgcaggatacggaggcctctccctgtctattgagggtcccagtaaggtggatatcaacactgaagatcttgaagacgggacttgtcgagtgacctattgtcctacggagccgggcaattacattattaatattaagtttgcagatcagcacgtgccaggatcacctttctctgtgaaggttacaggagaggggcgagtgaaggagtctatcacccggcgacggcgggctccctccgtggcaaatgtaggttcgcactgtgacctctccctgaaaatcccagagatttccattcaagacatgactgctcaagttacttcgcccagtgggaagacacacgaggccgagatcgtcgagggcgaaaaccacacctactgtatacgctttgtgcctgccgagatgggaacccataccgtatctgtaaagtacaagggtcagcacgtccctggcagcccttttcagtttactgttggtcctttgggggagggaggggcccataaggtgcgggcgggtggacccggtctcgagcgcgcagaggctggagttccagctgaattttctatttggaccagagaggccggggctgggggcctggccattgcggtggagggcccaagcaaggccgagatttctttcgaggatcggaaggacgggtcatgcggggtggcttacgtggttcaagaacctggggattacgaggtgagtgttaaattcaatgaggagcacatcccggattccccttttgttgtacccgtcgcctccccaagcggtgatgctcggcggctcacagtgagcagcctccaagagtcgggattaaaagtgaatcagccggcatcttttgcagtgagtctgaacggtgccaagggagcgattgacgcgaaagtacacagtccctccggcgcactcgaggaatgctacgtgacggagatcgaccaagacaaatatgctgtgcgtttcatccccagagaaaacggggtctatttaattgacgtgaaattcaatggcacacatattcctggatctccttttaagatccgcgtaggcgagcccggccacgggggcgacccagggttggtcagcgcgtacggggctggtttagagggcggggttactggcaatcccgccgaattcgtggtgaacaccagtaatgcaggcgcgggtgccctgagtgtgaccatcgatggcccatccaaagttaagatggattgtcaggaatgtccggagggttatcgggtgacgtacaccccgatggctccaggaagttatctcatcagcataaagtacggcggtccctaccacatcggcggatctccctttaaagccaaagtgacgggcccgcggctggtatctaaccacagcctacacgagacgtcctccgtgtttgtagactcgttaaccaaggcaacctgcgcaccccagcatggcgctccaggccctggccctgcagacgctagcaaggtggtggccaagggcctgggactgtcaaaagcatatgtgggccagaagtcttcatttactgtcgattgcagcaaagccggaaacaatatgctgctagtcggcgttcacgggcctagaacaccgtgcgaggaaatcctggtgaagcacgtgggctcccgcctatacagcgtcagttatctcttgaaagacaaaggggaatacaccttggtggtgaagtggggtgacgagcacatccccggcagcccttatcgggtcgtggtgccctag

SEQ ID NO: 324867 - DNA, 2343 bp, Artificial Sequence
  derived and/or modified sequence
atgccttctggtaaggtggcccagcccactattacagacaataaggacggtacggtaactgtgagatatgcgccttctgaagcaggcctacacgagatggacatccggtatgacaacatgcatatcccaggaagccctcttcagttctatgtagactatgttaactgtggacacgtgacagcttacggtcccggactgactcatggagtcgtgaataagcccgcaacatttaccgtgaacacgaaggacgcaggcgagggcgacgattcaatgaggatgagccacctgaaggtggggtcagccgctgacatcccgatcaacatcagtgagactgacctatccctgctgactgcaacagtggtgccacctagtggtagagaggagccttgtctgctcaagcggctacgcaacggccatgtcggaattagttttgtgcccaaagagacgggggaacacctggtgcatgtcaagaaaaacgggcagcatgtcgcctccagccctatccctgtggtgatatctcagagcgagatcggggacgcctccagggtgcgagtatccggtcagggactgcatgaggggcacaccttcgagcccgctgagtttattatcgacaccagagatgcgggttacggcggtcttagcctctccatcgaagggccatcaaaggtagacatcaatactgaggatctggaggatggtacatgtagagttacttactgccccaccgaacctgggaattatataattaacattaagtttgccgatcaacatgtgcccggttctcccttttccgtgaaagtcaccggtgagggcagggtgaaggaatctatcacgcgacgcagaagagctcctagtgtggcgaacgtgggctcacattgcgatttgtccttaaagataccagagatcagtatacaggatatgactgcgcaggtgacctctcccagcggtaaaactcatgaagcagagatcgtggagggcgagaaccatacctactgcataagatttgtccccgcagagatgggtacacacacagtctcagtgaagtacaagggtcaacatgtcccaggctcccccttccagttcaccgttggccctctgggcgaaggaggcgcacacaaggtgcgggctggcggtccaggacttgagagagccgaagctggggtcccagcagagttctccatctggacccgcgaggcaggagcaggcggactggcaatagccgtggaggggccatccaaggctgaaattagcttcgaggaccggaaagacggctcatgcggcgttgcatacgtggttcaggagcctggagactacgaggtgagcgtaaaattcaacgaagaacatatcccagacagtccgtttgtagtgccagtggccagtccttctggcgacgccagacggctgactgtgtcatctctgcaggagtccgggctgaaggtcaatcagccagcatccttcgcggtctcactgaacggcgctaagggtgccattgacgccaaggtgcacagcccttcaggagcactcgaagaatgctacgtcacagagattgatcaagacaaatatgccgtcaggtttattccgcgagagaatggagtgtatctcattgacgttaagttcaacggtacacacattccagggagtccttttaagatcagggtcggcgagcccggtcacggcggtgatccagggttggtgtccgcctacggggctggactggaggggggagtgaccgggaatcctgctgaattcgttgtaaacacatcaaacgcaggggcaggagctctcagcgtgacaatcgatggaccctccaaagtgaagatggattgtcaggaatgccctgaaggatatcgagtgacctacacccccatggcaccgggtagctatctaattagtatcaagtatgggggtccctatcacattggcggttcaccattcaaggccaaagtgactggccctcggctcgtctccaaccactccctccatgagacttcctcggtgtttgtggactccctgaccaaagcgacgtgcgcgccacagcacggtgcaccagggcctgggcctgccgacgccagtaaagttgtcgcaaagggtctgggactatctaaggcatacgtaggccagaagagctccttcaccgtggattgcagcaaggcaggaaataacatgttactcgtaggcgtgcacggccctcgcacgccttgtgaggagatcctagtaaagcacgttgggagcaggctgtacagcgtgtcctatctgctcaaagataaaggcgagtacacactcgtagtcaaatggggcgacgagcacatcccaggatctccatatcgtgtggtagtgccctag

SEQ ID NO: 324868 - DNA, 2343 bp, Artificial Sequence
  derived and/or modified sequence
atgcccagcggcaaggtggcccagcccaccatcaccgacaacaaggacggcaccgtgaccgtgagatacgcccccagcgaggccggcctgcacgagatggacatcagatacgacaacatgcacatccccggcagccccctgcagttctacgtggactacgtgaactgcggccacgtgaccgcctacggccccggcctgacccacggcgtggtgaacaagcccgccaccttcaccgtgaacaccaaggacgccggcgagggcgacgacagcatgagaatgagccacctgaaggtgggcagcgccgccgacatccccatcaacatcagcgagaccgacctgagcctgctgaccgccaccgtggtgccccccagcggcagagaggagccctgcctgctgaagagactgagaaacggccacgtgggcatcagcttcgtgcccaaggagaccggcgagcacctggtgcacgtgaagaagaacggccagcacgtggccagcagccccatccccgtggtgatcagccagagcgagatcggcgacgccagcagagtgagagtgagcggccagggcctgcacgagggccacaccttcgagcccgccgagttcatcatcgacaccagagacgccggctacggcggcctgagcctgagcatcgagggccccagcaaggtggacatcaacaccgaggacctggaggacggcacctgcagagtgacctactgccccaccgagcccggcaactacatcatcaacatcaagttcgccgaccagcacgtgcccggcagccccttcagcgtgaaggtgaccggcgagggcagagtgaaggagagcatcaccagaagaagaagagcccccagcgtggccaacgtgggcagccactgcgacctgagcctgaagatccccgagatcagcatccaggacatgaccgcccaggtgaccagccccagcggcaagacccacgaggccgagatcgtggagggcgagaaccacacctactgcatcagattcgtgcccgccgagatgggcacccacaccgtgagcgtgaagtacaagggccagcacgtgcccggcagccccttccagttcaccgtgggccccctgggcgagggcggcgcccacaaggtgagagccggcggccccggcctggagagagccgaggccggcgtgcccgccgagttcagcatctggaccagagaggccggcgccggcggcctggccatcgccgtggagggccccagcaaggccgagatcagcttcgaggacagaaaggacggcagctgcggcgtggcctacgtggtgcaggagcccggcgactacgaggtgagcgtgaagttcaacgaggagcacatccccgacagccccttcgtggtgcccgtggccagccccagcggcgacgccagaagactgaccgtgagcagcctgcaggagagcggcctgaaggtgaaccagcccgccagcttcgccgtgagcctgaacggcgccaagggcgccatcgacgccaaggtgcacagccccagcggcgccctggaggagtgctacgtgaccgagatcgaccaggacaagtacgccgtgagattcatccccagagagaacggcgtgtacctgatcgacgtgaagttcaacggcacccacatccccggcagccccttcaagatcagagtgggcgagcccggccacggcggcgaccccggcctggtgagcgcctacggcgccggcctggagggcggcgtgaccggcaaccccgccgagttcgtggtgaacaccagcaacgccggcgccggcgccctgagcgtgaccatcgacggccccagcaaggtgaagatggactgccaggagtgccccgagggctacagagtgacctacacccccatggcccccggcagctacctgatcagcatcaagtacggcggcccctaccacatcggcggcagccccttcaaggccaaggtgaccggccccagactggtgagcaaccacagcctgcacgagaccagcagcgtgttcgtggacagcctgaccaaggccacctgcgccccccagcacggcgcccccggccccggccccgccgacgccagcaaggtggtggccaagggcctgggcctgagcaaggcctacgtgggccagaagagcagcttcaccgtggactgcagcaaggccggcaacaacatgctgctggtgggcgtgcacggccccagaaccccctgcgaggagatcctggtgaagcacgtgggcagcagactgtacagcgtgagctacctgctgaaggacaagggcgagtacaccctggtggtgaagtggggcgacgagcacatccccggcagcccctacagagtggtggtgccctag

SEQ ID NO: 324869 - DNA, 771 bp, Artificial Sequence
  derived and/or modified sequence
atggccgagcaggtggccctgagcagaacccaggtgtgcggcatcctgagagaggagctgttccagggcgacgccttccaccagagcgacacccacatcttcatcatcatgggcgccagcggcgacctggccaagaagaagatctaccccaccatctggtggctgttcagagacggcctgctgcccgagaacaccttcatcgtgggctacgccagaagcagactgaccgtggccgacatcagaaagcagagcgagcccttcttcaaggccacccccgaggagaagctgaagctggaggacttcttcgccagaaacagctacgtggccggccagtacgacgacgccgccagctaccagagactgaacagccacatgaacgccctgcacctgggcagccaggccaacagactgttctacctggccctgccccccaccgtgtacgaggccgtgaccaagaacatccacgagagctgcatgagccagatcggctggaacagaatcatcgtggagaagcccttcggcagagacctgcagagcagcgacagactgagcaaccacatcagcagcctgttcagagaggaccagatctacagaatcgaccactacctgggcaaggagatggtgcagaacctgatggtgctgagattcgccaacagaatcttcggccccatctggaacagagacaacatcgcctgcgtgatcctgaccttcaaggagcccttcggcaccgagggcagaggcggctacttcgacgagttcggcatcatctag

SEQ ID NO: 324870 - DNA, 771 bp, Artificial Sequence
  derived and/or modified sequence
atggctgaacaggtcgctctatcgagaactcaagtgtgcggaatcctgcgagaggagctttttcagggagatgctttccatcaatccgacacccacatttttattattatgggagcatccggtgacctggctaaaaaaaagatttatcctacaatctggtggctgtttagagacgggttgttacccgaaaacaccttcatcgtcggttatgcgaggtctcgcctgacggttgcggatatacgcaaacaaagtgagccttttttcaaagcaactccggaggagaagctaaagttagaggatttcttcgccagaaattcctacgtcgccggccagtatgatgatgcagccagctatcagagactcaattcccacatgaatgctctccaccttggaagtcaagcaaatcggctcttctacctggcgctgccgcctactgtttatgaagcagtgactaaaaatatccacgagagttgcatgagccaaatagggtggaaccgaattatagtcgaaaagccctttggaagagacctgcagtctagcgacagactgtcaaatcatattagctccctctttagggaggatcagatttaccgtattgaccactacctgggaaaagagatggtgcaaaatcttatggtgcttagatttgcgaacaggattttcggacctatctggaatcgggataacatcgcctgtgttatacttactttcaaggagccctttggtactgaaggccgtggcggttacttcgacgagttcggcatcatctag

SEQ ID NO: 324871 - DNA, 817 bp, Artificial Sequence
  derived and/or modified sequence
acttcggggctgcgagcgcggagggcgacgacgacgaagcgcagcgtcatggcagagcaggtggccctgagccggacccaggtgtgcgggatcctgcgggaagagcttttccagggcgatgccttccatcagtcggatacacacatattcatcatcatgggtgcatcgggtgacctggccaagaagaagatctaccccaccatctggtggctgttccgggatggccttctgcccgaaaacaccttcatcgtgggctatgcccgttcccgcctcacagtggctgacatccgcaaacagagtgagcccttcttcaaggccaccccagaggagaagctcaagctggaggacttctttgcccgcaactcctatgtggctggccagtacgatgatgcagcctcctaccagcgcctcaacagccacatgaatgccctccacctggggtcacaggccaaccgcctcttctacctggccttgcccccgaccgtctacgaggccgtcaccaagaacattcacgagtcctgcatgagccagataggctggaaccgcatcatcgtggagaagcccttcgggagggacctgcagagctctgaccggctgtccaaccacatctcctccctgttccgtgaggaccagatctaccgcatcgaccactacctgggcaaggagatggtgcagaacctcatggtgctgagatttgccaacaggatcttcggccccatctggaaccgggacaacatcgcctgcgttatcctcaccttcaaggagccctttggcactgagggtcgcgggggctatttcgatgaatttgggatcatcc

SEQ ID NO: 324872 - DNA, 771 bp, Artificial Sequence
  derived and/or modified sequence
atggccgagcaggtggccctgagcaggacccaggtgtgtggcatcctgcgggaggagctgttccagggagatgccttccaccagagcgacacccacatcttcatcatcatgggcgccagcggggacctggccaagaagaagatctaccccaccatctggtggctgttcagagatggcctgctgcctgagaacaccttcatcgtgggctacgcccggagccggctgactgtggccgacatcaggaagcagagcgagcccttcttcaaggccaccccagaggagaagctgaagctggaggacttctttgccaggaacagctatgtggccggccagtatgatgatgctgccagctaccagaggctgaacagccacatgaatgccctgcacctgggcagccaggccaacagactcttctacctggccctgcccccaacagtgtatgaagctgtgaccaagaacatccacgagagctgcatgagccagatcggctggaaccgcatcatcgtggagaagcccttcggccgggacctgcagagcagtgaccggctgagcaaccacatcagcagcctcttccgggaggaccagatctacagaattgaccactacctgggcaaggagatggtgcagaacctgatggtgctgcgctttgccaaccgcatcttcggccccatctggaacagagacaacatcgcctgcgtcatcctgaccttcaaggagccctttggaacagagggccggggcggctactttgatgaatttggcatcatctag

SEQ ID NO: 324873 - DNA, 771 bp, Artificial Sequence
  derived and/or modified sequence
atggccgagcaggtggccctgagccggacccaggtgtgcggcatcctccgggaggagctttttcaaggcgatgcctttcatcagagcgatacacatatttttattatcatgggggcttcaggggatctcgcgaagaagaagatctatccgacgatttggtggctgttccgggatggtttgctccccgagaatacgttcattgtgggttatgctagaagtcgtttaacagtggccgatataaggaaacaaagcgaaccctttttcaaggcaactccggaagagaaactgaaactggaggactttttcgcccggaattcctacgtggccggacagtacgacgatgcagcgtcataccaaaggctgaattcccatatgaatgcccttcacctggggtcccaggccaatcgacttttttatttggcgctgcctcccactgtgtacgaggccgtgactaagaatatacacgagtcttgtatgagccagattggatggaaccgaattattgttgagaaaccctttggacgggatctccagagctcggatcgtcttagcaatcatatcagttcactcttccgagaggaccaaatttatcgcatcgaccactaccttggcaaggagatggtacagaacttaatggtacttaggttcgctaatcggatattcggaccgatatggaatagggacaacatcgcttgcgtaatcttaaccttcaaagaacccttcgggactgaaggccgcggcgggtactttgatgaattcgggattatctag

SEQ ID NO: 324874 - DNA, 771 bp, Artificial Sequence
  derived and/or modified sequence
atggccgagcaagtcgcgctcagtcgaacacaggtctgcgggatcctaagagaggagttattccagggcgacgcattccaccagagcgatactcacatatttatcatcatgggagccagcggagatttggctaagaagaagatctaccccactatctggtggctgtttagggacggtctcctgcccgagaacacatttattgtgggttacgctcgctcccgacttacagtcgcggacatcaggaagcagtcagagcccttctttaaagcaacacccgaagagaagttgaaactggaggattttttcgcccgtaattcgtatgtggcaggccagtatgacgacgctgcctcctatcaacgattgaactcacacatgaatgccttgcaccttggatcccaagccaatagactattttaccttgcactgccacctactgtttatgaggcggtgaccaagaacatccatgagtcctgtatgagccagatcgggtggaaccgaattattgtggagaagccctttggacgcgatctgcagtcctctgataggctctccaatcacatctccagtctgttccgcgaggatcagatctatcggatcgaccattatctgggaaaggaaatggtgcagaacctaatggtgttacgcttcgctaacagaatctttggccctatttggaacagagacaacatcgcttgcgtgatccttactttcaaggagccatttggcacagagggcaggggaggctatttcgatgagttcggtattatctag

SEQ ID NO: 324875 - DNA, 180 bp, Artificial Sequence
  derived and/or modified sequence
atgcagaccggcggctgcgagcccaagcacagaagaatgtgccccgacgacagcagcgagaacatcatgaagtggagaaccttcctgcccgaggagagaaccgtgacccaggccggcgacgtgacccacaccctgggcagcaagggccccaaggccggcgtgcccttcaccggcccctag

SEQ ID NO: 324876 - DNA, 338 bp, Artificial Sequence
  derived and/or modified sequence
gagtacactattgatgtattttttcggcagacatggcatgatgaaagactgaaatttgatggccccatgaagatccttccactgaacaatctcctggctagtaagatctggacaccggacaccttcttccacaatggcaagaaatcagtggctcataacatgaccacgcccaacaagctgctcagattggtggacaacggaaccctcctctatacaatgagaatagaggaagtacagaagcacagaagcatgatgaagccatcggtttcctacacagtagcaccttggatccaggaaggtgggcctggagggagacataggctcaaaatggaaaaata

SEQ ID NO: 324877 - DNA, 339 bp, Artificial Sequence
  derived and/or modified sequence
gaatacaccatcgacgtgtttttccgacagacttggcacgatgagcgccttaaatttgatggccctatgaagatactccctttaaataacttgctagctagtaaaatatggacccctgacacctttttccacaatgggaagaagtccgtggcccacaatatgaccactcccaacaagcttcttaggctcgtcgacaatggcaccctgctgtatacaatgagaattgaagaagtccaaaaacatcggagtatgatgaagccttcagtgtcttacacagtggcaccgtggatccaagaggggggccccggtggccgccacaggctgaaaatggaaaagtag

SEQ ID NO: 324878 - DNA, 339 bp, Artificial Sequence
  derived and/or modified sequence
gagtacaccattgatgtgttcttccggcagacctggcatgatgagcggctgaagtttgatggccccatgaagatcctgcccctgaacaacctgctggccagcaagatctggaccccagacaccttcttccacaacgggaagaagtctgtggcccacaacatgaccacccccaacaagctgctgcggctggtggacaatggcaccctgctgtacaccatgagaattgaggaggtgcagaagcaccgctccatgatgaagcccagcgtgtcctacacagtggccccctggatccaggagggcggccctgggggccgccaccggctgaagatggagaagtag

SEQ ID NO: 324879 - DNA, 339 bp, Artificial Sequence
  derived and/or modified sequence
gagtacaccatcgacgtgttcttccggcagacctggcacgacgagagactgaaattcgatggcccaatgaaaatactgcccctgaataatctcctggcgtctaaaatatggacccccgacacattctttcacaacggcaagaagtccgttgctcacaacatgaccacccccaacaagttacttcgacttgtagataatggtactctgctttacaccatgcgaatcgaggaggtgcagaaacaccgttccatgatgaagcctagtgtgagctacacggtggctccctggatccaagaggggggcccaggaggcaggcatcgcttgaaaatggagaagtag

SEQ ID NO: 324880 - DNA, 339 bp, Artificial Sequence
  derived and/or modified sequence
gaatataccatcgatgtttttttccgacagacatggcacgatgaacggttaaagttcgacggccctatgaagatccttccgctgaataacctcttagcgtccaagatctggactcctgacacgttctttcataatggcaaaaagtctgtcgcccacaacatgaccacccccaacaaactccttagactcgtggacaatggtaccctgctctacactatgcgcatcgaagaggtgcagaaacaccgctccatgatgaagccctccgtttcctacacggtcgccccttggattcaagaaggcggtcctggcggtaggcacagacttaagatggaaaaatag

SEQ ID NO: 324881 - DNA, 339 bp, Artificial Sequence
  derived and/or modified sequence
gagtacaccatcgacgtgttcttcagacagacctggcacgacgagagactgaagttcgacggccccatgaagatcctgcccctgaacaacctgctggccagcaagatctggacccccgacaccttcttccacaacggcaagaagagcgtggcccacaacatgaccacccccaacaagctgctgagactggtggacaacggcaccctgctgtacaccatgagaatcgaggaggtgcagaagcacagaagcatgatgaagcccagcgtgagctacaccgtggccccctggatccaggagggcggccccggcggcagacacagactgaagatggagaagtag

SEQ ID NO: 324882 - protein, 139 aa, Artificial Sequence
  derived and/or modified sequence
MRSPCPTRWSASTRMARCCTQLVSYPENEMIYKWENFKLEINEKNSWKLFQFDFTGVSNKTEIITTPVGDLNEEPRDLPRVAPRATLETLFTHPDQVQGSEGTALIVSRMWMEPVTQPAICRERHLVLLPFKIPRQEDF

SEQ ID NO: 324883 - DNA, 420 bp, Artificial Sequence
  derived and/or modified sequence
atgaggtccccctgtcccaccaggtggagtgcctctaccaggatggcgcggtgttgtacccagctggtgtcataccccgagaacgaaatgatttacaagtgggagaacttcaagctagaaatcaacgaaaaaaatagctggaaactttttcagtttgatttcaccggagtttctaacaaaaccgagatcatcacaacccctgttggagacttgaatgaggaacctcgagacctgcctcgagtcgccccacgggcgaccttggagacactatttacgcaccctgatcaggtgcagggcagtgagggtacggcactgattgtttcccgcatgtggatggagcccgtgacccaacccgcaatctgtcgggagaggcatctggtgctgctcccctttaaaataccgaggcaagaagacttctag

SEQ ID NO: 324884 - DNA, 420 bp, Artificial Sequence
  derived and/or modified sequence
atgaggagcccctgccccacccgctggagcgccagcaccaggatggcccgctgctgcacccagctggtgtcctacccagaaaatgagatgatctacaagtgggagaacttcaagctggagatcaatgagaagaacagctggaagctgttccagtttgacttcaccggggtgagcaacaagacagagatcatcaccacccctgtgggggacctgaatgaggagccccgggacctgccccgggtggccccccgggccaccctggagaccctcttcacccacccagaccaggtgcagggcagcgagggcacagccctgattgtgtccaggatgtggatggagcctgtgacccagcctgccatctgccgggagcggcacctggtgctgctgcccttcaagatcccccggcaggaggacttctag

SEQ ID NO: 324885 - DNA, 420 bp, Artificial Sequence
  derived and/or modified sequence
atgcggagcccctgccccacccggtggagcgccagcacccggatggcacgatgttgcacccagttggtttcctacccggaaaatgagatgatttacaaatgggagaactttaagcttgaaattaatgagaagaattcttggaaacttttccaattcgattttacaggagttagcaataaaacagaaattattactacacctgtaggcgatctgaacgaagaaccgcgtgacttaccaagggtggctccacgggcaactcttgagaccttgttcactcatcccgatcaggtacagggatctgagggaactgctcttatcgtgagtaggatgtggatggaacccgtcacccaacccgcgatctgcagggaacggcacctcgtccttttacccttcaagatccctagacaagaagacttctag

SEQ ID NO: 324886 - DNA, 420 bp, Artificial Sequence
  derived and/or modified sequence
atgagatccccttgtcccacacgatggtcggcgagtactcggatggctcgatgttgcacccaactcgtgagctacccggaaaatgaaatgatttacaagtgggagaacttcaaattggagattaacgagaaaaacagttggaagctgtttcagttcgatttcacaggcgtgtcaaacaagaccgaaatcataactacccccgtcggcgatctcaatgaggagcccagggatctgcccagagtcgctccacgagccacactcgaaacactgtttacacacccagatcaagtccaaggatctgaggggactgcattgattgtatcccgaatgtggatggaaccagtgacccagcccgcaatctgccgagagagacacctggtgttgctaccattcaaaattccaaggcaagaagatttttag

SEQ ID NO: 324887 - DNA, 420 bp, Artificial Sequence
  derived and/or modified sequence
atgagaagcccctgccccaccagatggagcgccagcaccagaatggccagatgctgcacccagctggtgagctaccccgagaacgagatgatctacaagtgggagaacttcaagctggagatcaacgagaagaacagctggaagctgttccagttcgacttcaccggcgtgagcaacaagaccgagatcatcaccacccccgtgggcgacctgaacgaggagcccagagacctgcccagagtggcccccagagccaccctggagaccctgttcacccaccccgaccaggtgcagggcagcgagggcaccgccctgatcgtgagcagaatgtggatggagcccgtgacccagcccgccatctgcagagagagacacctggtgctgctgcccttcaagatccccagacaggaggacttctag

SEQ ID NO: 324888 - DNA, 1315 bp, Artificial Sequence
  derived and/or modified sequence
gtgagccgcgacctccgcgcaggtggtcgcgccggtctccgcggaaatgttgtccaaagttcttccagtcctcctaggcatcttattgatcctccagtcgagaacatgtatacagagaagtgctcaaatcataagtgtacagctgatgagttgtcagaatatgaccacagcggtgtaaagaaagccaaatcaaggacccgaatgtgagcaggacctcagaagccccctttgtcactgcctcccagcaaaggcagcactatccggacttctaacaccatcgggtcgagggacctcagactgaatcaaagaatgaagcctcttcccgtgatgttgtctatggcccccagccccagcctctggaaaatcagctcctctctgaggaaacaaagtcaactgagactgagactgggagcagagttggcaaactgccagaagcctctcgcatcctgaacactatcctgagtaattatgaccacaaactgcgccctggcattggagagaagcccactgtggtcactgttgagatctccgtcaacagccttggtcctctctctatcctagacatggaatacaccattgacatcatcttctcccagacctggtacgacgaacgcctctgttacaacgacacctttgagtctcttgttctgaatggcaatgtggtgagccagctatggatcccggacaccttttttaggaattctaagaggacccacgagcatgagatcaccatgcccaaccagatggtccgcatctacaaggatggcaaggtgttgtacacaattagtttcctatcctgagaatgagatgatctacaagtgggaaaatttcaagcttgaaatcaatgagaagaactcctggaagctcttccagtttgattttacaggagtgagcaacaaaactgaaataatcacaaccccagttggtgacctgaatgaggagccaagggacctccccagggtagctcccagagcaaccctggaaacactcttcacacatcctgaccaagttcagggcagtgaaggcactgccctcatcgtttccagaatgtggatggagccagtcacccaaccagccatttgtcgtgagaggcatcttgttctgctaccattcaagatcccacggcaagaggacttttgataaatacattctggccagtaggcaagtgcgagggtggtccgtgcagcagctctggaggagttctatcccaaagctatactcaacacacaggtttcccactgacaacaggtcgctcccttgccttcttccagaagaatctgagaagctttgctccttgagtttcagtgctgccaag

SEQ ID NO: 324889 - protein, 1966 aa, Artificial Sequence
  derived and/or modified sequence
MASAVSPANLPAVLLQPRWKRVVGWSGPVPRPRHGHRAVAIKELIVVFGGGNEGIVDELHVYNTATNQWFIPAVRGDIPPGCAAYGFVCDGTRLLVFGGMVEYGKYSNDLYELQASRWEWKRLKAKTPKNGPPPCPRLGHSFSLVGNKCYLFGGLANDSEDPKNNIPRYLNDLYILELRPGSGVVAWDIPITYGVLPPPRESHTAVVYTEKDNKKSKLVIYGGMSGCRLGDLWTLDIDTLTWNKPSLSGVAPLPRSLHSATTIGNKMYVFGGWVPLVMDDVKVATHEKEWKCTNTLACLNLDTMAWETILMDTLEDNIPRARAGHCAVAINTRLYIWSGRDGYRKAWNNQVCCKDLWYLETEKPPPPARVQLVRANTNSLEAAPAPPTTTTIQVLPTVPGSSISVPTAARTQGVPAVLKVTGPQATTGTPLVTMRPASQAGKAPVTVTSLPAGVRMVVPTQSAQGTVIGSSPQMSGMAALAAAAAATQKIPPSSAPTVLSVPAGTTIVKTMAVTPGTTTLPATVKVASSPVMVSNPATRMLKTAAAQVGTSVSSATNTSTRPIITVHKSGTVTVAQQAQVVTTVVGGVTKTITLVKSPISVPGGSALISNLGKVMSVVQTKPVQTSAVTGQASTGPVTQIIQTKGPLPAGTILKLVTSADGKPTTIITTTQASGAGTKPTILGISSVSPSTTKPGTTTIIKTIPMSAIITQAGATGVTSSPGIKSPITIITTKVMTSGTGAPAKIITAVPKIATGHGQQGVTQVVLKGAPGQPGTILRTVPMGGVRLVTPVTVSAVKPAVTTLVVKGTTGVTTLGTVTGTVSTSLAGAGGHSTSASLATPITTLGTIATLSSQVINPTAITVSAAQTTLTAAGGLTTPTITMQPVSQPTQVTLITAPSGVEAQPVHDLPVSILASPTTEQPTATVTIADSGQGDVQPGTVTLVCSNPPCETHETGTTNTATTTVVANLGGHPQPTQVQFVCDRQEAAASLVTSTVGQQNGSVVRVCSNPPCETHETGTTNTATTATSNMAGQHGCSNPPCETHETGTTNTATTAMSSVGANHQRDARRACAAGTPAVIRISVATGALEAAQGSKSQCQTRQTSATSTTMTVMATGAPCSAGPLLGPSMAREPGGRSPAFVQLAPLSSKVRLSSPSIKDLPAGRHSHAVSTAAMTRSSVGAGEPRMAPVCESLQGGSPSTTVTVTALEALLCPSATVTQVCSNPPCETHETGTTNTATTSNAGSAQRVCSNPPCETHETGTTHTATTATSNGGTGQPEGGQQPPAGRPCETHQTTSTGTTMSVSVGALLPDATSSHRTVESGLEVAAAPSVTPQAGTALLAPFPTQRVCSNPPCETHETGTTHTATTVTSNMSSNQDPPPAASDQGEVESTQGDSVNITSSSAITTTVSSTLTRAVTTVTQSTPVPGPSVPPPEELQVSPGPRQQLPPRQLLQSASTALMGESAEVLSASQTPELPAAVDLSSTGEPSSGQESAGSAVVATVVVQPPPPTQSEVDQLSLPQELMAEAQAGTTTLMVTGLTPEELAVTAAAEAAAQAAATEEAQALAIQAVLQAAQQAVMGTGEPMDTSEAAATVTQAELGHLSAEGQEGQATTIPIVLTQQELAALVQQQQLQEAQAQQQHHHLPTEALAPADSLNDPAIESNCLNELAGTVPSTVALLPSTATESLAPSNTFVAPQPVVVASPAKLQAAATLTEVANGIESLGVKPDLPPPPSKAPMKKENQWFDVGVIKGTNVMVTHYFLPPDDAVPSDDDLGTVPDYNQLKKQELQPGTAYKFRVAGINACGRGPFSEISAFKTCLPGFPGAPCAIKISKSPDGAHLTWEPPSVTSGKIIEYSVYLAIQSSQAGGELKSSTPAQLAFMRVYCGPSPSCLVQSSSLSNAHIDYTTKPAIIFRIAARNEKGYGPATQVRWLQETSKDSSGTKPANKRPMSSPEMKSAPKKSKADGQ

SEQ ID NO: 324890 - DNA, 445 bp, Artificial Sequence
  derived and/or modified sequence
aagacgccgagggaggactgaggcgggcctcaccccagacagagggcccccaataatccagcgctgcctctgctgccgggcctggaccaccctgcaggggaagacttctcaggctgagtcgccaccacctcaccccgccaccccccgccgctttaaccgcagggaactctggcatctcagggagttgatgaccttgttttcagaaggtgactcaggtcaacacaggggcccccatctggtcgacagatgcagtggttctaggatctgccaagcatccaggcctgtgggtcttcattgcccagctcctgcccgcactcctgcctgctgccctgaccagagtcatcatgcctcttgagcagaggagtcagcactgcaagcctgaagaaggccttgaggcccgaggagaggccctgggcctggtgggtgcgcaggctcctgctactga

SEQ ID NO: 324891 - protein, 603 aa, Artificial Sequence
  derived and/or modified sequence
MASASTSKYNSHSLENESIKRTSRDGVNRDLTEAVPRLPGETLITDKEVIYICPFNGPIKGRVYITNYRLYLRSLETDSSLILDVPLGVISRIEKMGGATSRGENSYGLDITCKDMRNLRFALKQEGHSRRDMFEILTRYAFPLAHSLPLFAFLNEEKFNVDGWTVYNPVEEYRRQGLPNHHWRITFINKCYELCDTYPALLVVPYRASDDDLRRVATFRSRNRIPVLSWIHPENKTVIVRCSQPLVGMSGKRNKDDEKYLDVIRETNKQISKLTIYDARPSVNAVANKATGGGYESDDAYHNAELFFLDIHNIHVMRESLKKVKDIVYPNVEESHWLSSLESTHWLEHIKLVLTGAIQVADKVSSGKSSVLVHCSDGWDRTAQLTSLAMLMLDSFYRSIEGFEILVQKEWISFGHKFASRIGHGDKNHTDADRSPIFLQFIDCVWQMSKQFPTAFEFNEQFLIIILDHLYSCRFGTFLFNCESARERQKVTERTVSLWSLINSNKEKFKNPFYTKEINRVLYPVASMRHLELWVNYYIRWNPRIKQQQPNPVEQRYMELLALRDEYIKRLEELQLANSAKLSDPPTSPSSPSQMMPHVQTHF

SEQ ID NO: 324892 - protein, 566 aa, Artificial Sequence
  derived and/or modified sequence
MASASTSKYNSHSLENESIKRTSRDGVNRDLTEAVPRLPGETLITDKEVIYICPFNGPIKGRVYITNYRLYLRSLETDMRNLRFALKQEGHSRRDMFEILTRYAFPLAHSLPLFAFLNEEKFNVDGWTVYNPVEEYRRQGLPNHHWRITFINKCYELCDTYPALLVVPYRASDDDLRRVATFRSRNRIPVLSWIHPENKTVIVRCSQPLVGMSGKRNKDDEKYLDVIRETNKQISKLTIYDARPSVNAVANKATGGGYESDDAYHNAELFFLDIHNIHVMRESLKKVKDIVYPNVEESHWLSSLESTHWLEHIKLVLTGAIQVADKVSSGKSSVLVHCSDGWDRTAQLTSLAMLMLDSFYRSIEGFEILVQKEWISFGHKFASRIGHGDKNHTDADRSPIFLQFIDCVWQMSKQFPTAFEFNEQFLIIILDHLYSCRFGTFLFNCESARERQKVTERTVSLWSLINSNKEKFKNPFYTKEINRVLYPVASMRHLELWVNYYIRWNPRIKQQQPNPVEQRYMELLALRDEYIKRLEELQLANSAKLSDPPTSPSSPSQMMPHVQTHF

SEQ ID NO: 324893 - protein, 416 aa, Artificial Sequence
  derived and/or modified sequence
MGGATSRGENSYGLDITCKDMRNLRFALKQEGHSRRDMFEILTRYAFPLAHSLPLFAFLNEEKFNVDGWTVYNPVEEYRRQGLPNHHWRITFINKCYELCDTYPALLVVPYRASDDDLRRVATFRSRNRIPVLSWIHPENKTVIVRCSQPLVGMSGKRNKDDEKYLDVIRETNKQISKLTIYDARPSVNAVANKATGGGYESDDAYHNAELFFLDIHNIHVMRESLKKVKDIVYPNVEESHWLSSLESTHWLEHIKLVLTGAIQVADKVSSGKSSVLVHCSDGWDRTAQLTSLAMLMLDSFYRSIEGFEILVQKEWISFGHKFASRIGHGDKNHTDADRSPIFLQFIDCVWQMSKQFPTAFEFNEQFLIIILDHLYSCRFGTFLFNCESARERQALHFLSLSLCRRLQKGLFLYGH

SEQ ID NO: 324894 - protein, 488 aa, Artificial Sequence
  derived and/or modified sequence
MRNLRFALKQEGHSRRDMFEILTRYAFPLAHSLPLFAFLNEEKFNVDGWTVYNPVEEYRRQGLPNHHWRITFINKCYELCDTYPALLVVPYRASDDDLRRVATFRSRNRIPVLSWIHPENKTVIVRCSQPLVGMSGKRNKDDEKYLDVIRETNKQISKLTIYDARPSVNAVANKATGGGYESDDAYHNAELFFLDIHNIHVMRESLKKVKDIVYPNVEESHWLSSLESTHWLEHIKLVLTGAIQVADKVSSGKSSVLVHCSDGWDRTAQLTSLAMLMLDSFYRSIEGFEILVQKEWISFGHKFASRIGHGDKNHTDADRSPIFLQFIDCVWQMSKQFPTAFEFNEQFLIIILDHLYSCRFGTFLFNCESARERQKVTERTVSLWSLINSNKEKFKNPFYTKEINRVLYPVASMRHLELWVNYYIRWNPRIKQQQPNPVEQRYMELLALRDEYIKRLEELQLANSAKLSDPPTSPSSPSQMMPHVQTHF

SEQ ID NO: 324895 - DNA, 3452 bp, Artificial Sequence
  derived and/or modified sequence
agagggggcggagcagggcccggcagccgagcagcctggcaacggcggtggcgcccggagcccgagagtttccaggatggcttctgcatcaacttctaaatataattcacactccttggagaatgagtctattaagaggacgtctcgagatggagtcaatcgagatctcactgaggctgttcctcgacttccaggagaaacactaatcactgacaaagaagttatttacatatgtcctttcaatggccccattaagggaagagtttacatcacaaattatcgtctttatttaagaagtttggaaacggattcttctctaatacttgatgttcctctgggtgtgatctcgagaattgaaaaaatgggaggcgcgacaagtagaggagaaaattcctatggtctagatattacttgtaaagacatgagaaacctgaggttcgctttgaaacaggaaggccacagcagaagagatatgtttgagatcctcacgagatacgcgtttcccctggctcacagtctgccattatttgcatttttaaatgaagaaaagtttaacgtggatggatggacagtttacaatccagtggaagaatacaggaggcagggcttgcccaatcaccattggagaataacttttattaataagtgctatgagctctgtgacacttaccctgctcttttggtggttccgtatcgtgcctcagatgatgacctccggagagttgcaacttttaggtcccgaaatcgaattccagtgctgtcatggattcatccagaaaataagacggtcattgtgcgttgcagtcagcctcttgtcggtatgagtgggaaacgaaataaagatgatgagaaatatctcgatgttatcagggagactaataaacaaatttctaaactcaccatttatgatgcaagacccagcgtaaatgcagtggccaacaaggcaacaggaggaggatatgaaagtgatgatgcatatcataacgccgaacttttcttcttagacattcataatattcatgttatgcgggaatctttaaaaaaagtgaaggacattgtttatcctaatgtagaagaatctcattggttgtccagtttggagtctactcattggttagaacatatcaagctcgttttgacaggagccattcaagtagcagacaaagtttcttcagggaagagttcagtgcttgtgcattgcagtgacggatgggacaggactgctcagctgacatccttggccatgctgatgttggatagcttctataggagcattgaagggttcgaaatactggtacaaaaagaatggataagttttggacataaatttgcatctcgaataggtcatggtgataaaaaccacaccgatgctgaccgttctcctatttttctccagtttattgattgtgtgtggcaaatgtcaaaacagttccctacagcttttgaattcaatgaacaatttttgattataattttggatcatctgtatagttgccgatttggtactttcttattcaactgtgaatctgctcgagaaagacagaaggttacagaaaggactgtttctttatggtcactgataaacagtaataaagaaaaattcaaaaaccccttctatactaaagaaatcaatcgagttttatatccagttgccagtatgcgtcacttggaactctgggtgaattactacattagatggaaccccaggatcaagcaacaacagccgaatccagtggagcagcgttacatggagctcttagccttacgcgacgaatacataaagcggcttgaggaactgcagctcgccaactctgccaagctttctgatcccccaacttcaccttccagtccttcgcaaatgatgccccatgtgcaaactcacttctgaggggggaccctggcaccgcattagagctcgaaataaaggcgatagctgactttcatttggggcatttgtaaaaagtagattaaaatatttgcctccatgtagaacttgaactaacataatcttaaactcttgaatatgtgccttctagaatacatattacaagaaaactacagggtccacacggcaatcagaagaaaggagctgagatgaggttttggaaaaccctgacacctttaaaaagcagtttttgaaagacaaaatttagatttaatttacgtcttgagaaatactatatatacaatatatattttgtgggcttaattgaaacaacattattttaaaatcaaaggggatatatgtttgtggaatggattttcctgaagctgcttaacagttgctttggattctctaagatgaatccaaatgtgaaagatgcatgttactgccaaaaccaaattgagctcagcttcctaggcattacccaaaagcaaggtgtttaagtaattgccagcttttataccatcatgagtggtgacttaaggagaaatagctgtatagatgagtttttcattatttggaaatttaggggtagaaaatgttttcccctaattttccagagaagcctatttttatatttttaaaaaactgacagggcccagttaaatatgatttgcattttttaaatttgccagttttattttctaaattctttcatgagcttgcctaaaattcggaatggttttcgggttgtggcaaaccccaaagagagcactgtccaaggatgtcgggagcatcctgctgcttaggggaatgttttcgcaaatgttgctctagtcagtccagctcatctgccaaaatgtagggctaccgtcttggatgcatgagctattgctagagcatcatccttagaaatcagtgccccagatgtacatgtgttgagcgtattcttgaaagtattgtgtttatgcatttcaatttcaatggtgttggcttcccctccccaccccacgcgtgcataaaaactggttctacaaatttttacttgaagtaccaggccgtttgctttttcaggttgttttgttttatagtattaagtgaaattttaaatgcacagttctatttgctatctgaactaattcatttattaagtatatttgtaaaagctaaggctcgagttaaaacaatgaagtgttttacaatgatttgtaaaggactatttataactaatatggttttgttttcaatgaattaagaaagattaaatatatctttgtaaattattttatgtcatagtttaattggtctaccaagtaagacatctcaaatacagtagtataatgtatgaattttgtaagtataagaaattttattagacattctcttactttttgtaaatgctgtaaatatttcataaattaacaaagtgtcactccataaaaagaaagctaatactaatagcctaaaagattttgtgaaatttcatgaaaactttttaatggcaataatgactaaagacctgctgtaataaatgtattaactgaaacctaaaaaaaaaaaaaaaaaa

SEQ ID NO: 324896 - DNA, 1812 bp, Artificial Sequence
  derived and/or modified sequence
atggcatcagcctctacttccaaatacaacagccactctctcgagaacgagagcatcaaaagaacaagtcgtgacggtgtgaatcgcgacctcaccgaggccgtcccaagattacctggggagactctgataaccgacaaggaagtgatttacatctgcccgtttaatggaccaataaagggcagagtgtacattaccaactacaggctgtacttaaggagtctggaaactgacagctctctcattctcgacgtgcccctgggcgtcatttctagaattgagaaaatggggggggccacgagccggggtgaaaattcttacggtctcgatataacatgtaaggacatgaggaatctgcgcttcgccctgaaacaggaaggccattccagaagggatatgttcgagatactcacacggtacgcctttcctctggctcatagcttaccattattcgcctttctgaacgaggaaaaattcaatgttgacggctggactgtgtataaccccgtggaagaatacaggaggcagggccttcctaatcatcattggcgcattaccttcatcaataaatgttacgaactgtgcgacacctatccggctcttctcgtcgttccctaccgcgctagtgacgatgacctgaggagggtggccacctttcgatcccgcaatagaatcccagtgttgagctggattcaccctgagaataagactgttatcgtcagatgctcgcagcctctggtggggatgagcggcaagcgcaacaaagatgacgaaaagtatctggatgtaattagggagaccaataagcagatcagcaagttaacaatctatgatgctcggccatccgtcaacgctgtggccaataaggccactggaggcggatacgagagtgatgatgcttaccataacgccgaactgttttttctggatattcacaatattcatgtcatgcgggaatcacttaagaaggttaaagatatcgtctatcctaatgtcgaagagagtcactggcttagctcactcgaatctacgcactggctggagcacattaaattagtgctgaccggggccatacaggtggccgataaggtctcttctggcaaaagctctgtactggtgcactgttctgacggatgggaccgaacggcgcagctgacttccctagccatgttgatgttagattcgttctatcgcagcatcgagggctttgagatcctggtccagaaagagtggataagtttcggacacaagttcgcttctaggatcggacacggtgataagaatcacaccgacgcagaccgtagtcccatcttcttacagtttatagactgcgtctggcaaatgtctaaacagttcccgaccgccttcgagtttaacgaacaatttctcatcattattttagaccacctttactcctgccgattcgggacttttctctttaattgtgaaagtgctcgtgagagacaaaaggtgacagaacgcaccgttagcttatggagcctcattaatagcaacaaagagaagttcaagaatccgttctacaccaaggagattaaccgcgtgttgtaccctgtagcgtcaatgaggcacctggagctgtgggtgaactattatataaggtggaatcccagaattaagcagcagcagccaaatccagtagaacagcgctacatggaacttcttgccctgcgtgacgaatacatcaaacgcctggaagaactccaactcgctaactcagccaagctgtccgacccacctacaagtcccagtagccccagccaaatgatgcctcacgttcagacacacttctag

SEQ ID NO: 324897 - DNA, 1701 bp, Artificial Sequence
  derived and/or modified sequence
atggctagtgcctcgacctctaagtacaacagtcattcgctggaaaatgaaagcattaagcgcacgtcccgggatggggttaaccgagatctcaccgaagctgttccccgcctccctggcgaaactcttatcaccgataaagaggtcatctatatatgtcctttcaatggaccaatcaagggcagggtgtacataactaactaccgcctttatctgagatccttggaaacagacatgcgcaacctcagattcgcactgaaacaggagggccacagccgaagagatatgttcgagattctcacaagatacgcattcccgcttgcccacagcctgcccctgtttgcttttctgaatgaggagaagttcaatgttgatggctggacagtctacaaccctgttgaggaatatcggcggcagggactccctaatcaccattggcgcataacgtttatcaacaaatgctacgagctatgtgatacttacccagccctcctcgttgtgccttacagagcttcagatgatgatctcagaagggttgctacttttagatcccgcaatcgaattccagtactgtcttggatacaccctgagaacaagaccgtaatcgtgagatgctcgcagccattggtggggatgtcaggaaagcgcaataaagatgacgaaaaatacctggacgtgattcgcgagactaacaagcagatctctaaattgactatttacgacgcaaggcccagcgtcaatgccgttgctaacaaggccaccggaggtggttacgagagcgatgatgcctatcataacgctgagctcttctttcttgacatccataacatacacgttatgcgcgaatccctcaagaaagttaaagatatcgtgtacccgaatgttgaggaatcacattggctttcttcactggaaagcacacactggctggagcatatcaaacttgtcctcacgggagctattcaagtggctgacaaggtgagctctggcaagtccagtgtgctagtgcactgcagcgacggctgggaccgcaccgctcaactgacgagtctagccatgctgatgctcgactctttttacaggagcatcgaaggttttgagatcctggtccagaaggagtggataagctttgggcataaatttgcatcccgtataggtcatggggacaagaaccatacggatgctgatcggagccctatcttcctccaatttattgattgcgtgtggcagatgtccaagcagttccctaccgccttcgagttcaacgagcagtttcttatcatcattcttgaccacctctatagctgccgctttggaacctttctgtttaattgcgaatcagcccgagaacggcagaaggtgaccgaacggacggtctcgctgtggtcactcatcaatagcaacaaggaaaaatttaaaaatccattctatacaaaagagatcaatcgagttctttaccccgtagcaagtatgagacacctggaactttgggttaattactatatcagatggaaccctaggatcaagcaacagcagcccaacccagtcgagcaaagatacatggagctgctggcgcttagagatgaatatatcaagaggcttgaggagctccaattggcaaatagtgccaaattgtcagacccccctacgtccccctccagtccttctcagatgatgcctcacgtgcagacccacttttag

SEQ ID NO: 324898 - DNA, 1251 bp, Artificial Sequence
  derived and/or modified sequence
atgggtggcgccacttctaggggtgaaaattcctacgggctggacataacttgcaaagatatgcgcaacctgcgctttgcattgaagcaggagggccactcccggcgcgatatgttcgagatcctgacccggtacgcctttcccctggcgcatagcctacctctgtttgcttttctgaatgaggaaaagttcaacgtggacgggtggactgtctataacccagtagaggagtaccgtaggcaggggctccctaatcatcattggagaatcacatttatcaacaaatgctatgaactctgcgacacctaccccgctctcctggtcgtcccctatcgcgcctccgatgatgaccttaggagggtggccacattccgaagccgtaatcgaatccccgtcctgtcttggattcacccagaaaataaaacagtgattgtccgctgtagtcagccgctggtaggcatgagcggcaaaagaaataaggacgatgagaaatacctggatgtgatacgggagacgaacaagcagatcagcaagctgaccatttacgacgcccgcccatccgtcaatgctgttgcaaacaaggctacaggtggtggctatgaatccgatgatgcataccacaatgctgaactgttctttctcgacatccacaacatccacgtgatgcgggaatctctgaaaaaggtgaaagatattgtgtaccccaacgtggaggagtcacactggctgtccagcctggagtccacgcactggcttgaacacattaagctcgtgctcaccggtgccattcaggtggctgataaggtctcttccggaaagtcctctgtgctggtgcactgctctgatggctgggaccgcacagcccagctgacttccctggcaatgctgatgctggatagtttctacaggagcatcgaaggctttgagatcctcgtccagaaggagtggatcagcttcggacacaagtttgcaagtcggatcggccacggagacaaaaatcacaccgacgctgataggtccccaatattcctgcagttcattgattgtgtgtggcaaatgtccaagcagttccccactgcgtttgagttcaatgagcagttccttatcatcatcctagaccacttgtatagttgccgtttcggtacctttttgtttaattgcgagtccgctcgagaaaggcaggccctccacttcctgtctctgtcactctgtagacgcctacaaaaaggtctgtttctttacggccactag

SEQ ID NO: 324899 - DNA, 1467 bp, Artificial Sequence
  derived and/or modified sequence
atgcgtaacctacgatttgcgctgaagcaggaaggtcattcccgccgggatatgtttgaaatactgacccgctacgcattccccctcgcccactccttgccattgttcgctttcctcaatgaagagaaatttaacgtggatgggtggaccgtgtataaccccgtggaggaatacagacgccagggtcttcccaaccaccattggagaatcacctttattaacaaatgttatgaactgtgcgacacttaccctgcattgttggtagtaccctaccgcgcatcagacgatgacctccgcagagtggctacatttaggagtaggaacagaatcccagtactctcatggatccatcccgaaaataaaacggtgatagtgcggtgctcgcagcctctcgtgggcatgagcggcaaaaggaataaagatgatgagaagtatctggacgttatcagagagacaaataaacaaatatcaaagctcacaatctacgatgcacgaccttctgtcaatgcggttgctaataaagcaacagggggaggttatgagagcgatgatgcataccacaacgcggagttattctttctagatatacacaacatccatgtgatgcgggagtctttgaaaaaggtcaaggacatcgtttaccctaatgtggaggagtcacactggctctcctcactagaatctactcactggctggaacacatcaagttggtgcttactggcgcaatccaggtggccgacaaggttagctccggtaagtcttccgtgctggtgcattgttccgacggctgggaccgaactgcccagctgacatccctcgcgatgctgatgttggatagcttctacagatcaattgaaggattcgagatcctggtccagaaggagtggatatcttttgggcacaaattcgccagcagaattggacacggagacaagaatcatacagacgccgaccggtcaccaatatttcttcagttcatcgattgcgtgtggcagatgtccaagcaattccccacagcattcgaatttaatgagcagttccttatcatcattctggatcacctttattcatgtaggttcggcactttcctctttaactgtgagagcgcccgtgagcggcaaaaggttacagagcgcacagtgtcgctgtggagcctcatcaatagtaacaaagagaaattcaagaaccccttctacactaaagagatcaatagggtgctgtatcctgtggctagcatgcggcacttggagctgtgggtgaattactacataagatggaacccccggatcaaacagcaacagcctaatcccgtagaacaacgatatatggaattgctggctctgcgcgatgagtacattaaaaggctcgaggaactacagttagctaactctgccaagctgtcggacccacccacgtcaccgtcctcacccagtcagatgatgccccacgttcagacccacttttag

SEQ ID NO: 324900 - DNA, 1812 bp, Artificial Sequence
  derived and/or modified sequence
atggccagcgccagcaccagcaagtacaacagccacagcctggagaatgaaagcatcaagaggaccagcagagatggagtgaacagagacctgacagaggccgtgccccggctgcctggagagaccctcatcacagacaaggaggtgatctacatctgccccttcaacggccccatcaagggccgggtgtacatcaccaactaccgcctgtacctgcggagcctggagacagacagcagcctcatcctggatgtgcccctgggcgtcatcagcagaattgagaagatgggcggggccaccagcagaggagagaacagctatggcctggacatcacctgcaaggacatgaggaacctgcgctttgccctgaagcaggagggccacagccggcgggacatgtttgagatcctgaccaggtatgccttccccctggcccacagcctgcccctgtttgccttcctgaatgaggagaagttcaacgtggatggctggacagtgtacaaccctgtggaggagtaccgccggcagggcctgcccaaccaccactggaggatcaccttcatcaacaagtgctatgagctgtgtgacacctacccagccctgctggtggtgccctaccgggccagtgatgatgacctgcggcgggtggccaccttccgcagcaggaaccgcatccctgtgctgtcctggatccaccctgagaacaagacagtgattgtgcgctgcagccagcccctggtgggcatgtctgggaagaggaacaaggatgatgagaagtacctggatgtgatccgggagaccaacaagcagatcagcaagctgaccatctatgatgcccggcccagcgtgaatgctgtggccaacaaggccactggaggcggctatgaaagtgatgatgcctaccacaatgctgagctgttcttcctggacatccacaacatccacgtgatgagggagagcctgaagaaggtgaaggacatcgtgtacccaaatgtggaggagagccactggctgagcagcctggagagcacccactggctggagcacatcaagctggtgctgactggagccatccaggtggccgacaaggtgagcagcggcaagagctctgtgctggtgcactgcagtgatggctgggacagaacagcccagctgaccagcctggccatgctgatgctggacagcttctaccgcagcattgagggctttgagatcctggtgcagaaggagtggatcagctttggccacaagtttgccagccgcatcggccacggggacaagaaccacacagatgctgacaggagccccatcttcctgcagttcatcgactgtgtgtggcagatgagcaagcagttccccacagcctttgagttcaatgagcagttcctgatcatcatcctggaccacctgtacagctgccgcttcggcaccttcctgttcaactgtgagagcgcccgggagcggcagaaggtgacagagaggacagtgtccctgtggagcctcatcaacagcaacaaggagaagttcaagaaccccttctacaccaaggagatcaacagagtgctgtaccctgtggcctccatgaggcacctggagctgtgggtgaactactacatccgctggaacccccgcatcaagcagcagcagcccaaccctgtggagcagcgctacatggagctgctggccctgagagatgagtacatcaagaggctggaggagctgcagctggccaacagcgccaagctgagtgacccccccaccagccccagcagccccagccagatgatgccccacgtgcagacccacttctag

SEQ ID NO: 324901 - DNA, 1701 bp, Artificial Sequence
  derived and/or modified sequence
atggccagcgccagcaccagcaagtacaacagccacagcctggagaatgaaagcatcaagaggaccagcagagatggagtgaacagagacctgacagaggccgtgccccggctgcctggagagaccctcatcacagacaaggaggtgatctacatctgccccttcaacggccccatcaagggccgggtgtacatcaccaactaccgcctgtacctgcggagcctggagacagacatgaggaacctgcgctttgccctgaagcaggagggccacagcagaagagacatgtttgagatcctgaccaggtatgccttccccctggcccacagcctgcccctgtttgccttcctgaatgaggagaagttcaacgtggatggctggacagtgtacaaccctgtggaggagtaccgccggcagggcctgcccaaccaccactggaggatcaccttcatcaacaagtgctatgagctgtgtgacacctacccagccctgctggtggtgccctaccgggccagtgatgatgacctgcggcgggtggccaccttccgcagcaggaaccgcatccctgtgctgtcctggatccaccctgagaacaagacagtcatcgtgcgctgcagccagcccctggtgggcatgtctgggaagaggaacaaggatgatgagaagtacctggatgtgatccgggagaccaacaagcagatcagcaagctgaccatctatgatgcccggcccagcgtgaatgctgtggccaacaaggccaccggcggcggctatgaaagtgatgatgcctaccacaatgctgagctgttcttcctggacatccacaacatccacgtgatgagggagagcctgaagaaggtgaaggacatcgtgtaccccaacgtggaggagagccactggctgagcagcctggagagcacccactggctggagcacatcaagctggtgctgaccggggccatccaggtggccgacaaggtgtcctctgggaagagctctgtgctggtgcactgcagtgatggctgggacagaacagcccagctgaccagcctggccatgctgatgctggacagcttctaccgcagcattgagggctttgagatcctggtgcagaaggagtggatcagctttggccacaagtttgccagcagaattggacatggagacaagaaccacacagatgctgacaggagccccatcttcctgcagttcatcgactgtgtgtggcagatgagcaagcagttccccacagcctttgagttcaatgagcagttcctgatcatcatcctggaccacctgtacagctgccgcttcggcaccttcctgttcaactgtgagagcgcccgggagcggcagaaggtgacagagaggacagtgtccctgtggagcctcatcaacagcaacaaggagaagttcaagaaccccttctacaccaaggagatcaacagagtgctgtaccctgtggcctccatgaggcacctggagctgtgggtgaactactacatccgctggaacccccgcatcaagcagcagcagcccaaccctgtggagcagcgctacatggagctgctggccctgagagatgagtacatcaagaggctggaggagctgcagctggccaacagcgccaagctgagtgacccccccaccagccccagcagccccagccagatgatgcctcatgtgcagacccacttctag

SEQ ID NO: 324902 - DNA, 1251 bp, Artificial Sequence
  derived and/or modified sequence
atgggcggggccaccagcagaggagaaaattcctatggcctggacatcacctgcaaggacatgaggaacctgcgctttgccctgaagcaggagggccacagcagaagagacatgtttgagatcctgaccaggtatgccttccccctggcccacagcctgcccctgtttgccttcctgaatgaggagaagttcaacgtggatggctggacagtgtacaaccctgtggaggagtaccgccggcagggcctgcccaaccaccactggaggatcaccttcatcaacaagtgctatgagctgtgtgacacctacccagccctgctggtggtgccctaccgggccagtgatgatgacctgcggcgggtggccaccttccgcagcaggaaccgcatccctgtgctgtcctggatccaccctgagaacaagacagtcatcgtgcgctgcagccagcccctggtgggcatgtctgggaagaggaacaaggatgatgagaagtacctggatgtgatccgggagaccaacaagcagatcagcaagctgaccatctatgatgcccggcccagcgtgaatgctgtggccaacaaggccaccggcggcggctatgaaagtgatgatgcctaccacaatgctgagctgttcttcctggacatccacaacatccacgtgatgagggagagcctgaagaaggtgaaggacatcgtgtaccccaacgtggaggagagccactggctgagcagcctggagagcacccactggctggagcacatcaagctggtgctgaccggggccatccaggtggccgacaaggtgtcctctgggaagagctctgtgctggtgcactgcagtgatggctgggacagaacagcccagctgaccagcctggccatgctgatgctggacagcttctaccgcagcattgagggctttgagatcctggtgcagaaggagtggatcagctttggccacaagtttgccagcagaattggacatggagacaagaaccacacagatgctgacaggagccccatcttcctgcagttcatcgactgtgtgtggcagatgagcaagcagttccccacagcctttgagttcaatgagcagttcctgatcatcatcctggaccacctgtacagctgccgcttcggcaccttcctgttcaactgtgagagcgcccgggagcggcaggccctgcacttcctgagcctgagcctgtgccggcggctgcagaagggcctcttcctgtatggccactag

SEQ ID NO: 324903 - DNA, 1467 bp, Artificial Sequence
  derived and/or modified sequence
atgaggaacctgcgctttgccctgaagcaggagggccacagcagaagagacatgtttgagatcctgaccaggtatgccttccccctggcccacagcctgcccctgtttgccttcctgaatgaggagaagttcaacgtggatggctggacagtgtacaaccctgtggaggagtaccgccggcagggcctgcccaaccaccactggaggatcaccttcatcaacaagtgctatgagctgtgtgacacctacccagccctgctggtggtgccctaccgggccagtgatgatgacctgcggcgggtggccaccttccgcagcaggaaccgcatccctgtgctgtcctggatccaccctgagaacaagacagtcatcgtgcgctgcagccagcccctggtgggcatgtctgggaagaggaacaaggatgatgagaagtacctggatgtgatccgggagaccaacaagcagatcagcaagctgaccatctatgatgcccggcccagcgtgaatgctgtggccaacaaggccaccggcggcggctatgaaagtgatgatgcctaccacaatgctgagctgttcttcctggacatccacaacatccacgtgatgagggagagcctgaagaaggtgaaggacatcgtgtaccccaacgtggaggagagccactggctgagcagcctggagagcacccactggctggagcacatcaagctggtgctgaccggggccatccaggtggccgacaaggtgtcctctgggaagagctctgtgctggtgcactgcagtgatggctgggacagaacagcccagctgaccagcctggccatgctgatgctggacagcttctaccgcagcattgagggctttgagatcctggtgcagaaggagtggatcagctttggccacaagtttgccagcagaattggacatggagacaagaaccacacagatgctgacaggagccccatcttcctgcagttcatcgactgtgtgtggcagatgagcaagcagttccccacagcctttgagttcaatgagcagttcctgatcatcatcctggaccacctgtacagctgccgcttcggcaccttcctgttcaactgtgagagcgcccgggagcggcagaaggtgacagagaggacagtgtccctgtggagcctcatcaacagcaacaaggagaagttcaagaaccccttctacaccaaggagatcaacagagtgctgtaccctgtggcctccatgaggcacctggagctgtgggtgaactactacatccgctggaacccccgcatcaagcagcagcagcccaaccctgtggagcagcgctacatggagctgctggccctgagagatgagtacatcaagaggctggaggagctgcagctggccaacagcgccaagctgagtgacccccccaccagccccagcagccccagccagatgatgcctcatgtgcagacccacttctag

SEQ ID NO: 324904 - DNA, 3593 bp, Artificial Sequence
  derived and/or modified sequence
gcagccgagcagcctggcaacggcggtggcgcccggagcccgagagtttccaggatggcttctgcatcaacttctaaatataattcacactccttggagaatgagtctattaagaggacgtctcgagatggagtcaatcgagatctcactgaggctgttcctcgacttccaggagaaacactaatcactgacaaagaagttatttacatatgtcctttcaatggccccattaagggaagagtttacatcacaaattatcgtctttatttaagaagtttggaaacggattcttctctaatacttgatgttcctctgggtgtgatctcgagaattgaaaaaatgggaggcgcgacaagtagaggagaaaattcctatggtctagatattacttgtaaagacatgagaaacctgaggttcgctttgaaacaggaaggccacagcagaagagatatgtttgagatcctcacgagatacgcgtttcccctggctcacagtctgccattatttgcatttttaaatgaagaaaagtttaacgtggatggatggacagtttacaatccagtggaagaatacaggaggcagggcttgcccaatcaccattggagaataacttttattaataagtgctatgagctctgtgacacttaccctgctcttttggtggttccgtatcgtgcctcagatgatgacctccggagagttgcaacttttaggtcccgaaatcgaattccagtgctgtcatggattcatccagaaaataagacggtcattgtgcgttgcagtcagcctcttgtcggtatgagtgggaaacgaaataaagatgatgagaaatatctcgatgttatcagggagactaataaacaaatttctaaactcaccatttatgatgcaagacccagcgtaaatgcagtggccaacaaggcaacaggaggaggatatgaaagtgatgatgcatatcataacgccgaacttttcttcttagacattcataatattcatgttatgcgggaatctttaaaaaaagtgaaggacattgtttatcctaatgtagaagaatctcattggttgtccagtttggagtctactcattggttagaacatatcaagctcgttttgacaggagccattcaagtagcagacaaagtttcttcagggaagagttcagtgcttgtgcattgcagtgacggatgggacaggactgctcagctgacatccttggccatgctgatgttggatagcttctataggagcattgaagggttcgaaatactggtacaaaaagaatggataagttttggacataaatttgcatctcgaataggtcatggtgataaaaaccacaccgatgctgaccgttctcctatttttctccagtttattgattgtgtgtggcaaatgtcaaaacagttccctacagcttttgaattcaatgaacaatttttgattataattttggatcatctgtatagttgccgatttggtactttcttattcaactgtgaatctgctcgagaaagacagaaggttacagaaaggactgtttctttatggtcactgataaacagtaataaagaaaaattcaaaaaccccttctatactaaagaaatcaatcgagttttatatccagttgccagtatgcgtcacttggaactctgggtgaattactacattagatggaaccccaggatcaagcaacaacagccgaatccagtggagcagcgttacatggagctcttagccttacgcgacgaatacataaagcggcttgaggaactgcagctcgccaactctgccaagctttctgatcccccaacttcaccttccagtccttcgcaaatgatgccccatgtgcaaactcacttctgaggggggaccctggcaccgcattagagctcgaaataaaggcgatagctgactttcatttggggcatttgtaaaaagtagattaaaatatttgcctccatgtagaacttgaactaacataatcttaaactcttgaatatgtgccttctagaatacatattacaagaaaactacagggtccacacggcaatcagaagaaaggagctgagatgaggttttggaaaaccctgacacctttaaaaagcagtttttgaaagacaaaatttagatttaatttacgtcttgagaaatactatatatacaatatatattttgtgggcttaattgaaacaacattattttaaaatcaaaggggatatatgtttgtggaatggattttcctgaagctgcttaacagttgctttggattctctaagatgaatccaaatgtgaaagatgcatgttactgccaaaaccaaattgagctcagcttcctaggcattacccaaaagcaaggtgtttaagtaattgccagcttttataccatcatgagtggtgacttaaggagaaatagctgtatagatgagtttttcattatttggaaatttaggggtagaaaatgttttcccctaattttccagagaagcctatttttatatttttaaaaaactgacagggcccagttaaatatgatttgcattttttaaatttgccagttttattttctaaattctttcatgagcttgcctaaaattcggaatggttttcgggttgtggcaaaccccaaagagagcactgtccaaggatgtcgggagcatcctgctgcttaggggaatgttttcgcaaatgttgctctagtcagtccagctcatctgccaaaatgtagggctaccgtcttggatgcatgagctattgctagagcatcatccttagaaatcagtgccccagatgtacatgtgttgagcgtattcttgaaagtattgtgtttatgcatttcaatttcaatggtgttggcttcccctccccaccccacgcgtgcataaaaactggttctacaaatttttacttgaagtaccaggccgtttgctttttcaggttgttttgttttatagtattaagtgaaattttaaatgcacagttctatttgctatctgaactaattcatttattaagtatatttgtaaaagctaaggctcgagttaaaacaatgaagtgttttacaatgatttgtaaaggactatttataactaatatggttttgttttcaatgaattaagaaagattaaatatatctttgtaaattattttatgtcatagtttaattggtctaccaagtaagacatctcaaatacagtagtataatgtatgaattttgtaagtataagaaattttattagacattctcttactttttgtaaatgctgtaaatatttcataaattaacaaagtgtcactccataaaaagaaagctaatactaatagcctaaaagattttgtgaaatttcatgaaaactttttaatggcaataatgactaaagacctgctgtaataaatgtattaactgaaacctaacactgttttcagggctgtgagtgtgcatgtgttggaaatgtgcatggtggccatctgatttctttgcccgggtctgcttcatgtactttttatctcaccggcaaccttgcagggctctcccaaaatttcagcaagattgggcatttaagtgtattaaacagtgcagattttaagagtca

SEQ ID NO: 324905 - DNA, 1774 bp, Artificial Sequence
  derived and/or modified sequence
ggtggcgcccggagcccgagagtttccaggatggcttctgcatcaacttctaaatataattcacactccttggagaatgagtctattaagaggacgtctcgagatggagtcaatcgagatctcactgaggctgttcctcgacttccaggagaaacactaatcactgacaaagaagttatttacatatgtcctttcaatggccccattaagggaagagtttacatcacaaattatcgtctttatttaagaagtttggaaacggacatgagaaacctgaggttcgctttgaaacaggaaggccacagcagaagagatatgtttgagatcctcacgagatacgcgtttcccctggctcacagtctgccattatttgcatttttaaatgaagaaaagtttaacgtggatggatggacagtttacaatccagtggaagaatacaggaggcagggcttgcccaatcaccattggagaataacttttattaataagtgctatgagctctgtgacacttaccctgctcttttggtggttccgtatcgtgcctcagatgatgacctccggagagttgcaacttttaggtcccgaaatcgaattccagtgctgtcatggattcatccagaaaataagacggtcattgtgcgttgcagtcagcctcttgtcggtatgagtgggaaacgaaataaagatgatgagaaatatctcgatgttatcagggagactaataaacaaatttctaaactcaccatttatgatgcaagacccagcgtaaatgcagtggccaacaaggcaacaggaggaggatatgaaagtgatgatgcatatcataacgccgaacttttcttcttagacattcataatattcatgttatgcgggaatctttaaaaaaagtgaaggacattgtttatcctaatgtagaagaatctcattggttgtccagtttggagtctactcattggttagaacatatcaagctcgttttgacaggagccattcaagtagcagacaaagtttcttcagggaagagttcagtgcttgtgcattgcagtgacggatgggacaggactgctcagctgacatccttggccatgctgatgttggatagcttctataggagcattgaagggttcgaaatactggtacaaaaagaatggataagttttggacataaatttgcatctcgaataggtcatggtgataaaaaccacaccgatgctgaccgttctcctatttttctccagtttattgattgtgtgtggcaaatgtcaaaacagttccctacagcttttgaattcaatgaacaatttttgattataattttggatcatctgtatagttgccgatttggtactttcttattcaactgtgaatctgctcgagaaagacagaaggttacagaaaggactgtttctttatggtcactgataaacagtaataaagaaaaattcaaaaaccccttctatactaaagaaatcaatcgagttttatatccagttgccagtatgcgtcacttggaactctgggtgaattactacattagatggaaccccaggatcaagcaacaacagccgaatccagtggagcagcgttacatggagctcttagccttacgcgacgaatacataaagcggcttgaggaactgcagctcgccaactctgccaagctttctgatcccccaacttcaccttccagtccttcgcaaatgatgccccatgtgcaaactcacttctgaggggggaccctggcaccgcattagagctcgaaataaaggcgat

SEQ ID NO: 324906 - DNA, 1943 bp, Artificial Sequence
  derived and/or modified sequence
agccgagcagcctggcaacggcggtggcgcccggagcccgagagtttccaggatggcttctgcatcaacttctaaatataattcacactccttggagaatgagtctattaagaggacgtctcgagatggagtcaatcgagatctcactgaggctgttcctcgacttccaggagaaacactaatcactggattcttctctaatacttgatgttcctctgggtgtgatctcgagaattgaaaaaatgggaggcgcgacaagtagaggagaaaattcctatggtctagatattacttgtaaagacatgagaaacctgaggttcgctttgaaacaggaaggccacagcagaagagatatgtttgagatcctcacgagatacgcgtttcccctggctcacagtctgccattatttgcatttttaaatgaagaaaagtttaacgtggatggatggacagtttacaatccagtggaagaatacaggaggcagggcttgcccaatcaccattggagaataacttttattaataagtgctatgagctctgtgacacttaccctgctcttttggtggttccgtatcgtgcctcagatgatgacctccggagagttgcaacttttaggtcccgaaatcgaattccagtgctgtcatggattcatccagaaaataagacggtcattgtgcgttgcagtcagcctcttgtcggtatgagtgggaaacgaaataaagatgatgagaaatatctcgatgttatcagggagactaataaacaaatttctaaactcaccatttatgatgcaagacccagcgtaaatgcagtggccaacaaggcaacaggaggaggatatgaaagtgatgatgcatatcataacgccgaacttttcttcttagacattcataatattcatgttatgcgggaatctttaaaaaaagtgaaggacattgtttatcctaatgtagaagaatctcattggttgtccagtttggagtctactcattggttagaacatatcaagctcgttttgacaggagccattcaagtagcagacaaagtttcttcagggaagagttcagtgcttgtgcattgcagtgacggatgggacaggactgctcagctgacatccttggccatgctgatgttggatagcttctataggagcattgaagggttcgaaatactggtacaaaaagaatggataagttttggacataaatttgcatctcgaataggtcatggtgataaaaaccacaccgatgctgaccgttctcctatttttctccagtttattgattgtgtgtggcaaatgtcaaaacagttccctacagcttttgaattcaatgaacaatttttgattataattttggatcatctgtatagttgccgatttggtactttcttattcaactgtgaatctgctcgagaaagacaggctctccactttctctctctgtctctctgtagaaggttacagaaaggactgtttctttatggtcactgataaacagtaataaagaaaaattcaaaaaccccttctatactaaagaaatcaatcgagttttatatccagttgccagtatgcgtcacttggaactctgggtgaattactacattagatggaaccccaggatcaagcaacaacagccgaatccagtggagcagcgttacatggagctcttagccttacgcgacgaatacataaagcggcttgaggaactgcagctcgccaactctgccaagctttctgatcccccaacttcaccttccagtccttcgcaaatgatgccccatgtgcaaactcacttctgaggggggaccctggcaccgcattagagctcgaaataaaggcgatagctgactttcatttggggcatttgtaaaaagtagattaaaatatttgcctccatgtagaacttgaactaacataatcttaaactcttgaatatgtgcc

SEQ ID NO: 324907 - DNA, 1954 bp, Artificial Sequence
  derived and/or modified sequence
agccgagcagcctggcaacggcggtggcgcccggagcccgagagtttccaggatggcttctgcatcaacttctaaatataattcacactccttggagaatgagtctattaagaggacgtctcgagatggagtcaatcgagatctcactgaggctgttcctcgacttccaggagaaacactaatcactggacatgagaaacctgaggttcgctttgaaacaggaaggccacagcagaagagatatgtttgagatcctcacgagatacgcgtttcccctggctcacagtctgccattatttgcatttttaaatgaagaaaagtttaacgtggatggatggacagtttacaatccagtggaagaatacaggaggcagggcttgcccaatcaccattggagaataacttttattaataagtgctatgagctctgtgacacttaccctgctcttttggtggttccgtatcgtgcctcagatgatgacctccggagagttgcaacttttaggtcccgaaatcgaattccagtgctgtcatggattcatccagaaaataagacggtcattgtgcgttgcagtcagcctcttgtcggtatgagtgggaaacgaaataaagatgatgagaaatatctcgatgttatcagggagactaataaacaaatttctaaactcaccatttatgatgcaagacccagcgtaaatgcagtggccaacaaggcaacaggaggaggatatgaaagtgatgatgcatatcataacgccgaacttttcttcttagacattcataatattcatgttatgcgggaatctttaaaaaaagtgaaggacattgtttatcctaatgtagaagaatctcattggttgtccagtttggagtctactcattggttagaacatatcaagctcgttttgacaggagccattcaagtagcagacaaagtttcttcagggaagagttcagtgcttgtgcattgcagtgacggatgggacaggactgctcagctgacatccttggccatgctgatgttggatagcttctataggagcattgaagggttcgaaatactggtacaaaaagaatggataagttttggacataaatttgcatctcgaataggtcatggtgataaaaaccacaccgatgctgaccgttctcctatttttctccagtttattgattgtgtgtggcaaatgtcaaaacagttccctacagcttttgaattcaatgaacaatttttgattataattttggatcatctgtatagttgccgatttggtactttcttattcaactgtgaatctgctcgagaaagacagaaggttacagaaaggactgtttctttatggtcactgataaacagtaataaagaaaaattcaaaaaccccttctatactaaagaaatcaatcgagttttatatccagttgccagtatgcgtcacttggaactctgggtgaattactacattagatggaaccccaggatcaagcaacaacagccgaatccagtggagcagcgttacatggagctcttagccttacgcgacgaatacataaagcggcttgaggaactgcagctcgccaactctgccaagctttctgatcccccaacttcaccttccagtccttcgcaaatgatgccccatgtgcaaactcacttctgaggggggaccctggcaccgcattagagctcgaaataaaggcgatagctgactttcatttggggcatttgtaaaaagtagattaaaatatttgcctccatgtagaacttgaactaacataatcttaaactcttgaatatgtgccttctagaatacatattacaagaaaactacagggtccacacggcaatcagaagaaaggagctgagatgaggttttggaaaaccctgacacctttaaaaagcagtttttgaaagacaaaatttagatttaatttacgtcttgagaaatactatata

SEQ ID NO: 324908 - DNA, 1812 bp, Artificial Sequence
  derived and/or modified sequence
atggccagcgccagcaccagcaagtacaacagccacagcctggagaatgagtcaatcaagagaacaagcagggacggggtaaaccgggacctgactgaagccgttccgcggctgcctggagagactctcatcactgataaggaggtgatatatatctgccctttcaatggtcccatcaaaggccgggtatacatcaccaactatcggctgtacctgcggagtttagaaactgacagctctctaatactggacgtgcccttgggcgtcatctcacggattgaaaagatgggcggtgcgacgtcccgaggtgagaattcatatggattggacatcacttgcaaagacatgcggaacctccgcttcgcacttaaacaagagggccactcccgccgagatatgtttgagatcctcacccgctatgcattcccactggcccacagcctccccttattcgcctttcttaatgaggagaaatttaacgtcgacggatggacagtgtataacccagtcgaagagtataggaggcaggggctgcccaaccaccattggcgaatcaccttcataaacaagtgttacgaactgtgcgacacctaccccgccctcctggtggttccgtacagggcctcagacgacgatctgcgccgtgtggcaactttcagaagccgcaatcgcatcccagtactgagttggatacacccagagaacaagacggtgatcgtccgctgcagccagccgttggtcgggatgtcaggtaaacgcaataaggacgatgaaaaatacctcgatgtcataagggaaactaacaagcaaatatccaagttaacaatctatgacgccagacccagtgtgaatgccgtggccaataaggcaacaggcggtggctacgaatccgatgacgcctaccataacgcagagctgttcttcttggacattcataacattcacgtcatgcgcgagagcttgaagaaagtgaaggatatagtgtacccgaatgtggaggaaagtcactggctgagcagcctcgagtcaacacactggctggaacacattaagctggttctgactggcgcaattcaagtggccgacaaagtgtcgtctgggaaaagctcagtgcttgtgcattgttccgacggctgggatcgtaccgcgcagctgacttccctggccatgctcatgctggactccttctatcggagcatagagggtttcgagatcctagtacagaaggaatggattagttttgggcacaaatttgcctcacgaattggccacggagacaaaaaccacacggatgcagatcgatcaccgatcttccttcagtttatcgattgcgtgtggcagatgagtaaacaatttcctaccgcatttgaattcaacgagcagttcctcatcatcattcttgaccacctctatagctgtcggtttgggacctttcttttcaattgcgaaagcgccagagaacggcaaaaagtgacggaacgaactgtgtctctgtggtcactaattaatagcaacaaagagaagtttaaaaaccctttttatacgaaggagatcaatagagtattatatccagtggccagcatgcgacacctggaattgtgggttaattactatatcaggtggaatccgcgaatcaaacaacagcaacctaaccctgtagaacaacggtatatggagctcttggccctccgtgacgagtacatcaagcggcttgaggagctacagctggcaaactctgctaagctttccgaccctccaacttctccaagctccccgagccaaatgatgccacacgtgcaaacgcatttttag

SEQ ID NO: 324909 - DNA, 1701 bp, Artificial Sequence
  derived and/or modified sequence
atggccagcgccagcaccagcaagtacaacagccacagcctggagaacgaaagcattaaacgcacttcgagagacggggttaatcgtgatttgaccgaggctgtcccacgattacccggtgaaacccttatcaccgacaaagaggtcatttacatctgccccttcaatggacctataaaggggagggtctatattacaaattatagactctatctgcgaagtctggaaacagatatgaggaatttgcgtttcgcgttgaagcaagagggacattccaggcgggacatgtttgagattctcactcgctatgcctttccattggcccatagtttgccgctgttcgccttcctgaacgaagaaaagtttaatgtcgacgggtggaccgtctacaacccagtcgaggaatataggcggcagggactgcccaatcatcactggcgcattaccttcatcaataaatgctacgagctctgcgatacatatccggcactgcttgtggtgccttatagggctagcgacgacgatctgagacgcgtggctacttttaggtcacgtaataggatccccgtgttgtcttggatacatcccgagaacaagaccgtcatagtacgatgtagtcagcctttggtggggatgtccggaaaacggaacaaggatgatgaaaagtatctggacgtgatcagggaaaccaataaacagatcagtaaactgaccatttacgatgcccgcccaagcgtcaacgctgtggcaaacaaggctactgggggcgggtatgagtctgatgacgcataccataatgctgagctcttctttctggacattcataacattcacgtcatgagagagagcttgaaaaaggtgaaagacatagtatatccaaatgttgaggagtcccattggctgagttcgctggaatccacccactggttggagcatataaaactggtgctgactggtgcaatccaggtggccgacaaagtgagcagtggcaagtcttcagtgctggtgcactgttctgacggatgggataggaccgctcagctgactagcttggctatgctgatgctggacagtttttaccgcagcattgaaggatttgaaatcttagtgcagaaggaatggatcagcttcggccataaatttgcatctaggataggccacggcgataagaatcacacagatgctgacaggtcccccatattcctacagtttatcgactgtgtgtggcaaatgtccaagcagtttccaacagctttcgagtttaacgaacaattcctgatcattatcctggatcacctgtacagctgtcgctttggaacattcctgttcaactgcgaaagtgctcgcgagcgacagaaggtaacagagagaaccgtttcgctgtggtcactgattaacagtaataaggaaaagttcaagaacccgttctataccaaagagattaatagggtgttataccccgtcgcatcaatgagacacttggagctctgggtaaactattacattagatggaacccccgtatcaagcagcagcagccaaatccagtggaacaaaggtatatggagctgctcgcactgcgggatgagtacatcaaacgcctggaagagctgcagttggctaactccgccaaactgtcagatcctcccacttccccctctagcccctcgcaaatgatgccacatgtgcagacacacttctag

SEQ ID NO: 324910 - DNA, 1251 bp, Artificial Sequence
  derived and/or modified sequence
atgggcggcgccaccagccggggcgagaacagctacggcctggacattacctgcaaagacatgcgcaatctccggttcgctctgaaacaggaaggacatagccgtcgggatatgtttgagatactgactcgatatgcgtttccactcgcccactctctgcctttatttgcatttctgaacgaggaaaaattcaacgtggatggttggacagtgtataaccccgtggaggagtaccgtaggcaagggttacccaaccatcactggaggatcaccttcataaacaagtgctatgaattgtgtgacacataccctgcccttttagtcgtcccctatcgcgcttccgatgatgacctgcgcagagtggctacatttcgctctaggaacaggatcccggtactatcctggatccaccccgagaacaagacagtgatcgttagatgcagccagccactggtgggaatgagcggaaaacgaaataaagacgatgagaaatacctggatgtcatcagggagactaacaagcaaatctccaagctaacaatttatgacgcacggcctagtgtaaacgcagtcgccaacaaggccaccggaggcggctatgagagtgacgacgcttaccacaatgctgaacttttcttcctagatatccacaacattcacgtgatgcgcgagtcgctaaagaaagtgaaagatatcgtgtacccgaacgtcgaagaaagccactggctgagcagcttagagagtacacactggctagagcacattaagctagtgctaacgggcgctatacaagtggccgataaggttagtagcggcaaaagctcggtcctggtgcattgtagcgacggatgggatagaaccgctcaattaacttcacttgcaatgttgatgctggattccttttatcgcagcatcgagggcttcgaaattctcgtgcagaaagagtggattagtttcggccacaagtttgcaagccggattggccatggagacaagaaccacacagacgcagatcgatcgccgatcttccttcagttcatagattgtgtctggcagatgagcaagcagttcccgacggccttcgaattcaacgaacaattcctgattataattctcgaccacttatatagctgtcggttcggaaccttcttgttcaattgtgaaagcgcgagagaacgtcaagcgctgcactttctgtccctgtcactgtgtcggcgccttcagaagggcttgttcctttatggacactag

SEQ ID NO: 324911 - DNA, 1467 bp, Artificial Sequence
  derived and/or modified sequence
atgcggaacctgcggttcgccctgaagcaggagggccacagccggcgtgacatgttcgaaatccttactaggtacgcttttcccctcgcccattctctacccctgttcgcctttctgaacgaagagaagttcaacgttgacggctggacagtctacaaccccgtggaggaataccgccggcagggactgcctaaccaccattggagaatcaccttcatcaacaagtgctatgaactctgtgatacataccccgccttactggtggttccctacagggcaagcgacgacgatttaagacgggttgcaaccttcaggtcgcggaacaggatccccgtcctttcatggatacatcccgagaataagaccgtgatcgtgcggtgctcacagccactcgtaggcatgtctgggaaacgcaacaaggatgacgagaagtatcttgatgtaatccgggaaacaaataaacagatttcaaagctgaccatctatgatgcgcggcccagcgttaacgctgtcgccaacaaggccacagggggcggatacgaaagtgacgacgcataccataatgccgaactgttcttcttagacatccacaatatacacgtgatgcgcgagagcctgaagaaggtgaaggacatcgtgtaccccaacgtcgaagaatcccattggttgtccagccttgaaagtacccattggttagaacacattaagctggtccttactggcgccatccaggttgctgacaaggtgtccagtggaaagagctcggttttggtccactgttcagacgggtgggacagaactgctcaactcaccagcctcgccatgcttatgctggactcattctaccgctctattgaaggtttcgagatcctggtgcagaaagaatggatatccttcgggcacaaattcgcttctcggatcggacatggcgacaaaaatcataccgacgcagaccggtcccccatctttctgcagttcatcgattgcgtgtggcagatgtcaaaacaatttccgactgccttcgagttcaacgaacagttcttaattatcatactcgatcacctctactcatgtagatttggaacatttctattcaactgtgaatcagcccgcgagagacagaaggtgacagagcgcactgtgtcgctgtggtcgctgattaattcaaacaaggagaaatttaagaaccctttctataccaaagaaattaatcgtgtgttgtaccctgtcgccagcatgcgacatctggaactgtgggtcaattactatatcaggtggaaccctcgcatcaaacagcagcaaccaaacccagtggagcagcgatacatggaactactcgccctacgagatgagtacatcaaacgcctggaggagctacaactggctaattccgccaagctttccgacccccctacaagccccagttctcctagccaaatgatgccccacgtccagacacacttctag

SEQ ID NO: 324912 - DNA, 1812 bp, Artificial Sequence
  derived and/or modified sequence
atggccagcgcctcaacatcaaaatataattcccattccctggagaacgaatccatcaaaaggacgtccagggatggtgttaaccgggatctgacagaggctgtacctcgcttacccggagagacgcttattacagacaaagaagtgatttacatttgtccattcaatgggcctattaaaggcagagtgtatattaccaattatcgcttgtatcttcgctcactggaaaccgattcctccctgattctggacgtaccacttggagttatcagtcggattgagaagatggggggagccacctcacggggtgaaaacagctatggcctcgatataacatgcaaggacatgcgaaaccttcgcttcgcgctgaaacaagaagggcacagccgcagagacatgtttgaaatattaacccggtacgccttcccgctggcccattccctaccactgtttgcatttctgaacgaggagaagttcaacgttgatgggtggacagtgtacaatcccgtggaggagtacaggcgccaaggccttcctaatcaccactggaggattacatttatcaataagtgttatgagttgtgcgatacctacccggctctcttggttgtgccttatcgggcttccgatgacgatctgaggcgcgtcgccactttcaggtctagaaaccgcattcctgttctcagctggatacatcctgagaacaagactgtgatagtgcggtgcagtcaaccattagtgggaatgtcggggaagcggaacaaggacgatgagaaataccttgacgttataagggagactaataaacagatcagcaagctcaccatctatgacgcacggccttcagttaatgcggttgctaacaaggccacaggaggcggatacgaatctgacgatgcctatcacaatgccgagctgttcttcctggatattcataatatccacgtaatgcgcgaaagcctaaagaaggtcaaagacatcgtgtatcccaacgtggaagaaagtcattggttgtcgtccctggagtctacccactggctggagcacatcaagctcgtgctgaccggcgctattcaggttgctgataaagtttcctcaggcaaatcgagcgttctggtccattgctcagacggctgggaccgaaccgcccagctgacatctctggccatgttgatgctggattcattttaccgttctattgaaggctttgagattctggtccagaaagagtggatctcctttggccataagttcgcttcccgtataggtcacggtgacaaaaaccacaccgatgccgatcggtcccctatcttcttacagtttattgattgcgtctggcagatgtcaaaacagtttccaactgctttcgaatttaatgagcaattccttattattattctcgatcacctgtactcatgccggttcggcacctttctgtttaattgtgaatcagcacgtgaaaggcaaaaggttaccgagagaacagtgtccctctggtccctgatcaacagtaataaggaaaagttcaaaaacccattttacacaaaggaaataaatcgagttttgtaccctgttgcatccatgaggcacctggagttgtgggttaactactatatacgatggaaccccaggataaaacagcagcagccgaatccagtggagcagcggtacatggaactgttggcgctgcgggacgaatacattaaacgcctggaagagcttcagctcgctaacagcgctaaactgtccgacccaccaacttccccatcaagcccctcgcagatgatgcctcatgtgcagacacacttctag

SEQ ID NO: 324913 - DNA, 1701 bp, Artificial Sequence
  derived and/or modified sequence
atggcctcagcttccacttccaaatacaactcccactcactggagaacgaatcaattaaacgaacatcccgcgacggtgtgaacagggatctcaccgaggccgtgcccagactccccggagagacgctaataactgataaagaagtgatctatatttgtccattcaatgggccaataaaaggcagggtatatatcacgaactacagactgtatctgaggtctctggagacagacatgagaaatctacgctttgcactgaagcaggagggacactctaggcgtgacatgttcgaaatccttacccggtatgccttcccgctggcccatagtctgcctctgtttgcgtttctgaacgaagagaagtttaatgtggatggttggactgtttataatcccgtggaggagtaccggcgacaaggtctgcctaaccaccactggaggattacgttcattaacaagtgctacgagctgtgtgacacatatcctgccttactggtggtgccctacagggcctccgatgacgacctcagacgggtcgccacattccggtctagaaatcgtattccggtgttatcctggatacacccagaaaataaaactgtaattgtcaggtgtagtcagcccctggtgggaatgtcagggaaaagaaataaggacgacgagaagtatctggacgtcatcagggaaaccaataaacaaatttctaagttgaccatttacgacgcccgaccctctgtgaacgccgtggcgaataaagctacaggtggtggttatgagtctgatgatgcttatcacaatgccgagttgttcttcctggacatccacaacatccacgtgatgagagagtcactgaaaaaggtgaaggacatcgtctacccaaatgtggaagagagccactggctgagctcactggagtccactcattggctggagcatataaagttagtgttgacgggggcaatacaggtggctgataaagtgagttctggaaagagctcagtcctggttcactgtagcgatggatgggatcgcacagctcagttgaccagtctggctatgctgatgctggacagcttctaccgctcgatcgagggattcgaaatcctcgtccaaaaggaatggatcagctttggccacaaatttgccagccgcattggccatggggacaagaaccacactgatgctgacagaagtcccatctttctacagtttattgactgcgtgtggcaaatgtctaaacagttccccacagctttcgagttcaacgagcagttcctgattattatcctagatcacctgtattcttgcaggttcgggacatttctgtttaactgtgagtcagccagagagcgacagaaagttacagagagaacagtctctctgtggtcattaattaactcgaacaaggagaagttcaagaaccctttttacacaaaagaaattaaccgggttctctacccggttgcttcgatgagacacttagaactgtgggtaaattattatatccgctggaatcccagaatcaagcaacagcagccaaacccggtggagcagcgctatatggagctcctggccctccgggatgagtacatcaagcggctggaggagctacaactggctaattctgccaagttatctgatccccctacgagcccatctagccccagccaaatgatgccccatgtgcagacacacttctag

SEQ ID NO: 324914 - DNA, 1251 bp, Artificial Sequence
  derived and/or modified sequence
atgggcggagcgacctcgcgcggagaaaactcctacggactagacataacatgcaaagatatgcgcaacctaagattcgccctgaaacaggagggccacagtcggagagacatgtttgagatattaacccggtacgccttcccactggcccacagcctcccactttttgcttttctcaacgaggagaaatttaatgtggacggatggacagtgtataaccctgtggaggagtacagaagacagggactccctaaccaccactggcgcatcaccttcattaataagtgctacgaactctgcgacacctatcccgcacttctggtggtgccctacagagcatccgacgacgatctgcggagggttgcaacctttaggagcaggaataggatacccgttctcagttggattcatccggaaaacaaaaccgtgattgtgcgctgctcccaacccctggtcggtatgtccggaaagaggaacaaggacgatgagaaatatttggatgtgatcagggagacaaacaagcagatctcgaaactgactatttacgatgccaggcccagcgtgaatgctgtcgccaataaggcaactggcggtgggtacgagagtgatgacgcgtaccacaacgccgaactcttttttttggatatccataacatccacgtcatgcgggagtcgcttaagaaagtgaaggacattgtatatcctaacgtcgaggagtctcattggctgagttcactggagtctactcactggctggagcatataaaattggtcttgacaggcgctatccaagttgccgacaaggtgtcctccggcaagagttctgtcctggtgcactgctcagatggttgggatagaacagcccagctgactagtttagccatgctgatgctggactcgttttatcgcagcattgaagggttcgagatcctggtgcaaaaggagtggatctcttttggccataagttcgcatctagaattggacacggtgataagaaccacacagatgccgatcgaagccccatcttcttgcagtttattgattgtgtttggcaaatgagcaagcagtttccaacagcttttgaattcaatgaacagttcttgatcatcatcctggatcatctctatagttgccggtttgggacgtttctgtttaactgcgaatccgctagggaacggcaggcactgcacttccttagcctctcgctttgtcgacggttacagaaaggactcttcctctacgggcactag

SEQ ID NO: 324915 - DNA, 1467 bp, Artificial Sequence
  derived and/or modified sequence
atgcgcaacttgcgattcgcgctaaagcaggaagggcactcacgcagggacatgtttgagatcctaacacgctacgcctttccgctggcccacagccttccccttttcgctttcttgaacgaagagaaatttaatgtggacggctggactgtttacaaccctgtcgaggagtaccggcgtcaggggttgccaaatcaccactggcgtattaccttcataaacaagtgctatgagctgtgtgacacctacccggctctgttggttgtcccctatcgcgcttccgatgatgacctccggcgagtggcaaccttcagatccaggaaccggatccctgtcctgtcttggatccacccagagaataagacagtgatcgtgaggtgctctcaacccctggttggcatgagtggaaagcgcaacaaggatgacgaaaagtacttggatgtgatacgggaaactaacaagcagataagtaagttgaccatctatgatgccagaccctctgtaaatgcagtggctaacaaggcaacaggaggcggttacgaatccgacgacgcttaccataacgccgaactgttcttcctggatatacacaatattcacgtcatgagggaaagcctgaagaaggtaaaggacattgtttatcctaacgtggaggaaagccactggctctcttctcttgagagcacacattggttggaacatataaagctagttttgacaggagccattcaggtggcggacaaggtgtcgtccggcaagtcctctgtgctcgtgcactgcagtgacggctgggatagaaccgcccagctgacctcacttgccatgctgatgttagacagcttctaccgctctatagaaggtttcgagatcctcgttcagaaagagtggatctccttcggccacaagttcgcctcacgaatcggacatggggacaaaaatcacacagatgccgatcggtcacccattttcctccagttcattgactgcgtttggcagatgtccaagcagttccccactgcctttgaattcaatgaacagttcttaataatcatactcgaccacctgtatagctgtcggttcgggaccttcttgtttaactgcgagagtgcacgcgaacgccagaaagtcaccgagcgaacggtgtcgctttggtcccttatcaatagcaacaaagagaaatttaagaaccccttttacacgaaggaaattaatcgagtgctttacccggtcgccagcatgagacacctggaactgtgggtcaattattacatccgctggaatccaagaattaagcaacagcagccaaacccagtggaacagcggtacatggagctactcgccctacgggacgaatacataaaaaggctcgaggagcttcagctggccaacagtgctaagctcagcgacccaccgactagtccctccagtccgtctcaaatgatgccccatgtgcagacccacttctag

SEQ ID NO: 324916 - DNA, 1809 bp, Artificial Sequence
  derived and/or modified sequence
atggccagcgccagcaccagcaagtacaacagccacagcctggagaacgagagcatcaagcgcaccagccgcgacggcgtgaaccgcgacctgaccgaggccgtgccccgcctgcccggcgagaccctgatcaccgacaaggaggtgatctacatctgccccttcaacggccccatcaagggccgcgtgtacatcaccaactaccgcctgtacctgcgcagcctggagaccgacagcagcctgatcctggacgtgcccctgggcgtgatcagccgcatcgagaagatgggcggcgccaccagccgcggcgagaacagctacggcctggacatcacctgcaaggacatgcgcaacctgcgcttcgccctgaagcaggagggccacagccgccgcgacatgttcgagatcctgacccgctacgccttccccctggcccacagcctgcccctgttcgccttcctgaacgaggagaagttcaacgtggacggctggaccgtgtacaaccccgtggaggagtaccgccgccagggcctgcccaaccaccactggcgcatcaccttcatcaacaagtgctacgagctgtgcgacacctaccccgccctgctggtggtgccctaccgcgccagcgacgacgacctgcgccgcgtggccaccttccgcagccgcaaccgcatccccgtgctgagctggatccaccccgagaacaagaccgtgatcgtgcgctgcagccagcccctggtgggcatgagcggcaagcgcaacaaggacgacgagaagtacctggacgtgatccgcgagaccaacaagcagatcagcaagctgaccatctacgacgcccgccccagcgtgaacgccgtggccaacaaggccaccggcggcggctacgagagcgacgacgcctaccacaacgccgagctgttcttcctggacatccacaacatccacgtgatgcgcgagagcctgaagaaggtgaaggacatcgtgtaccccaacgtggaggagagccactggctgagcagcctggagagcacccactggctggagcacatcaagctggtgctgaccggcgccatccaggtggccgacaaggtgagcagcggcaagagcagcgtgctggtgcactgcagcgacggctgggaccgcaccgcccagctgaccagcctggccatgctgatgctggacagcttctaccgcagcatcgagggcttcgagatcctggtgcagaaggagtggatcagcttcggccacaagttcgccagccgcatcggccacggcgacaagaaccacaccgacgccgaccgcagccccatcttcctgcagttcatcgactgcgtgtggcagatgagcaagcagttccccaccgccttcgagttcaacgagcagttcctgatcatcatcctggaccacctgtacagctgccgcttcggcaccttcctgttcaactgcgagagcgcccgcgagcgccagaaggtgaccgagcgcaccgtgagcctgtggagcctgatcaacagcaacaaggagaagttcaagaaccccttctacaccaaggagatcaaccgcgtgctgtaccccgtggccagcatgcgccacctggagctgtgggtgaactactacatccgctggaacccccgcatcaagcagcagcagcccaaccccgtggagcagcgctacatggagctgctggccctgcgcgacgagtacatcaagcgcctggaggagctgcagctggccaacagcgccaagctgagcgacccccccaccagccccagcagccccagccagatgatgccccacgtgcagacccacttc

SEQ ID NO: 324917 - DNA, 1698 bp, Artificial Sequence
  derived and/or modified sequence
atggccagcgccagcaccagcaagtacaacagccacagcctggagaacgagagcatcaagcgcaccagccgcgacggcgtgaaccgcgacctgaccgaggccgtgccccgcctgcccggcgagaccctgatcaccgacaaggaggtgatctacatctgccccttcaacggccccatcaagggccgcgtgtacatcaccaactaccgcctgtacctgcgcagcctggagaccgacatgcgcaacctgcgcttcgccctgaagcaggagggccacagccgccgcgacatgttcgagatcctgacccgctacgccttccccctggcccacagcctgcccctgttcgccttcctgaacgaggagaagttcaacgtggacggctggaccgtgtacaaccccgtggaggagtaccgccgccagggcctgcccaaccaccactggcgcatcaccttcatcaacaagtgctacgagctgtgcgacacctaccccgccctgctggtggtgccctaccgcgccagcgacgacgacctgcgccgcgtggccaccttccgcagccgcaaccgcatccccgtgctgagctggatccaccccgagaacaagaccgtgatcgtgcgctgcagccagcccctggtgggcatgagcggcaagcgcaacaaggacgacgagaagtacctggacgtgatccgcgagaccaacaagcagatcagcaagctgaccatctacgacgcccgccccagcgtgaacgccgtggccaacaaggccaccggcggcggctacgagagcgacgacgcctaccacaacgccgagctgttcttcctggacatccacaacatccacgtgatgcgcgagagcctgaagaaggtgaaggacatcgtgtaccccaacgtggaggagagccactggctgagcagcctggagagcacccactggctggagcacatcaagctggtgctgaccggcgccatccaggtggccgacaaggtgagcagcggcaagagcagcgtgctggtgcactgcagcgacggctgggaccgcaccgcccagctgaccagcctggccatgctgatgctggacagcttctaccgcagcatcgagggcttcgagatcctggtgcagaaggagtggatcagcttcggccacaagttcgccagccgcatcggccacggcgacaagaaccacaccgacgccgaccgcagccccatcttcctgcagttcatcgactgcgtgtggcagatgagcaagcagttccccaccgccttcgagttcaacgagcagttcctgatcatcatcctggaccacctgtacagctgccgcttcggcaccttcctgttcaactgcgagagcgcccgcgagcgccagaaggtgaccgagcgcaccgtgagcctgtggagcctgatcaacagcaacaaggagaagttcaagaaccccttctacaccaaggagatcaaccgcgtgctgtaccccgtggccagcatgcgccacctggagctgtgggtgaactactacatccgctggaacccccgcatcaagcagcagcagcccaaccccgtggagcagcgctacatggagctgctggccctgcgcgacgagtacatcaagcgcctggaggagctgcagctggccaacagcgccaagctgagcgacccccccaccagccccagcagccccagccagatgatgccccacgtgcagacccacttc

SEQ ID NO: 324918 - DNA, 1248 bp, Artificial Sequence
  derived and/or modified sequence
atgggcggcgccaccagccgcggcgagaacagctacggcctggacatcacctgcaaggacatgcgcaacctgcgcttcgccctgaagcaggagggccacagccgccgcgacatgttcgagatcctgacccgctacgccttccccctggcccacagcctgcccctgttcgccttcctgaacgaggagaagttcaacgtggacggctggaccgtgtacaaccccgtggaggagtaccgccgccagggcctgcccaaccaccactggcgcatcaccttcatcaacaagtgctacgagctgtgcgacacctaccccgccctgctggtggtgccctaccgcgccagcgacgacgacctgcgccgcgtggccaccttccgcagccgcaaccgcatccccgtgctgagctggatccaccccgagaacaagaccgtgatcgtgcgctgcagccagcccctggtgggcatgagcggcaagcgcaacaaggacgacgagaagtacctggacgtgatccgcgagaccaacaagcagatcagcaagctgaccatctacgacgcccgccccagcgtgaacgccgtggccaacaaggccaccggcggcggctacgagagcgacgacgcctaccacaacgccgagctgttcttcctggacatccacaacatccacgtgatgcgcgagagcctgaagaaggtgaaggacatcgtgtaccccaacgtggaggagagccactggctgagcagcctggagagcacccactggctggagcacatcaagctggtgctgaccggcgccatccaggtggccgacaaggtgagcagcggcaagagcagcgtgctggtgcactgcagcgacggctgggaccgcaccgcccagctgaccagcctggccatgctgatgctggacagcttctaccgcagcatcgagggcttcgagatcctggtgcagaaggagtggatcagcttcggccacaagttcgccagccgcatcggccacggcgacaagaaccacaccgacgccgaccgcagccccatcttcctgcagttcatcgactgcgtgtggcagatgagcaagcagttccccaccgccttcgagttcaacgagcagttcctgatcatcatcctggaccacctgtacagctgccgcttcggcaccttcctgttcaactgcgagagcgcccgcgagcgccaggccctgcacttcctgagcctgagcctgtgccgccgcctgcagaagggcctgttcctgtacggccac

SEQ ID NO: 324919 - DNA, 1464 bp, Artificial Sequence
  derived and/or modified sequence
atgcgcaacctgcgcttcgccctgaagcaggagggccacagccgccgcgacatgttcgagatcctgacccgctacgccttccccctggcccacagcctgcccctgttcgccttcctgaacgaggagaagttcaacgtggacggctggaccgtgtacaaccccgtggaggagtaccgccgccagggcctgcccaaccaccactggcgcatcaccttcatcaacaagtgctacgagctgtgcgacacctaccccgccctgctggtggtgccctaccgcgccagcgacgacgacctgcgccgcgtggccaccttccgcagccgcaaccgcatccccgtgctgagctggatccaccccgagaacaagaccgtgatcgtgcgctgcagccagcccctggtgggcatgagcggcaagcgcaacaaggacgacgagaagtacctggacgtgatccgcgagaccaacaagcagatcagcaagctgaccatctacgacgcccgccccagcgtgaacgccgtggccaacaaggccaccggcggcggctacgagagcgacgacgcctaccacaacgccgagctgttcttcctggacatccacaacatccacgtgatgcgcgagagcctgaagaaggtgaaggacatcgtgtaccccaacgtggaggagagccactggctgagcagcctggagagcacccactggctggagcacatcaagctggtgctgaccggcgccatccaggtggccgacaaggtgagcagcggcaagagcagcgtgctggtgcactgcagcgacggctgggaccgcaccgcccagctgaccagcctggccatgctgatgctggacagcttctaccgcagcatcgagggcttcgagatcctggtgcagaaggagtggatcagcttcggccacaagttcgccagccgcatcggccacggcgacaagaaccacaccgacgccgaccgcagccccatcttcctgcagttcatcgactgcgtgtggcagatgagcaagcagttccccaccgccttcgagttcaacgagcagttcctgatcatcatcctggaccacctgtacagctgccgcttcggcaccttcctgttcaactgcgagagcgcccgcgagcgccagaaggtgaccgagcgcaccgtgagcctgtggagcctgatcaacagcaacaaggagaagttcaagaaccccttctacaccaaggagatcaaccgcgtgctgtaccccgtggccagcatgcgccacctggagctgtgggtgaactactacatccgctggaacccccgcatcaagcagcagcagcccaaccccgtggagcagcgctacatggagctgctggccctgcgcgacgagtacatcaagcgcctggaggagctgcagctggccaacagcgccaagctgagcgacccccccaccagccccagcagccccagccagatgatgccccacgtgcagacccacttc

SEQ ID NO: 324920 - DNA, 1812 bp, Artificial Sequence
  derived and/or modified sequence
atggccagcgccagcaccagcaagtacaacagccacagcctggagaacgagagcatcaagagaaccagcagagacggcgtgaacagagacctgaccgaggccgtgcccagactgcccggcgagaccctgatcaccgacaaggaggtgatctacatctgccccttcaacggccccatcaagggcagagtgtacatcaccaactacagactgtacctgagaagcctggagaccgacagcagcctgatcctggacgtgcccctgggcgtgatcagcagaatcgagaagatgggcggcgccaccagcagaggcgagaacagctacggcctggacatcacctgcaaggacatgagaaacctgagattcgccctgaagcaggagggccacagcagaagagacatgttcgagatcctgaccagatacgccttccccctggcccacagcctgcccctgttcgccttcctgaacgaggagaagttcaacgtggacggctggaccgtgtacaaccccgtggaggagtacagaagacagggcctgcccaaccaccactggagaatcaccttcatcaacaagtgctacgagctgtgcgacacctaccccgccctgctggtggtgccctacagagccagcgacgacgacctgagaagagtggccaccttcagaagcagaaacagaatccccgtgctgagctggatccaccccgagaacaagaccgtgatcgtgagatgcagccagcccctggtgggcatgagcggcaagagaaacaaggacgacgagaagtacctggacgtgatcagagagaccaacaagcagatcagcaagctgaccatctacgacgccagacccagcgtgaacgccgtggccaacaaggccaccggcggcggctacgagagcgacgacgcctaccacaacgccgagctgttcttcctggacatccacaacatccacgtgatgagagagagcctgaagaaggtgaaggacatcgtgtaccccaacgtggaggagagccactggctgagcagcctggagagcacccactggctggagcacatcaagctggtgctgaccggcgccatccaggtggccgacaaggtgagcagcggcaagagcagcgtgctggtgcactgcagcgacggctgggacagaaccgcccagctgaccagcctggccatgctgatgctggacagcttctacagaagcatcgagggcttcgagatcctggtgcagaaggagtggatcagcttcggccacaagttcgccagcagaatcggccacggcgacaagaaccacaccgacgccgacagaagccccatcttcctgcagttcatcgactgcgtgtggcagatgagcaagcagttccccaccgccttcgagttcaacgagcagttcctgatcatcatcctggaccacctgtacagctgcagattcggcaccttcctgttcaactgcgagagcgccagagagagacagaaggtgaccgagagaaccgtgagcctgtggagcctgatcaacagcaacaaggagaagttcaagaaccccttctacaccaaggagatcaacagagtgctgtaccccgtggccagcatgagacacctggagctgtgggtgaactactacatcagatggaaccccagaatcaagcagcagcagcccaaccccgtggagcagagatacatggagctgctggccctgagagacgagtacatcaagagactggaggagctgcagctggccaacagcgccaagctgagcgacccccccaccagccccagcagccccagccagatgatgccccacgtgcagacccacttctag

SEQ ID NO: 324921 - DNA, 1701 bp, Artificial Sequence
  derived and/or modified sequence
atggccagcgccagcaccagcaagtacaacagccacagcctggagaacgagagcatcaagagaaccagcagagacggcgtgaacagagacctgaccgaggccgtgcccagactgcccggcgagaccctgatcaccgacaaggaggtgatctacatctgccccttcaacggccccatcaagggcagagtgtacatcaccaactacagactgtacctgagaagcctggagaccgacatgagaaacctgagattcgccctgaagcaggagggccacagcagaagagacatgttcgagatcctgaccagatacgccttccccctggcccacagcctgcccctgttcgccttcctgaacgaggagaagttcaacgtggacggctggaccgtgtacaaccccgtggaggagtacagaagacagggcctgcccaaccaccactggagaatcaccttcatcaacaagtgctacgagctgtgcgacacctaccccgccctgctggtggtgccctacagagccagcgacgacgacctgagaagagtggccaccttcagaagcagaaacagaatccccgtgctgagctggatccaccccgagaacaagaccgtgatcgtgagatgcagccagcccctggtgggcatgagcggcaagagaaacaaggacgacgagaagtacctggacgtgatcagagagaccaacaagcagatcagcaagctgaccatctacgacgccagacccagcgtgaacgccgtggccaacaaggccaccggcggcggctacgagagcgacgacgcctaccacaacgccgagctgttcttcctggacatccacaacatccacgtgatgagagagagcctgaagaaggtgaaggacatcgtgtaccccaacgtggaggagagccactggctgagcagcctggagagcacccactggctggagcacatcaagctggtgctgaccggcgccatccaggtggccgacaaggtgagcagcggcaagagcagcgtgctggtgcactgcagcgacggctgggacagaaccgcccagctgaccagcctggccatgctgatgctggacagcttctacagaagcatcgagggcttcgagatcctggtgcagaaggagtggatcagcttcggccacaagttcgccagcagaatcggccacggcgacaagaaccacaccgacgccgacagaagccccatcttcctgcagttcatcgactgcgtgtggcagatgagcaagcagttccccaccgccttcgagttcaacgagcagttcctgatcatcatcctggaccacctgtacagctgcagattcggcaccttcctgttcaactgcgagagcgccagagagagacagaaggtgaccgagagaaccgtgagcctgtggagcctgatcaacagcaacaaggagaagttcaagaaccccttctacaccaaggagatcaacagagtgctgtaccccgtggccagcatgagacacctggagctgtgggtgaactactacatcagatggaaccccagaatcaagcagcagcagcccaaccccgtggagcagagatacatggagctgctggccctgagagacgagtacatcaagagactggaggagctgcagctggccaacagcgccaagctgagcgacccccccaccagccccagcagccccagccagatgatgccccacgtgcagacccacttctag

SEQ ID NO: 324922 - DNA, 1251 bp, Artificial Sequence
  derived and/or modified sequence
atgggcggcgccaccagcagaggcgagaacagctacggcctggacatcacctgcaaggacatgagaaacctgagattcgccctgaagcaggagggccacagcagaagagacatgttcgagatcctgaccagatacgccttccccctggcccacagcctgcccctgttcgccttcctgaacgaggagaagttcaacgtggacggctggaccgtgtacaaccccgtggaggagtacagaagacagggcctgcccaaccaccactggagaatcaccttcatcaacaagtgctacgagctgtgcgacacctaccccgccctgctggtggtgccctacagagccagcgacgacgacctgagaagagtggccaccttcagaagcagaaacagaatccccgtgctgagctggatccaccccgagaacaagaccgtgatcgtgagatgcagccagcccctggtgggcatgagcggcaagagaaacaaggacgacgagaagtacctggacgtgatcagagagaccaacaagcagatcagcaagctgaccatctacgacgccagacccagcgtgaacgccgtggccaacaaggccaccggcggcggctacgagagcgacgacgcctaccacaacgccgagctgttcttcctggacatccacaacatccacgtgatgagagagagcctgaagaaggtgaaggacatcgtgtaccccaacgtggaggagagccactggctgagcagcctggagagcacccactggctggagcacatcaagctggtgctgaccggcgccatccaggtggccgacaaggtgagcagcggcaagagcagcgtgctggtgcactgcagcgacggctgggacagaaccgcccagctgaccagcctggccatgctgatgctggacagcttctacagaagcatcgagggcttcgagatcctggtgcagaaggagtggatcagcttcggccacaagttcgccagcagaatcggccacggcgacaagaaccacaccgacgccgacagaagccccatcttcctgcagttcatcgactgcgtgtggcagatgagcaagcagttccccaccgccttcgagttcaacgagcagttcctgatcatcatcctggaccacctgtacagctgcagattcggcaccttcctgttcaactgcgagagcgccagagagagacaggccctgcacttcctgagcctgagcctgtgcagaagactgcagaagggcctgttcctgtacggccactag

SEQ ID NO: 324923 - DNA, 1467 bp, Artificial Sequence
  derived and/or modified sequence
atgagaaacctgagattcgccctgaagcaggagggccacagcagaagagacatgttcgagatcctgaccagatacgccttccccctggcccacagcctgcccctgttcgccttcctgaacgaggagaagttcaacgtggacggctggaccgtgtacaaccccgtggaggagtacagaagacagggcctgcccaaccaccactggagaatcaccttcatcaacaagtgctacgagctgtgcgacacctaccccgccctgctggtggtgccctacagagccagcgacgacgacctgagaagagtggccaccttcagaagcagaaacagaatccccgtgctgagctggatccaccccgagaacaagaccgtgatcgtgagatgcagccagcccctggtgggcatgagcggcaagagaaacaaggacgacgagaagtacctggacgtgatcagagagaccaacaagcagatcagcaagctgaccatctacgacgccagacccagcgtgaacgccgtggccaacaaggccaccggcggcggctacgagagcgacgacgcctaccacaacgccgagctgttcttcctggacatccacaacatccacgtgatgagagagagcctgaagaaggtgaaggacatcgtgtaccccaacgtggaggagagccactggctgagcagcctggagagcacccactggctggagcacatcaagctggtgctgaccggcgccatccaggtggccgacaaggtgagcagcggcaagagcagcgtgctggtgcactgcagcgacggctgggacagaaccgcccagctgaccagcctggccatgctgatgctggacagcttctacagaagcatcgagggcttcgagatcctggtgcagaaggagtggatcagcttcggccacaagttcgccagcagaatcggccacggcgacaagaaccacaccgacgccgacagaagccccatcttcctgcagttcatcgactgcgtgtggcagatgagcaagcagttccccaccgccttcgagttcaacgagcagttcctgatcatcatcctggaccacctgtacagctgcagattcggcaccttcctgttcaactgcgagagcgccagagagagacagaaggtgaccgagagaaccgtgagcctgtggagcctgatcaacagcaacaaggagaagttcaagaaccccttctacaccaaggagatcaacagagtgctgtaccccgtggccagcatgagacacctggagctgtgggtgaactactacatcagatggaaccccagaatcaagcagcagcagcccaaccccgtggagcagagatacatggagctgctggccctgagagacgagtacatcaagagactggaggagctgcagctggccaacagcgccaagctgagcgacccccccaccagccccagcagccccagccagatgatgccccacgtgcagacccacttctag

SEQ ID NO: 324924 - DNA, 291 bp, Artificial Sequence
  derived and/or modified sequence
atgtcagagtcaagcagtaaaagcagtcagccactcgcaagtaaacaggagaaagatggaacagaaaagcggggccgtgggcggcctcgcaaacagcctcctaaggagccaagtgaggtgcccacgccaaaacgacctcggggtcgacccaagggctcaaaaaacaagggcgcggccaagacccgcaagacaacaacgacccccggccgaaagccccgcggccgcccaaagaaactcgagaaggaggaagaggagggcatctcccaggagtcttctgaagaggaacagtag

SEQ ID NO: 324925 - DNA, 423 bp, Artificial Sequence
  derived and/or modified sequence
atggccagctacccctaccggcagggctgccctggagctgctggccaggcccctggggcccctcctggcagctactacccaggcccccccaacagcggcggccagtatggcagcggcctgcccccaggcggcggctacggcggccctgcccctgggggcccctacggccccccagctgggggcggcccctacggccaccccaaccctggcatgttccccagcggcaccccaggcggcccctatggaggagctgcccctgggggcccctacggccagcccccacccagcagctatggagcccagcagcccggcctgtatggccagggcatccacgccgagggcgccgcccctgtgtgggacatgctgagcctgtggcagcgggagggcgctggggagctggccaggatgcacaatgccagctag

SEQ ID NO: 324926 - protein, 373 aa, Artificial Sequence
  derived and/or modified sequence
MEPAVSEPMRDQVARTHLTEDTPKVNADIEKVNQNQAKRCTVIGGSGFLGQHMVEQLLARGYAVNVFDIQQGFDNPQVRFFLGDLCSRQDLYPALKGVNTVFHCASPPPSSNNKELFYRVNYIGTKNVIETCKEAGVQKLILTSSASVIFEGVDIKNGTEDLPYAMKPIDYYTETKILQERAVLGANDPEKNFLTTAIRPHGIFGPRDPQLVPILIEAARNGKMKFVIGNGKNLVDFTFVENVVHGHILAAEQLSRDSTLGGKAFHITNDEPIPFWTFLSRILTGLNYEAPKYHIPYWVAYYLALLLSLLVMVISPVIQLQPTFTPMRVALAGTFHYYSCERAKKAMGYQPLVTMDDAMERTVQSFRHLRRVK

SEQ ID NO: 324927 - protein, 254 aa, Artificial Sequence
  derived and/or modified sequence
MEPAVSEPMRDQVARTHLTEDTPKVNADIEKVNQNQAKRCTVIGGSGFLGQHMVEQLLARGYAVNVFDIQQGFDNPQVRFFLGDLCSRQDLYPALKGVNTVFHCASPPPSSNNKELFYRVNYIGTKNVIETCKEAGVQKLILTSSASVIFEGVDIKNGTEDLPYAMKPIDYYTETKILQERAVLGANDPEKNFLTTAIRPHGIFGPRDPQLVPILIEAARNGKMKFVIGNGKNLVDFTFVENVVHGHILAAEQL

SEQ ID NO: 324928 - DNA, 1122 bp, Artificial Sequence
  derived and/or modified sequence
atggagcccgccgtgagcgagcccatgagagaccaggtggccagaacccacctgaccgaggacacccccaaggtgaacgccgacatcgagaaggtgaaccagaaccaggccaagagatgcaccgtgatcggcggcagcggcttcctgggccagcacatggtggagcagctgctggccagaggctacgccgtgaacgtgttcgacatccagcagggcttcgacaacccccaggtgagattcttcctgggcgacctgtgcagcagacaggacctgtaccccgccctgaagggcgtgaacaccgtgttccactgcgccagccccccccccagcagcaacaacaaggagctgttctacagagtgaactacatcggcaccaagaacgtgatcgagacctgcaaggaggccggcgtgcagaagctgatcctgaccagcagcgccagcgtgatcttcgagggcgtggacatcaagaacggcaccgaggacctgccctacgccatgaagcccatcgactactacaccgagaccaagatcctgcaggagagagccgtgctgggcgccaacgaccccgagaagaacttcctgaccaccgccatcagaccccacggcatcttcggccccagagacccccagctggtgcccatcctgatcgaggccgccagaaacggcaagatgaagttcgtgatcggcaacggcaagaacctggtggacttcaccttcgtggagaacgtggtgcacggccacatcctggccgccgagcagctgagcagagacagcaccctgggcggcaaggccttccacatcaccaacgacgagcccatccccttctggaccttcctgagcagaatcctgaccggcctgaactacgaggcccccaagtaccacatcccctactgggtggcctactacctggccctgctgctgagcctgctggtgatggtgatcagccccgtgatccagctgcagcccaccttcacccccatgagagtggccctggccggcaccttccactactacagctgcgagagagccaagaaggccatgggctaccagcccctggtgaccatggacgacgccatggagagaaccgtgcagagcttcagacacctgagaagagtgaagtag

SEQ ID NO: 324929 - DNA, 1122 bp, Artificial Sequence
  derived and/or modified sequence
atggagcctgctgtttccgagcccatgcgagatcaggtcgcccgaactcacctgactgaggatacaccgaaagtgaacgcagacatcgaaaaagtgaaccagaatcaggcaaagcgctgcaccgtcatcgggggctctggtttcttaggacagcacatggtggaacaactccttgcccgcggatacgcagtgaacgtttttgatatccagcagggtttcgacaacccacaggtcaggttttttctgggggatctgtgtagtcggcaggatttgtacccagctttaaaaggagtcaacacagtgttccattgcgcttcgcctcctccgagctccaacaacaaagaactgttttaccgcgtgaattatataggaacaaagaatgtaattgaaacctgtaaggaggccggcgtgcagaaactgatcttaacctcgtcagcatctgttatcttcgaaggcgtggacataaaaaatggcacagaggacctgccctatgcaatgaaaccaatcgattattacaccgaaacaaagatccttcaggagagggctgtcctaggcgcaaacgatcccgaaaagaactttctgaccactgccatcaggccccatgggatcttcggcccaagggaccctcagttagtccctattctcatcgaagcagccaggaatggcaagatgaagtttgtcatagggaatggcaaaaatctggtcgacttcaccttcgtcgaaaacgttgtccatggtcacatactggccgcagagcagctaagccgcgatagtaccctggggggcaaagcattccacatcacaaatgatgagcccatccctttctggactttccttagtcgcatccttactggtctaaattatgaagcccctaagtatcacatcccatattgggtggcctactatttggcgctgctgctgagcttattggtaatggtgatcagtccagtcatccaattgcaaccgacctttacaccaatgcgcgtggcactggcaggaaccttccactactacagctgcgagagagcaaaaaaggccatgggataccagcccctcgtcactatggatgacgcgatggagagaactgtccaatccttccggcacctcaggagggtcaagtag

SEQ ID NO: 324930 - DNA, 1122 bp, Artificial Sequence
  derived and/or modified sequence
atggagccggctgtatccgagcctatgagggatcaggtcgcccgcacccacttaacggaggatacacctaaggtgaatgctgatatcgagaaagtgaaccagaaccaggcaaaaaggtgcaccgtgatcggagggagtggttttctgggacagcacatggtggagcagctactcgctaggggatacgcggtcaacgttttcgacattcaacagggctttgataatccacaggtgcgctttttcctgggggacctgtgctcacgacaggacctataccccgcgctcaaaggtgtgaacacagtgtttcactgcgcctcccctccccctagcagcaacaacaaggagctgttctaccgcgtgaactacataggcaccaagaatgtcatcgagacctgtaaggaggccggggtgcagaaactgatacttacttcttctgccagcgtgatcttcgaaggagttgacattaaaaacggcacagaagatctcccatacgcgatgaagcccatcgactattacaccgagaccaaaattctgcaagagagagcagtgctgggcgctaatgaccctgaaaaaaattttcttacaaccgcaataaggccacatgggattttcggcccaagagatccccagcttgtgccaatccttatagaggccgctcggaatggaaagatgaagttcgtgattgggaacggcaaaaacttggtggacttcaccttcgtggagaacgttgtccacggccacattcttgcggctgaacagcttagcagagactcaaccctgggcgggaaagctttccacatcaccaacgatgagccaattccattctggacttttctgagtcggatccttactgggttgaattacgaggcccctaagtaccacattccatattgggtagcatattatctggccttgctgctgtctctgctggtgatggttatctctcctgtgatccaacttcaaccaaccttcacgcccatgagggtagccctggccggtacgttccactattatagctgcgagagagctaaaaaggctatggggtaccaacccctggtcacaatggacgacgccatggaacggacagttcagtcatttcgtcatctcagacgagtaaagtag

SEQ ID NO: 324931 - DNA, 1122 bp, Artificial Sequence
  derived and/or modified sequence
atggagcctgctgtgtctgagcccatgagggaccaggtggcccggacccacctgacagaggacacccccaaggtgaatgctgacatcgagaaggtgaaccagaaccaggccaagcgctgcaccgtgattggaggcagcggcttcctgggccagcacatggtggagcagctgctggcccggggctatgctgtgaatgtgtttgacatccagcagggctttgacaacccccaggtgcgcttcttcctgggggacctgtgcagccggcaggacctgtacccagccctgaagggcgtgaacacagtgttccactgtgccagccccccacccagcagcaacaacaaggagctgttctacagagtgaactacatcggcaccaagaatgtgattgagacctgcaaggaggccggcgtgcagaagctgatcctgaccagcagcgccagcgtcatctttgagggcgtggacatcaagaatggaacagaggacctgccctatgccatgaagcccatcgactactacacagagaccaagatcctgcaggagagagctgtgctgggcgccaatgaccctgagaagaacttcctgaccacagccatccggccccacggcatcttcggcccccgggacccccagctggtgcccatcctgattgaggccgccagaaatggcaagatgaagtttgtgattggaaatggcaagaacctggtggacttcacctttgtggagaatgtggtgcacggccacatcctggccgctgagcagctgagccgggacagcaccctgggcggcaaggccttccacatcaccaatgatgagcccatccccttctggaccttcctgagccgcatcctgaccggcctgaactatgaggcccccaagtaccacatcccctactgggtggcctactacctggccctgctgctgagcctgctggtgatggtgatcagccctgtgatccagctgcagcccaccttcacccccatgagggtggccctggccggcaccttccactactacagctgtgagcgggccaagaaggccatgggctaccagcccctggtgaccatggatgatgccatggagaggacagtgcagagcttccgccacctgcggcgggtgaagtag

SEQ ID NO: 324932 - DNA, 1122 bp, Artificial Sequence
  derived and/or modified sequence
atggagcccgccgtgagcgagcccatgcgggaccaggtggcccggacccaccttaccgaagatacaccaaaagtgaatgccgatatcgagaaggttaatcagaatcaggctaaacgatgtacggttatcggtggctcaggcttcctcggccagcatatggttgagcagcttctcgctcgcggctacgccgtgaatgtgtttgacatccagcagggattcgacaacccccaagtgagatttttcctgggcgatttgtgcagccggcaagacttatatcctgctcttaaaggcgtcaataccgtcttccactgtgctagccctccaccctcgagcaataacaaagaattattctacagagtgaactacatcgggacaaagaatgtcatcgagacctgcaaagaagccggcgtccagaaacttatactgacttcttctgccagcgtcatttttgaaggggtagacatcaaaaatggaaccgaagacttgccttatgccatgaagccaattgattattataccgagaccaaaattctgcaggagcgggcagtgctgggtgcaaacgatcctgagaagaacttcctgacaactgcaatccgcccacatgggatctttgggcccagggacccccaattggtccccattttaattgaagccgcgcggaacgggaagatgaaattcgtcattggtaatggcaaaaacctagtggattttacatttgtcgagaacgtcgtccacgggcacatccttgccgccgaacaactcagccgggatagtacattggggggaaaagcgttccatataaccaatgacgaacccatcccattttggacgtttctttcgcggatcctgactgggctgaactatgaggccccaaagtatcatataccatattgggtggcctattacttagcccttctgttgagcctcctggtaatggtcatttctccagtgatccaattgcagcccaccttcacaccaatgcgcgtggcactggcggggacatttcattactattcttgcgaacgcgcaaagaaggccatgggctaccagccacttgtgacaatggacgacgctatggagcggacagtgcagtcgtttcgacacttacgtagggtgaaatag

SEQ ID NO: 324933 - DNA, 1122 bp, Artificial Sequence
  derived and/or modified sequence
atggagcccgccgtgagcgagcccatgcgggaccaggtggcccggacccacctcacagaggacacgccaaaagtaaacgcagatatagagaaggtgaatcagaaccaggctaaaagatgtaccgtgatcggtgggtccggctttctgggccagcatatggtggagcaactattagctagggggtatgccgtgaatgtgtttgatatccagcaaggtttcgataacccacaggtgcgattcttcctaggagatctatgcagccgtcaggacctctatcctgccctgaaaggggtaaataccgtattccattgtgccagccccccccctagtagcaataacaaggagctgttctaccgcgttaattatattggaactaagaatgtgattgagacctgtaaagaagctggggtgcagaagctcatattgacttcctctgctagcgttatcttcgaaggcgtagatatcaagaacggaacagaagatctgccatatgcaatgaaaccgatcgattattacactgagactaagatccttcaagagagagcagtattgggtgccaatgaccccgaaaaaaactttctgactacagctatacgcccccatggaatatttgggcctagggatccacagctggtgcctatcttgattgaggccgctcgaaacgggaagatgaagttcgtcattggaaacggcaagaacctggttgatttcactttcgtggagaatgtcgtccatggccatattctcgcagccgagcagctttctcgggacagtaccctcggtgggaaggccttccatatcactaacgatgagcctatacctttttggacgtttcttagccggatcctgaccggcttaaactacgaggccccaaaataccatattccttactgggtagcttactaccttgctctgctgctgtctctccttgtgatggtgatctcaccagtgatccaattgcaacctacattcacacccatgagagtggccttggcaggcacattccactactacagttgcgagcgtgccaagaaggccatgggttaccagcctctagtgacaatggatgatgctatggagaggaccgtacagagcttcaggcatcttcgcagggtgaagtag

SEQ ID NO: 324934 - DNA, 1630 bp, Artificial Sequence
  derived and/or modified sequence
cgccgagctgggccaatcctcttggtggaggaagctcggctgattctcggctcacgcgggaggggagtaaagggtggcggtccgggcctggagttcagtgggtgcagcctgcttgcgagctgaggccagacaggggggcgcctacggacggataaggaggagcattccaggccgagacgccctcatcagcagagtcacaggagttttggaagtgagagaaaagaaaagttgattacaaacgggaccatattttgcttcgaaatggaaccagcagttagcgagccaatgagagaccaagtcgcacggactcatttgacagaggacactcccaaagtgaatgctgacatagaaaaggttaaccagaatcaggccaagagatgcacagtgatcggtggctctggattcctggggcagcacatggtggagcagttgctggcaagaggatatgctgtcaatgtatttgatatccagcaagggtttgataatccccaggtgcggttctttctgggtgacctctgcagccgacaggatctgtacccagctctgaaaggtgtaaacacagttttccactgtgcgtcacccccaccatccagtaacaacaaggagctcttttatagagtgaattacattggcaccaagaatgtcattgaaacttgcaaagaggctggggttcagaaactcattttaaccagcagtgccagtgtcatctttgagggcgtcgatatcaagaatggaactgaagaccttccctatgccatgaaacccattgactactacacagagactaagatcttacaggagagggcagttctgggcgccaacgatcctgagaagaatttcttaaccacagccatccgccctcatggcattttcggcccaagggacccgcagttggtacccatcctcatcgaggcagccaggaacggcaagatgaagttcgtgattggaaatgggaagaacttggtggacttcacctttgtggagaacgtggtccatggacacatcctggcggcagagcagctctcccgagactcgacactgggtgggaaggcatttcacatcaccaatgatgagcccatccctttctggacattcctgtctcgcatcctgacaggcctcaattatgaggcccccaagtaccacatcccctactgggtggcctactacctggccctcctgctatccctgctggtgatggtgatcagtcctgtcatccagctgcagcccaccttcacacccatgcgggtcgcactggctggcacattccactactacagctgcgagagagccaaaaaggccatgggctaccagccactagtgaccatggatgatgctatggagaggaccgtgcagagctttcgccacctgcggagggtcaagtgagggacactggaggctgggctctctcgacacgttgctcagccagtcactccttcccctgtggattgatgaaataacatcctttgaatgagtttgctctgagcctgtgactccttctgctaggcagagagcgcaccctactctttccgtgacgatgagggcggcaaaaacagacatttcttccttcatggaactggatttggatttcttgaagcaggcagcttcatattataccgatttgttctctgtc

SEQ ID NO: 324935 - DNA, 1929 bp, Artificial Sequence
  derived and/or modified sequence
cgccgagctgggccaatcctcttggtggaggaagctcggctgattctcggctcacgcgggaggggagtaaagggtggcggtccgggcctggagttcagtgggtgcagcctgcttgcgagctgaggccagacaggggggcgcctacggacggaaaagaaaagttgattacaaacgggaccatattttgcttcgaaatggaaccagcagttagcgagccaatgagagaccaagtcgcacggactcatttgacagaggacactcccaaagtgaatgctgacatagaaaaggttaaccagaatcaggccaagagatgcacagtgatcggtggctctggattcctggggcagcacatggtggagcagttgctggcaagaggatatgctgtcaatgtatttgatatccagcaagggtttgataatccccaggtgcggttctttctgggtgacctctgcagccgacaggatctgtacccagctctgaaaggtgtaaacacagttttccactgtgcgtcacccccaccatccagtaacaacaaggagctcttttatagagtgaattacattggcaccaagaatgtcattgaaacttgcaaagaggctggggttcagaaactcattttaaccagcagtgccagtgtcatctttgagggcgtcgatatcaagaatggaactgaagaccttccctatgccatgaaacccattgactactacacagagactaagatcttacaggagagggcagttctgggcgccaacgatcctgagaagaatttcttaaccacagccatccgccctcatggcattttcggcccaagggacccgcagttggtacccatcctcatcgaggcagccaggaacggcaagatgaagttcgtgattggaaatgggaagaacttggtggacttcacctttgtggagaacgtggtccatggacacatcctggcggcagagcagctctcccgagactcgacactgggtgggaaggcatttcacatcaccaatgatgagcccatccctttctggacattcctgtctcgcatcctgacaggcctcaattatgaggcccccaagtaccacatcccctactgggtggcctactacctggccctcctgctatccctgctggtgatggtgatcagtcctgtcatccagctgcagcccaccttcacacccatgcgggtcgcactggctggcacattccactactacagctgcgagagagccaaaaaggccatgggctaccagccactagtgaccatggatgatgctatggagaggaccgtgcagagctttcgccacctgcggagggtcaagtgagggacactggaggctgggctctctcgacacgttgctcagccagtcactccttcccctgtggattgatgaaataacatcctttgaatgagtttgctctgagcctgtgactccttctgctaggcagagagcgcaccctactctttccgtgacgatgagggcggcaaaaacagacatttcttccttcatggaactggatttggatttcttgaagcaggcagcttcatattataccgatttgttctctgtctttttgtgtctctctgtttaccccctcccttgccccctcttctggtttatacatttcattccagtgtccttgtacataatcaaggaagctgtaggaagctacaacccatttgttagttctgatggagaaccatttccatgcagaccaatactagagtgaagcctctagactttgttcaagatactctatcttcaaaatatcccagaagaaaaacagaagctgttaacacacaggtgagactttacatatacatttcatactgacagtgagcttagagcaaaagctgaaagctgaaatgactgtaattcctccccagtctctgttgcttgttcaactccttacatgttccacattctctttcaggta

SEQ ID NO: 324936 - DNA, 1122 bp, Artificial Sequence
  derived and/or modified sequence
atggagcccgcagtgtccgagcccatgagagatcaggtggccaggacccatcttacagaggatacaccaaaagtgaacgccgatatcgagaaagtgaaccagaatcaggccaagcggtgtaccgttatcggtggctcggggttcctgggacagcatatggtcgagcagcttctggcgcgaggctacgcagtgaatgtatttgatattcaacagggctttgacaacccacaggttaggttctttctgggagacttatgctctaggcaggatttataccccgcactaaagggagtcaacacagttttccattgcgcctcacctcctccatccagtaacaacaaagaactgttctaccgggtgaattacataggcaccaaaaacgtgatagaaacatgcaaagaggcgggagttcagaagctcattttgacatcctccgcctctgtcatcttcgagggagtggacattaaaaacgggacagaggaccttccatacgctatgaagcctatcgattattatacagaaacaaagatcctgcaggagcgagccgttctgggagcgaatgatcctgagaaaaacttcctgacaacggcaattaggccccacggcatctttgggccaagggacccacaattggtgcccattctgatcgaggccgctaggaatggcaagatgaagtttgttatagggaacggcaagaatttggtcgatttcacttttgtcgaaaacgtggtgcacgggcatatcctggcagctgagcagctgtcacgggactcaacccttggtggcaaggccttccacattaccaatgatgagccaattcctttttggacctttctgtcccgaattcttaccggcctgaattatgaggcgcctaaatatcacatcccttattgggtagcatactatttagcactcctcctgtccctgctggtgatggtcattagccctgtgatccagctgcagcccacttttacaccaatgagggtcgccctggcaggcacattccactactattcttgtgagcgagccaagaaagccatggggtatcaacccctggtgacgatggatgacgctatggagcggaccgtacaatcctttcgccacctccggcgagtgaaatag

SEQ ID NO: 324937 - DNA, 1122 bp, Artificial Sequence
  derived and/or modified sequence
atggagcctgccgtttctgaaccgatgcgtgaccaagttgctagaacccacttaacagaagatactcctaaggtgaatgccgacatcgaaaaagtgaatcagaaccaggcaaagcgatgtaccgttattggcggttcaggcttcctcggacagcatatggttgaacagctgttggccagaggctacgctgtaaacgtttttgacattcagcaaggatttgataacccgcaggtcaggttctttctgggggatctctgctccaggcaggacctgtatcctgcccttaaaggagtgaatactgttttccattgcgcaagtccccctcctagctcaaataacaaggaactgttctatcgagtaaattatattggtacaaaaaatgtcatcgagacatgcaaggaggctggagtacaaaagctgatcctcacctccagtgctagcgtaatctttgagggcgtagacatcaaaaatgggacagaagaccttccctatgcaatgaagccaatcgactactacaccgaaacgaagatcttgcaggaacgcgctgtgctgggagccaacgatcctgagaagaatttcctgaccaccgctatccggccacatggcattttcggacctagagacccccagcttgtaccaatccttatcgaggcagctaggaacggaaagatgaaatttgtgattggcaacgggaaaaacttagtggactttacattcgtggagaacgtggtgcatgggcacatcctcgctgccgagcagctgtcgcgggactccacactcggcggaaaagccttccatattacaaatgatgaacctatccctttctggacctttctgtcgcgaatccttacagggctgaactatgaagctcctaaatatcatattccgtactgggtagcatattatctagctctccttctctctctgctggtgatggtcatatcacccgtaatccagctgcagccaacgttcacccctatgagggtggcacttgctgggacgttccactactattcctgcgagcgcgcaaaaaaagccatggggtaccagccacttgtgacaatggatgatgccatggagcgaacagtccagtcctttagacacctgaggcgggttaaatag

SEQ ID NO: 324938 - DNA, 1122 bp, Artificial Sequence
  derived and/or modified sequence
atggaacctgcagtctctgagcctatgagggatcaggtggcccgtactcaccttacagaagacaccccaaaggtcaacgcagatatcgagaaggtcaaccagaatcaggccaagagatgcacagtcatcggaggatccggttttctgggccagcatatggtggaacagctcttagcccgtggctatgccgtaaacgtctttgacattcagcaggggttcgataaccctcaggtccgatttttcttaggcgatctctgtagtcggcaagacttgtatccggcgctgaagggggtcaatacagtcttccattgcgcctctccacctccctcttcgaacaacaaggagttattttatagagtgaattacataggaacaaagaacgttatcgagacttgcaaggaggcgggtgtgcagaaactaatccttacaagctccgcttctgtgatctttgagggggttgatatcaagaatggaacagaggacctgccttatgccatgaaacccattgattattacacagaaaccaagattcttcaagagcgcgcagtgctcggcgccaacgatccagagaaaaattttctgaccaccgccattagacctcacggtatctttggccctagggatccccagctggtacctattttaatcgaggcagcacggaacggcaagatgaagttcgtaatcggtaatggcaagaatctggtggattttactttcgtggagaacgtagttcacggccatatcctcgctgcggaacagctgtcccgcgatagcacattgggcggcaaagccttccacatcactaatgacgagcctattcctttttggacatttttatcacggatcttaacaggcctcaattacgaagcacctaagtaccatattccttattgggttgcctactacttagccctccttttgtctttgctcgtgatggtgatttctccagttatacagctgcagccaaccttcacacccatgagagtggccctggctggcaccttccactactactcctgcgaacgcgcaaagaaggctatgggttaccaacctcttgtaacaatggacgacgctatggagagaactgtccagtcctttagacatttaaggagagtcaagtag

SEQ ID NO: 324939 - DNA, 765 bp, Artificial Sequence
  derived and/or modified sequence
atggagcccgccgtcagcgaaccgatgcgggatcaggtcgcccgcacacacctgacagaagacacaccaaaggtcaacgcagacatcgaaaaggtcaaccagaaccaggccaagcggtgtactgtgataggtgggagcgggttcctgggacagcacatggtcgaacaattattggcgaggggctatgcagtgaacgtttttgacattcagcaggggttcgataatccccaagtgcgcttctttctgggcgatctctgctccagacaggatctctaccctgcactgaagggggttaatacagtgttccactgtgccagcccacccccctccagtaacaataaggagctcttctatcgggtgaactacattgggactaagaatgtcattgaaacctgcaaggaggcgggagtccagaagttgatcttgacgtcttccgctagcgtgatctttgaaggcgtggatatcaaaaatggtactgaggatttgccgtatgcgatgaagccaatcgattattatacagaaaccaaaattttgcaggagcgtgctgtgttaggtgctaatgatccggaaaagaatttcctcaccaccgccattagaccacatggcatatttggcccccgcgatccacaattggtacctattttgatagaggccgcccgtaatgggaaaatgaagtttgtcattggcaatggtaaaaatctagtagatttcacttttgtcgaaaacgttgtccacgggcatatactagccgctgagcaattgtag

SEQ ID NO: 324940 - DNA, 1122 bp, Artificial Sequence
  derived and/or modified sequence
atggagccagcagtgtcggagccaatgcgcgatcaggtagctcgaacacacctgacggaggacactccaaaggttaacgctgacatcgagaaggtaaatcagaatcaggcgaagagatgcacggtgatcggcgggtcaggattcttaggtcagcacatggtggagcagctgctggccaggggatatgctgtcaatgtgttcgacatacagcaaggtttcgacaatccacaggttcgcttcttcctcggagatctctgcagtagacaagatctctatccagcgctcaaaggggtaaatactgtttttcactgcgcaagtccccccccatcctctaacaataaggaactgttttaccgagtgaattatatagggaccaaaaatgtcattgagacatgcaaagaggccggtgttcagaagctgatccttacctcaagcgctagcgtgatttttgagggcgtcgatatcaaaaacggtacagaggatttgccatacgctatgaagcctattgattactacactgagacgaagatacttcaagagcgggcagtcctgggagccaacgaccccgagaaaaactttttaaccaccgctattagaccacacgggattttcggccctcgggatccacagctggtgccgatcttaatagaggctgcccgaaatggtaagatgaaattcgtgatcggtaatggcaaaaacttggtcgattttacatttgtcgaaaatgtggtccatggccatatcttggccgccgaacaactgtctcgagactctacactcgggggaaaggcttttcacatcaccaatgacgagcccattcctttttggacattcctgtcacggatccttactgggttgaattacgaggcccctaagtatcacatcccgtactgggtggcctactacctcgccttattgctttctctgctcgttatggttatcagcccagtgatacagctgcagcctacgtttacccctatgcgggtcgccctggccggcactttccactactatagctgcgaacgcgcaaaaaaggcgatggggtatcagccactcgtgacaatggatgacgccatggaaagaacagttcagtcttttcgacacctgcggcgcgttaaatag

SEQ ID NO: 324941 - DNA, 765 bp, Artificial Sequence
  derived and/or modified sequence
atggagcctgctgtgtctgagcccatgagggaccaggtggcccggacccacctgacagaggacacccccaaggtgaatgctgacatcgagaaggtgaaccagaaccaggccaagcgctgcaccgtgattggaggcagcggcttcctgggccagcacatggtggagcagctgctggcccggggctatgctgtgaatgtgtttgacatccagcagggctttgacaacccccaggtgcgcttcttcctgggggacctgtgcagccggcaggacctgtacccagccctgaagggcgtgaacacagtgttccactgtgccagccccccacccagcagcaacaacaaggagctgttctacagagtgaactacatcggcaccaagaatgtgattgagacctgcaaggaggccggcgtgcagaagctgatcctgaccagcagcgccagcgtcatctttgagggcgtggacatcaagaatggaacagaggacctgccctatgccatgaagcccatcgactactacacagagaccaagatcctgcaggagagagctgtgctgggcgccaatgaccctgagaagaacttcctgaccacagccatccggccccacggcatcttcggcccccgggacccccagctggtgcccatcctgattgaggccgccagaaatggcaagatgaagtttgtgattggaaatggcaagaacctggtggacttcacctttgtggagaatgtggtgcacggccacatcctggccgctgagcagctgtag

SEQ ID NO: 324942 - DNA, 994 bp, Artificial Sequence
  derived and/or modified sequence
gaagctcggctgattctcggctcacgcgggaggggagtaaagggtggcggtccgggcctggagttcagtgggtgcagcctgcttgcgagctgaggccagacaggggggcgcctacggacggataaggaggagcattccaggccgagacgccctcatcagcagagtcacaggagttttggaagtgagagaaaagaaaagttgattacaaacgggaccatattttgcttcgaaatggaaccagcagttagcgagccaatgagagaccaagtcgcacggactcatttgacagaggacactcccaaagtgaatgctgacatagaaaaggttaaccagaatcaggccaagagatgcacagtgatcggtggctctggattcctggggcagcacatggtggagcagttgctggcaagaggatatgctgtcaatgtatttgatatccagcaagggtttgataatccccaggtgcggttctttctgggtgacctctgcagccgacaggatctgtacccagctctgaaaggtgtaaacacagttttccactgtgcgtcacccccaccatccagtaacaacaaggagctcttttatagagtgaattacattggcaccaagaatgtcattgaaacttgcaaagaggctggggttcagaaactcattttaaccagcagtgccagtgtcatctttgagggcgtcgatatcaagaatggaactgaagaccttccctatgccatgaaacccattgactactacacagagactaagatcttacaggagagggcagttctgggcgccaacgatcctgagaagaatttcttaaccacagccatccgccctcatggcattttcggcccaagggacccgcagttggtacccatcctcatcgaggcagccaggaacggcaagatgaagttcgtgattggaaatgggaagaacttggtggacttcacctttgtggagaacgtggtccatggacacatcctggcggcagagcagctct

SEQ ID NO: 324943 - DNA, 1122 bp, Artificial Sequence
  derived and/or modified sequence
atggagcccgccgtgagcgagcccatgcgggaccaggtggcccggactcacttaaccgaagatacaccgaaagtgaatgccgatatcgaaaaagttaatcagaaccaggcaaaacgttgcactgtgatcggcggaagtgggtttctgggacagcatatggtcgaacagctgctggcaagagggtacgccgtcaatgtgttcgacatacagcagggattcgacaatccgcaggtgcgtttctttctgggcgacctatgctctcgtcaggacctttaccccgccctgaagggcgtgaatacagtgttccactgtgccagccctccacccagcagtaataataaagaactgttttacagagtaaattatatcggcaccaagaacgtgattgagacctgcaaggaggcgggagtgcaaaaattgatcctcactagctccgcgagcgtgatcttcgagggggtggatatcaaaaatgggaccgaagacttaccctacgcaatgaaacctatcgactattataccgaaaccaaaattctgcaggagcgggccgtgctcggggctaatgatccggagaaaaacttccttactaccgccatccgcccacacggaatcttcgggcccagggatccccaactcgtgcctatcctgatcgaggctgctagaaatgggaaaatgaaattcgtgatagggaatggtaagaatctggttgatttcactttcgttgaaaacgtggtgcatggtcacatcctagccgccgagcagctctctagagatagcaccctaggcgggaaggcgttccacataacgaatgacgagcccataccgttctggacatttttatcaagaattctgacaggcctcaactatgaggccccaaagtatcacataccgtactgggttgcctattatttggctctgcttctctcgctgctggtcatggtcatttctcctgtgatacagctgcagcccacctttactcccatgagagtagcgttggccggtacttttcactactacagctgtgaacgcgccaaaaaagctatggggtatcaacctctcgtgactatggatgatgccatggagaggacagtgcagtcatttcgacatttgcgacgtgtgaagtag

SEQ ID NO: 324944 - DNA, 765 bp, Artificial Sequence
  derived and/or modified sequence
atggagcccgccgtgagcgagcccatgcgggaccaggtggcccggacacaccttactgaagatactccaaaggtgaatgccgatattgagaaggtgaatcaaaatcaagcaaagcggtgtaccgtgattggtggaagcgggtttctgggccagcatatggtggagcagctgttagccaggggctacgcggtgaacgttttcgatattcagcaaggattcgataatccccaagtgcggttctttctgggggatttgtgtagccggcaagatctgtacccagcactcaaaggcgtcaataccgtcttccactgcgcttccccgccacccagttccaacaacaaggaactgttttaccgagtcaattatattggtactaagaatgtgatcgagacctgtaaagaagctggagtgcagaagctgattttgaccagttcggcctctgtgatatttgagggcgtagacatcaaaaacgggaccgaggacctcccttatgccatgaagcctatcgattattataccgagactaagattctacaggagagggccgtgctgggagccaatgaccctgagaagaattttctgacaaccgccatccggccccacggaatattcgggcccagagatccacagctcgtcccaattttgatagaggcagctcgcaacgggaagatgaagtttgtgattgggaacggcaagaatctcgtcgattttacatttgtggaaaatgtcgtgcatgggcatattctcgccgccgaacagctgtag

SEQ ID NO: 324945 - DNA, 1122 bp, Artificial Sequence
  derived and/or modified sequence
atggagcccgccgtgagcgagcccatgcgggaccaggtggcccggacccatctgactgaagacactccaaaggtgaacgccgatatcgagaaagtgaaccagaatcaggccaaacggtgcacagttatagggggctccgggtttctgggacagcacatggtggagcaactgctcgcgagggggtacgcagttaacgttttcgacattcaacaggggtttgataatcctcaggtccgattttttttaggagacctgtgctcccgccaggatctctatcccgctctgaagggggtgaatactgtgtttcactgtgcgtctccccctccatccagcaacaataaggagctcttctatcgggtaaactacattggcacgaaaaacgtgatagaaacatgtaaagaagccggtgttcaaaagctgattcttacttccagtgcgtccgtgatatttgagggagttgacataaaaaacggcacggaagatctcccttacgcaatgaaaccaatcgactattacacagaaacgaagattctccaggagagagctgtcctcggcgctaatgatccagaaaaaaacttcctcactacagccatccggcctcatggaatctttgggcctagagatccccagctcgtcccaatcctcatagaggccgccagaaatggaaagatgaagttcgtcattgggaacggaaagaatctggtggatttcaccttcgtcgagaatgtggtgcatggccacattctggcagccgagcagctttcaagggacagtactctgggaggcaaagcatttcacattacgaatgacgagcctattccgttctggacctttctcagcagaattctcacaggcttaaactacgaagcgcctaagtatcacatcccatactgggttgcttactacctggccctactgctttccttgctcgtgatggttatatcacctgtgatccaactacaacctaccttcacccccatgagagtagcacttgcaggcacgttccactactatagctgtgaacgggccaaaaaggcaatgggctaccagccgctggtcacaatggatgacgcaatggaacgcactgtgcagtcgtttagacacctcagacgtgtcaagtag

SEQ ID NO: 324946 - DNA, 1122 bp, Artificial Sequence
  derived and/or modified sequence
atggaacccgctgtgagcgagcctatgcgcgaccaagttgcaagaacacacctcacagaagatactccaaaggtgaacgcagatatcgaaaaggttaaccaaaaccaggcaaaaaggtgcactgtgatcggcggttccggctttttgggacagcatatggttgagcagctgctggccagagggtacgcagtgaacgtctttgatatacagcagggttttgacaatccccaggttcgatttttcctcggagatctgtgtagcagacaggatctgtatcctgcactgaaaggcgtcaatacagtcttccattgtgccagtcctccccctagttctaataacaaggagcttttttatcgggtgaactacatcggtacaaaaaatgtaatcgaaacttgtaaagaggccggagtacagaaactgatcctgacttcttccgccagcgtgatttttgagggcgtcgatattaagaatggaacggaagacttgccctacgctatgaaaccaatcgactattacaccgaaactaaaatcttacaggagagagccgttctgggcgcaaatgaccccgaaaagaacttcttgaccaccgcaattaggccgcacggcatctttggtcccagggaccctcagctggttcctatcttaattgaggctgccagaaatgggaagatgaaattcgtaataggaaacggaaagaatctggtggattttacttttgtggaaaacgtggtccacggacatatcctggccgcagagcagctctcacgggactctactcttggcggtaaggcattccatattacaaacgacgagcccattccattctggacgttcctgtctaggatccttactgggctaaactatgaggcccctaagtatcatataccatactgggtagcatattatctcgcactgctgctatctctacttgtgatggttattagtcccgtgattcaattgcagcccaccttcacaccaatgcgcgtcgccctggcgggtacatttcattactacagttgtgagcgcgcaaagaaggctatgggatatcaacctttagtgacaatggacgacgccatggagcgaacagtccagtcctttaggcacttgcggagggtcaagtag

SEQ ID NO: 324947 - DNA, 765 bp, Artificial Sequence
  derived and/or modified sequence
atggagcctgccgtgagtgagccaatgagggaccaggtggctcgcacccatcttactgaggatacccccaaagtgaatgccgacattgagaaggtgaaccagaatcaagccaagcgctgcaccgttattggaggctctgggtttttgggccagcatatggtggaacagctgctggccaggggctacgccgtgaacgtcttcgacatacaacagggcttcgacaacccccaggtgcgattcttcctgggggatctttgctcgcggcaggatctgtaccctgccctgaagggcgtcaacacagtgttccattgtgcatcaccccctcccagcagcaataacaaagagttgttctacagagtgaactacatcgggacaaagaacgtgattgagacttgtaaagaagcgggagtgcagaaactcattctgactagcagcgctagtgtcatctttgaaggggtcgacatcaagaacgggactgaagacctgccatatgccatgaagcccatagactactatacggagactaaaattcttcaggagcgcgctgtgctaggggctaacgatcccgaaaagaactttttgaccacagctataagacctcatgggattttcggccctcgggacccacagctggtgcctatcctgatcgaagcagcgagaaatggaaagatgaagttcgttatcggaaacggcaaaaacctggtggacttcactttcgtagagaatgtggtacacgggcacattctggctgccgagcaattgtag

SEQ ID NO: 324948 - DNA, 1122 bp, Artificial Sequence
  derived and/or modified sequence
atggagcctgcagtgtctgaaccgatgagagaccaagttgcaagaacccacctgacggaggatacaccaaaagtgaacgcggatatagagaaggtgaatcaaaatcaggccaagaggtgcaccgttattggaggttccggcttccttggacagcacatggttgaacaactcctcgccagggggtatgccgttaatgtgtttgacatccagcagggtttcgataacccacaggtcaggttcttcctcggggacctgtgcagcaggcaggatttataccccgctctgaagggcgttaacacagtgtttcactgcgctagccctcctccaagctcgaacaataaagagctattctacagggtcaactacatcggaacgaagaatgtgattgaaacctgtaaggaagccggagtgcagaagctcattctaacatcttctgcatcggtgatctttgaaggcgtggatattaagaacgggactgaggatctcccttatgccatgaagcccatagactattacaccgagactaaaattctgcaagagcgggctgttctgggtgctaatgatccagaaaagaatttcctaacgacagcaataagaccacatggcatatttggcccacgcgatccacaattggttccaatcctgatcgaagctgcgagaaacggtaagatgaagttcgtgatcggcaatggtaaaaacctcgtggacttcacatttgtagagaatgtcgtgcacggacacattcttgccgctgaacaattatcacgggattctacacttggaggcaaagcatttcatataacaaatgatgaacccatacccttctggaccttcctgtcacggatcttgactggactaaactacgaggctcccaagtatcatatcccttattgggtagcctactatctcgctctgctcctttctctcctggtgatggtcatctctccagtgatccagctccagcccactttcaccccaatgagagtcgccctcgcaggcaccttccactactactcctgtgagcgcgctaaaaaggctatgggctaccagccgctcgttactatggacgatgccatggagagaaccgtgcagtcatttcggcacctgcggcgagtgaaatag

SEQ ID NO: 324949 - DNA, 765 bp, Artificial Sequence
  derived and/or modified sequence
atggagcccgccgtgagcgagcccatgagagaccaggtggccagaacccacctgaccgaggacacccccaaggtgaacgccgacatcgagaaggtgaaccagaaccaggccaagagatgcaccgtgatcggcggcagcggcttcctgggccagcacatggtggagcagctgctggccagaggctacgccgtgaacgtgttcgacatccagcagggcttcgacaacccccaggtgagattcttcctgggcgacctgtgcagcagacaggacctgtaccccgccctgaagggcgtgaacaccgtgttccactgcgccagccccccccccagcagcaacaacaaggagctgttctacagagtgaactacatcggcaccaagaacgtgatcgagacctgcaaggaggccggcgtgcagaagctgatcctgaccagcagcgccagcgtgatcttcgagggcgtggacatcaagaacggcaccgaggacctgccctacgccatgaagcccatcgactactacaccgagaccaagatcctgcaggagagagccgtgctgggcgccaacgaccccgagaagaacttcctgaccaccgccatcagaccccacggcatcttcggccccagagacccccagctggtgcccatcctgatcgaggccgccagaaacggcaagatgaagttcgtgatcggcaacggcaagaacctggtggacttcaccttcgtggagaacgtggtgcacggccacatcctggccgccgagcagctgtag

SEQ ID NO: 324950 - DNA, 453 bp, Artificial Sequence
  derived and/or modified sequence
atgcttcgcgccgctgtcatccttctactcattaggacttggctggcagaaggtaactaccctagtcccatcccgaagtttcactttgagttttctagcgcagtcccagaggtggtgctgaatctatttaactgtaagaactgtgcgaacgaagccgttgtacagaagatcctagaccgggtgttaagtcgttacgatgttcggcttcgtcctaatttcggaggcgtacttgaaactaactccacgtggggcctcaacgacgacgagctaatggcacatggccaggagaaagattcgtcatccgaaagcgaggacagctgccccccttctcctgggtgtagcttcaccgaaggctttagctttgatctgtttaatccggattatgtgcctaaagtggacaagtggtccaggttcttgttcccgctggccttcggtttatttaacatcgtgtag

SEQ ID NO: 324951 - DNA, 485 bp, Artificial Sequence
  derived and/or modified sequence
gcgcccagaacgccccggccatgggcatccgaggcatgctgcgagccgcagtgatcctgctgctcatcaggacctggctcgcggagggcaactaccccagtcccatcccgaaattccacttcgagttctcctctgctgtgcccgaagtcgtcctgaacctcttcaactgcaaaaattgtgcaaatgaagctgtggttcaaaagattttggacagggtgctgtcaagatacgatgtccgcctgagaccgaattttggaggtgtcctagagactaacagtacctggggccttaatgatgatgagctcatggcccatggccaagagaaggacagtagctcagagtctgaggatagttgccccccaagccctgggtgctccttcactgaagggttctccttcgatctctttaatcctgactacgtcccaaaggtcgacaagtggtcccggttcctcttccctctggcctttgggttgttcaacattgtt

SEQ ID NO: 324952 - DNA, 453 bp, Artificial Sequence
  derived and/or modified sequence
atgctgcgggctgctgtgatcctgctgctgatccgcacctggctggccgagggcaactaccccagccccatccccaagttccactttgagttcagcagcgctgtgcctgaggtggtgctgaacctcttcaactgcaagaactgtgccaatgaggccgtggtgcagaagatcctggacagagtgctgagccgctatgatgtgcggctgcggcccaactttggaggagtgctggagaccaacagcacctggggcctgaatgatgatgagctgatggcccacggccaggagaaggacagcagcagcgagagcgaggacagctgcccccccagccctggctgcagcttcacagagggcttctcctttgacctcttcaacccagactatgtgcccaaggtggacaagtggagccgcttcctgttccccctggccttcggcctcttcaacatcgtgtag

SEQ ID NO: 324953 - DNA, 453 bp, Artificial Sequence
  derived and/or modified sequence
atgctgcgggccgccgtgatcctgctgctgatccggacctggctggccgaaggcaactatcccagtcctattcctaagttccatttcgagttctcttctgccgtccctgaggtggttctgaacctgttcaactgtaagaattgtgccaatgaggcagtagttcagaaaattctggatagagtactttctcgatatgatgtccgcctcagacccaattttggtggcgtcctggagacaaatagcacttggggcctgaacgatgatgaactgatggctcacggccaggaaaaggactcatctagcgaatccgaggactcttgcccgccttcaccagggtgttcgtttactgagggtttctcatttgacctgttcaaccccgactatgtgccaaaggtggataaatggtccaggtttttattcccactggccttcggcctttttaatattgtgtag

SEQ ID NO: 324954 - DNA, 453 bp, Artificial Sequence
  derived and/or modified sequence
atgttgagagccgcagtaattctccttctgatcagaacttggctggcagaagggaattaccccagccctattcctaaattccattttgaattttccagtgctgttcccgaggtggtgttaaacctcttcaattgcaagaactgtgccaacgaagctgtggtccaaaaaatcctggaccgagttttgagccggtatgacgtgagactgaggcctaatttcggaggagtgctcgaaactaactcgacttgggggctcaacgacgatgagctcatggcgcatggccaggaaaaagacagtagttccgagtctgaggactcatgcccccctagcccaggatgtagctttaccgagggcttctccttcgatctgtttaacccagactacgtacccaaggtggacaagtggtctcgattcctgttccctttggctttcggccttttcaatattgtgtag

SEQ ID NO: 324955 - DNA, 453 bp, Artificial Sequence
  derived and/or modified sequence
atgctgagagccgccgtgatcctgctgctgatcagaacctggctggccgagggcaactaccccagccccatccccaagttccacttcgagttcagcagcgccgtgcccgaggtggtgctgaacctgttcaactgcaagaactgcgccaacgaggccgtggtgcagaagatcctggacagagtgctgagcagatacgacgtgagactgagacccaacttcggcggcgtgctggagaccaacagcacctggggcctgaacgacgacgagctgatggcccacggccaggagaaggacagcagcagcgagagcgaggacagctgcccccccagccccggctgcagcttcaccgagggcttcagcttcgacctgttcaaccccgactacgtgcccaaggtggacaagtggagcagattcctgttccccctggccttcggcctgttcaacatcgtgtag

SEQ ID NO: 324956 - DNA, 847 bp, Artificial Sequence
  derived and/or modified sequence
tactctggcggggaaggagaggtcaggcgctccgggctcgcccgctaggtcggggccgcggcgtcccccaccctaagtcccacctccggccgggcatgggtacccgggcgggcctgcctcggcctgggcccactcactggtccagaagcagctgtaggtgcccaccaagcccatgacgacgctgctggccagggtccagcattactgcaggacccccaggacgttggactgccagctccctgggtctcctcctctctggggcagatcctcagtcctcccttgacttcacgactgtggccagatcatgtgtggactgtccctctctttgggtctccagagcgcttgcatcaaacacccctaactcagaagtgtgcagccacactgggactcagaacccaacaacagggacagaagactcacgcccttggggtgcccggtctcgtggcatcaggcatgacttccagctcctgcgccttccccagcaactgctgactggggacccagaccgggagctgagcgacgggcctggcgagcgaagctcggggtctcactcaggcaccagcccctccttgccccaggcttgagtgactcacagccctattcaggcaggagctgctcttctggggtatcgcgatccacttaaggatgaggcagacttggtgacaagctggtctgagcagcgcttccagagccagaactgagcccagtgagagcgcaccctggagcagcctggattcctggggtgtccccggcagccacacacagccatgcactacccaactgcactcctcttcctcatcctggccaatggggcccaggcctttcgcatctgcgccttcaatgccca

SEQ ID NO: 324957 - protein, 457 aa, Artificial Sequence
  derived and/or modified sequence
MTTEDYKKLAPYNIRRSSTSGDTEEEEEEEVVPFSSDEQKRRSEAASGVLRRTAPREHSYVLSAAKKSTGSPTQETQAPFIAKRVEVVEEDGPSEKSQDPPALARSTPGSNSSRGEEIVRLQILTPRAGLRLVAPDVEGMSSSATSVSAVPADRKSNSTAAQEDAKADPKGALADYEGKDVATRVGEAWQERPGAPRGGQGDPAVPAQQPADPSTPERQSSPSGSEQLVRRESCGSSVLTDFEGKDVATKVGEAWQDRPGAPRGGQGDPAVPTQQPADPSTPEQQNSPSGSEQFVRRESCTSRVRSPSSCMVTVTVTATSEQPHIYIPAPASELDSSSTTKGILFVKEYVNASEVSSGKPVSARYSNVSSIEDSFAMEKKPPCGSTPYSERTTGGICTYCNREIRDCPKITLEHLGICCHEYCFKCGICSKPMGDLLDQIFIHRDTIHCGKCYEKLF

SEQ ID NO: 324958 - protein, 452 aa, Artificial Sequence
  derived and/or modified sequence
MQRQAPYNIRRSSTSGDTEEEEEEEVVPFSSDEQKRRSEAASGVLRRTAPREHSYVLSAAKKSTGSPTQETQAPFIAKRVEVVEEDGPSEKSQDPPALARSTPGSNSSRGEEIVRLQILTPRAGLRLVAPDVEGMSSSATSVSAVPADRKSNSTAAQEDAKADPKGALADYEGKDVATRVGEAWQERPGAPRGGQGDPAVPAQQPADPSTPERQSSPSGSEQLVRRESCGSSVLTDFEGKDVATKVGEAWQDRPGAPRGGQGDPAVPTQQPADPSTPEQQNSPSGSEQFVRRESCTSRVRSPSSCMVTVTVTATSEQPHIYIPAPASELDSSSTTKGILFVKEYVNASEVSSGKPVSARYSNVSSIEDSFAMEKKPPCGSTPYSERTTGGICTYCNREIRDCPKITLEHLGICCHEYCFKCGICSKPMGDLLDQIFIHRDTIHCGKCYEKLF

SEQ ID NO: 324959 - DNA, 1374 bp, Artificial Sequence
  derived and/or modified sequence
atgaccaccgaggactacaagaagctggccccctacaacatcagaagaagcagcaccagcggcgacaccgaggaggaggaggaggaggaggtggtgcccttcagcagcgacgagcagaagagaagaagcgaggccgccagcggcgtgctgagaagaaccgcccccagagagcacagctacgtgctgagcgccgccaagaagagcaccggcagccccacccaggagacccaggcccccttcatcgccaagagagtggaggtggtggaggaggacggccccagcgagaagagccaggacccccccgccctggccagaagcacccccggcagcaacagcagcagaggcgaggagatcgtgagactgcagatcctgacccccagagccggcctgagactggtggcccccgacgtggagggcatgagcagcagcgccaccagcgtgagcgccgtgcccgccgacagaaagagcaacagcaccgccgcccaggaggacgccaaggccgaccccaagggcgccctggccgactacgagggcaaggacgtggccaccagagtgggcgaggcctggcaggagagacccggcgcccccagaggcggccagggcgaccccgccgtgcccgcccagcagcccgccgaccccagcacccccgagagacagagcagccccagcggcagcgagcagctggtgagaagagagagctgcggcagcagcgtgctgaccgacttcgagggcaaggacgtggccaccaaggtgggcgaggcctggcaggacagacccggcgcccccagaggcggccagggcgaccccgccgtgcccacccagcagcccgccgaccccagcacccccgagcagcagaacagccccagcggcagcgagcagttcgtgagaagagagagctgcaccagcagagtgagaagccccagcagctgcatggtgaccgtgaccgtgaccgccaccagcgagcagccccacatctacatccccgcccccgccagcgagctggacagcagcagcaccaccaagggcatcctgttcgtgaaggagtacgtgaacgccagcgaggtgagcagcggcaagcccgtgagcgccagatacagcaacgtgagcagcatcgaggacagcttcgccatggagaagaagcccccctgcggcagcaccccctacagcgagagaaccaccggcggcatctgcacctactgcaacagagagatcagagactgccccaagatcaccctggagcacctgggcatctgctgccacgagtactgcttcaagtgcggcatctgcagcaagcccatgggcgacctgctggaccagatcttcatccacagagacaccatccactgcggcaagtgctacgagaagctgttctag

SEQ ID NO: 324960 - DNA, 1359 bp, Artificial Sequence
  derived and/or modified sequence
atgcagagacaggccccctacaacatcagaagaagcagcaccagcggcgacaccgaggaggaggaggaggaggaggtggtgcccttcagcagcgacgagcagaagagaagaagcgaggccgccagcggcgtgctgagaagaaccgcccccagagagcacagctacgtgctgagcgccgccaagaagagcaccggcagccccacccaggagacccaggcccccttcatcgccaagagagtggaggtggtggaggaggacggccccagcgagaagagccaggacccccccgccctggccagaagcacccccggcagcaacagcagcagaggcgaggagatcgtgagactgcagatcctgacccccagagccggcctgagactggtggcccccgacgtggagggcatgagcagcagcgccaccagcgtgagcgccgtgcccgccgacagaaagagcaacagcaccgccgcccaggaggacgccaaggccgaccccaagggcgccctggccgactacgagggcaaggacgtggccaccagagtgggcgaggcctggcaggagagacccggcgcccccagaggcggccagggcgaccccgccgtgcccgcccagcagcccgccgaccccagcacccccgagagacagagcagccccagcggcagcgagcagctggtgagaagagagagctgcggcagcagcgtgctgaccgacttcgagggcaaggacgtggccaccaaggtgggcgaggcctggcaggacagacccggcgcccccagaggcggccagggcgaccccgccgtgcccacccagcagcccgccgaccccagcacccccgagcagcagaacagccccagcggcagcgagcagttcgtgagaagagagagctgcaccagcagagtgagaagccccagcagctgcatggtgaccgtgaccgtgaccgccaccagcgagcagccccacatctacatccccgcccccgccagcgagctggacagcagcagcaccaccaagggcatcctgttcgtgaaggagtacgtgaacgccagcgaggtgagcagcggcaagcccgtgagcgccagatacagcaacgtgagcagcatcgaggacagcttcgccatggagaagaagcccccctgcggcagcaccccctacagcgagagaaccaccggcggcatctgcacctactgcaacagagagatcagagactgccccaagatcaccctggagcacctgggcatctgctgccacgagtactgcttcaagtgcggcatctgcagcaagcccatgggcgacctgctggaccagatcttcatccacagagacaccatccactgcggcaagtgctacgagaagctgttctag

SEQ ID NO: 324961 - DNA, 1374 bp, Artificial Sequence
  derived and/or modified sequence
atgaccacagaggattataaaaaactggcaccgtataatatccgtaggtcaagcacatcaggtgataccgaggaggaagaagaggaggaagtggtgcctttcagtagcgatgaacagaaaagaagatccgaggcggcgtccggagtgctcagacgaacggctcctcgggagcacagttacgtcctgagcgcagcaaaaaaatccaccgggtcaccgactcaggaaacacaagctccgttcatcgccaagagggtcgaagtagtggaggaagatggcccatccgagaagtcacaagatccacccgccctcgcccggtcaactccgggctccaattcttcacgtggcgaagagatagtccgtctgcaaattctgacgccacgggctggccttagacttgtggccccggacgtcgagggcatgagctctagcgcaactagcgtttctgccgttccagccgataggaagtctaattctacagctgctcaggaggatgccaaggccgaccctaagggtgccctggccgactacgagggtaaggacgttgccaccagggttggggaagcatggcaggagagacctggggctccaaggggtggccagggggaccctgcagtgcccgctcaacagccggcagaccccagcacccctgaaagacagtcttccccatctgggagtgagcagctcgttcgtagggagtcctgcggctctagcgtactgactgacttcgaaggcaaagatgtggccactaaagtcggagaggcatggcaggacagaccgggggctccacgggggggccagggagatcccgccgtgcccacacaacagcctgccgatcccagcacaccggagcagcagaatagcccaagcgggtcagaacagttcgtaaggcgggaaagctgcaccagcagagtgcgaagccccagcagctgcatggttacagttaccgttactgccacttccgagcaaccccacatttacatacccgctcccgcatccgagctggactcttcttccactaccaaagggatcttatttgtgaaagaatacgttaacgccagtgaagtgtcatccgggaaacctgtgagcgcccgatatagcaacgtcagcagcatcgaagactccttcgccatggagaagaagcctccatgcggtagcacaccttactcagaacggacaacaggagggatctgcacatattgtaatcgcgagataagggactgccctaagatcacgctggaacatctgggcatttgttgtcacgagtattgtttcaagtgcgggatatgttcgaaaccgatgggcgatttgttggatcaaattttcatacacagagacactattcattgtggaaaatgctatgaaaagctcttttag

SEQ ID NO: 324962 - DNA, 1359 bp, Artificial Sequence
  derived and/or modified sequence
atgcagcgccaggcaccatataacatcaggcggagtagcacttccggcgataccgaggaagaagaagaagaagaggtggtccctttttcctctgatgaacagaagagaagatctgaggccgcaagtggggtactgaggcggacagcgcctcgggaacactcatacgttctttccgcggcgaagaaaagcaccggaagccccacccaggaaactcaggcgcctttcattgccaagcgtgtcgaggtggtggaagaggacggaccaagcgagaaaagtcaggatccccccgcactcgcaagatcgacaccgggatctaacagcagccgcggagaggagatcgtgaggctgcagattctaaccccaagagctggtctccgccttgtagcaccggacgtcgagggcatgtctagtagcgccacatctgtgagtgcagtgcctgcagaccgaaaaagtaactcaaccgccgcacaggaggatgcgaaggcggaccctaagggcgctctggccgattatgaaggtaaggatgtggccacaagggtgggtgaggcatggcaggagcggccaggggctccacggggcggccagggagatccggctgtgcctgcccagcagcccgccgatccgtccactcctgaaagacagtcatcacctagcgggtccgaacagcttgttcggagagagagttgcggatccagcgtactgacagactttgagggaaaggatgtcgctaccaaggtgggtgaagcttggcaagatcgccctggtgctcccaggggggggcagggtgaccctgctgtccctacacagcagcccgcagaccctagcacccccgagcaacagaacagtcctagcggttcagaacaattcgtgcgaagggagtcctgcacctctcgcgttaggagcccatcttcctgcatggttacagtgacggtcactgctactagcgagcaaccacatatatatatccctgcacctgcatctgaattggatagtagtagcaccacaaagggcatcttattcgtgaaagaatatgtaaatgccagcgaggtctcttccggtaagcccgtgtcggcgaggtactctaatgtatcttctattgaagattcattcgccatggagaagaagcctccttgtggcagtactccttatagcgagaggacaactggtggcatttgcacttattgcaatcgtgaaatcagggattgcccaaagatcacattagaacacctcggcatctgctgccacgaatactgttttaagtgcggcatttgcagtaagccaatgggcgaccttctggaccagatctttattcatcgggataccatacattgtggtaagtgctacgagaagttgttttag

SEQ ID NO: 324963 - DNA, 1374 bp, Artificial Sequence
  derived and/or modified sequence
atgaccacagaggactacaagaagctggccccctacaacatcagaagaagcagcaccagcggggacacagaggaggaggaggaggaggaggtggtgcccttcagcagtgatgagcagaagagaagaagtgaagctgccagcggcgtgctgcggaggacagccccccgggagcacagctatgtgctgtctgctgccaagaagagcacaggcagccccacccaggagacccaggcccccttcatcgccaagagggtggaggtggtggaggaggatggccccagcgagaagagccaggaccccccagccctggcccggagcaccccaggcagcaacagcagcagaggagaggagatcgtgcggctgcagatcctgaccccccgggccggcctgcggctggtggccccagatgtggagggcatgagcagcagcgccacctctgtgtctgctgtgcctgctgacaggaagagcaacagcacagctgcccaggaggatgccaaggctgaccccaagggggccctggccgactatgagggcaaggatgtggccaccagggtgggggaggcctggcaggagaggcctggggccccccggggcggccagggcgaccctgctgtgcctgcccagcagcctgctgaccccagcaccccagagcggcagagcagccccagcggcagcgagcagctggtgcggcgggagagctgtggcagctctgtgctgacagactttgagggcaaggatgtggccaccaaggtgggggaggcctggcaggacaggcctggggccccccggggcggccagggcgaccctgctgtgcccacccagcagcctgctgaccccagcaccccagagcagcagaacagccccagcggcagcgagcagtttgtgcggcgggagagctgcaccagccgggtgcgcagccccagcagctgcatggtgacagtgacagtgacagccaccagcgagcagccccacatctacatcccagccccagccagcgagctggacagcagcagcaccaccaagggcatcctgtttgtgaaggagtatgtgaatgccagcgaggtgtcctctgggaagcctgtgtctgcccgctacagcaatgtgagcagcattgaggacagctttgccatggagaagaagccaccctgtggcagcaccccctacagcgagaggaccactggaggcatctgcacctactgcaaccgggagatccgggactgccccaagatcaccctggagcacctgggcatctgctgccacgagtactgcttcaagtgtggcatctgcagcaagcccatgggagacctgctggaccagatcttcatccaccgggacaccatccactgtgggaaatgttatgagaagctgttctag

SEQ ID NO: 324964 - DNA, 1359 bp, Artificial Sequence
  derived and/or modified sequence
atgcagaggcaggccccctacaacatccgccgcagcagcaccagcggggacacagaggaggaggaggaggaggaggtggtgcccttcagcagtgatgagcagaagagaagaagtgaggccgccagcggcgtgctgcggaggacagccccccgggagcacagctatgtgctgtctgctgccaagaagagcacaggcagccccacccaggagacccaggcccccttcatcgccaagagggtggaggtggtggaggaggatggccccagcgagaagagccaggaccccccagccctggcccggagcaccccaggcagcaacagcagcagaggagaggagatcgtgcggctgcagatcctgacccccagggctggcctgcggctggtggccccagatgtggagggcatgagcagcagcgccacctctgtgtctgctgtgcctgctgacaggaagagcaacagcacagctgcccaggaggatgccaaggctgaccccaagggggccctggccgactatgagggcaaggatgtggccaccagggtgggggaggcctggcaggagaggcctggggccccccggggcggccagggcgaccctgctgtgcctgcccagcagcctgctgaccccagcaccccagagcggcagagcagccccagcggcagcgagcagctggtgagaagagagagctgtggcagctctgtgctgacagactttgagggcaaggatgtggccaccaaggtgggggaggcctggcaggacaggcctggggccccccggggcggccagggcgaccctgctgtgcccacccagcagcctgctgaccccagcaccccagagcagcagaacagccccagcggcagcgagcagtttgtgagaagagagagctgcaccagccgggtgcgcagccccagcagctgcatggtgacagtgacagtgacagccaccagcgagcagccccacatctacatcccagccccagccagcgagctggacagcagcagcaccaccaagggcatcctgtttgtgaaggagtatgtgaatgccagcgaggtgagcagcggcaagcctgtgtctgcccgctacagcaatgtgagcagcattgaagattcttttgccatggagaagaagccaccctgtggcagcaccccctacagcgagaggaccaccggcggcatctgcacctactgcaaccgggagatccgggactgccccaagatcaccctggagcacctgggcatctgctgccacgagtactgcttcaagtgtggcatctgcagcaagcccatgggagacctgctggaccagatcttcatccaccgggacaccatccactgtgggaagtgctatgagaagctgttctag

SEQ ID NO: 324965 - DNA, 1374 bp, Artificial Sequence
  derived and/or modified sequence
atgaccaccgaggactacaagaagctggccccctacaacatccggcgcagcagtactagcggcgacaccgaagaagaagaagaggaggaagttgtgcctttcagtagtgacgagcagaaacggcgctccgaggccgcgagcggcgtgctacgtcgtacagctccacgggagcactcctatgtgctcagcgccgcgaagaaaagtaccgggagccctacccaggaaacgcaggcaccgtttatcgccaagcgcgtggaagtggtggaagaagacggtccctccgagaagtctcaggacccacctgccctagcgcggtctacaccgggtagcaatagctcacggggagaagagatcgtgagattacaaatattaactccacgcgccggacttagactcgtcgccccagacgttgaaggaatgtctagctcggcaacttctgtatctgcggtgcccgcagaccgcaagagtaatagcactgccgcccaggaagacgccaaagccgacccaaagggagccctggcagattacgaggggaaagatgttgcaaccagggtgggagaagcttggcaagagcgacccggtgcccccagagggggccagggcgacccagctgtcccagctcagcagccagccgacccctcaaccccggagcggcaatctagcccttccggcagcgagcagctggtacgccgtgaatcatgtggatcctccgtgctaactgactttgaagggaaagatgtggccacgaaagtgggagaagcctggcaggacagaccaggcgccccacgaggcgggcagggcgacccagccgttccaacccaacaacccgcggatccttccacaccagaacagcagaattctcctagcgggagcgagcagtttgtgcggcgcgagagctgcacaagccgggttcgtagcccatccagctgtatggtcactgttaccgtcaccgccacctccgagcagccccatatctacatccctgccccagcctctgagctggacagctcaagcacaaccaaaggcatcctgttcgtgaaggaatacgtcaacgcctcggaagtcagctcaggcaagcctgtgagtgcccggtacagtaacgtgagctcaattgaagattcctttgccatggagaagaaaccaccgtgcggatccaccccctacagtgaacgcacgaccggcggcatctgcacttactgcaacagggagatcagagattgcccgaagatcaccctcgaacatctgggaatctgttgtcatgagtattgctttaaatgtggtatttgttcaaaacctatgggagacctgttagatcaaatattcatacacagagatacaatccactgtggcaagtgttacgagaagttgttctag

SEQ ID NO: 324966 - DNA, 1359 bp, Artificial Sequence
  derived and/or modified sequence
atgcagcggcaggccccctacaacatccggcggagcagcaccagcggagacaccgaggaagaagaggaagaggaagttgtgccattttcatcagacgagcaaaaaagaaggtctgaagctgcgtcaggagtactacgccgcacagccccccgggagcactcttacgttttatctgccgctaagaaatcgacaggctcccctacccaggaaacccaggccccatttattgccaagagagtcgaagttgtcgaagaggacggaccatctgagaaatcccaagacccccctgccctagcgagatccacgccaggctccaatagctcccggggggaggagatcgtcagattgcagatcctgacccctcgggctgggcttcggctggtagctccagacgtggagggcatgagcagtagcgccacctccgtgagtgctgttcctgcggaccggaagtcaaacagcaccgctgcccaggaagacgctaaggccgacccaaaaggcgcgctcgccgactatgagggcaaggacgttgccaccagagtaggcgaggcgtggcaggagaggcccggcgctcctagggggggacagggcgatccagccgttcccgctcaacagccagcggacccttccacacctgagaggcaatcttcacccagcggtagcgagcagctcgtacggcgggagagttgtggctcttcggtactcactgactttgaaggtaaagatgtggctactaaagtcggtgaagcctggcaggataggcccggggcccctagaggtggtcagggcgatccagcggtccccacacagcagcccgctgatccctcaacaccagaacagcagaatagcccctccggctcggagcaatttgtgcgaagagagtcttgtactagtcgcgtgagaagcccctctagttgtatggtcactgtaacagtgaccgctacatccgaacagccccacatttatatccctgcaccggcatccgaactggacagctctagcactacaaaaggtatcctgttcgtcaaagagtacgtgaacgctagcgaggtcagctctggcaaacccgtatctgcacggtactccaacgtgtcatcaatcgaggacagttttgccatggaaaagaaaccaccctgcggaagcaccccttattccgaacgcactacaggcggtatttgtacatattgcaaccgggagatcagggactgccccaagatcaccctggagcacctcggcatttgctgccacgaatattgttttaagtgtggcatttgttccaaacctatgggtgatttgttggaccaaatttttatccatcgggatacaatacactgcggcaagtgctacgagaagctgttttag

SEQ ID NO: 324967 - DNA, 414 bp, Artificial Sequence
  derived and/or modified sequence
tgagtgctgccccggcggcaccggcaccggctgagccggcggggctggcggtggtggaagagaactggcctgcttcgccgggcaaggactcatcttctctggcaggatccactgttggcgcagactgtccggatggaggcgggccccaagcggcttggtcagttcggaagttcggcttgtcaggtctgcttggcaccgttaggggcccgctccagtggtttaccacaggctaccaagacacgcaggcccccggcacctgagagtagccggggcacatggcttgtgcgaagattaagcggtccccctacccagatgctgcaggcccccgtgcccctgcagagcttattatccctgttaatcgggagggccactgcgcagcaacctcgcaggatgcagcgccagactcagaggtag

SEQ ID NO: 324968 - DNA, 1374 bp, Artificial Sequence
  derived and/or modified sequence
atgacaaccgaagattataagaaattggcaccatacaacattagaaggtcttccacaagcggcgacaccgaggaggaagaagaagaggaagtggtgccgttttcctctgatgagcagaaacgccgttcggaggccgcttcaggcgtgctccggaggactgccccaagagagcactcctacgttctatctgccgcaaaaaaaagcactggtagccccacacaggaaacccaggccccattcatagcaaagcgtgttgaggtcgtcgaagaggatggccctagcgaaaagagccaggatccacctgccctcgccagatccacgcccggatcaaactcttctcgcggagaagagatcgttcggctccaaatcctgacacctcgggcagggctgcggctggttgcccctgacgtagaggggatgtcctcttctgcaacatctgtgtcggcggttcctgctgataggaagtcaaacagcactgctgcccaggaggacgccaaggccgatccaaagggcgcactggcagactacgaagggaaggatgtggcaacccgggttggggaagcgtggcaggagaggccgggagcccctcgcggaggacagggagatcctgctgttcccgcacagcaacccgcagaccctagcacacctgaacggcaatccagcccatccggatcggagcagctggtaaggcgggaaagttgtggatcaagcgtcctgaccgatttcgaggggaaggacgtggccaccaaggtgggggaggcctggcaggatcgtcctggagcgccaaggggcggacaaggagaccctgccgtccccacgcagcaacccgcagacccctccacccctgaacagcagaattctccctcaggctctgaacagtttgtgagaagagagtcctgtacctcacgagtcaggagcccctcatcttgcatggttaccgttacggtgactgcaacgtccgaacagccccatatctacatcccagcccctgccagtgaactggacagttcatctacaacaaaagggatcttgttcgtgaaggagtacgtgaacgcctccgaagtgagttccggcaaacccgtgagcgctagatacagcaacgtaagctcaattgaagacagcttcgccatggagaagaaaccaccatgcgggagtactccgtacagcgaaagaacaaccggtggaatctgtacatattgcaatagggagattagagactgccccaagatcacactggagcatttgggcatctgttgccatgaatactgctttaagtgtgggatttgcagcaaaccgatgggcgacctcctagaccagattttcattcatagggacactattcactgtggaaaatgctatgaaaagctgttctag

SEQ ID NO: 324969 - DNA, 1359 bp, Artificial Sequence
  derived and/or modified sequence
atgcaacgccaggctccttataacattcgaagaagttcaacatctggcgacaccgaagaggaagaggaggaggaggtggtaccattctcatccgacgaacaaaagcgaagaagtgaggcagctagcggtgttctgcgtcggaccgccccacgggaacattcttatgtgctttccgcagccaagaagtcaaccgggagtcctacccaagagacccaggctcctttcatcgccaagagagtggaagtggtagaagaagatgggccttccgagaaatcccaggaccctccagctctggcacgaagcactccgggaagtaatagctcccgcggagaagagattgtaaggttgcagatcttgactcctagggctggcctccggctggtggccccagacgtggaaggaatgagctcctctgcaacctccgtgagcgccgtgcctgcggatagaaagtcaaattccacagctgcccaggaggacgcgaaggcagaccctaagggcgcacttgcagattacgaagggaaggatgtggctacacgtgttggtgaagcctggcaggagaggccgggagctccaagaggcggacagggagatcccgctgtgcccgctcagcagccggctgaccccagcactccagagcgtcaatcaagcccttcaggttctgaacagctggtcaggagagagtcatgcggctcatcggtgctgactgacttcgaaggcaaagacgttgccaccaaagtgggagaggcctggcaagataggccgggagctccacggggaggacagggcgatcctgcagttcctacccaacaacccgctgacccaagcacacctgagcagcagaacagtcctagtggctcagagcagtttgtaagaagagaatcctgtacctcacgggttcggtcacccagtagttgcatggtcaccgtcactgttacggcaaccagtgaacagccgcatatatacatacctgcgcctgcgtcagaactcgattccagctccacaactaaagggatcctatttgttaaagagtatgtgaatgccagcgaggtgtcaagtggcaagcctgtgagcgcacggtatagtaacgtgagctcaatcgaggactcctttgccatggagaagaaacctccctgcggtagcaccccttatagcgaaagaaccaccggaggtatctgtacatactgcaacagagagatccgagactgtccaaagatcactcttgaacacttggggatatgctgccacgagtactgtttcaaatgtgggatatgctcaaagcccatgggggaccttctggatcaaattttcatacatcgtgacacaattcactgtggtaagtgctatgagaaactattctag

SEQ ID NO: 324970 - DNA, 414 bp, Artificial Sequence
  derived and/or modified sequence
tgagttcttccgcgacgccatcgacatcggctgagcagaagaggctggcggtggtggaagcggaccggactcttgcgaagagccagaactcatctgctgtggcaggatccccttttagcccaaacagtcagaatggaggccggaccaaagaggctaggtcaatttggcagctcagcatgtcaagtgtgtctggcaccacttggggcaaggtcttcgggcctgccgcaggcaaccaagactcgaagacccccagctcctgaaagctcaagaggaacctggttagtacggcgtctgagcggaccccctactcagatgcttcaggcgcctgtgcccctgcagtccctgctgtccttactgataggacgcgctaccgcgcagcagcctcgtcgcatgcagaggcagacacagagatag

SEQ ID NO: 324971 - DNA, 4034 bp, Artificial Sequence
  derived and/or modified sequence
cagaagccctgctgaatcaagtgagaggagagctgcggagcaatcaccatgagtatctcagctcttggaggccgcaccaaagggaagcctctgccaccaggcgaggaggagcgcaataacgttctcaagcagatgaaagtgcgaaccacgctgaagggggacaagagctggattaccaagcaggatgaatcggagggtcgcaccatagagctgccctcaggccggagtcgcgccacatccttttcatcagctggggaggttccgaagcctaggcctccgagcacaagggctcccactggctacatcatccggggagtgttcaccaagcccatagacagctcttcccagccccagcagcagttccccaaggccaacgggactccaaaaagtgctgccagtctggtgagaacagctaacgctggtcctccccgcccctcctcctctggctacaagatgaccactgaggattacaagaagctggcaccctacaatatcaggcgcagctctacatcaggggacaccgaggaggaggaggaggaggaggtggtgccattctcctcagatgaacagaaacggaggtcagaggctgcaagcggtgttctgaggaggacagctccccgggagcactcctacgtcctgtcagcggccaagaagagcactggcagtcctacccaggagacacaggcaccgtttatcgcgaagagggtggaggtggtggaagaggacgggccttctgagaagagccaggacccacctgctctggcaagatccactcctggctcaaacagctcaagaggtgaggaaattgtccgcctgcagatcctgacacccagggcaggactccgcctggtggccccagacgtggaaggcatgagctccagtgccacttcagtctctgctgtccctgctgataggaagagcaacagcacagcagcccaggaggatgcaaaggcagacccaaagggggccttggctgattatgaggggaaggatgtggccaccagggtcggagaggcctggcaggagaggcctggagctccaagaggtggccaaggagacccagctgtacccgctcagcaacctgcagatcccagcaccccagagcggcagagcagccccagcggatctgagcaacttgtcagacgagagagttgtggcagcagcgtgttgactgattttgaggggaaggatgtggccaccaaggtcggagaggcctggcaggacaggcctggagccccaagaggtggccaaggagacccagctgtacccactcagcaacctgcagatcccagtaccccagaacagcagaacagccccagcggatctgagcaattcgtcagacgagagagctgcaccagcagggtgaggagcccctcgagctgcatggtcactgttactgtcactgccacatctgagcagcctcacatttatattccagcccccgcaagtgaattggactccagctctaccaccaaagggattctcttcgtgaaggagtacgtgaatgctagtgaagtgtcttctgggaagccagtatctgcacgctatagcaacgtcagcagcattgaggactcattcgccatggagaagaagcctccatgtggcagcactccatactctgagaggacaactggagggatctgtacttactgcaaccgtgagatccgagactgtccaaagattaccctagaacatcttggtatctgctgccatgaatattgctttaagtgtgggatttgcagtaaaccgatgggcgatctcctggatcagatcttcattcaccgtgacaccattcactgtgggaaatgctatgagaagctcttctagcgaccccccaccgccaggctgatcagaagctgatgactcgtggacaaatttggctgtccccagttttgccccaagttgctgtctccccttccctcacctcctccctccctgtttgatttcttcatgcttttgcccttctcaagttgaagttgcatacatccaatatcgtatcttaatgatgctatgataattgcttgtgtgtgtagcttcttgtagcttagaaagcgctttatgcccatgatgtcatttcaggctcaaccaaagaggatcaaacaggaattccatcttggcttccctaagacagattggctttctaatgagtttaagtgggcagaagtgtagggttcagtgtgtcctgactcccttgaggcttataatgggccaagttgaagactgttgatgatccctggtgggtaaattgcagacatcaaatgctagggattggcataggctagtgtttagcttgtctatttgccatatctattttttttaaatttccatacacttgtaaaagtagttagttgcttttgattgagttatatagcagtttttcatttggtcttccactcacctttcactatatttgagtgttcccttacaggtatgttggcatgtgttggaaaatttacacaattaggtttaaattcagtaggatgtgattttaggatgctactgatcaaagtgatatctgtgtctgttggaatcttgatagctgattaatttgccctcaattctgctccctgaacttcacacataaatcttcccaagtgggttttagggtgtatagatcccagcaggattaaggaggtggaaaagcagctaacatttcttgaggctctaccacatagcaggcactgtcacagagtaatggcattaatccccataataatcctgtgaaggtgatattctcatcccatcttagacatgaggatattggaactcagagaggtggctattgcattgcgcagaacgctacagagcccatgctcttcccagagcagcacccacaaaagcaagcattgattttgtgctcagtgtgtgccaagcactgtgcagagggtacacagttcctgccaggttaacaccctcccttcaggcctcccaaaggcataggcttgcaaagagcagaaggtgtgaaatcacactcttcctctgggcatcctggatccctgaattatccccccccccatgaagtacttcaagggccaagctgcccctttccctcctctccgcccatgaaaatgcctccaaactgagatgctttcagctgagaacagatttgactcacagacattaccaaagaggagcttgtgaatccaggaaaagctccagggggctagctgatctgagcagagagctttcagtgacccattttcctgtctagactctgccttaagctagtggcaactgctggggccccaggtacttgggacatggaaactcgttggatggctgggcagatgtaagcctgtccatgcagtcagccgatcctctgctcaggttcagctggactctgccatctgtgggcccagcatcactctgtaagttccttgaaaggaagaacaaccttagagtatttctgatacaaaatgagggcctctgctcttgatttaattataaaatgtctacgtctttctccagtttctgagccctatgcacattggcttgtgggcttgttcttcctgccaaatgatcagagaggaacattccatttatttgtagtggatttcctctggagggcatgtacccacactaaataccaactgctcttcctcagctgtagtccccaacatcagacttggcacgtggtggacactaacacacaggcactcaatgaatgagtgaaggaaataaaagtcaccccgttggtgagaggtgctatccctgagtctcagtgcaggaccagtggatgaaaggcaaggtaaagaggcccaagataggctggcttcccccgttcaaggtatagtctgcctttaagggagttttagaaccaacatgcaagacattgaaagaaatcttgcaagagccattattgacttagatccaaaacagcctctctcatgtctaaaaaggcacagaattttgcagatctgaggaagagggatgcattacctttttgcttcttttcaattgcttagtgtttctaatcatacttaatccacactaatgtgcgcaattataataaatggtaagatatcacatgtgtc

SEQ ID NO: 324972 - DNA, 3607 bp, Artificial Sequence
  derived and/or modified sequence
gctacaagatgaccactgaggattacaagaagctgtgagtatgcaacgccaggcaccctacaatatcaggcgcagctctacatcaggggacaccgaggaggaggaggaggaggaggtggtgccattctcctcagatgaacagaaacggaggtcagaggctgcaagcggtgttctgaggaggacagctccccgggagcactcctacgtcctgtcagcggccaagaagagcactggcagtcctacccaggagacacaggcaccgtttatcgcgaagagggtggaggtggtggaagaggacgggccttctgagaagagccaggacccacctgctctggcaagatccactcctggctcaaacagctcaagaggtgaggaaattgtccgcctgcagatcctgacacccagggcaggactccgcctggtggccccagacgtggaaggcatgagctccagtgccacttcagtctctgctgtccctgctgataggaagagcaacagcacagcagcccaggaggatgcaaaggcagacccaaagggggccttggctgattatgaggggaaggatgtggccaccagggtcggagaggcctggcaggagaggcctggagctccaagaggtggccaaggagacccagctgtacccgctcagcaacctgcagatcccagcaccccagagcggcagagcagccccagcggatctgagcaacttgtcagacgagagagttgtggcagcagcgtgttgactgattttgaggggaaggatgtggccaccaaggtcggagaggcctggcaggacaggcctggagccccaagaggtggccaaggagacccagctgtacccactcagcaacctgcagatcccagtaccccagaacagcagaacagccccagcggatctgagcaattcgtcagacgagagagctgcaccagcagggtgaggagcccctcgagctgcatggtcactgttactgtcactgccacatctgagcagcctcacatttatattccagcccccgcaagtgaattggactccagctctaccaccaaagggattctcttcgtgaaggagtacgtgaatgctagtgaagtgtcttctgggaagccagtatctgcacgctatagcaacgtcagcagcattgaggactcattcgccatggagaagaagcctccatgtggcagcactccatactctgagaggacaactggagggatctgtacttactgcaaccgtgagatccgagactgtccaaagattaccctagaacatcttggtatctgctgccatgaatattgctttaagtgtgggatttgcagtaaaccgatgggcgatctcctggatcagatcttcattcaccgtgacaccattcactgtgggaaatgctatgagaagctcttctagcgaccccccaccgccaggctgatcagaagctgatgactcgtggacaaatttggctgtccccagttttgccccaagttgctgtctccccttccctcacctcctccctccctgtttgatttcttcatgcttttgcccttctcaagttgaagttgcatacatccaatatcgtatcttaatgatgctatgataattgcttgtgtgtgtagcttcttgtagcttagaaagcgctttatgcccatgatgtcatttcaggctcaaccaaagaggatcaaacaggaattccatcttggcttccctaagacagattggctttctaatgagtttaagtgggcagaagtgtagggttcagtgtgtcctgactcccttgaggcttataatgggccaagttgaagactgttgatgatccctggtgggtaaattgcagacatcaaatgctagggattggcataggctagtgtttagcttgtctatttgccatatctattttttttaaatttccatacacttgtaaaagtagttagttgcttttgattgagttatatagcagtttttcatttggtcttccactcacctttcactatatttgagtgttcccttacaggtatgttggcatgtgttggaaaatttacacaattaggtttaaattcagtaggatgtgattttaggatgctactgatcaaagtgatatctgtgtctgttggaatcttgatagctgattaatttgccctcaattctgctccctgaacttcacacataaatcttcccaagtgggttttagggtgtatagatcccagcaggattaaggaggtggaaaagcagctaacatttcttgaggctctaccacatagcaggcactgtcacagagtaatggcattaatccccataataatcctgtgaaggtgatattctcatcccatcttagacatgaggatattggaactcagagaggtggctattgcattgcgcagaacgctacagagcccatgctcttcccagagcagcacccacaaaagcaagcattgattttgtgctcagtgtgtgccaagcactgtgcagagggtacacagttcctgccaggttaacaccctcccttcaggcctcccaaaggcataggcttgcaaagagcagaaggtgtgaaatcacactcttcctctgggcatcctggatccctgaattatccccccccccatgaagtacttcaagggccaagctgcccctttccctcctctccgcccatgaaaatgcctccaaactgagatgctttcagctgagaacagatttgactcacagacattaccaaagaggagcttgtgaatccaggaaaagctccagggggctagctgatctgagcagagagctttcagtgacccattttcctgtctagactctgccttaagctagtggcaactgctggggccccaggtacttgggacatggaaactcgttggatggctgggcagatgtaagcctgtccatgcagtcagccgatcctctgctcaggttcagctggactctgccatctgtgggcccagcatcactctgtaagttccttgaaaggaagaacaaccttagagtatttctgatacaaaatgagggcctctgctcttgatttaattataaaatgtctacgtctttctccagtttctgagccctatgcacattggcttgtgggcttgttcttcctgccaaatgatcagagaggaacattccatttatttgtagtggatttcctctggagggcatgtacccacactaaataccaactgctcttcctcagctgtagtccccaacatcagacttggcacgtggtggacactaacacacaggcactcaatgaatgagtgaaggaaataaaagtcaccccgttggtgagaggtgctatccctgagtctcagtgcaggaccagtggatgaaaggcaaggtaaagaggcccaagataggctggcttcccccgttcaaggtatagtctgcctttaagggagttttagaaccaacatgcaagacattgaaagaaatcttgcaagagccattattgacttagatccaaaacagcctctctcatgtctaaaaaggcacagaattttgcagatctgaggaagagggatgcattacctttttgcttcttttcaattgcttagtgtttctaatcatacttaatccacactaatgtgcgcaattataataaatggtaagatatcacatgtgtca

SEQ ID NO: 324973 - DNA, 411 bp, Artificial Sequence
  derived and/or modified sequence
cagtcctacccaggagacacaggcaccgtttatcgcgaagagggtggaggtggtggaagaggacgggccttctgagaagagccaggacccacctgctctggcaagatccactcctggctcaaacagtgcggatggaggcaggaccaaagcgtctcgggcaatttggatcgagtgcctgccaagtatgcctagccccgctgggagccaggagctcaggtcttccccaggcaacaaagacaaggaggccccctgctccagagagctccagagggacttggctggtgaggaggctttcagggcccccaacacagatgctgcaagctccagtgccacttcagtctctgctgtccctgctgataggaagagcaacagcacagcagcccaggaggatgcaaaggcagacccaaaggg

SEQ ID NO: 324974 - DNA, 636 bp, Artificial Sequence
  derived and/or modified sequence
gaggaggccttcagagcccccaacaccgacgccgccagaagcagcgcccagctgagcgacggcaacgtgggcagcggcgccaccggcagcagacccgagggcctggccgccgtggacatcggcagcgagagaggcagactgtgcgccgccgccagcttcgccagcttcctggaggaccaggacggccacagcgccaacagccagagctgcaagcccagacccgccgccatcagcagcagcgccaccagcgtgagcgccgtgcccgccgacagaaagagcaacagcaccgccgcccaggaggacgccaaggccgaccccaagggcgccctggccgactacgagggcaaggacgtggccaccagagtgggcgaggcctggcaggagagacccggcgcccccagaggcggccagggcgaccccgccgtgcccgcccagcagcccgccgaccccagcacccccgagagacagagcagccccagcggcagcgagcagctggtgagaagagagagctgcggcagcagcgtgctgaccgacttcgagggcaaggacgtggccaccaaggtgggcgaggcctggcaggacagacccggcgcccccagaggcggccagggcgaccccgccgtgcccacccagtag

SEQ ID NO: 324975 - DNA, 636 bp, Artificial Sequence
  derived and/or modified sequence
gaagaagcttttcgagcccctaacactgacgcagcgcgatcttctgcccagcttagcgatggaaatgttggctctggtgccaccggaagccggcctgaggggctcgccgctgtggacatcggaagcgaaagaggtcggctctgtgccgccgcgtcttttgcatcctttctcgaggatcaagacggccactcagccaatagtcagagctgtaagcctcggcctgccgctatctcctcatccgccacgagcgtctcagcggtgcctgccgaccgcaagtcgaattcgacagcagcgcaggaagacgctaaagcggaccccaaaggagcgctggcagactatgaaggcaaagacgttgccacaagggtgggcgaagcttggcaggagcggcctggcgccccacgcggtggccaaggggatccagccgttccggcccagcagcccgctgatccatccactcccgaacgccagagctctccctcagggtccgagcagctggtgcggagggaatcttgcggcagtagtgtcttgacggatttcgaaggtaaggatgtggccaccaaagttggtgaagcttggcaagacagacccggcgctccacgtggcgggcaaggcgatccggcagtccctactcaatag

SEQ ID NO: 324976 - DNA, 636 bp, Artificial Sequence
  derived and/or modified sequence
gaggaggccttccgggcccccaacacagatgctgcccggagcagcgcccagctgagtgatggaaatgtgggcagcggggccaccggcagcaggcctgagggcctggccgctgtggacatcggcagcgagcggggccgcctgtgtgccgccgccagctttgccagcttcctggaggaccaggacggccacagcgccaacagccagagctgcaagcccaggcctgctgccatcagcagcagcgccacctctgtgtctgctgtgcctgctgacaggaagagcaacagcacagctgcccaggaggatgccaaggctgaccccaagggggccctggccgactatgagggcaaggatgtggccaccagggtgggggaggcctggcaggagaggcctggggccccccggggcggccagggcgaccctgctgtgcctgcccagcagcctgctgaccccagcaccccagagcggcagagcagccccagcggcagcgagcagctggtgagaagagagagctgtggcagctctgtgctgacagactttgagggcaaggatgtggccaccaaggtgggggaggcctggcaggacaggcctggggccccccggggcggccagggcgaccctgctgtgcccacccagtag

SEQ ID NO: 324977 - DNA, 636 bp, Artificial Sequence
  derived and/or modified sequence
gaggaggccttccgggcccccaacaccgacgccgcccggagcagcgcacagctgagtgacggcaacgtgggttccggcgcgaccgggtctcgacctgaagggcttgctgcggtggacataggaagtgagaggggcagattatgtgcagctgcaagtttcgcctccttcctggaggaccaggacggccactcagctaattcccaatcatgcaaaccaagaccagcagcaatctccagctccgctacctcagtgagcgcagtccctgcggaccgcaaatccaattcaactgcggctcaggaagatgcgaaagcggaccctaagggagcccttgccgactacgagggcaaagacgtggctactcgagttggcgaagcctggcaggagagacccggggccccccggggaggccaaggcgacccagctgtgccagctcagcagccggctgatccctcaactccagagcggcagtcctccccctctggctctgagcagctggtacgcagagaaagttgtgggtcttctgtgttaacagatttcgagggaaaagacgtggcgaccaaggtcggggaggcctggcaagataggcccggagcaccaaggggcgggcaaggtgatccagctgtccccactcagtag

SEQ ID NO: 324978 - DNA, 636 bp, Artificial Sequence
  derived and/or modified sequence
gaggaggcgtttagggcccctaataccgacgccgctcggtcctccgcccagctgtcagacggaaacgtcggctccggagctaccgggagtcggcctgaaggcctcgctgctgtagacatcggcagtgagagggggagactctgtgccgctgcctcctttgcctctttcctggaagaccaggatggccactcggccaatagccaaagctgtaagcctagacctgctgcaatctcctcttcagccacgtcagtgtcagccgtgcctgcagacagaaagtccaacagcaccgctgcacaggaggatgcaaaggcagatccaaaaggagccctggccgattacgagggtaaggacgtcgctacccgagtgggtgaggcatggcaggagaggccgggtgctccacgagggggacagggcgacccggcagtgccagcccagcagccggcagacccatccacacccgagagacagtcttcaccatctgggtctgagcagctcgtgcggagagaatcctgcggaagctcagtgttgaccgattttgaaggcaaagacgtggcaacaaaggtcggagaagcctggcaggataggcctggcgctcctcggggaggccaaggagaccctgctgtacccacccaatag

SEQ ID NO: 324979 - DNA, 633 bp, Artificial Sequence
  derived and/or modified sequence
gaggaggctttcagggcccccaacacagatgctgcaaggtcaagtgcacagttgagtgatggcaatgtgggatccggagccacgggctcccggcctgaaggcttggctgcagtagacatcggctccgagagaggaaggctgtgtgcagctgctagctttgcctctttcctggaagaccaggatgggcacagtgccaactctcagtcctgcaagcctagaccagcagccatcagctccagtgccacttcagtctctgctgtccctgctgataggaagagcaacagcacagcagcccaggaggatgcaaaggcagacccaaagggggccttggctgattatgaggggaaggatgtggccaccagggtcggagaggcctggcaggagaggcctggagctccaagaggtggccaaggagacccagctgtacccgctcagcaacctgcagatcccagcaccccagagcggcagagcagccccagcggatctgagcaacttgtcagacgagagagttgtggcagcagcgtgttgactgattttgaggggaaggatgtggccaccaaggtcggagaggcctggcaggacaggcctggagccccaagaggtggccaaggagacccagctgtacccactcag

SEQ ID NO: 324980 - protein, 261 aa, Artificial Sequence
  derived and/or modified sequence
MNPEWGQAFVHVAVAGGLCAVAVFTGIFDSVSVQVGYEHYAEAPVAGLPAFLAMPFNSLVNMAYTLLGLSWLHRGGAMGLGPRYLKDVFAAMALLYGPVQWLRLWTQWRRAAVLDQWLTLPIFAWPVAWCLYLDRGWRPWLFLSLECVSLASYGLALLHPQGFEVALGAHVVAAVGQALRTHRHYGSTTSATYLALGVLSCLGFVVLKLCDHQLARWRLFQCLTGHFWSKVCDVLQFHFAFLFLTHFNTHPRFHPSGGKTR

SEQ ID NO: 324981 - protein, 66 aa, Artificial Sequence
  derived and/or modified sequence
MNPEWGQAFVHVAVAGGLCAVAVFTGIFDSVSVQVGYEHYAEAPVAGLPAFLAMPFNSLVNMAYTL

SEQ ID NO: 324982 - protein, 33 aa, Artificial Sequence
  derived and/or modified sequence
MNPEWGQAFVHVAVAGGLCAVAVFTGIFDSVSV

SEQ ID NO: 324983 - DNA, 786 bp, Artificial Sequence
  derived and/or modified sequence
atgaaccccgagtggggccaggccttcgtgcacgtggccgtggccggcggcctgtgcgccgtggccgtgttcaccggcatcttcgacagcgtgagcgtgcaggtgggctacgagcactacgccgaggcccccgtggccggcctgcccgccttcctggccatgcccttcaacagcctggtgaacatggcctacaccctgctgggcctgagctggctgcacagaggcggcgccatgggcctgggccccagatacctgaaggacgtgttcgccgccatggccctgctgtacggccccgtgcagtggctgagactgtggacccagtggagaagagccgccgtgctggaccagtggctgaccctgcccatcttcgcctggcccgtggcctggtgcctgtacctggacagaggctggagaccctggctgttcctgagcctggagtgcgtgagcctggccagctacggcctggccctgctgcacccccagggcttcgaggtggccctgggcgcccacgtggtggccgccgtgggccaggccctgagaacccacagacactacggcagcaccaccagcgccacctacctggccctgggcgtgctgagctgcctgggcttcgtggtgctgaagctgtgcgaccaccagctggccagatggagactgttccagtgcctgaccggccacttctggagcaaggtgtgcgacgtgctgcagttccacttcgccttcctgttcctgacccacttcaacacccaccccagattccaccccagcggcggcaagaccagatag

SEQ ID NO: 324984 - DNA, 201 bp, Artificial Sequence
  derived and/or modified sequence
atgaaccccgagtggggccaggccttcgtgcacgtggccgtggccggcggcctgtgcgccgtggccgtgttcaccggcatcttcgacagcgtgagcgtgcaggtgggctacgagcactacgccgaggcccccgtggccggcctgcccgccttcctggccatgcccttcaacagcctggtgaacatggcctacaccctgtag

SEQ ID NO: 324985 - DNA, 102 bp, Artificial Sequence
  derived and/or modified sequence
atgaaccccgagtggggccaggccttcgtgcacgtggccgtggccggcggcctgtgcgccgtggccgtgttcaccggcatcttcgacagcgtgagcgtgtag

SEQ ID NO: 324986 - DNA, 786 bp, Artificial Sequence
  derived and/or modified sequence
atgaatcctgaatggggccaggcttttgttcatgttgctgtagccggaggactgtgcgccgttgccgtgttcacaggcatctttgattccgtcagcgtgcaagtaggctacgagcactacgccgaagcaccagttgccggactacctgcctttctcgccatgccatttaattcactggtgaacatggcttacaccctgctgggtttaagctggctgcacagggggggggcgatgggccttgggcctaggtaccttaaggacgtcttcgccgcaatggcgctgctgtatggccctgtacaatggctccgactttggacccagtggagaagggccgcagttctggatcagtggctgaccctgccaatctttgcttggcccgtggcctggtgtttgtacttggaccgtggatggcgtccctggctctttctgtctctggagtgtgtgtccctagctagctacggcctggctcttctgcacccccagggctttgaggttgctctgggagctcacgtggtcgctgccgtaggtcaggctcttaggacccataggcactatggatcaaccacctccgccacataccttgctttaggagtgttgtcctgtctcggttttgtggttctcaagctttgcgaccaccaactcgcccgctggcggcttttccagtgtctgacagggcacttttggagcaaagtgtgtgacgttctgcagttccacttcgctttcctcttcctgacgcactttaacactcaccctcgatttcacccaagcggtggtaagactagatag

SEQ ID NO: 324987 - DNA, 201 bp, Artificial Sequence
  derived and/or modified sequence
atgaatcctgaatggggccaggcctttgtgcatgtggcagtggccggaggtctctgcgccgtcgctgtgttcactgggatttttgactctgtctcagttcaggttggctatgagcactatgcagaggcccccgtggccggcttaccggcgttcttggccatgccattcaatagcctggtcaatatggcctataccctgtag

SEQ ID NO: 324988 - DNA, 102 bp, Artificial Sequence
  derived and/or modified sequence
atgaacccggaatggggacaagcgttcgttcatgttgcagtggctggaggattatgcgcagtcgctgtttttactgggattttcgacagtgtgtctgtttag

SEQ ID NO: 324989 - DNA, 786 bp, Artificial Sequence
  derived and/or modified sequence
atgaaccctgagtggggccaggcctttgtgcacgtggccgtggccggcggcctgtgtgctgtggccgtgttcaccggcatctttgacagcgtgtctgtgcaggtgggctatgagcactatgcagaggcccctgtggccggcctgcctgccttcctggccatgcccttcaacagcctggtgaacatggcctacaccctgctgggcctgtcctggctgcacagaggaggagccatgggcctgggcccccgctacctgaaggatgtgtttgctgccatggccctgctgtatggccctgtgcagtggctgcggctgtggacccagtggaggagagctgctgtgctggaccagtggctgaccctgcccatctttgcctggcctgtggcctggtgcctgtacctggaccggggctggaggccctggctgttcctgagcctggagtgtgtgtccctggccagctatggcctggccctgctgcacccccagggctttgaggtggccctgggcgcccacgtggtggccgctgtgggccaggccctgcggacccaccgccactacggcagcaccaccagcgccacctacctggccctgggcgtgctgagctgcctgggctttgtggtgctgaagctgtgtgaccaccagctggcccgctggaggctcttccagtgcctgaccggccacttctggagcaaggtgtgtgatgtgctgcagttccactttgccttcctgttcctgacccacttcaacacccacccccgcttccaccccagcggcggcaagaccaggtag

SEQ ID NO: 324990 - DNA, 201 bp, Artificial Sequence
  derived and/or modified sequence
atgaaccctgagtggggccaggcctttgtgcacgtggccgtggccggcggcctgtgtgctgtggccgtgttcaccggcatctttgacagcgtgtctgtgcaggtgggctatgagcactatgcagaggcccctgtggccggcctgcctgccttcctggccatgcccttcaacagcctggtgaacatggcctacaccctgtag

SEQ ID NO: 324991 - DNA, 102 bp, Artificial Sequence
  derived and/or modified sequence
atgaaccctgagtggggccaggcctttgtgcacgtggccgtggccggcggcctgtgtgctgtggccgtgttcaccggcatctttgacagcgtgtctgtgtag

SEQ ID NO: 324992 - DNA, 786 bp, Artificial Sequence
  derived and/or modified sequence
atgaaccccgagtggggccaggccttcgtgcacgtggccgtggccgggggcctctgtgcagttgcagtgttcacgggtattttcgacagcgtgtcggtgcaggttgggtatgagcactatgctgaggcaccagttgccgggctgcccgcattcctggcaatgccttttaattctctggtgaatatggcctataccctgcttggcctcagttggctgcaccggggcggggcgatgggcctcggccctcggtacctgaaagatgtgttcgctgccatggccttgctgtatggtcctgtacagtggctccgtctctggacccagtggcggcgggccgccgtacttgaccagtggctgactctgcctatcttcgcttggcccgtggcatggtgtttgtatttggatcgtggatggcggccttggctgttcctgagtctcgagtgtgtgtcccttgctagctatggcctggccctcttgcatccacaggggtttgaagtggcactgggcgctcatgtggtcgctgcagtgggacaggccctgaggacacatcggcactacggttctaccacttcggctacttacctggcgctgggcgtgctcagctgccttgggtttgtcgttctcaagctgtgcgatcatcagctggcccggtggcgactgttccagtgtctgacaggacacttctggtcaaaggtgtgcgatgtgttgcagttccattttgcttttctgtttctaacccatttcaatactcatccccgattccaccccagtggcgggaagacccgctag

SEQ ID NO: 324993 - DNA, 201 bp, Artificial Sequence
  derived and/or modified sequence
atgaaccccgagtggggccaggccttcgtgcacgtggccgtggccggtggcctttgtgccgttgctgtgtttacagggatattcgacagcgtctccgtgcaggtcggctacgagcactatgcagaagcccccgtggccgggctgcctgccttcctggctatgcctttcaacagcctcgtgaacatggcatatactttgtag

SEQ ID NO: 324994 - DNA, 102 bp, Artificial Sequence
  derived and/or modified sequence
atgaaccccgagtggggccaggccttcgtgcacgtggccgtggccggcggtctgtgtgccgtggccgtgttcacaggaatattcgattccgtcagtgtttag

SEQ ID NO: 324995 - DNA, 786 bp, Artificial Sequence
  derived and/or modified sequence
atgaaccccgagtggggccaggcgtttgtacatgtcgcggtggctgggggactttgtgccgtggcagtctttacgggaatctttgactccgttagtgtgcaggttggatacgagcactacgcagaggctcctgtcgccggactgccggcttttctagccatgccttttaattcattggtaaacatggcatacaccctcctaggcctgtcttggttacacaggggcggagctatggggttgggcccacgctaccttaaggatgtatttgcagcgatggccctgctgtacggtcccgtgcaatggctgcggctgtggacacagtggagacgggctgctgttctcgaccaatggctcacactccctatattcgcatggcctgtggcctggtgcctttacctggatagaggctggagaccatggctgtttctgagcctggagtgtgtgagtcttgcatcttacgggcttgccctactgcacccacagggcttcgaggttgcccttggagcacatgtggtagctgccgtcggccaggcgcttcgcacacacagacattatggatctaccacctccgcgacttaccttgccctaggagttctgagctgtctgggtttcgtggtgctgaaactgtgtgatcatcagctggccaggtggagactattccagtgtctgacagggcacttttggagcaaggtctgcgacgtcttgcagtttcactttgcatttctcttcctgactcacttcaatacgcaccccaggttccacccctccggaggaaagactaggtag

SEQ ID NO: 324996 - DNA, 201 bp, Artificial Sequence
  derived and/or modified sequence
atgaaccccgagtgggggcaagcttttgttcacgtggccgtggccggaggactgtgtgccgtggccgtgttcacaggcatttttgatagcgtctccgtccaagtcggttatgagcactacgcagaagcgcctgtcgctggattgccagcatttctggccatgccttttaacagcttggtcaacatggcctatactctctag

SEQ ID NO: 324997 - DNA, 102 bp, Artificial Sequence
  derived and/or modified sequence
atgaaccctgagtgggggcaggctttcgtgcatgtggcggtggccggtggcctctgtgcagtagctgtgttcaccgggattttcgactctgtcagcgtttag

SEQ ID NO: 324998 - DNA, 1880 bp, Artificial Sequence
  derived and/or modified sequence
ccggggttggcgaacagccactgcagccgcgcctgcggccgggaagcgagcattttcgcgccctgcacacccagcagccgcaggaggcggcccgaggcgcgccgcgggggagccgggggcggggcgacagtgggaggcgacgcagccgagcgccggcgcccgggggtggagcctccgcccgctcccaggctcccaggctgcggggcccgccctcgggcgccaccgcctccgcccgcgccgcagcaaaatgagccgggccgcgcgccccagaccgccgcgcgctcggccgcccccactgccgagaggcccgcagtcgggccggtggcgcacgagccgggcgggcgaccgcgggaggcgtccgcgtcatctcgcgtcacctcgccccgcccgcttcccaggcttcgagtcccgccctgcgcgcaggcgcaccggcgctgctcggatcctcccttttcggagatttgaatttcccccagcgaggcgagtgaggcgaaatacccgtatggtgatagctggccttttcgcgccaatactgaaaaaggcagaacgttcctccgctggcgccagccaatcagcaggactcctgccttccttcggggcaaggtcgcagcatctgcctcggaaatcacgaaatcacggggcttctttctgctggctcagccgggaggcccagagtgttctgcagaggctgcgtattgaaggctgctctctgaagctccctgccccaggtcacgccgccggttccagatgaatccagagtgggggcaggccttcgtgcacgtggccgtggccggtggcctctgtgccgtggctgtgttcacgggcattttcgacagtgtttccgtgcaagtgggctatgagcactacgccgaggcgcccgtggccggcctccctgccttcctggccatgccgttcaactcactcgtgaacatggcctacacgctgctggggctgtcgtggctgcacaggggcggcgcgatggggctgggtccccgctacctgaaggacgtgttcgcagccatggccctgctctatggccccgtgcagtggctgcgcctgtggacgcagtggcgccgtgccgcggtgctggaccagtggctcacactgcccatctttgcatggcccgtggcctggtgcctctacctagaccgcggctggcggccctggctgttcctctctcttgagtgcgtctccctggccagttatggcctcgctctgctgcatccccagggcttcgaggtcgcactgggtgctcacgtggtggccgctgtggggcaggcgctgcgcacccacaggcactatggcagcaccacctcggctacctacttagctttgggggtgctctcttgcctgggctttgtggtcctcaagctgtgtgaccatcagctcgcacggtggcgtctcttccagtgcctcacaggccacttctggtccaaggtctgtgacgtgctccagttccactttgcgtttttgtttctgacgcatttcaacactcacccaagattccatccctctggcgggaagacgcgttgaacccagggaagaacctgctgaaaaccgatgacccccagcattgaaatggactctgagatggcagcgtggtgccagtgtcagacatcctgtgtgtgatgatatgcactgatcacacaagactgccctttcctgagaagctgcgggcttcggtgtggaggggtggagtgctgtgatctcgacaacttactttcaaagacataaagcacagatctccgcacaggggatgtgtgtgttcctgatgtaatttgcataacttttctgtagtttgaaatgtttccaaataaatattggcaaggggagtggaaatgacaccaagaagcccctcatgctcatggttggacagagag

SEQ ID NO: 324999 - DNA, 440 bp, Artificial Sequence
  derived and/or modified sequence
actgtaagtgctcaccgcagccctgggaggaaaaaggcagaacgttcctccgctggcgccagccaatcagcaggactcctgccttccttcggggcaaggtcgcagcatctgcctcggaaatcacgaaatcacggggcttctttctgctggctcagccgggaggcccagagtgttctgcagaggctgcgtattgaaggctgctctctgaagctccctgccccaggtcacgccgccggttccagatgaatccagagtgggggcaggccttcgtgcacgtggccgtggccggtggcctctgtgccgtggctgtgttcacgggcattttcgacagtgtttccgtgcaagtgggctatgagcactacgccgaggcgcccgtggccggcctccctgccttcctggccatgccgttcaactcactcgtgaacatggcctacacgctg

SEQ ID NO: 325000 - DNA, 330 bp, Artificial Sequence
  derived and/or modified sequence
taagcgattaggtcaaaggaaaaaggcagaacgttcctccgctggcgccagccaatcagcaggactcctgccttccttcggggcaaggtcgcagcatctgcctcggaaatcacgaaatcacggggcttctttctgctggctcagccgggaggcccagagtgttctgcagaggctgcgtattgaaggctgctctctgaagctccctgccccaggtcacgccgccggttccagatgaatccagagtgggggcaggccttcgtgcacgtggccgtggccggtggcctctgtgccgtggctgtgttcacgggcattttcgacagtgtttccgtg

SEQ ID NO: 325001 - protein, 368 aa, Artificial Sequence
  derived and/or modified sequence
MNRHLWKSQLCEMVQPSGGPAADQDVLGEESPLGKPAMLHLPSEQGAPETLQRCLEENQELRDAIRQSNQILRERCEELLHFQASQREEKEFLMCKFQEARKLVERLGLEKLDLKRQKEQALREVEHLKRCQQQMAEDKASVKAQVTSLLGELQESQSRLEAATKECQALEGRRKLAQLQVAYHQLFQEYDNHIKSSVVGSERKRGMQLEDLKQQLQQAEEALVAKQEVIDKLKEEAEQHKIVMETVPVLKAQADIYKADFQAERQAREKLAEKKELLQEQLEQLQREYSKLKASCQESARIEDMRKRHVEVSQAPLPPAPAYLSSPLALPSQRRSPPEEPPDFCCPKCQYQAPDMDTLQIHVMECIE

SEQ ID NO: 325002 - DNA, 1107 bp, Artificial Sequence
  derived and/or modified sequence
atgaaccgacatttgtggaagtctcagctctgtgaaatggttcaaccatccggaggtcccgccgcagatcaggacgtcctgggggaagagtcccccctgggcaagcccgccatgcttcatctgccatctgagcagggcgcccccgaaaccttacaaagatgtcttgaggagaatcaggagctcagggatgctattaggcagtcaaatcaaatcctgcgggaacggtgtgaggagttactacattttcaggcatcccaacgtgaggaaaaagaattcctgatgtgcaaattccaggaggctaggaaacttgtggaaaggttaggactcgaaaaacttgaccttaagagacaaaaagaacaagctctgcgggaggttgaacatctgaaacgatgccagcagcagatggccgaagataaggccagtgtgaaggctcaggtaacaagtctgctcggcgagctgcaagagagccagtcacgcttagaggccgctaccaaagagtgtcaagctctggagggacggaggaagctggcccagcttcaagtggcttaccatcaactattccaggagtacgacaaccacataaaaagctctgtagtgggctccgaacggaagcgcggaatgcaacttgaggatctgaaacagcagctccagcaggctgaagaggcacttgtcgccaagcaagaagtgattgataagctgaaggaggaagccgaacagcataagatcgttatggagacagtgcccgttctgaaggcacaggcagatatttataaagcagactttcaggcagagaggcaggccagagagaagctggcagagaagaaggagctgttacaggagcagctcgaacagcttcaaagggaatacagcaagcttaaggcctcctgccaggagtcagcaaggattgaagacatgcgcaaaagacacgttgaggtgagccaggcccccctgcctccggctcctgcttatttaagttctcccctggcactcccctctcagaggcgtagtcctccagaagagcccccagatttttgctgtccaaagtgccagtatcaggcacccgacatggacactctccaaatccacgttatggagtgcatcgaatag

SEQ ID NO: 325003 - DNA, 1751 bp, Artificial Sequence
  derived and/or modified sequence
tggtagggaagggcgaccgcgaaactgggactttctcggagcgccggggccctaccagcgttcacagtccgccgctcccacccttctcacgtctgacggactctgctgacagcccttgccctgttggatgaataggcacctctggaagagccaactgtgtgagatggtgcagcccagtggtggcccggcagcagatcaggacgtactgggcgaagagtctcctctggggaagccagccatgctgcacctgccttcagaacagggcgctcctgagaccctccagcgctgcctggaggagaatcaagagctccgagatgccatccggcagagcaaccagattctgcgggagcgctgcgaggagcttctgcatttccaagccagccagagggaggagaaggagttcctcatgtgcaagttccaggaggccaggaaactggtggagagactcggcctggagaagctcgatctgaagaggcagaaggagcaggctctgcgggaggtggagcacctgaagagatgccagcagcagatggctgaggacaaggcctctgtgaaagcccaggtgacgtccttgctcggggagctgcaggagagccagagtcgcttggaggctgccactaaggaatgccaggctctggagggtcggaggaagctggcccagttgcaggtggcctatcaccagctcttccaagaatacgacaaccacatcaagagcagcgtggtgggcagtgagcggaagcgaggaatgcagctggaagatctcaaacagcagctccagcaggccgaggaggccctggtggccaaacaggaggtgatcgataagctgaaggaggaggccgagcagcacaagattgtgatggagaccgttccggtgctgaaggcccaggcggatatctacaaggcggacttccaggctgagaggcaggcccgggagaagctggccgagaagaaggagctcctgcaggagcagctggagcagctgcagagggagtacagcaaactgaaggccagctgtcaggagtcggccaggatcgaggacatgaggaagcggcatgtcgaggtctcccaggcccccttgccccccgcccctgcctacctctcctctcccctggccctgcccagccagaggaggagcccccccgaggagccacctgacttctgctgtcccaagtgccagtatcaggcccctgatatggacaccctgcagatacatgtcatggagtgcattgagtagggccggccagtgcaaggccactgcctgccgaggacgtgcccgggaccgtgcagtctgcgctttcctctcccgcctgcctagcccaggatgaagggctgggtggccacaactgggatgccacctggagccccacccaggagctggccgcggcaccttacgcttcagctgttgatccgctggtcccctcttttggggtagatgcggccccgatcaggcctgactcgctgctctttttgttcccttctgtctgctcgaaccacttgcctcgggctaatccctccctcttcctccacccggcactggggaagtcaagaatggggcctggggctctcagggagaactgcttcccctggcagagctgggtggcagctcttcctcccaccggacaccgacccgcccgctgctgtgccctgggagtgctgccctcttaccatgcacacgggtgctctccttttgggctgcatgctattccattttgcagccagaccgatgtgtatttaaccagtcactattgatg

SEQ ID NO: 325004 - DNA, 1107 bp, Artificial Sequence
  derived and/or modified sequence
atgaacagacacctgtggaagagccagctgtgtgagatggtgcagcccagcggcggccctgctgctgaccaggatgtgctgggggaggagagccccctgggcaagccagccatgctgcacctgcccagcgagcagggcgcccctgagaccctgcagcgctgcctggaggagaaccaggagctgagagatgccatccggcagagcaaccagatcctgcgggagcgctgtgaggagctgctgcacttccaggccagccagcgggaggagaaggagttcctgatgtgcaagttccaggaggccaggaagctggtggagcggctgggcctggagaagctggacctgaagaggcagaaggagcaggccctgcgggaggtggagcacctgaagcgctgccagcagcagatggccgaggacaaggcctctgtgaaggcccaggtgaccagcctgctgggggagctgcaggagagccagagccggctggaggccgccaccaaggagtgccaggccctggagggccgcaggaagctggcccagctgcaggtggcctaccaccagctgttccaggagtatgacaaccacatcaagagctctgtggtgggcagcgagaggaagaggggcatgcagctggaggacctgaagcagcagctgcagcaggccgaggaggccctggtggccaagcaggaggtgattgacaagctgaaggaggaggccgagcagcacaagatcgtgatggagaccgtgcctgtgctgaaggcccaggccgacatctacaaggctgacttccaggccgagcggcaggcccgggagaagctggccgagaagaaggagctgctgcaggagcagctggagcagctgcagcgggagtacagcaagctgaaggccagctgccaggagagcgccagaattgaggacatgaggaagagacatgtggaggtgtcccaggcccccctgcccccagccccagcctacctgagcagccccctggccctgcccagccagaggaggagccccccagaggagcccccagacttctgctgccccaagtgccagtaccaggccccagacatggacaccctgcagatccacgtgatggagtgcattgaatag

SEQ ID NO: 325005 - DNA, 1107 bp, Artificial Sequence
  derived and/or modified sequence
atgaaccggcacctgtggaagagccagctgtgcgagatggtgcagcccagcggcggacctgcggccgatcaagacgtgcttggagaagagtccccactgggaaagcctgcaatgctgcacctgcctagcgaacagggggccccagaaactctacaaagatgtctggaagagaaccaggagctcagagatgccatccggcagtctaaccagatcctcagggaaagatgcgaggaattgctccactttcaagcctcgcagcgggaggagaaagagttcctgatgtgtaagtttcaggaagccagaaagttggtagagcgcctaggactggagaaactggacctcaagcgccaaaaagagcaggcgctgagagaagtggagcacctcaagcggtgccaacagcagatggccgaggacaaggcatcggtgaaggctcaggtgaccagtctgctgggggagctgcaggagtcccagagccgcctagaagctgcaaccaaggagtgccaggctctggaaggccgcagaaaactggcacagctgcaggtcgcctaccatcagctctttcaagagtacgataaccacattaaatccagcgtggtcggatcagagagaaagcggggcatgcagctcgaagacctgaaacaacagctccagcaggcagaggaggccctggtggcgaagcaggaggtaattgataaattgaaagaagaggccgagcagcataaaattgtgatggaaaccgtgcccgttctcaaagctcaggcagacatctacaaagccgattttcaggccgaacgacaagctagagagaagcttgcggagaagaaagaactcttgcaggaacagttggaacagctacagagggagtactctaagctgaaggcctcttgccaggagagcgctagaatcgaggatatgcgaaagcgtcatgtcgaggtttcccaggcccctctgcctcccgctcctgcatatctctcttcccccttggccttaccatcccagcgccggagccccccagaagagccacctgacttctgttgtcctaaatgccaataccaggccccggatatggataccctccagatacatgtgatggaatgtatagagtag

SEQ ID NO: 325006 - DNA, 1107 bp, Artificial Sequence
  derived and/or modified sequence
atgaaccggcacttgtggaaaagtcagctatgcgaaatggtgcagccctctggcggaccagccgctgaccaggatgtgctgggggaggagagcccgctcgggaagcccgcaatgctccatctcccttcagaacaaggagccccagagacattacaacgttgcttggaggaaaaccaggagctgcgcgacgccatcagacagagcaatcagatcttacgggagcggtgcgaggaacttcttcattttcaggcatctcagagggaagagaaagagttccttatgtgtaagttccaagaagctaggaaactggtggagagattagggttagagaaactggatctgaagcggcagaaggaacaggcgctgagagaggttgaacacctgaagcggtgccagcagcagatggctgaggacaaggcatccgttaaggctcaagtcaccagcctgctgggggagctacaggaaagccagagcagactggaagctgccaccaaagagtgtcaggcgctggaaggaagacggaagttggctcagttacaagtggcttatcatcagctgttccaagagtatgataaccatataaagtccagcgttgtggggtctgaaaggaagagaggcatgcaactggaggatttgaaacagcagctgcagcaggccgaagaagccctcgttgcgaagcaggaggtcattgacaagctgaaagaagaagctgagcagcataaaatcgttatggagacggtgccagttttgaaagcccaggccgacatctacaaggcagactttcaagcggagcgccaggcccgagaaaagctggcggaaaagaaggaactccttcaggagcagctagaacagttgcaacgcgaatatagtaaactgaaagcaagttgtcaagagtccgccaggattgaagacatgcgcaaaagacacgtggaggtgtcccaggctccattacctccagcccctgcatacctgagcagccctttagcattgcctagccaaagacgatcgccacccgaggagccacctgacttttgctgtccgaagtgtcaatatcaggcccctgacatggataccctgcaaatacatgtgatggaatgcatcgagtag

SEQ ID NO: 325007 - DNA, 1107 bp, Artificial Sequence
  derived and/or modified sequence
atgaacagacacctgtggaagagccagctgtgcgagatggtgcagcccagcggcggccccgccgccgaccaggacgtgctgggcgaggagagccccctgggcaagcccgccatgctgcacctgcccagcgagcagggcgcccccgagaccctgcagagatgcctggaggagaaccaggagctgagagacgccatcagacagagcaaccagatcctgagagagagatgcgaggagctgctgcacttccaggccagccagagagaggagaaggagttcctgatgtgcaagttccaggaggccagaaagctggtggagagactgggcctggagaagctggacctgaagagacagaaggagcaggccctgagagaggtggagcacctgaagagatgccagcagcagatggccgaggacaaggccagcgtgaaggcccaggtgaccagcctgctgggcgagctgcaggagagccagagcagactggaggccgccaccaaggagtgccaggccctggagggcagaagaaagctggcccagctgcaggtggcctaccaccagctgttccaggagtacgacaaccacatcaagagcagcgtggtgggcagcgagagaaagagaggcatgcagctggaggacctgaagcagcagctgcagcaggccgaggaggccctggtggccaagcaggaggtgatcgacaagctgaaggaggaggccgagcagcacaagatcgtgatggagaccgtgcccgtgctgaaggcccaggccgacatctacaaggccgacttccaggccgagagacaggccagagagaagctggccgagaagaaggagctgctgcaggagcagctggagcagctgcagagagagtacagcaagctgaaggccagctgccaggagagcgccagaatcgaggacatgagaaagagacacgtggaggtgagccaggcccccctgccccccgcccccgcctacctgagcagccccctggccctgcccagccagagaagaagcccccccgaggagccccccgacttctgctgccccaagtgccagtaccaggcccccgacatggacaccctgcagatccacgtgatggagtgcatcgagtag

SEQ ID NO: 325008 - protein, 419 aa, Artificial Sequence
  derived and/or modified sequence
MNRHLWKSQLCEMVQPSGGPAADQDVLGEESPLGKPAMLHLPSEQGAPETLQRCLEENQELRDAIRQSNQILRERCEELLHFQASQREEKEFLMCKFQEARKLVERLGLEKLDLKRQKEQALREVEHLKRCQQQMAEDKASVKAQVTSLLGELQESQSRLEAATKECQALEGRARAASEQARQLESEREALQQQHSVQVDQLRMQGQSVEAALRMERQAASEEKRKLAQLQVAYHQLFQEYDNHIKSSVVGSERKRGMQLEDLKQQLQQAEEALVAKQEVIDKLKEEAEQHKIVMETVPVLKAQADIYKADFQAERQAREKLAEKKELLQEQLEQLQREYSKLKASCQESARIEDMRKRHVEVSQAPLPPAPAYLSSPLALPSQRRSPPEEPPDFCCPKCQYQAPDMDTLQIHVMECIE

SEQ ID NO: 325009 - protein, 206 aa, Artificial Sequence
  derived and/or modified sequence
MNRHLWKSQLCEMVQPSGGPAADQDVLGEESPLGKPAMLHLPSEQGAPETLQRCLEENQELRDAIRQSNQILRERCEELLHFQASQREEKEFLMCKFQEARKLVERLGLEKLDLKRQKEQALREVEHLKRCQQQMAEDKASVKAQVTSLLGELQESQSRLEAATKECQALEGRARAASEQARQLESEREALQQQHSVQVDQLRMQG

SEQ ID NO: 325010 - protein, 251 aa, Artificial Sequence
  derived and/or modified sequence
MNRHLWKSQLCEMVQPSGGPAADQDVLGEESPLGKPAMLHLPSEQGAPETLQRCLEENQELRDAIRQSNQILRERCEELLHFQASQREEKEFLMCKFQEARKLVERLGLEKLDLKRQKEQALREVEHLKRCQQQMAEDKASVKAQVTSLLGELQESQSRLEAATKECQALEGRARAASEQARQLESEREALQQQHSVQVDQLRMQGQSVEAALRMERQAASEEKRKLAQLQVAYHQLFQEYDNHIKSSVVG

SEQ ID NO: 325011 - protein, 138 aa, Artificial Sequence
  derived and/or modified sequence
MNRHLWKSQLCEMVQPSGGPAADQDVLGEESPLGKPAMLHLPSEQGAPETLQRCLEENQELRDAIRQSNQILRERCEELLHFQASQREEKEFLMCKFQEARKLVERLGLEKLDLKRQKEQALREVEHLKRCQQQMAED

SEQ ID NO: 325012 - DNA, 1260 bp, Artificial Sequence
  derived and/or modified sequence
atgaacagacacctgtggaagagccagctgtgcgagatggtgcagcccagcggcggccccgccgccgaccaggacgtgctgggcgaggagagccccctgggcaagcccgccatgctgcacctgcccagcgagcagggcgcccccgagaccctgcagagatgcctggaggagaaccaggagctgagagacgccatcagacagagcaaccagatcctgagagagagatgcgaggagctgctgcacttccaggccagccagagagaggagaaggagttcctgatgtgcaagttccaggaggccagaaagctggtggagagactgggcctggagaagctggacctgaagagacagaaggagcaggccctgagagaggtggagcacctgaagagatgccagcagcagatggccgaggacaaggccagcgtgaaggcccaggtgaccagcctgctgggcgagctgcaggagagccagagcagactggaggccgccaccaaggagtgccaggccctggagggcagagccagagccgccagcgagcaggccagacagctggagagcgagagagaggccctgcagcagcagcacagcgtgcaggtggaccagctgagaatgcagggccagagcgtggaggccgccctgagaatggagagacaggccgccagcgaggagaagagaaagctggcccagctgcaggtggcctaccaccagctgttccaggagtacgacaaccacatcaagagcagcgtggtgggcagcgagagaaagagaggcatgcagctggaggacctgaagcagcagctgcagcaggccgaggaggccctggtggccaagcaggaggtgatcgacaagctgaaggaggaggccgagcagcacaagatcgtgatggagaccgtgcccgtgctgaaggcccaggccgacatctacaaggccgacttccaggccgagagacaggccagagagaagctggccgagaagaaggagctgctgcaggagcagctggagcagctgcagagagagtacagcaagctgaaggccagctgccaggagagcgccagaatcgaggacatgagaaagagacacgtggaggtgagccaggcccccctgccccccgcccccgcctacctgagcagccccctggccctgcccagccagagaagaagcccccccgaggagccccccgacttctgctgccccaagtgccagtaccaggcccccgacatggacaccctgcagatccacgtgatggagtgcatcgagtag

SEQ ID NO: 325013 - DNA, 1260 bp, Artificial Sequence
  derived and/or modified sequence
atgaatcggcatctgtggaaaagtcagttatgcgaaatggtgcaaccttcaggtgggccagcagccgatcaagacgtgctgggagaagagagtcctcttggcaagccagctatgcttcacctgccatccgaacagggggccccagagactctccagagatgccttgaggagaatcaggagctgagggacgctatccggcaatcaaaccagatccttcgtgaaaggtgtgaggagctactccatttccaagcatcacagcgggaagaaaaggagttcctgatgtgcaagttccaggaggcccggaagctagtggagcggttggggctcgagaagctggacctgaaaaggcagaaggaacaagctttgagggaggtggagcacttgaagagatgtcagcaacagatggcagaggataaagcctctgtgaaagcgcaggtgacctccttgctgggagaactgcaagagagtcagagtcgtctggaggcagctacaaaagaatgccaggctctcgaaggcagggctagggcagcgtctgaacaggctaggcagctcgagagtgagcgcgaggccctgcaacagcagcacagcgtacaggtggaccagctccgaatgcagggacaatccgttgaagccgctttgagaatggagaggcaggctgcttctgaggagaaacgaaaactagcccagcttcaagtcgcttatcatcagttgtttcaggagtacgacaaccacatcaaatccagcgttgtgggatccgaacgcaagaggggcatgcaacttgaagacctcaagcagcagctgcagcaggcagaggaggccttagtggctaaacaggaggttatcgacaaactcaaagaggaggccgagcagcacaagatcgtcatggagacagtacccgtgctgaaagcccaggcagacatttacaaagccgactttcaagcggaaagacaggcacgagagaaactcgcggaaaaaaaggagttgctgcaggaacagctggagcagctacagagggaatatagtaaactgaaagctagctgccaggagagtgcacgtatcgaggatatgaggaagcgccatgtggaggtgagccaggccccactgccccccgcccccgcctatctgtcatcccccctagccttaccctcccagagaaggagcccacctgaagaaccccccgatttctgctgcccaaaatgccagtaccaggcgccagacatggacactcttcagatccacgttatggagtgtatcgagtag

SEQ ID NO: 325014 - DNA, 1260 bp, Artificial Sequence
  derived and/or modified sequence
atgaacagacacctgtggaagagccagctgtgtgagatggtgcagcccagcggcggccctgctgctgaccaggatgtgctgggggaggagagccccctgggcaagccagccatgctgcacctgcccagcgagcagggcgcccctgagaccctgcagcgctgcctggaggagaaccaggagctgagagatgccatccggcagagcaaccagatcctgcgggagcgctgtgaggagctgctgcacttccaggccagccagcgggaggagaaggagttcctgatgtgcaagttccaggaggccaggaagctggtggagcggctgggcctggagaagctggacctgaagaggcagaaggagcaggccctgcgggaggtggagcacctgaagcgctgccagcagcagatggccgaggacaaggcctctgtgaaggcccaggtgaccagcctgctgggggagctgcaggagagccagagccggctggaggccgccaccaaggagtgccaggccctggagggccgggcccgggccgccagcgagcaggcccggcagctggagagcgagcgggaggccctgcagcagcagcacagcgtgcaggtggaccagctgaggatgcagggccagagcgtggaggccgccctgaggatggagcggcaggccgccagcgaggagaagaggaagctggcccagctgcaggtggcctaccaccagctgttccaggagtatgacaaccacatcaagagctctgtggtgggcagcgagaggaagaggggcatgcagctggaggacctgaagcagcagctgcagcaggccgaggaggccctggtggccaagcaggaggtgattgacaagctgaaggaggaggccgagcagcacaagatcgtgatggagaccgtgcctgtgctgaaggcccaggccgacatctacaaggctgacttccaggccgagcggcaggcccgggagaagctggccgagaagaaggagctgctgcaggagcagctggagcagctgcagcgggagtacagcaagctgaaggccagctgccaggagagcgccagaattgaggacatgaggaagagacatgtggaggtgtcccaggcccccctgcccccagccccagcctacctgagcagccccctggccctgcccagccagaggaggagccccccagaggagcccccagacttctgctgccccaagtgccagtaccaggccccagacatggacaccctgcagatccacgtgatggagtgcatcgagtag

SEQ ID NO: 325015 - DNA, 1260 bp, Artificial Sequence
  derived and/or modified sequence
atgaaccggcacctgtggaagagccagctgtgcgagatggtgcagcctagtggaggtccggcagccgaccaggacgtgctgggggaggagtctcccctaggtaagcctgccatgcttcacctcccatctgagcagggagctccagagaccctgcagcgatgcctggaggagaatcaggagctgcgggatgctatcagacagagcaatcaaattctgagagagcgctgtgaagagttgttgcattttcaggcctcacaacgggaggaaaaagagttcctgatgtgcaagttccaggaggcaagaaagttggtggagcgcctcggacttgagaagctagatctgaagcggcagaaggagcaagctttaagggaagtggaacatctgaaaagatgtcagcagcagatggccgaggacaaagcctctgttaaggcccaagttacctcactgctgggagaactgcaggaaagtcaaagccggcttgaagcggcaactaaggagtgtcaggccttggagggacgcgccagagccgctagcgagcaggcccgacagttagagtcagagcgggaggctcttcagcaacagcattccgtccaggtggaccagctccgcatgcagggacagagtgtggaggctgctctccgcatggagcggcaggcagcaagcgaggagaaaaggaagcttgcccaactccaggtcgcgtatcatcagttgtttcaagagtacgacaaccacatcaaatcgtccgtcgttggctcagaacgcaaacgagggatgcagctggaggacctgaaacagcaactgcagcaggcggaggaggcgttggtggctaagcaggaggttattgacaagctcaaggaggaggcggaacagcataagatcgtcatggagacagtgcctgttctgaaggcccaagcagacatctataaagcggatttccaggctgaaaggcaggcccgggagaagctggcggagaagaaagagcttctgcaggagcagctcgagcagctccagcgcgagtatagcaagttgaaggcgtcttgtcaggaatcagcacgaatcgaagacatgcgtaaacgccacgtggaggtttctcaggcccctttacctccagcccctgcttacctcagctcacccctggcgctgccctcccaacggagatcaccccccgaagagccacccgatttttgttgccctaagtgccaatatcaggctcccgatatggacactcttcagatacatgtgatggagtgtattgagtag

SEQ ID NO: 325016 - DNA, 1260 bp, Artificial Sequence
  derived and/or modified sequence
atgaacagacatctgtggaagtctcagctctgcgagatggtgcaacctagtggcggtccggcagctgaccaggacgttttaggcgaagagtcgccattgggtaagcccgcaatgctgcacctgccttcagaacagggcgctcccgagacactacagcgatgtctggaagaaaatcaggagttgagagacgcaattcgccagagtaaccagatacttcgcgagagatgtgaagaattgctccactttcaggcaagtcagagggaggagaaagagttcttgatgtgtaagtttcaggaggcacgtaagcttgttgaaaggcttgggcttgagaagctggatctcaaacggcagaaagagcaggccctgcgtgaggtcgagcacttgaaacgctgccagcagcaaatggcagaagacaaggccagcgtgaaagcgcaggttacctccctgttgggggagctccaggaatcccagtctagactcgaagctgccaccaaggaatgccaggccttggaaggaagggccagggccgcaagcgagcaggctcggcagctcgagtctgagagagaggcgctgcagcagcagcactcagtgcaggtggatcagctgcggatgcagggtcagagcgtggaggcggcattgagaatggagagacaagccgcttctgaggagaaacgaaagcttgcacaactgcaggtggcctaccaccaactgttccaagagtacgacaaccatatcaaatccagcgtggtggggtccgaacgtaagagaggcatgcaactcgaagatttgaaacaacagctgcagcaggccgaggaggctctggtggcaaaacaagaggtcatcgataaattaaaggaggaggcagagcagcataagatcgtgatggagactgtgccggttctaaaggcccaggccgatatctacaaagccgacttccaagcagaaagacaggcccgagaaaaacttgccgagaaaaaggagcttctgcaggagcagttggagcagctacagagagagtatagcaaactgaaggcatcgtgccaggaaagcgcgagaattgaggacatgagaaaaaggcacgttgaggtttcacaggctcctctgcccccagcgccagcctatctgagtagtccactggcattaccgtcccagaggaggtcacctccagaagagcccccagatttctgttgccctaagtgccaatatcaggccccagacatggacacgctccaaatccacgtgatggaatgtatcgagtag

SEQ ID NO: 325017 - DNA, 1260 bp, Artificial Sequence
  derived and/or modified sequence
atgaatagacacctgtggaagtctcaactgtgtgaaatggtgcaacccagcggggggcccgccgccgaccaggatgttttgggtgaggagagtccattgggcaagcctgctatgctccatctccccagtgagcagggcgcccccgagacactgcagcggtgccttgaggaaaatcaggagctgagagatgctatacggcaaagtaatcagatactccgggagagatgcgaggaactccttcatttccaggcaagccagagggaagagaaagagttcctgatgtgtaagtttcaggaagcacgtaagctcgtggagcggctcggcctcgaaaagctggacctgaaacggcagaaagaacaggcattgcgagaggtggaacacctgaaacgttgtcagcagcagatggcagaggacaaggcctcagtgaaagcccaggtcacgtcactcctcggcgagctacaggaatcacagagccgcctcgaggctgctactaaggaatgccaagctttggagggccgcgccagggctgcctcagagcaggcgcgccagctggagagcgagagagaggctctgcaacagcagcatagtgtgcaggttgaccagctccgcatgcagggacagagtgtcgaggcagcgctcagaatggagcgacaagccgcgtccgaagagaaaaggaagctggcgcaactgcaggtcgcatatcaccagttgtttcaagagtacgacaaccatataaagtctagcgtggtcggatcagagagaaaacgcgggatgcaactggaagacttgaaacaacaactccagcaggccgaggaagccctggtggctaaacaggaagtcatcgacaaactgaaagaggaggcagaacaacataagatcgtgatggaaaccgttcccgtactgaaggcacaagcagacatctacaaagctgactttcaggcagaacgccaggccagagaaaagttagcggaaaaaaaagagcttctgcaggagcagctggaacagttgcagagagaatactctaaactgaaagcctcttgccaggaatcagcacgcattgaggacatgcgcaagagacacgtggaggtcagtcaggcacctctgccacctgctccagcctatctgtcgtcccctctggccttgccaagccaacgaaggtcaccacccgaggagcctcccgacttctgctgccctaagtgtcaatatcaggcccccgacatggacactcttcagatccatgtcatggaatgcatagaatag

SEQ ID NO: 325018 - DNA, 1260 bp, Artificial Sequence
  derived and/or modified sequence
atgaatagacatctgtggaagagccaattgtgcgagatggtgcaacctagtggcggtccggccgccgatcaggatgtgctcggggaggaatcccctcttgggaagccagctatgctgcatctgcccagtgagcaaggcgctccagagacactacagagatgcttggaggagaaccaagaattaagagatgcaataaggcagtcgaaccagatattgcgggaacggtgcgaggagttgctgcactttcaagcgagtcaaagagaggagaaggagttccttatgtgcaagttccaggaagccagaaagttagtcgagcggctcggtcttgagaagctggacctgaagcgtcagaaggagcaggctcttagggaggtggagcacctgaaacgttgtcagcagcagatggccgaagataaagcgagcgtgaaggctcaagtgacaagtctcctaggcgaactgcaggaatcacagagccgacttgaggccgcaaccaaagaatgccaagccctggagggccgagccagagcggctagcgagcaagcgcgccagcttgagagcgagagggaggccctccagcagcagcactccgtccaagttgatcagctgcgaatgcagggccagtcagtcgaagccgctctgcggatggaacggcaagccgcttctgaggaaaaacggaaacttgcgcagctgcaagtggcttaccaccagttgttccaagagtacgacaaccatataaaaagttcggtcgtgggttccgaaagaaagcgcggtatgcagctcgaagatctcaagcagcagctccagcaggctgaggaggcccttgttgccaaacaggaggtcattgacaaactgaaagaagaagccgaacagcacaagatagtgatggagacagttcctgttctcaaagctcaagccgacatctataaggccgattttcaggctgaaagacaggcccgtgaaaaacttgcagaaaaaaaggaactgctacaggaacagttggagcaactacagcgggaatattccaagctcaaggcgagttgccaggagagtgcaagaatagaggacatgcgtaagagacacgtagaagtgagccaggcacctctgccccccgctcccgcctacctgtcaagtcccttagccctgccatcccaacgcaggagccctcctgaagagcctcccgacttctgttgccccaaatgccagtaccaggcccctgatatggatacactccagattcatgtgatggaatgtattgaatag

SEQ ID NO: 325019 - DNA, 1260 bp, Artificial Sequence
  derived and/or modified sequence
atgaacagacatctgtggaagtctcagctctgtgagatggtccagcctagtggcggaccagctgccgatcaggacgtgcttggagaagaaagtcctttagggaagcctgccatgctgcatttgccatccgagcaaggtgcaccggagaccctccagaggtgccttgaagagaaccaggagctgcgcgacgccatccgtcagtcaaatcagatactcagggagaggtgcgaggaactcctgcacttccaggcatctcagagagaggaaaaggagttcctgatgtgtaagttccaggaggcacggaaactggtcgagcgattggggctagagaagctggacctaaaaagacagaaagaacaggcccttagagaggtcgagcacttgaagcggtgccagcagcagatggccgaagataaagcaagtgtgaaagcacaggtgacatcgctccttggtgagctgcaggaaagccagtcacgtcttgaggccgccacgaaggagtgccaagctctcgagggacgcgcacgtgcggcttctgagcaggcacgccagctggagtctgaaagggaagccctgcagcagcagcacagtgttcaggttgatcagttgcggatgcagggccagtcagtagaggcagccctgcgtatggagcggcaggctgcttcggaagagaaaagaaagttggcacaacttcaagtggcataccaccagctcttccaggaatatgataatcatataaaaagtagtgtggtgggatctgaaaggaaacggggaatgcagctggaagatttgaagcagcagttacaacaggccgaggaggcgctggttgcaaagcaggaagtgatcgataaactgaaggaggaggccgagcagcataagatagtgatggaaacagtgcctgtactgaaggcccaggcggacatctataaagctgactttcaggcggaaagacaggcgcgcgagaaattggccgagaagaaagagttgctgcaggaacaattggaacagctgcagcgtgagtacagcaagcttaaggcgtcttgtcaagagtctgccagaattgaggacatgcgaaagcggcacgttgaagtgagccaggccccacttccccctgctcccgcttacctgtcaagtccactggcccttcctagtcagcgccgaagccccccggaggagcctcctgatttctgctgtccaaagtgtcagtaccaggcccctgacatggacacactgcagatccacgtgatggaatgcattgagtag

SEQ ID NO: 325020 - DNA, 621 bp, Artificial Sequence
  derived and/or modified sequence
atgaacaggcacctttggaaaagccagttgtgcgagatggtccagccttcaggtggtcctgctgccgaccaggacgttctaggggaggagagtccactcggtaagccagcaatgctgcatctgccgagcgagcaaggggcccctgagaccctgcagcgttgcctcgaagaaaatcaagagctgcgtgatgcgatccggcagagcaaccagattcttagagaaaggtgtgaggagcttctacattttcaagcctcacagcgagaagagaaagagtttctcatgtgtaaatttcaagaggcgcgcaaactggttgaacgcctcggactggagaagcttgatcttaagcggcaaaaggagcaagctctccgagaagtggagcacctgaaaagatgtcaacagcagatggctgaggacaaggcttccgttaaggctcaggtgacaagtctgcttggcgaattacaagagtcccagtctcgcctggaagcagccacaaaagaatgccaagccctggagggcagagcgcgagccgcatccgaacaggccaggcagctggaaagtgagcgcgaggccttgcagcagcagcattccgtgcaagtggaccagctcagaatgcaaggctag

SEQ ID NO: 325021 - DNA, 756 bp, Artificial Sequence
  derived and/or modified sequence
atgaatcggcacctctggaagtcccagctgtgcgaaatggtacaaccgagcggcgggcctgcggccgaccaggacgtcctcggtgaggagtcccctttggggaagcctgcaatgctgcacctgccctctgaacagggagccccagaaactcttcagcgatgtctcgaggagaatcaggaacttcgagacgcaattcgccagagtaaccaaattctgcgagagagatgcgaggagctgctccacttccaggctagccagcgtgaagaaaaagagttcctgatgtgcaaatttcaggaggcccgaaaacttgtagaacgattaggccttgagaagctggatctgaagcggcaaaaggagcaggctttacgcgaggtcgaacacctcaagagatgtcagcaacagatggccgaagataaggcttcagtcaaggcacaggtcacttcactgctcggggagctccaggagtcgcagagtcgcctggaagctgcgaccaaagaatgtcaagccctggagggcagggcccgggccgcgtctgagcaagcaaggcagctagaatctgagagggaggcgcttcagcagcagcacagtgtccaagtggaccaactccgcatgcagggccagagcgtggaggcagccctgcgcatggagcgccaggccgcatctgaggaaaaaaggaagctcgcgcaacttcaagtcgcttaccatcaactgttccaggaatacgataaccacatcaagagctcggtcgtgggctag

SEQ ID NO: 325022 - DNA, 621 bp, Artificial Sequence
  derived and/or modified sequence
atgaacagacacctgtggaagagccagctgtgtgagatggtgcagcccagcggcggccctgctgctgaccaggatgtgctgggggaggagagccccctgggcaagccagccatgctgcacctgcccagcgagcagggcgcccctgagaccctgcagcgctgcctggaggagaaccaggagctgagagatgccatccggcagagcaaccagatcctgcgggagcgctgtgaggagctgctgcacttccaggccagccagcgggaggagaaggagttcctgatgtgcaagttccaggaggccaggaagctggtggagcggctgggcctggagaagctggacctgaagaggcagaaggagcaggccctgcgggaggtggagcacctgaagcgctgccagcagcagatggccgaggacaaggcctctgtgaaggcccaggtgaccagcctgctgggggagctgcaggagagccagagccggctggaggccgccaccaaggagtgccaggccctggagggccgggcccgggccgccagcgagcaggcccggcagctggagagcgagcgggaggccctgcagcagcagcacagcgtgcaggtggaccagctgaggatgcagggctag

SEQ ID NO: 325023 - DNA, 756 bp, Artificial Sequence
  derived and/or modified sequence
atgaacagacacctgtggaagagccagctgtgtgagatggtgcagcccagcggcggccctgctgctgaccaggatgtgctgggggaggagagccccctgggcaagccagccatgctgcacctgcccagcgagcagggcgcccctgagaccctgcagcgctgcctggaggagaaccaggagctgagagatgccatccggcagagcaaccagatcctgcgggagcgctgtgaggagctgctgcacttccaggccagccagcgggaggagaaggagttcctgatgtgcaagttccaggaggccaggaagctggtggagcggctgggcctggagaagctggacctgaagaggcagaaggagcaggccctgcgggaggtggagcacctgaagcgctgccagcagcagatggccgaggacaaggcctctgtgaaggcccaggtgaccagcctgctgggggagctgcaggagagccagagccggctggaggccgccaccaaggagtgccaggccctggagggccgggcccgggccgccagcgagcaggcccggcagctggagagcgagcgggaggccctgcagcagcagcacagcgtgcaggtggaccagctgaggatgcagggccagagcgtggaggccgccctgaggatggagcggcaggccgccagcgaggagaagaggaagctggcccagctgcaggtggcctaccaccagctgttccaggagtatgacaaccacatcaagagctctgtggtgggctag

SEQ ID NO: 325024 - DNA, 1260 bp, Artificial Sequence
  derived and/or modified sequence
atgaaccggcacctgtggaagagccagctgtgcgagatggtgcagccctcaggcgggcccgctgccgatcaggacgtcctgggcgaggagtcaccactggggaaacctgccatgctgcatctgccttctgaacaaggggcccccgaaaccctacagcggtgcctggaagagaatcaggagctccgggacgccattcggcagagtaaccagatcctgagagaaagatgtgaggagctcctgcatttccaggccagtcagcgcgaggagaaagaattcctaatgtgcaagtttcaggaagccagaaaattagtggagcggctcggactggaaaagctcgacctcaagaggcaaaaagagcaggccctgcgcgaggttgaacatctgaaacgatgtcagcaacagatggctgaggacaaggctagtgtgaaggcgcaggtgacctcccttctgggagagttgcaggagtcacaatcaaggctcgaggccgccacaaaggaatgccaggctctcgagggcagggcacgggctgctagcgagcaggcccggcagctggaatcggaaagagaggctcttcaacagcagcactcggtgcaggtagatcagttacgaatgcagggacagtccgtggaggccgctctgaggatggaacgtcaggctgcatcagaggaaaagcggaagctggcccaactgcaggtagcttaccaccagttgttccaagagtacgataatcatatcaaatcatccgtggtggggtctgaacgaaaaaggggaatgcagctggaagatctgaaacaacagctacaacaggcagaggaggctctggtggcaaagcaggaggtcattgacaagcttaaggaggaagcagaacaacataagatcgtcatggaaaccgtgcctgtgcttaaggctcaggcagatatctacaaggccgattttcaagccgagaggcaggcacgcgaaaaattagcggagaagaaagagttactccaagagcagctggagcagctgcagcgcgaatactcgaaattgaaggcctcctgtcaagaatctgctagaatagaggacatgaggaagcggcacgttgaagtgtctcaggcccccttacctcctgcccccgcctaccttagttcacctctcgcactaccttctcagcgccgatcgccgcctgaggaaccaccggatttttgctgccctaagtgccagtatcaagctcctgacatggacaccctccagatacacgtgatggaatgtatcgagtag

SEQ ID NO: 325025 - DNA, 1260 bp, Artificial Sequence
  derived and/or modified sequence
atgaaccggcacctgtggaagagccagctgtgcgagatggtgcagccatccggcggcccggcagccgaccaggacgttctcggcgaggaaagcccccttggcaagcccgccatgctccatctgccctctgaacagggagccccggaaactttgcagaggtgtctggaggaaaatcaggaacttcgggacgctatacgccaatccaatcagatactgcgagaaaggtgcgaggagctgcttcactttcaagccagccagcgggaggagaaagaatttttgatgtgtaaattccaggaggccaggaaactagtggagcggctggggcttgagaaactagatctgaaaaggcagaaggagcaggctctccgggaagtggaacaccttaaaagatgtcagcagcagatggcagaggacaaagctagtgtcaaggctcaagtgacaagccttctcggggagctgcaggaaagtcagagcagattggaagcagccacaaaggaatgccaggcactggaagggcgggcaagggcggcatccgaacaggcaagacagctggaaagcgagagagaggccttgcaacaacagcattccgttcaggtggaccagctccgcatgcaagggcagagcgtggaggccgctctccgcatggagcggcaagcagccagcgaggagaagcgaaagctggcccagctgcaggtcgcttaccaccagttattccaggagtatgataaccatattaaatcctccgtagtgggatcagagcgcaaacgagggatgcaactggaggacctcaagcagcagctgcagcaggccgaggaggcgctggtcgccaagcaggaagtgatagataagctcaaagaggaagcagagcagcacaagattgtgatggagactgttcctgttcttaaggcacaggctgacatatataaggcggacttccaagccgaacggcaagcgcgggagaagctggcagaaaaaaaggagttgctgcaggagcaactcgagcagctgcagagggaatattcgaagctcaaagcctcttgccaggagtcagcacgaattgaagacatgcgcaagcgacacgtggaggtttcccaagcaccccttcctcctgcacccgcctatctttcatccccactggccctaccgtcccagagacgttcaccccccgaagagccaccagacttttgctgcccaaagtgtcaatatcaggcgccagatatggatactcttcagatccatgtcatggagtgtatcgagtag

SEQ ID NO: 325026 - DNA, 1260 bp, Artificial Sequence
  derived and/or modified sequence
atgaaccggcacctgtggaagagccagctgtgcgagatggtgcagccatcaggcgggcctgctgccgatcaggatgtgctcggagaggagtctcccctgggcaagcctgcgatgctgcacctgccatccgaacagggagcccccgagacattgcagcggtgtctcgaagaaaatcaggagcttagggatgcaatacgccagtccaatcagatcctgagggaacgatgtgaggagctcttacactttcaggctagtcagcgcgaagaaaaggaatttctcatgtgtaagtttcaagaggcgagaaagctagtcgagcgccttgggctggaaaaactcgatctcaagagacagaaggagcaggctctccgcgaggtggaacatctgaaacgctgccagcagcagatggccgaggataaggccagcgtgaaggcccaggtgacctccttgctaggggagttgcaggaatcacagtctaggttggaagccgcgaccaaggaatgtcaagccctggaaggacgggctcgtgctgcgtctgagcaggctcggcagttggaaagcgaaagggaggccctccaacaacaacactccgtccaggtggatcagctgagaatgcaggggcaatctgtcgaggcagcactccgcatggaacgccaggcagcttctgaagagaaacgcaagctggcacagctccaggtcgcctaccatcaactcttccaggagtacgacaaccacattaaatcttcggtcgtgggtagcgaacggaaacggggaatgcagttggaagacctgaaacagcagttacagcaagctgaagaggctttggtggccaagcaggaagttatcgacaaattgaaggaagaggcagaacagcataagatcgtaatggagaccgtcccagtgttgaaagcgcaggccgatatctataaggctgatttccaggcggaaagacaagcccgagaaaagctcgccgaaaagaaagaactgctgcaggagcagctggaacagctgcaaagggaatacagcaagctcaaggcttcatgccaggaatctgctcgcattgaagatatgagaaagagacatgtggaggtgagccaggccccactccctccagcacctgcgtatctgagcagccctttagctctaccaagccagcgtaggtccccccccgaggaaccacctgatttttgttgtcccaagtgccaataccaggcacccgacatggatacactgcagattcacgtgatggagtgtatcgaatag

SEQ ID NO: 325027 - DNA, 621 bp, Artificial Sequence
  derived and/or modified sequence
atgaaccggcacctgtggaagagccagctgtgcgagatggtgcagcccagtggagggccagctgctgatcaagatgttctcggtgaggaatccccactcggcaaacccgcaatgctccacttacctagcgagcagggggctccagagactttgcagcgctgcctcgaagagaatcaggagttgagggatgccatacggcaaagcaaccagatacttcgcgagaggtgtgaagagttgctccatttccaagcttctcagagggaagaaaaggaattcttgatgtgcaaatttcaggaggccagaaagttggtggagaggctcgggctagagaaactcgatctgaagcgacagaaggaacaggcactgcgggaagttgaacatctgaagcgttgtcagcagcagatggccgaggacaaagcctcagtaaaggctcaggtaacctctctcttaggagagttacaagagtctcagagccgcctcgaggcagctacaaaagagtgtcaggctctcgaaggtcgggcacgggccgccagcgaacaggcaagacaactagaatccgagcgtgaagcgttgcagcaacaacacagcgtgcaggtggaccagctccggatgcagggatag

SEQ ID NO: 325028 - DNA, 756 bp, Artificial Sequence
  derived and/or modified sequence
atgaaccggcacctgtggaagagccagctgtgcgagatggtgcagccttccgggggtcccgctgcagaccaggatgtcctcggcgaagagtcccctcttggcaagcctgcgatgcttcacttgccgagcgagcagggggctcccgagacactgcagcgatgcttagaggagaatcaggaactgagagacgctatacggcaaagcaaccaaatcctgcgtgaacgctgtgaagagttactacacttccaggctagtcagagggaggaaaaggaattcctgatgtgcaagtttcaagaagcacgcaaactggtggaaaggctaggcttggaaaagctggaccttaagagacagaaggagcaggctctcagagaagtggagcaccttaaacgatgccagcagcagatggcagaagataaagcctccgtgaaggcgcaagtgacatccttattgggggagttgcaggagagtcagtctcggctggaagccgccaccaaggaatgtcaagccttggaaggcagggcgcgagccgcgtcggagcaggcccgccagttggagtcagagcgggaagcactgcagcagcaacatagtgtacaagtggatcagcttcggatgcaggggcaatcggtagaggcggccctgagaatggagcggcaggcagctagtgaagagaagcggaagctggcccagctccaggttgcctatcaccagctcttccaagagtatgacaaccatattaagtcctccgtagtgggctag

SEQ ID NO: 325029 - DNA, 1260 bp, Artificial Sequence
  derived and/or modified sequence
atgaatcgccacttatggaaaagtcaactgtgtgagatggtccagccaagcggaggaccagctgctgaccaggacgtgctgggtgaggagtccccgcttggcaaacccgcaatgctgcaccttccatcggaacagggggctcccgagacgctgcagcggtgcctcgaagagaaccaagagcttcgcgacgccatcagacaaagcaaccagatactgcgggagaggtgcgaggaattattacatttccaggcgtctcagagagaggagaaggagttccttatgtgcaaattccaggaggcaagaaaacttgtagagagattgggcctggagaagctggatctgaagcggcagaaagagcaggccttacgagaggtggaacatctcaaaagatgccagcagcagatggcggaggataaagcctcggtgaaggcccaagtgactagtcttctcggtgaacttcaggagtcacagtccagactggaggctgctaccaaggaatgccaggcgctggaggggagggcacgagccgcaagcgagcaggctagacagttagagtctgagcgcgaggcacttcagcagcaacatagcgtccaggttgaccagcttcgaatgcagggtcagagtgtggaggcggctcttagaatggaaagacaggccgcttcagaggagaaacggaagttggcccaactccaggtggcgtaccatcaactgtttcaagaatatgacaatcatatcaaaagtagcgtggtcggatcagaaagaaagaggggcatgcagcttgaggatctgaaacagcagttacagcaagctgaggaagcccttgtggctaagcaggaagtaattgataaactgaaggaggaggccgagcagcacaaaattgttatggagacggtgccagtcctgaaagcccaggccgacatctataaggccgatttccaggctgaaaggcaggcccgtgaaaaattagccgaaaaaaaggaactcctgcaggaacagctggagcaactgcagagagagtatagcaaattgaaggcctcctgtcaggaaagtgccagaatagaggatatgaggaagcgacatgtagaagtcagccaggcaccgctgccaccagctcccgcatacctaagtagccccctagccctcccttcgcagcgcagatcaccccctgaggagccccctgacttttgctgccccaagtgtcagtaccaggcccctgacatggatacattacaaattcatgtgatggaatgtatcgagtag

SEQ ID NO: 325030 - DNA, 1260 bp, Artificial Sequence
  derived and/or modified sequence
atgaatcggcacctatggaaatcacagctgtgtgaaatggtacaacctagtggcggtcctgcagcggaccaagacgtgctgggagaggaatctccactgggcaaacccgctatgctgcatctgccttccgagcagggagcccctgaaacgctgcagaggtgtttggaagagaatcaagagttacgcgatgccattcgccagagtaaccagattcttagagaaagatgtgaggagttgctgcactttcaggccagccagcgggaagaaaaagaattcctgatgtgcaaattccaagaagcccgaaaattagtggagcgcctgggactcgagaagttggatcttaagcggcaaaaggaacaggccctcagagaggtcgagcatctgaagagatgccagcagcaaatggctgaagataaggcctccgtaaaagcccaagtcaccagcctgcttggggagctgcaagagtctcagtcgcgactagaggccgcaacgaaggagtgccaggctctcgagggaagagccagagctgcctccgaacaggcccgtcagttggaatcagagcgcgaagccctacagcagcagcattccgtccaggtggatcagcttaggatgcagggacagtcagtggaagctgccctcaggatggagaggcaggctgcttctgaggaaaaacgtaaactcgctcaactgcaggtggcctatcatcaactatttcaggaatacgacaatcatataaagagtagcgtcgtcggatccgagaggaagagaggcatgcaactggaggacctgaaacagcagctgcagcaggccgaagaggccctggtagccaaacaggaggttatagacaaattaaaagaggaagctgaacagcataagatcgtgatggaaactgtgccggtactgaaggcccaggctgacatttataaggcagattttcaggcagaacgtcaggctagggagaagctcgcagagaagaaggagctgctgcaggaacagttggagcagcttcagagagaatattcgaagctgaaggcctcttgtcaggagtctgctcgtatcgaggacatgcgcaagcgacacgttgaagtgagtcaggccccattaccaccagctcccgcatatctttcctcccctttggcactgccgtctcaacggcgaagccctccagaagagcctccagacttctgttgtcccaaatgtcagtatcaggcccctgacatggatacgctgcagatacatgtgatggaatgtattgagtag

SEQ ID NO: 325031 - DNA, 1260 bp, Artificial Sequence
  derived and/or modified sequence
atgaaccgccacctgtggaagtcccagctgtgcgaaatggtgcagcccagtggaggacccgctgctgaccaggacgttctaggcgaagagtccccgttgggcaaaccagctatgctgcacctcccaagtgagcaaggtgccccagagactctccagcgctgcctggaggagaatcaagagttgagagacgcaatcaggcagagcaaccaaatcttaagagaaagatgcgaggagcttctgcatttccaagcctctcagagagaagaaaaagagtttctgatgtgtaagtttcaagaggcccgaaagctcgtggaaagactgggcctcgagaagctggacctgaagcgacagaaagaacaggcactcagagaagtagagcatctgaagagatgtcaacaacaaatggctgaagataaggcctcagttaaagctcaggttaccagtctcctcggggaactccaggaatcccagtctagattggaggccgctacgaaggagtgtcaggccctcgagggcagggctcgggctgcaagcgagcaggcccgacagcttgaatccgaaagggaagctctgcagcagcagcactctgtgcaagtggaccagctccgcatgcagggacagagcgtcgaggctgcactgagaatggaacgccaggctgcgtctgaagagaaacgaaagttggcccagctgcaggtggcctatcatcagttgtttcaggagtatgataatcatatcaaatcttctgtggtgggttctgaacgaaagcgtgggatgcagttggaggatctgaagcaacagctccaacaggccgaagaggccctcgtggctaagcaggaagttatcgataagctgaaggaagaggcagagcagcataaaattgtaatggaaactgtgcccgtgttgaaggcccaggcagatatttacaaggccgacttccaagcagagcgccaggctagagagaagctggccgagaaaaaagaactgctccaggagcaactggagcagcttcagagggaatattcaaagctgaaggccagctgtcaggagtcagcacgtattgaggacatgaggaaaaggcacgtagaggtgtcacaggctcccctgccccctgctccggcatacctgtcgagcccactagctcttccttcacagcgcaggtccccaccagaggagccacctgatttttgctgcccaaaatgtcaataccaggcgccagatatggatacactgcagattcatgtgatggaatgtatcgaatag

SEQ ID NO: 325032 - DNA, 621 bp, Artificial Sequence
  derived and/or modified sequence
atgaatcgtcacctatggaaaagtcagctatgcgaaatggtccaacctagcgggggacccgcagcagaccaggatgtgttaggcgaggagagtcctcttggtaagccagctatgctacacctgccctcggaacaaggcgcacccgagacccttcagcgctgcctcgaagagaatcaggaactcagggacgcaatccggcaatcgaatcagatactgcgtgaaaggtgcgaagaactcttacacttccaggccagccaacgggaagaaaaagaatttctcatgtgcaaattccaggaggccagaaagcttgttgaacggcttggcctagaaaagctggatctaaagaggcagaaagaacaggcgctccgagaggtcgagcatcttaaacggtgccagcagcagatggcagaagataaggcttcagtgaaagcccaggtcacatcactgctgggtgagctccaggagtcccaatcccggctggaggccgctacaaaggagtgtcaggcactggagggccgagcccgagcagcctcagaacaagctaggcagctggaatcagaacgggaggcccttcagcaacaacacagcgtgcaggtggatcagttgcgcatgcagggctag

SEQ ID NO: 325033 - DNA, 756 bp, Artificial Sequence
  derived and/or modified sequence
atgaacagacatctttggaagtcacagctctgcgaaatggtgcagccatctggaggccctgccgctgaccaggacgttttgggtgaagaaagtccccttgggaaaccagccatgcttcatctgccttctgaacagggggctccagagacactgcagaggtgtctcgaggaaaaccaggaactcagggacgctatccgtcaatccaatcagatattgagggagaggtgcgaggagcttctgcacttccaggcttcccagcgagaagaaaaggagttcctgatgtgcaaattccaggaggctaggaaactcgttgaaagactgggacttgaaaagctagacttgaaacggcagaaggagcaggctctgcgggaggtcgaacacttgaaacgctgccagcagcagatggcagaggacaaagccagtgtaaaggcgcaggttacctcattgctgggcgagctccaggagagccagtccaggctggaggccgctaccaaggagtgccaggccctagaaggcagagctcgggctgcctcagagcaggctcggcagcttgaaagtgaacgggaagctctccagcagcagcattccgttcaggtggatcagctacgaatgcagggacagtccgttgaagccgctttgcgcatggagagacaagcagcttctgaagaaaaaagaaagctggcgcagcttcaagttgcctaccatcagttattccaggagtatgataaccatattaaatcctcagtcgtgggttag

SEQ ID NO: 325034 - DNA, 621 bp, Artificial Sequence
  derived and/or modified sequence
atgaacagacacctgtggaagagccagctgtgcgagatggtgcagcccagcggcggccccgccgccgaccaggacgtgctgggcgaggagagccccctgggcaagcccgccatgctgcacctgcccagcgagcagggcgcccccgagaccctgcagagatgcctggaggagaaccaggagctgagagacgccatcagacagagcaaccagatcctgagagagagatgcgaggagctgctgcacttccaggccagccagagagaggagaaggagttcctgatgtgcaagttccaggaggccagaaagctggtggagagactgggcctggagaagctggacctgaagagacagaaggagcaggccctgagagaggtggagcacctgaagagatgccagcagcagatggccgaggacaaggccagcgtgaaggcccaggtgaccagcctgctgggcgagctgcaggagagccagagcagactggaggccgccaccaaggagtgccaggccctggagggcagagccagagccgccagcgagcaggccagacagctggagagcgagagagaggccctgcagcagcagcacagcgtgcaggtggaccagctgagaatgcagggctag

SEQ ID NO: 325035 - DNA, 756 bp, Artificial Sequence
  derived and/or modified sequence
atgaacagacacctgtggaagagccagctgtgcgagatggtgcagcccagcggcggccccgccgccgaccaggacgtgctgggcgaggagagccccctgggcaagcccgccatgctgcacctgcccagcgagcagggcgcccccgagaccctgcagagatgcctggaggagaaccaggagctgagagacgccatcagacagagcaaccagatcctgagagagagatgcgaggagctgctgcacttccaggccagccagagagaggagaaggagttcctgatgtgcaagttccaggaggccagaaagctggtggagagactgggcctggagaagctggacctgaagagacagaaggagcaggccctgagagaggtggagcacctgaagagatgccagcagcagatggccgaggacaaggccagcgtgaaggcccaggtgaccagcctgctgggcgagctgcaggagagccagagcagactggaggccgccaccaaggagtgccaggccctggagggcagagccagagccgccagcgagcaggccagacagctggagagcgagagagaggccctgcagcagcagcacagcgtgcaggtggaccagctgagaatgcagggccagagcgtggaggccgccctgagaatggagagacaggccgccagcgaggagaagagaaagctggcccagctgcaggtggcctaccaccagctgttccaggagtacgacaaccacatcaagagcagcgtggtgggctag

SEQ ID NO: 325036 - DNA, 417 bp, Artificial Sequence
  derived and/or modified sequence
atgaacagacacctatggaaatcacagctctgtgagatggtccaaccatctggcggccccgcagctgatcaggatgtactgggtgaggagtccccactcggcaaacccgctatgcttcatttgcccagcgagcaaggagcccccgagacactgcagcgatgtctggaagaaaaccaagagctaagggatgccatccgccagtcgaatcagatcctgagggaacgctgcgaggagctcctgcattttcaggcatctcaacgcgaagagaaggagttcctcatgtgcaagttccaggaagctcgcaagctggtggaacggcttggcctcgaaaagctggatctcaaaagacagaaggaacaggctttacgcgaagtagaacacctcaagaggtgccaacagcagatggccgaagactag

SEQ ID NO: 325037 - DNA, 693 bp, Artificial Sequence
  derived and/or modified sequence
gagctcaacttagcagagcctgtggggccctgcaacaattagttggaaaagctgaggcatggagcaggcacttcctggcttttaagattggggcctgggagatactcaccgatgcacccatgatgatgaatatgtgtgtatccgactgatggaaggcatcgccctggaaaagctcttcccgcaggatcccgcacacctgggtccggctcagggccacctgctctgccatgacgctgtctggtggaagaaaggctcgttaacaagcccttgccctgttggatgaataggcacctctggaagagccaactgtgtgagatggtgcagcccagtggtggcccggcagcagatcaggacgtactgggcgaagagtctcctctggggaagccagccatgctgcacctgccttcagaacagggcgctcctgagaccctccagcgctgcctggaggagaatcaagagctccgagatgccatccggcagagcaaccagattctgcgggagcgctgcgaggagcttctgcatttccaagccagccagagggaggagaaggagttcctcatgtgcaagttccaggaggccaggaaactggtggagagactcggcctggagaagctcgatctgaagaggcagaaggagcaggctctgcgggaggtggagcacctgaagagatgccagcagcagatggctgaggac

SEQ ID NO: 325038 - DNA, 417 bp, Artificial Sequence
  derived and/or modified sequence
atgaacagacacctgtggaagagccagctgtgtgagatggtgcagcccagcggcggccctgctgctgaccaggatgtgctgggggaggagagccccctgggcaagccagccatgctgcacctgcccagcgagcagggcgcccctgagaccctgcagcgctgcctggaggagaaccaggagctgagagatgccatccggcagagcaaccagatcctgcgggagcgctgtgaggagctgctgcacttccaggccagccagcgggaggagaaggagttcctgatgtgcaagttccaggaggccaggaagctggtggagcggctgggcctggagaagctggacctgaagaggcagaaggagcaggccctgcgggaggtggagcacctgaagcgctgccagcagcagatggctgaagattag

SEQ ID NO: 325039 - DNA, 417 bp, Artificial Sequence
  derived and/or modified sequence
atgaaccggcacctgtggaagagccagctgtgcgagatggtgcagccatcgggcggccccgccgccgatcaggacgttcttggggaagagtcccccttggggaaaccagccatgctgcacctgcctagcgagcagggcgcccctgaaacattgcagaggtgcctcgaagaaaatcaagagctcagggatgccatccgacaatcaaaccagatcctgagagagcggtgtgaggaactcctgcatttccaagcaagtcagagagaagagaaagaatttctgatgtgtaagttccaagaagctcggaagctcgttgaacgacttggtctggagaagctggatctgaagaggcagaaggaacaagctctgcgggaggttgagcatctcaaaaggtgccagcagcagatggctgaggattag

SEQ ID NO: 325040 - DNA, 417 bp, Artificial Sequence
  derived and/or modified sequence
atgaatagacatctttggaagtcccaactttgtgagatggtgcagccctcggggggacctgcggcagaccaggacgttctgggagaagaaagtcccctgggcaaacccgctatgctgcacttgcctagtgaacagggggcacccgaaactttgcagagatgtctggaagaaaaccaggagctgcgggacgccatcaggcaatccaaccagatcctgcgggaacggtgtgaagagctcctgcatttccaagcttcccagagggaggagaaggaatttctcatgtgcaagttccaggaggcgcgtaaactagtggagaggctgggtctggagaagctagatctgaagaggcagaaagagcaagcactgcgagaagtggagcatctgaagaggtgccagcaacaaatggcagaagactag

SEQ ID NO: 325041 - DNA, 417 bp, Artificial Sequence
  derived and/or modified sequence
atgaacagacacctgtggaagagccagctgtgcgagatggtgcagcccagcggcggccccgccgccgaccaggacgtgctgggcgaggagagccccctgggcaagcccgccatgctgcacctgcccagcgagcagggcgcccccgagaccctgcagagatgcctggaggagaaccaggagctgagagacgccatcagacagagcaaccagatcctgagagagagatgcgaggagctgctgcacttccaggccagccagagagaggagaaggagttcctgatgtgcaagttccaggaggccagaaagctggtggagagactgggcctggagaagctggacctgaagagacagaaggagcaggccctgagagaggtggagcacctgaagagatgccagcagcagatggccgaggactag

SEQ ID NO: 325042 - protein, 147 aa, Artificial Sequence
  derived and/or modified sequence
MEEAPLFPGESIKAIVKDVMYICPFMGAVSGTLTVTDFKLYFKNVERDPHFILDVPLGVISRVEKIGAQSHGDNSCGIEIVCKDMRNLRLAYKQEEQSKLGIFENLNKHAFPLSNGQALFAFSYKEKFPINGWKVYDPVSEYKRQGL

SEQ ID NO: 325043 - protein, 90 aa, Artificial Sequence
  derived and/or modified sequence
MEEAPLFPGESIKAIVKDVMYICPFMGAVSGTLTVTDFKLYFKNVERDPHFILDVPLGVISRVEKIGAQSHGDNSCGIEIVCKDMRNLRL

SEQ ID NO: 325044 - DNA, 564 bp, Artificial Sequence
  derived and/or modified sequence
aaaatgcacggaattgctcctgcttcaagatgtcaagaccgagggagcttgagctgttctataccttttccgggaaggacaactgagtcccacaggatcacatgttgaatggtgtaaacagcttatagctgctacaatttctagtcagatttcaggttcagtgacatcagaaaatgtgtccagagattacaaggttttcaggaggcctgatctaagggagattcaggaagaacacaatggctacccttctgaagctgaagctgatcaggtggctctaagggatggaaataagctggcacagatggaagaggctccacttttcccaggagaatcaattaaagccattgtgaaagatgtcatgtatatctgcccatttatgggagcagtgagtggaaccctgacagtgacggactttaagctgtacttcaaaaatgtcgagagggacccgcattttatccttgatgttccccttggagtgatcagcagagtggagaagattggagcacagagccatggagacaattcctgtggtatagagatagtgtgcaaggatatgaggaactt

SEQ ID NO: 325045 - DNA, 549 bp, Artificial Sequence
  derived and/or modified sequence
aagatgtcaagaccgagggagcttgagctgttctataccttttccgggaaggacaactgaggatcacatgttgaatggtgtaaacagcttatagctgctacaatttctagtcagatttcaggttcagtgacatcagaaaatgtgtccagagattacaaggttttcaggaggcctgatctaaggaatttagcaactaaaaaaaaaaaggagattcaggaagaacacaatggctacccttctgaagctgaagctgatcaggctctaagggatggaaataagctggcacagatggaagaggctccacttttcccaggagaatcaattaaagccattgtgaaagatgtcatgtatatctgcccatttatgggagcagtgagtggaaccctgacagtgacggactttaagctgtacttcaaaaatgtcgagagggacccgcattttatccttgatgttccccttggagtgatcagcagagtggagaagattggagcacagagccatggagacaattcctgtggtatagagatagtgtgcaaggatatgaggaac

SEQ ID NO: 325046 - DNA, 573 bp, Artificial Sequence
  derived and/or modified sequence
ttgctaaaatgcacggaattgctcctgcttcaagatgtcaagaccgagggagcttgagctgttctataccttttccgggaaggacaactgagtcccacaggatcacatgttgaatggtgtaaacagcttatagctgctacaatttctagtcagatttcaggttcagtgacatcagaaaatgtgtccagagattacaaggttttcaggaggcctgatctaagggagattcaggaagaacacaatggctacccttctgaagctgaagctgatcaggctctaagggatggaaataagctggcacagatggaagaggctccacttttcccaggagaatcaattaaagccattgtgaaagatgtcatgtatatctgcccatttatgggagcagtgagtggaaccctgacagtgacggactttaagctgtacttcaaaaatgtcgagagggacccgcattttatccttgatgttccccttggagtgatcagcagagtggagaagattggagcacagagccatggagacaattcctgtggtatagagatagtgtgcaaggatatgaggaacttgcggctt

SEQ ID NO: 325047 - protein, 94 aa, Artificial Sequence
  derived and/or modified sequence
  misc_feature (1)..(1): Xaa can be any naturally occurring amino acid
XAGKVEEQHLRTRDIINVSNRYFNPSGEPLELDSRFWELRDSIVQCELLMLRVLRFQVSFQHPHKVFNDDLTKPIIDNIVSDLIQIYTMDTEIP

SEQ ID NO: 325048 - DNA, 593 bp, Artificial Sequence
  derived and/or modified sequence
ggccggcaaagtggaagagcagcacctgcggactcgtgacatcatcaatgtgtccaacaggtactttaacccaagcggtgagcccctggaattggactcccgcttctgggaactccgggacagcatcgtgcagtgtgagcttctcatgctgagagttctgcgcttccaggtctccttccagcatccacacaaggtgtttaatgacgaccttaccaagccaatcattgataatattgtgtctgatctcattcagatttataccatggacacagagatcccctaaggtcctggcccaggcctgcccaaagagaagcccaggatggtcggctgcctggggacattgtcaccacgtcgccatgacggctggtccccacaggaccagctgggaggactggttgtgctgctggagaagggctggagaaggcaatggcatgctgccgctttgccagtccctagaagtcgcggtgcaggtgatggtgggagccgcgcctccagcgggcaggccgggagtgtactgtgtgcagctgacccaaggcagccacatctgcgtttgtcctttgagaggactttgactacaatacaggcatgacatc

SEQ ID NO: 325049 - DNA, 285 bp, Artificial Sequence
  derived and/or modified sequence
taagccgggaaggtggaggagcagcacctcagaacacgcgatatcatcaatgtgagcaacagatatttcaatccctcaggtgaacccctggagctggacagtaggttctgggaactgcgcgactcaatagtccagtgcgagctgttgatgctgagggtgctgcgcttccaggtgtcattccagcacccccataaagtcttcaatgacgacctcactaagcccataattgataacattgtcagcgacctgatacagatatataccatggataccgagataccatag

SEQ ID NO: 325050 - DNA, 285 bp, Artificial Sequence
  derived and/or modified sequence
tgagctgggaaggtggaggagcagcacctgcggacccgggacatcatcaacgtgagcaaccgctacttcaaccccagcggggagcccctggagctggacagccgcttctgggagctgcgggacagcatcgtgcagtgtgagctgctgatgctgcgggtgctgcgcttccaggtgtccttccagcacccccacaaggtgttcaatgatgacctgaccaagcccatcatcgacaacatcgtgtctgacctgatccagatctacaccatggacacagagatcccctag

SEQ ID NO: 325051 - DNA, 285 bp, Artificial Sequence
  derived and/or modified sequence
tgagccggcaaggtggaggagcagcacctgcggacccgggacatcattaatgtcagcaacaggtatttcaatccatctggtgagcccctggaacttgattctaggttctgggaactgcgtgatagcatagtacaatgcgaattgttgatgttgagagtattgagatttcaggtgtcttttcagcaccctcataaagttttcaatgatgatttgaccaagccaatcatcgacaacatcgtgagcgaccttatccagatctatactatggatacagagattccctag

SEQ ID NO: 325052 - DNA, 285 bp, Artificial Sequence
  derived and/or modified sequence
tgagccggaaaagtagaagagcagcacctgcgaactagagatattattaatgtcagcaaccggtactttaatccctccggcgaacctctcgagctcgactcccgattctgggagctgcgcgatagtatcgtgcagtgtgagctactcatgctgcgggtgctgcgatttcaggttagctttcagcaccctcataaagtctttaatgatgacttgactaagccaatcatcgacaatatcgtgtcagacctgatacagatctataccatggacacagagattccttag

SEQ ID NO: 325053 - DNA, 285 bp, Artificial Sequence
  derived and/or modified sequence
tgagccggcaaggtggaggagcagcacctgagaaccagagacatcatcaacgtgagcaacagatacttcaaccccagcggcgagcccctggagctggacagcagattctgggagctgagagacagcatcgtgcagtgcgagctgctgatgctgagagtgctgagattccaggtgagcttccagcacccccacaaggtgttcaacgacgacctgaccaagcccatcatcgacaacatcgtgagcgacctgatccagatctacaccatggacaccgagatcccctag

SEQ ID NO: 325054 - protein, 2732 aa, Artificial Sequence
  derived and/or modified sequence
MEQTDCKPYQPLPKVKHEMDLAYTSSSDESEDGRKPRQSYNSRETLHEYNQELRMNYNSQSRKRKEVEKSTQEMEFCETSHTLCSGYQTDMHSVSRHGYQLEMGSDVDTETEGAASPDHALRMWIRGMKSEHSSCLSSRANSALSLTDTDHERKSDGENGFKFSPVCCDMEAQAGSTQDVQSSPHNQFTFRPLPPPPPPPHACTCARKPPPAADSLQRRSMTTRSQPSPAAPAPPTSTQDSVHLHNSWVLNSNIPLETRHFLFKHGSGSSAIFSAASQNYPLTSNTVYSPPPRPLPRSTFSRPAFTFNKPYRCCNWKCTALSATAITVTLALLLAYVIAVHLFGLTWQLQPVEGELYANGVSKGNRGTESMDTTYSPIGGKVSDKSEKKVFQKGRAIDTGEVDIGAQVMQTIPPGLFWRFQITIHHPIYLKFNISLAKDSLLGIYGRRNIPPTHTQFDFVKLMDGKQLVKQDSKGSDDTQHSPRNLILTSLQETGFIEYMDQGPWYLAFYNDGKKMEQVFVLTTAIEIMDDCSTNCNGNGECISGHCHCFPGFLGPDCARDSCPVLCGGNGEYEKGHCVCRHGWKGPECDVPEEQCIDPTCFGHGTCIMGVCICVPGYKGEICEEEDCLDPMCSNHGICVKGECHCSTGWGGVNCETPLPVCQEQCSGHGTFLLDAGVCSCDPKWTGSDCSTELCTMECGSHGVCSRGICQCEEGWVGPTCEERSCHSHCTEHGQCKDGKCECSPGWEGDHCTIAHYLDAVRDGCPGLCFGNGRCTLDQNGWHCVCQVGWSGTGCNVVMEMLCGDNLDNDGDGLTDCVDPDCCQQSNCYISPLCQGSPDPLDLIQQSQTLFSQHTSRLFYDRIKFLIGKDSTHVIPPEVSFDSRRACVIRGQVVAIDGTPLVGVNVSFLHHSDYGFTISRQDGSFDLVAIGGISVILIFDRSPFLPEKRTLWLPWNQFIVVEKVTMQRVVSDPPSCDISNFISPNPIVLPSPLTSFGGSCPERGTIVPELQVVQEEIPIPSSFVRLSYLSSRTPGYKTLLRILLTHSTIPVGMIKVHLTVAVEGRLTQKWFPAAINLVYTFAWNKTDIYGQKVWGLAEALVSVGYEYETCPDFILWEQRTVVLQGFEMDASNLGGWSLNKHHILNPQSGIIHKGNGENMFISQQPPVISTIMGNGHQRSVACTNCNGPAHNNKLFAPVALASGPDGSVYVGDFNFVRRIFPSGNSVSILELRNRDTRHSTSPAHKYYLAMDPVSESLYLSDTNTRKVYKLKSLVETKDLSKNFEVVAGTGDQCLPFDQSHCGDGGRASEASLNSPRGITVDRHGFIYFVDGTMIRKIDENAVITTVIGSNGLTSTQPLSCDSGMDITQVRLEWPTDLAVNPMDNSLYVLDNNIVLQISENRRVRIIAGRPIHCQVPGIDHFLVSKVAIHSTLESARAISVSHSGLLFIAETDERKVNRIQQVTTNGEIYIIAGAPTDCDCKIDPNCDCFSGDGGYAKDAKMKAPSSLAVSPDGTLYVADLGNVRIRTISRNQAHLNDMNIYEIASPADQELYQFTVNGTHLHTLNLITRDYVYNFTYNSEGDLGAITSSNGNSVHIRRDAGGMPLWLVVPGGQVYWLTISSNGVLKRVSAQGYNLALMTYPGNTGLLATKSNENGWTTVYEYDPEGHLTNATFPTGEVSSFHSDLEKLTKVELDTSNRENVLMSTNLTATSTIYILKQENTQSTYRVNPDGSLRVTFASGMEIGLSSEPHILAGAVNPTLGKCNISLPGEHNANLIEWRQRKEQNKGNVSAFERRLRAHNRNLLSIDFDHITRTGKIYDDHRKFTLRILYDQTGRPILWSPVSRYNEVNITYSPSGLVTFIQRGTWNEKMEYDQSGKIISRTWADGKIWSYTYLEKSVMLLLHSQRRYIFEYDQPDCLLSVTMPSMVRHSLQTMLSVGYYRNIYTPPDSSTSFIQDYSRDGRLLQTLHLGTGRRVLYKYTKQARLSEVLYDTTQVTLTYEESSGVIKTIHLMHDGFICTIRYRQTGPLIGRQIFRFSEEGLVNARFDYSYNNFRVTSMQAVINETPLPIDLYRYVDVSGRTEQFGKFSVINYDLNQVITTTVMKHTKIFSANGQVIEVQYEILKAIAYWMTIQYDNVGRMVICDIRVGVDANITRYFYEYDADGQLQTVSVNDKTQWRYSYDLNGNINLLSHGKSARLTPLRYDLRDRITRLGEIQYKMDEDGFLRQRGNDIFEYNSNGLLQKAYNKASGWTVQYYYDGLGRRVASKSSLGQHLQFFYADLTNPIRVTHLYNHTSSEITSLYYDLQGHLIAMELSSGEEYYVACDNTGTPLAVFSSRGQVIKEILYTPYGDIYHDTYPDFQVIIGFHGGLYDFLTKLVHLGQRDYDVVAGRWTTPNHHIWKQLNLLPKPFNLYSFENNYPVGKIQDVAKYTTDIRSWLELFGFQLHNVLPGFPKPELENLELTYELLRLQTKTQEWDPGKTILGIQCELQKQLRNFISLDQLPMTPRYNDGRCLEGGKQPRFAAVPSVFGKGIKFAIKDGIVTADIIGVANEDSRRLAAILNNAHYLENLHFTIEGRDTHYFIKLGSLEEDLVLIGNTGGRRILENGVNVTVSQMTSVLNGRTRRFADIQLQHGALCFNIRYGTTVEEEKNHVLEIARQRAVAQAWTKEQRRLQEGEEGIRAWTEGEKQQLLSTGRVQGYDGYFVLSVEQYLELSDSANNIHFMRQSEIGRR

SEQ ID NO: 325055 - DNA, 86 bp, Artificial Sequence
  derived and/or modified sequence
gaataatcattgaacggaatcgaatggaaacatcatcgaatggaaacgaatggaatcatcatcgaatggaaatgaaaggagtcatc

SEQ ID NO: 325056 - DNA, 8199 bp, Artificial Sequence
  derived and/or modified sequence
atggaacagacggattgcaaaccttaccagcctctgcccaaggtgaagcacgagatggacttggcatacacctcctcatccgatgagtcagaggacggcaggaagcccagacagtcttacaactcgcgcgagaccctgcacgaatacaaccaggagttacggatgaactacaattctcagtcacgcaagcgcaaggaggtggagaaaagcacacaagagatggaattctgcgaaacgagccatactctatgttcaggataccagaccgacatgcatagcgtgtcaagacacgggtatcagctggaaatgggatccgatgtggatactgagacagaaggtgctgcaagccctgaccatgccttaaggatgtggattagggggatgaaaagcgagcatagctcctgtttaagtagtcgtgcaaactccgcactgtcactgaccgataccgaccatgagcgcaagtcagacggggagaacggatttaaattcagccctgtgtgctgtgatatggaggcgcaggctggctccacacaagatgtgcagtcgagtccacataaccaattcacctttaggccccttccccctccccctccgccacctcacgcctgtacctgtgccaggaaaccgcctccagcggcagactctctgcaacggaggtctatgaccactagatctcaaccctcccccgctgccccagctcctccgacttcaacccaagatagcgtccacttgcacaactcatgggtcctgaattcaaacatccccttagagacaagacattttctctttaagcacggatccggcagttctgccatttttagcgccgcttctcagaactaccccctcacttcaaacacagtgtacagcccacctccccgtcctctaccaagaagcactttctctaggccggcattcacctttaacaagccttacagatgttgtaactggaagtgcactgccctatctgcgacagcaattacagtgacgctagccttgctgcttgcgtacgtaatcgctgtacacctgtttggactgacgtggcagcttcaaccagtcgagggcgagctgtatgccaacggggtgtcaaaaggcaacagagggacagaaagcatggataccacgtacagtcctatcgggggaaaggtttcagacaaaagtgaaaaaaaggtgttccagaaggggagagcaatcgacacaggggaggtggacatcggtgcacaggtaatgcagaccatccctcctggtctcttttggcgattccagattaccatccaccacccaatttacctcaagttcaacataagtctcgctaaggactccctgctgggcatctacggaaggcgcaatattccaccgactcacacgcagttcgattttgtaaagctgatggatgggaagcaacttgtaaagcaagacagcaaggggtctgatgatacacagcatagcccgaggaacctgatactcacgagcttacaggagacagggttcatcgagtatatggatcagggcccttggtaccttgctttctacaatgatggtaagaaaatggagcaggttttcgtcctcactaccgcaattgaaattatggacgattgttcgacgaattgtaacgggaacggcgagtgcatcagtggtcattgtcattgcttccccggttttctcggcccagattgtgctcgtgactcctgccctgtgctgtgcggaggtaatggggaatacgagaagggccattgcgtctgccgtcatggctggaaaggtcctgagtgcgatgtgccagaagaacagtgcatcgatccgacctgcttcggccatggcacatgtattatgggtgtctgcatctgcgtgccgggatataaaggagagatatgtgaagaagaggattgtcttgatccaatgtgctctaaccacggcatctgcgtcaagggagagtgccactgctcaactggttgggggggtgtaaattgtgagacgcccctgcccgtatgtcaagagcagtgtagcggtcacgggaccttcctgctggacgccggtgtgtgtagctgcgacccaaagtggacgggtagtgactgcagtaccgaattgtgtactatggaatgtggatcccacggggtctgtagccgtggaatctgtcagtgtgaggagggatgggttgggcctacgtgcgaggagcgctcttgtcacagtcactgtaccgagcacggccaatgtaaggacggaaaatgtgaatgtagtcccggttgggagggagaccactgcaccattgcccattacctcgatgcggttcgcgacggctgcccaggactgtgttttggcaacggacgctgtaccctcgatcagaacggttggcactgcgtgtgccaggtgggctggtccggtactggatgcaatgttgtcatggagatgctgtgcggcgacaacctcgacaacgacggcgacgggctgactgactgcgtggatccagactgttgccagcagtctaattgttatattagtcccttatgtcagggctctcccgacccactggatttaattcaacaatcccaaactctgttcagccagcacacctctaggctgttctacgataggattaagtttctgataggtaaagattccacacatgtaattcctcccgaggtcagtttcgactctcggagagcttgtgttattagaggccaggtcgtagcaattgacggaactcccctggtcggagtcaacgtgagtttcctgcaccattcagactacggatttacaatctctcgccaggatgggagctttgacctggtggcaattggcggtatttccgtgattttgatcttcgaccgcagccctttcctcccggagaagcggactctgtggctaccctggaaccaattcatcgttgtcgaaaaagttacgatgcaacgggtggtctctgatccgccttcttgcgacattagtaattttataagcccaaaccccatcgtactgcctagccctctcacgtccttcggcggttcgtgtccagaaagaggcacaattgttcccgagttgcaggtggtccaggaggagataccaattccatctagtttcgtgaggttgagttacctgagttctaggacgccaggatacaagaccctcttgcggatcttgttgacacattctactatccccgtcggcatgattaaagttcaccttaccgtcgctgtagagggcagattgactcagaaatggtttcctgctgccatcaacctggtgtatacattcgcatggaacaagaccgatatttatggacagaaggtgtggggcttagctgaggcgctggtaagcgtcgggtatgagtacgagacctgtccagactttatactctgggaacaacgcacggtcgtgttacaaggatttgagatggacgcaagcaaccttggagggtggagtctaaataagcatcatatactgaatccacagtcgggcatcattcacaagggcaacggcgagaacatgttcatctctcaacagccccctgtcattagcacgattatggggaatggccaccagagatcagttgcttgtactaactgcaatggcccagcccataacaataaactctttgcaccagtggcgcttgcaagtggcccagatgggtctgtgtacgttggggactttaactttgtccggaggatattcccatctgggaatagcgtatccattctggagctgagaaatcgtgacacaagacattccaccagtccagcacataagtactatctagctatggatcctgtgtctgagagtttgtacctttccgacactaacaccaggaaagtctataaattgaagagtttggttgagaccaaggacctgtcaaagaacttcgaagtggtagccggtaccggggaccagtgcttgccgttcgaccagagtcattgtggtgacggcggtagagcttctgaagcttctctgaattcaccaagaggcattactgtcgacaggcatggttttatatactttgtggatggcaccatgattcgcaaaatagatgaaaacgctgtgataactactgtcattggatcaaatggccttacgagcactcaacctctgtcttgcgactcggggatggacataactcaagtcaggctggagtggccaactgatttagccgtaaatcctatggacaacagcttgtatgtcctggataataacatagtattgcaaatctcagagaaccggagagtgcgcatcatcgccggacgccctatccactgccaggtcccagggatcgatcactttcttgtttccaaagtcgcaatccatagcacactggagtcggcccgagcaatctcggtaagccactctggccttttattcatcgccgagaccgacgagcggaaagttaatcgcattcagcaggtgaccactaatggtgagatttatatcattgccggagcccctaccgactgtgactgtaaaatcgaccccaactgtgactgcttttcaggggacggtggctatgccaaggatgccaagatgaaggccccaagctcccttgctgtgtcccctgatggcaccctctatgtcgccgacctggggaatgtccggatccggactatctctcggaaccaggcacacctaaacgacatgaatatctacgagattgcttcaccagcagatcaggagttataccagttcactgtgaacggcactcacctccacacgttgaacctgataacaagagattacgtttataattttacttataatagcgagggggatcttggggctatcacctcttcaaacgggaacagtgtgcatattagacgagacgctggcggaatgcctctgtggctcgtggtgccaggagggcaggtctattggctcactatctcctccaacggggtcctaaagcgtgttagcgcccagggatataacctagctctcatgacgtatccaggaaatactggcctgttggccacgaaatccaatgagaatggttggacgactgtctatgagtatgatccagaaggacacttaacgaatgcaacattcccgacaggagaggtgtcgagttttcactctgacctggagaaacttactaaggttgaactcgatacaagtaatcgtgagaacgtcctaatgtccaccaaccttactgctacttcaactatctacatcctcaaacaggagaatacccagtctacgtacagagtgaatcccgacgggtccctcagagtaacgtttgcctccggcatggaaatcgggctgagctcagagccgcacattttggccggtgcagttaaccctacactggggaaatgcaacatcagcctgccaggagaacacaatgctaatctgatcgaatggagacagcgcaaggagcagaacaaaggaaacgtgagtgcgtttgagcgaagactccgcgcacacaatagaaatctgctgagtatcgacttcgaccacatcacccggacaggtaaaatttatgacgaccaccggaagttcaccttgcggattctctacgaccagactggaagaccaatactgtggtcacccgtttctcggtacaacgaggtgaatatcacctactcaccaagcggcctcgttacctttatccaaagaggtacttggaatgagaagatggagtatgatcagtccggaaagatcatatctcgaacttgggcggatggaaagatttggagctacacatacttggagaaaagcgttatgctgttgctgcattctcagaggaggtacatctttgagtatgatcagccagactgccttctgtcggttactatgccgtctatggtgcggcatagtcttcagaccatgctgtccgtgggctactatcgcaacatttataccccacccgactccagtactagttttattcaggattatagtcgggatgggaggctactgcagacactgcatctcgggacgggaagacgtgtattgtataagtatacaaaacaggcaaggttatccgaggtcctctatgacaccacccaggtaactttgacttatgaggaatctagcggagttataaaaacaatccacctcatgcacgacggcttcatatgcaccattagatatcgccaaactggcccacttatcggtcgccagattttccgcttttctgaagagggtctagttaatgcccgattcgactattcctataataatttcagggtgacctctatgcaggccgtgatcaatgagacacctctacctattgacctctataggtacgtggacgtatccggacgcacagaacaatttgggaaattctctgtgattaattacgacctcaaccaggtgatcaccacaaccgtcatgaagcacactaaaattttcagtgccaatggccaagtgatcgaggtccagtatgagatccttaaagcaattgcctattggatgacaatccagtacgacaacgtgggcagaatggtgatttgcgacatccgagttggggtggatgcaaacataaccaggtacttctacgaatatgatgctgatggccaactgcagacggtatccgtcaatgataagacacagtggcgctacagttacgatctgaacggaaacattaaccttttatcacacggcaagtccgccaggctgacacccctccggtacgatttgcgtgacagaatcacgcgtctgggagagattcagtacaaaatggacgaagatggattcctgcggcagaggggcaatgatattttcgaatataattccaatggcctactgcagaaagcctacaataaggcatctgggtggacagtacaatactactatgacggactgggtcgccgagtcgcgtcaaaatcaagcttggggcagcatctacagttcttctatgctgacctgactaatccaatccgggtgacacatctctacaatcacacttctagcgagattacttcgctgtactacgatttgcaaggccacctgatagctatggaactgagttcgggggaagaatactacgtggcgtgtgataatacaggcacccccctggccgtcttcagcagcagggggcaggttattaaagaaatcctttacacgccatatggggacatctatcacgatacctaccctgatttccaggtgattatcggcttccatggcggtctatatgactttctgacaaagctggtgcacctggggcagcgcgactatgacgtggtggctggtcggtggactactcccaaccatcacatctggaaacagcttaatctgctgcccaaaccctttaatctgtactcctttgagaataactaccctgtgggtaaaatccaagacgttgcaaagtacactactgatatcagaagttggttggagttgttcgggttccagttgcacaatgttcttccgggatttccaaagccagagctggagaatctggagctgacctatgaactgctcagactccaaacaaagacccaggaatgggaccccggaaagacgattctgggaattcagtgcgaacttcagaagcagctgcggaatttcataagcctggaccagttgcctatgactccaaggtacaacgacggcaggtgcctggaagggggaaaacagcctcgctttgctgctgtccctagcgtgttcggtaagggcattaaatttgctattaaggacgggatagtgactgccgatatcatcggtgtcgccaacgaggactcccggaggctggccgcaatcctgaataatgcccattacctagagaatctccacttcactatcgaaggaagagacacccactacttcatcaaactgggatctctcgaggaggacctggtgctgatagggaatactggagggagacgtatcctcgaaaatggcgtgaacgtgacggtgtctcaaatgacttcagtacttaatgggaggacacgcaggttcgcggacattcagctgcagcatggggcactgtgcttcaatatcaggtacggcacgactgtagaggaggaaaaaaaccacgtactcgagattgcacgccagcgagcagtagcccaggcatggaccaaagaacagaggcgcctgcaggaaggcgaggaaggcatccgcgcatggacagagggagaaaagcaacagctgctgtccactggcagggtccaggggtatgacggctattttgtgttgagcgtagagcaatacctggagttaagcgacagcgctaacaacatccactttatgcgacagagcgaaatcggcagaagatag

SEQ ID NO: 325057 - DNA, 12891 bp, Artificial Sequence
  derived and/or modified sequence
gactgcttgcattaaaggacttcctcatcctttttttcatgaaactgagcttgcttaatcagagatggagcaaactgactgcaaaccctaccagcctctaccaaaagtcaagcatgaaatggatctagcttacaccagttcttctgatgagagtgaagatggaagaaaaccaagacagtcatacaactccagggagaccctgcacgagtataaccaggagctgaggatgaattacaatagccagagtagaaagaggaaagaagtagaaaaatctactcaagagatggaattctgtgaaacctctcacactctgtgctctggctaccaaacagacatgcacagcgtttctcggcatggctaccagctagagatgggatctgatgtggacacagagacagaaggtgctgcctcacctgaccatgcactaagaatgtggataaggggaatgaaatcagagcatagttcctgtttgtccagccgggccaactctgcattatccttgactgacactgaccatgaaaggaagtctgatggggaaaatggtttcaaattctctcctgtttgttgtgacatggaggctcaagctgggtctactcaagatgtgcagagcagcccacacaaccagttcaccttcagacccctcccaccgccacctccgcctcctcatgcctgcacctgtgccaggaagccaccccctgcagcggactctcttcagaggagatcaatgactacccgcagccagcccagcccagctgctccagctcccccaaccagcacgcaggattcagtccatctgcataacagctgggtcctgaacagcaacataccattggagaccaggcatttcctgttcaaacatggatctggttcctctgcgatcttcagtgcagccagtcagaactaccctctgacatccaataccgtgtactcgccccctcccaggcctcttcctcgaagcaccttttcccgacctgcctttacctttaacaaaccttacaggtgctgcaactggaagtgcacagcattgagcgccactgcaatcacagtgactttggccttgttactagcctatgtgattgcagtgcatttgttcggcctgacttggcagttgcaaccagttgaaggagagctgtatgcaaatggagttagcaaagggaacagggggaccgagtccatggacactacttactctccaattggaggaaaagtttctgataaatcagagaaaaaagtgtttcagaagggacgggcgatagacactggagaagttgacattggtgcacaggtcatgcagaccattccacctggtttattctggcgtttccagattactatccaccatccaatatatctgaagttcaatatttctttagccaaggactctctgctgggaatttatggcagaagaaacattccacctacacatactcagtttgattttgtaaaactaatggatggcaaacagctggtcaagcaggactccaagggctctgatgatacacagcactcccctcggaacctgatcttaacttcgcttcaggagacaggtttcatagagtatatggatcaaggaccttggtatctggcgttttacaatgatggaaaaaagatggagcaagtattcgtgttaactacagcaattgaaataatggatgactgttcaaccaattgcaatggaaatggagagtgtatctctggccattgtcattgtttcccaggattccttggacctgactgtgctagagattcctgccctgtgctgtgtggtgggaatggagaatacgagaaaggacactgtgtctgccggcatggctggaaggggccagagtgtgacgttccggaagaacaatgcattgatccaacatgctttggccacggcacctgcatcatgggagtctgcatctgtgtgccaggatacaaaggagaaatatgcgaggaagaggactgcctagacccaatgtgttccaaccatggcatctgtgtaaaaggagaatgtcactgttctactggctggggaggagttaactgtgaaacaccacttcctgtatgtcaagagcagtgctcaggacacggaacttttcttctggacgctggagtatgcagctgtgatcccaagtggacaggatctgactgctcaacagagctgtgtaccatggagtgtggtagccatggagtctgctcaagaggaatttgccagtgtgaagaaggctgggtaggaccaacatgtgaggaacgctcctgtcattctcattgtactgagcatggccaatgcaaagatggaaaatgtgagtgtagccctggatgggagggcgaccactgcacaattgctcactacttagatgctgtccgagatggctgcccagggctctgctttggaaatggacgatgtaccctggatcaaaatggttggcactgtgtgtgtcaggtgggttggagtgggacaggctgcaatgttgtcatggaaatgctttgtggagataacttggacaatgatggagatggtttaaccgactgtgtggatcctgactgttgtcaacaaagcaactgttatataagtcctctctgccagggctcaccagatcctcttgacctcattcagcaaagccaaactctcttctctcagcacacttcaagacttttttatgatcgaatcaaattcctcattggcaaggacagtactcatgtcattcctcctgaggtgtcatttgacagcaggcgtgcctgtgtgattcgaggccaagtggtggccatagatggaactcctctagtgggagtgaatgtcagtttcttgcaccacagtgattatgggtttaccatcagccggcaagatggaagctttgacctcgtggccatcggtggcatctctgtcatcttaatcttcgaccgatcccctttcctgcctgagaagagaacactctggttgccttggaatcagtttattgtggtagagaaagtcaccatgcagagagttgtatcagacccgccatcctgcgatatctccaactttatcagcccaaaccctattgtgcttccttcaccgctcacatcatttggagggtcctgtccagagaggggaactattgttcctgagctgcaggttgtacaggaggaaattcccattccctccagctttgtgaggctgagttacctgagcagccgcacccctgggtataaaaccctgctacggatccttctgacacattcaacgattcctgtaggcatgataaaagtacacctcacagtagctgtggaagggcgactcacacagaagtggtttcccgccgcaattaatcttgtctacacatttgcttggaacaagaccgacatctatggacagaaggtttggggcctggcagaggctttggtatctgtgggatatgaatatgaaacgtgccctgactttattctctgggagcaaaggacagtcgttttacaaggttttgagatggatgcttctaacctaggaggctggtctttgaataagcatcacattttgaatcctcaaagtggaatcatacataaagggaatggagaaaatatgttcatttcccagcagcccccagtcatatcaaccataatgggtaatggacaccaaaggagtgtagcctgcaccaactgcaatggcccagcccacaacaacaaactctttgctcctgtcgccttagcttctggccctgatggcagtgtgtatgttggcgacttcaattttgtaaggagaatatttccctcgggaaactccgttagtattttggaattaagaaacagagataccagacatagcacaagtcctgctcacaaatactatctggctatggaccctgtgtctgaatcactctatctatcagacaccaatactcgcaaagtctacaagttgaaatctcttgtggagacgaaagatctgtccaagaattttgaagtggtggcaggaactggtgatcagtgccttccctttgaccagagtcattgtggagatggtgggagagcatcggaagcttcactgaatagccctcgaggcatcacagttgataggcatggatttatttactttgtggatgggactatgattcgcaaaattgatgagaatgctgtgatcacaactgtaatcggctcaaatggtctgacttccacacaaccactgagctgtgactcaggaatggacatcactcaggtgcgattagagtggccaacagaccttgcagtaaatcctatggacaattcattgtatgtcttggataacaacattgtgctgcaaatttctgagaacaggcgtgttcggatcatcgcaggacgccccattcactgccaggtgccaggcatcgatcatttcctggtcagcaaggtagcaattcactccactctagagtcagcgagggccatcagtgtctcccacagcgggctgctcttcatagctgaaacagacgagaggaaagtaaaccgcattcagcaagtaaccaccaatggggagatctacatcatcgctggtgcccccactgactgtgactgcaaaattgatccaaactgtgactgtttttcaggtgatggtggctatgccaaagatgcaaagatgaaagccccttcctccttagcagtgtcgcctgatggaaccctctatgtggcagacctcggaaatgttcgaattcgtaccatcagcaggaaccaagcccacctgaatgacatgaacatttatgagattgcttcacccgctgatcaggaactgtaccagttcactgtaaatggaacccacctacacaccctgaacttgataacaagggactatgtttataacttcacctacaattctgaaggtgacttgggcgcgattaccagcagcaatggcaattcagtgcacattcgccgtgatgcaggcggaatgccgctatggcttgtggtgcctggcggacaagtatactggctgactataagcagcaatggagtcctgaaaagagtgtcagcccaaggctataatctggccttaatgacctatccaggaaacacagggcttctggctaccaaaagtaacgaaaatggatggacaaccgtttatgagtatgaccccgagggacacctgaccaatgcaacgtttcccactggagaggtcagcagcttccacagtgacctggagaagctgacaaaagtggagctagatacttccaaccgtgaaaatgtcctcatgtcaaccaacttgacggcaactagtaccatatatattttaaaacaagaaaatactcaaagtacctatcgggtgaatccagatggttccctgcgtgtcacttttgccagcgggatggagatcggcctcagctcagagccccacatcctggcaggggcagtcaaccctaccctgggcaaatgcaacatctcattgcccggagagcacaatgcaaacctcatcgagtggcggcagaggaaggagcaaaacaaaggcaatgtttcggcttttgaaaggaggctgagggcccacaacagaaacctactctccatagattttgatcatataacccgcacaggaaagatctatgatgaccatcgaaaattcacccttcgaattctttatgaccagactgggcgacccattctgtggtctcctgtaagcagatataatgaagtgaacatcacatattcaccttcgggattggtgacgtttattcaaagaggaacgtggaatgaaaaaatggaatatgaccagagtgggaaaattatttcaagaacttgggctgatgggaaaatttggagctatacctacttagaaaaatctgtgatgcttctcctacacagccagcggcgttacatctttgagtatgaccaaccagattgtctgctctcagtcaccatgcctagcatggtgcgtcacagcttacaaaccatgctttcagtgggctactaccggaacatctacaccccaccggacagtagcacttcttttatccaagactatagtcgagatggccgattgctacagaccctgcatctggggacagggcgcagagtcttatacaagtacaccaagcaagcaaggctttctgaggttctctatgataccactcaggtcacattaacatatgaagagtcttctggagtgattaagacaatacacctgatgcatgacggattcatctgcacaatcagatacaggcaaacaggacctcttattggacgccagattttcagattcagtgaagaaggccttgtgaatgcacggttcgactacagctacaacaatttccgagtcacaagcatgcaagctgtaatcaatgaaacccctttgcctatagatctttaccgatatgttgatgtctctggcagaacagagcagtttggaaaattcagtgtaattaattacgatttaaatcaggtcataactactacagtgatgaaacacaccaaaatcttcagtgccaatggacaagtcattgaagtccaatatgaaatcctaaaggcaattgcctactggatgaccattcaatatgataatgtgggccgcatggtaatatgtgacataagggtaggagtagatgccaatataacaaggtacttctatgaatacgatgctgatgggcaacttcagactgtttctgtaaatgacaaaacccagtggcgttatagttacgatctgaatggaaacatcaacctcttaagccatgggaagagtgctcgtcttactcctctccgatatgacctccgagaccgcatcaccagattaggagaaattcagtataaaatggatgaagatggctttctgaggcagaggggaaatgatatttttgaatataattctaatggcctgctgcagaaagcctacaataaggcttctggctggactgtgcagtattactatgatgggcttgggcgacgtgtcgcgagtaagtccagcctagggcagcaccttcagttcttttatgcagaccttaccaaccccataagagttactcatttgtacaaccacacaagctcggagattacatctctgtattatgatctccaaggtcaccttattgccatggagttaagcagtggtgaagaatattatgtagcctgtgataatacaggtaccccactagctgtgttcagcagccgaggtcaggtcataaaggagatactatacacaccttatggcgatatctatcatgacacttaccctgactttcaggtcattattggttttcatggaggactctatgatttccttactaaattagtgcacctggggcaaagggattatgatgttgttgctggcagatggacaacgcctaatcatcacatatggaaacagttgaacctccttcctaaaccattcaacctctactcctttgaaaataactacccagttggcaaaattcaagatgttgcaaagtataccacagacatcagaagttggttggagctatttggtttccaattacacaatgtactacctggatttcccaaacctgaattagaaaatttagaattaacttacgagcttctacggcttcagacaaaaactcaagagtgggatcctggaaagactatcctgggcattcagtgtgaactccagaaacagctcaggaatttcatttccttggaccaactacctatgactccccgatacaatgatggacggtgccttgaaggagggaagcaaccaaggtttgctgctgtcccttctgtttttgggaaaggtataaaatttgccatcaaggatggcatagtaacagctgatattataggagtagccaatgaagatagcaggcggcttgctgccattctcaataatgcccattacctggaaaacctacattttaccatagaggggagggacactcactacttcattaagcttgggtctctggaggaagacctggtgctcatcggtaacactggggggaggcggattctggagaatggtgtcaatgtcactgtgtcccagatgacttctgtgttgaatgggaggactagacggtttgcagatattcagctccagcatggagccctgtgcttcaacatccggtatgggacaactgtcgaagaggaaaagaatcacgtgttggagattgccagacagcgcgcagtggcccaggcctggactaaggaacaaagaaggctgcaagagggggaagaggggattagggcatggacagaaggggaaaagcagcagcttttgagcactgggcgggtacaaggttacgatgggtattttgttttgtctgttgagcagtatttagaactttctgacagtgccaataatattcactttatgagacagagcgaaataggcaggaggtaacaaaaatatctctgcctttgcgtcaccaaagactgcctgtttttaaaacataaaatggtttattgtattggttttctagatcagaactctgtatatgtaaatatggaggaaaaacatatccaactgcctttcaatgtgacggaagatggtattttaatattgtttgtttaaactctttaagaaatgacagagatttttagttcttgtgtggcagtattcaaaataacacaagtagaactcaaacagctaaaaacagttttcagaaagcaccactttcaatttgccgagccatgcatatgttccaatatccagaaagaacccaaggttctctatctctattgtgagaagcagtttcatccttaactgttggcagaacttacgggctatttgaataggtggtgcaatagtatctgaaacttgcctttcgaaagactgccagccctttgacgttttccagatctgttataggaaacttaaaaacaggtgtaaaatgtcttcagccaccatctcctagagtgaggacccaattgcccttccttcttgattattcctccttgcttgttaaagtaaatgccatattgttgtgctgtgttttggcgtgtggtggctgggttctgtctaccatgcttccctgtgggtgtggtaaccagactgtatagccgctatttgctcgtgtgtacatgataccaaagcagctggccagcgtgacctctctcacacgacctgttttgactcaattttttactaaaagttgttcagctgtattggtatcatgtaaacatagcttttattaacctgggtaggaatttctcatttatatataggatgtgttttggtcatagtttcacattagtgattcagtatctatacactgacccaatggttttgtgcacatgaacggtaatttacttaaaagtatgattctggtacaaaaacaaacaaaggctttagcaggcatacgtgtctgggatgccgatacatacattaactactactgcagaaattcataagagccaaaaccttaaaaaaatagacctggtacttaagtgaaagtactaaagggaagaccagaccaaacatcacagcagttgctgccacattgtttcagcccacttagatttatctttcaaatgtacaattctgtattgaacatctcccagccatcttcaggaaatcgaatcaagtaaatcctttccaaccgaaaacatttcaactaactatagagaggcagactcatttttactaaaataatttatacagttagttattttcgttctccgtacttacccatttatctttatttaatcgtctctactgcctaggaaaataactattttccaggacgggttatttgttctgcgatcatttaaaatttggagaaaggtcaggattagtgttaatatcagctgcagtttctcaatctctaggaatcctgcagtaaaacaagccccttggtgagctggaagatttgtgcccagtgacaaagagatagtttgtaaaatgctgtgtaattgtaagttaccacaaatgaaaatacatgacagcacaatgtggcccgtagaaaattcccctgagccagcttctgcactttcatcaccgaatctgaacatttgctatgtctgaaggcaaatttatgatggaatgttagtttggattctttccagatgctacctaaatgcagtgtggggtcattgccttgctttgcgatgacagtttctttgaaaatatgcaaagtcataagctcatgttaaggtttttcaagagtctgcctcctactacacaaaggaaagcaagggaaaggaaatgaccctggcaaacagtagggaagggtgtattcaaacatttcattttcaaaaccttcgggttagaataccacttacacatgtattctgagagacagaattcatgaggaactcatctctctttataactggaaacacaccagcttgatatattgctaatccatactaaaatcatattattgggttttttctgaatcaggcctgtattaatggtacagtatttattcagaatggaattctaaaattactaacaaacttgttgaaaatttgaatacctccacaccaacctaaaaatggaccttaagttcctagaacctctgatgttcttttaaattaatggaaaaataatttgtgaactgtatatagagagtgcattcataaatgtgattatgtattttatcacaaatccaaaatgtcaatattagagtctattttgcttatattttaagcaattatacgtttttgcaattcattgatgatgtatcattttcaaactgctttaaatatccattagaaacaaatatttgaagcttttacttaatagtgattaccttgaactgtgcatttctagtttgtaatacgtatttggttggttcgtgcctttagtttgttaaagttacatttgtattatattcaggaaatgcactttttattacttacagctgtggttttaatactgccttgaactattattattctttttacaactcctaaagcttgagggaggaaagaaaaaaaaaacaaaactactaatcagtagtaaatcgaagagaaacattttggcatttcttaagaagaagatggagatattgagtatatcacttcctattcagctgaatagaaagaatgccttcattgacttgcagttctgcagtttaaattattgaaagaacaattcgtttgcatttcctgatgaaagtaaaagcatttttcagagaaacatatgaatttctcatacccagcagacagatggctgacactgcacagccacacaccattcgagtaagttaaagtgagagcatagtagttggactctcctatgaagaacattctgggctggaggcagggaatactccatggttgtttctttttcctacttaagcccattttgtttgtgcttttctgttttgttttgttttcactcttgcactacagtctagagatccaaatgaactgaaaagttcaaagtttaacacatttaaatatgtttacttttagttgtcattctaatcgttattgattagaagcatgactcctgaaggaaagggaaataaatctcaattcatactaacttgcaacaaaacacttttaccatataaataagtatatgatttatttttaacccaaaaaatgtataaaataagtgtgtcctttactgtcaatttatctagaagatctataatatatagactacatatatataatatatacaacatagccaaatgtatgaaaacttgacaatgtataatttggaattcacatgctacctatgtagacaggtatgaaattaagttataattttcatgagacattttcatcactgttgacacagtttcaagcattccatcatgttattttgactctttttcttttttttttctttaaaaatatatttttaactagaccaggccccactataatatcacttaagagagtcagggcaaagtttttgcatttatgaagatgtgttcatgtaagggtgattgtaatggagttcattggtaatagaagcaaaagtacagtaacgaagtattgaaaagaaaattttggagacattggagcatattatatatagcttgtggaaagacataaggctacagatggaatggaacattcctgttttcttgaagaaattcacatacacatagctgacctgactagtacttcagctcttccacagccttctataaaggttctttcttctgcaaagaaaacaaaacaaaacaaaacaaaacaaaaaaaacaaaaaaagcgcaaaaaacaaaaaaacaaaaaaaagcaaagtaaaatttaaaaatacagaaaacaaacaacaaaaaagaattcaaccataaatagtgactattattttcagtgtgtccttcatgtgaaagctattaaggaccaaatatactactgttcataagaagaaattactttctaaacagtaactgaaaatacttagagttaaacttgctgtggattttgtcttggcagttgtcatcttacattatttgtcaaaggaaatgtgtttggcagttaaaaatctttccttagatttagtggtggactttaacctcttaaataaatgttagtatatcagattgtgtccttgaaaaatattttacttgtatgaatcatgacaacgtctaaatctttactattcttctggcaaaagcatcagtaagaaagaaggcgaaaaagagaagtatagcctttatgtcagaaaaacattctttttagctgcttactttctcatgaaaagtaaagatgtttacagtgtatgccaagttttcagtttctgtataacaacaggtagaggttctaatcatattgaaaattgtgttataatggtctgagccatgttgctaggaaacaataggttccaattttgtattcctgctctcctgtgctgaaaagtgactggatactgtacaggttcatgttctctggctgcagttaaatggtcttttgcattttgctctggctttcaggccagaagcatgcatttttctacaagagcatcacaacaacatgctgtaaatatttaaagttaaacattatgtgttgatatttgaaagaaaagtactttgaatatttcatttttaaaaaataaaattgccaatg

SEQ ID NO: 325058 - DNA, 8199 bp, Artificial Sequence
  derived and/or modified sequence
atggagcaaacagattgtaaaccgtaccagcccctgcccaaggtaaaacacgaaatggacctcgcatatacctccagtagcgatgagtccgaggacggcaggaaaccgagacagtcctacaattctcgtgaaacattacatgagtacaatcaggaactccgcatgaattacaactcacaatcacgaaagagaaaggaagtggaaaagtccacacaggagatggaattttgcgagacatctcacacactctgttcaggttaccagaccgacatgcacagcgtgtcgcgccatggataccagctggagatggggtccgacgttgatactgagaccgaaggagccgcttctccagaccatgccttacgcatgtggatacgcggaatgaagagcgagcattcatcatgcctgtcttctcgggcaaactccgcactttccctgaccgatacggaccacgaaagaaagagcgacggggagaacggcttcaagttttcacctgtgtgttgtgacatggaggcccaggcaggaagcacccaggacgtgcaatcatccccccacaaccagttcacctttcggccactacctcccccacccccacctccccacgcttgcacatgtgcccgaaagccacctcccgcggcggacagtcttcagcgccgctctatgaccaccaggtcccagccttcaccagcagcacctgctccccctacctcaacccaggatagtgtccatctgcataatagttgggtcctgaattctaacatccccctcgagactcggcactttttgtttaagcacggatctggctcatctgctattttttctgccgcctcacaaaattatcctttgactagcaatactgtgtattctccaccacctaggccattacctcggagcacattctcccgccctgcttttactttcaacaagccatatcggtgctgtaattggaaatgtactgctctgtccgcaacagccatcacagttactctggccctcctactcgcatacgtcattgccgttcatcttttcggcctcacatggcaactgcagcctgtggagggcgagttatatgcaaacggggtatctaagggcaatcgggggaccgaaagtatggataccacctattctcctattggcggaaaggtttcggacaagtccgaaaagaaagttttccagaaagggagggccattgataccggcgaggtcgacatcggggctcaggtaatgcaaactataccccctggtctcttctggcgttttcagattaccattcaccatcctatctacctgaagtttaatatctccttggccaaggattcactgctaggcatttatggccgcaggaatatccccccaacccacactcagttcgacttcgtcaagttgatggatgggaagcagctggttaaacaggacagcaagggtagcgacgacacacagcactctccacggaatctgatcctgacatctctgcaggagacagggttcattgagtacatggaccagggcccatggtatcttgctttctacaacgacggcaaaaaaatggaacaagtcttcgtgttgaccactgcaatcgaaattatggatgattgctccaccaactgcaacggaaacggagagtgcattagtggacactgtcactgctttcccggatttttaggccccgattgcgctagagactcctgccccgtgctgtgcgggggaaatggcgaatatgaaaaaggacactgcgtttgtcgacacggttggaagggaccggaatgcgacgtgccggaagagcaatgtatcgatcccacttgtttcggtcacggcacatgtattatgggcgtttgtatctgcgtgccggggtataaaggggaaatctgtgaggaggaagactgtctggaccctatgtgtagtaatcacggcatctgtgtgaaaggcgagtgtcattgctccacgggatgggggggagttaactgcgagactcctctgcccgtgtgccaagaacagtgtagcggacatgggacctttttgctcgacgccggagtatgttcgtgcgatcctaaatggaccgggagcgattgctctacagagctgtgtacgatggagtgcggctctcacggagtctgttccagagggatttgtcaatgtgaggaaggctgggtgggccccacttgtgaggaaagatcttgtcatagccactgcactgaacacggacagtgtaaagatggcaagtgcgagtgcagccccggttgggagggagaccactgtactatcgctcattatctggacgcagtaagagacggctgccccgggctgtgcttcgggaatggtaggtgtaccctagatcagaacggctggcactgtgtctgtcaagtcgggtggtccggtaccgggtgcaacgtcgtgatggagatgctttgcggcgataacctcgacaatgacggggacggcttgacggactgcgttgaccctgattgttgtcagcagtctaactgctacatctccccactctgccaggggtctccggatcccctggatctgattcagcaatcccagactctgttttcccagcatacctcccgcctgttttacgatcgaatcaagtttctcattggcaaagattcaacacatgtcattcctccagaggtaagtttcgacagccgcagagcgtgtgttataaggggacaggtcgtggcaatcgacgggactccactggtcggcgtcaatgtgagcttcctgcatcatagtgattacggctttacaatatcacggcaagatggcagtttcgacttggtggctatcggtgggatctcggtgatcctgatctttgaccgctcaccatttctccccgaaaagcgcacgctgtggctgccatggaaccaattcattgtggtagaaaaagtaacaatgcaaagagtcgtgagcgaccccccatcctgtgatatatccaacttcatatctccaaatccaatcgtgctcccctcaccccttacatcatttggtggctcctgtccagaaagagggacaatcgtaccagaactgcaagtcgtccaagaggagattcccattcctagctcttttgtgagactttcctacctgtcaagcaggacacccggctacaagacattattgcgcatcctcctgacacactctacaatacctgtcggcatgattaaggtacaccttaccgttgcagttgaggggcgcttgactcagaagtggtttcccgctgccatcaacctggtttatacatttgcctggaacaaaacggacatctacgggcagaaagtctgggggctggcagaggccctggtgagtgtgggatatgaatacgagacgtgcccagactttattctctgggagcagaggacagtggtgttgcagggattcgaaatggatgcttctaacctgggaggttggagcctgaataaacatcacatcctcaacccacaatccggaattattcataagggaaatggcgagaatatgtttatttcacaacaaccacctgtgataagtaccattatggggaatggtcatcaacgcagtgttgcatgtacgaattgcaatggtcctgcccacaataataagctgttcgcccctgtggctttggcctccgggcccgacggttctgtatacgtcggcgactttaacttcgttcggcgtattttccctagcggaaattctgtatcaatcctggagcttcgcaatcgcgacactcgacattcaacatcgcccgcgcacaagtattacctggctatggatcctgtgagcgaaagtctttatctgagcgacaccaatactcgcaaggtgtataaactgaagtctctagtagagaccaaagatttaagtaagaattttgaggtggtggccgggacaggagaccagtgtttgccattcgaccagtcccattgtggggatggtgggcgcgccagcgaagccagtttaaattccccacgaggcatcacagtggacagacatgggtttatctacttcgtcgacggcaccatgatacggaagatcgatgagaacgccgtcataacaacagtcatcgggagcaacgggttgacgtccactcagccactgagttgcgatagtggaatggacattacacaagttcgtttagaatggccaaccgatctcgctgtgaatcccatggataattctctgtatgtgctggacaataacattgtactccagatcagtgaaaaccggagagtgcggataatcgccggtcggcctattcactgccaggtgcccggtatagatcattttctggttagcaaagtagctatccattcaaccctagagtctgcgcgcgcaatctctgtgtcacatagtggcctgttatttatcgccgagaccgacgagaggaaggtgaaccggatccaacaggtgacgaccaatggggagatctacatcatcgctggggccccaactgattgcgactgtaagattgaccctaattgcgactgtttttcaggtgacggaggctacgctaaggacgctaagatgaaggctccctctagcctagcagttagccccgatggaaccttatacgtggccgaccttgggaacgttcgaattcgcaccatcagcagaaaccaagctcatttgaacgatatgaatatttacgagattgcctcacccgccgaccaagagctctatcagtttacagtgaacggaacgcaccttcataccctgaatcttatcacgagggattatgtttataactttacgtataacagcgaaggggatcttggcgccatcaccagctccaatggtaactcggtgcacattcggagagatgcaggaggcatgcctttatggctcgttgttccaggcggccaagtctattggctgactattagttccaacggtgtccttaaaagggtatccgcacagggctataaccttgctctcatgacctatccaggaaatactggcctcttagctaccaagagtaacgagaatggctggacgacagtgtacgagtatgatcctgaaggacatctgaccaatgctacatttcccaccggcgaagtcagcagctttcactctgatctggagaagttaacgaaggtcgaactggacacgtccaaccgagaaaacgtcctgatgtccacaaacctgacagccaccagcactatctatattcttaaacaggagaatacacagtcgacctaccgcgtcaaccctgatggctctctgcgcgttacatttgcctccggaatggaaattggcttgagcagcgagcctcatatcctggcaggcgccgtgaaccctacactgggcaagtgcaacatcagcttgccaggcgaacacaacgcgaacttgatcgagtggcgccagcgaaaagagcagaacaagggcaacgtgagcgccttcgagcgaagactccgggcccataacagaaacctgctcagcatcgactttgaccacatcacgaggaccggtaaaatctatgatgaccaccgaaagtttacactaagaatcctttacgatcagaccggccgacccatcctctggtccccagtgtcccggtacaatgaagttaatataacttattcccctagcgggctggttaccttcattcaacgcggtacatggaatgaaaagatggaatacgatcagagtggcaagatcatttccaggacctgggccgacggtaagatctggagttacacttaccttgagaagtccgtcatgctactgttacatagccagaggagatacatcttcgaatatgaccagcctgactgtctcctctctgtgactatgcctagtatggtgcggcactctctgcaaaccatgttgagcgtcgggtactatagaaacatctacactccacctgacagcagtacctctttcatccaggactattctcgagacggtcgcctcctgcagaccctccatctgggaactggcagaagggtcctttacaaatacaccaaacaggctcggttgtccgaagtcctgtatgacacaactcaggtgacgctaacatacgaggagagcagtggggttataaagaccattcacttgatgcatgacggcttcatttgcacgattagatatagacagacaggccctttgatcggacgacaaattttcaggttttccgaagagggtctggtgaacgcccgcttcgactattcgtacaataattttcgggttactagtatgcaggcggtcattaatgaaactccgctccccatagatctgtatcgctacgttgatgtctcaggccgcactgaacagttcggtaaattctctgtcattaactacgatttaaaccaggtaataacaaccacagtgatgaagcatactaagatcttttccgccaatggccaggttattgaagtgcagtatgagattcttaaagccatagcttactggatgacaatccagtatgacaatgtgggaaggatggtgatatgcgatatccgcgtaggggttgacgcaaacattactcgatacttttacgaatatgacgctgacggccagctgcagacggtgtcagtgaacgataaaactcagtggcgctacagctacgatctcaatgggaatattaatctccttagccacggtaagtccgcccgtttgacgcccctaagatatgacctccgggaccggatcacaaggttaggcgagatacagtataaaatggatgaagacggctttctgcgacaacgcggtaacgatatctttgaatacaatagcaacggtctgttacagaaggcctataacaaagcgagcggttggaccgtacagtactattacgatggactcggtagacgggtcgccagcaaatcttctttggggcagcatctccagttcttctatgccgacctgactaatccgatcagggttactcacctgtataatcacacatctagcgagatcacatctctgtactacgacctccagggccacctaattgctatggaactctcctctggggaagagtattacgtcgcctgcgataatacaggaacaccactggcagtcttctcttcacggggacaagtgattaaagagatcctgtacactccgtatggcgatatttatcacgatacatatcccgattttcaggtgattattggttttcacggtgggttatatgacttcctgactaaactggtgcatctcggccagagagattacgatgtggtggctggccgctggacgacaccgaaccatcatatctggaagcaacttaacctactcccaaagccattcaatctgtatagttttgaaaacaattatcccgtcggaaaaatccaggacgtagcgaagtataccaccgacattcgatcttggctggaactctttggcttccagctccataacgtgctgcccgggtttccgaaacccgagctggaaaacctggaactgacctacgagttactgcgcttgcagaccaagactcaggaatgggaccccgggaaaacaatactgggcatacagtgcgaactccagaaacagctgagaaatttcatttccctcgatcagctaccaatgaccccaaggtataacgatgggcgttgcctggagggcggcaaacagccacgctttgccgcagtgccctccgtgtttggaaagggtatcaaatttgcaataaaggatggcattgtcaccgcggatatcatcggggtcgccaatgaggattcacgtaggttggctgcaatacttaacaacgcccattacctggaaaacctgcatttcactattgagggccgcgacactcattacttcatcaaacttggatcattggaagaagatctggtgttaataggcaatacaggcggacggcggatcctggaaaatggggtaaacgtcaccgtcagccaaatgactagcgtccttaacggaaggaccaggcgcttcgccgacatccagcttcaacatggagcactctgcttcaatatccggtatggaaccaccgtagaggaggaaaagaaccatgttctcgaaatcgcccgccagagggctgtggctcaggcatggacaaaggagcagcggagactgcaggagggagaggaagggattcgcgcgtggaccgagggcgaaaaacagcagctcttatcaaccggacgggtccaaggttatgatgggtattttgtgctttccgtggaacagtaccttgaactttccgattctgcaaacaatatccattttatgcgacagtcagagataggcagacgatag

SEQ ID NO: 325059 - DNA, 8199 bp, Artificial Sequence
  derived and/or modified sequence
atggagcagaccgattgcaaaccttaccagcccctccccaaggttaagcatgaaatggacttggcttacacatcttccagtgatgagagtgaagacggacggaaaccacgccaatcatacaatagccgtgagaccctgcacgagtacaatcaagaactgaggatgaactacaactcacagagtagaaagcgcaaggaagtcgaaaaaagcactcaggagatggaattttgtgaaacctctcatacactatgtagcggctaccagacggatatgcacagtgttagtaggcatggctaccagctggagatgggatctgacgtggataccgagaccgaaggcgccgcctcaccagatcatgccctccgcatgtggatcagaggaatgaagtccgaacatagttcatgtctctcatcacgcgcaaattccgccctgtccctcaccgacaccgatcatgaaagaaaaagcgatggagaaaacggattcaagtttagtccggtttgctgcgatatggaagcccaagcggggagcacgcaggatgtgcagagttctccccataatcaattcacttttcggcccctcccgcccccccccccaccaccccacgcctgtacatgcgcacgcaagccgccaccagccgcagactctctccaacggcgatctatgacgactcgcagtcagccctcccctgcagcgccagcccctcccacatcaacacaagactctgtacatctgcacaattcctgggtgctaaactccaatatacctctggagacacgacatttccttttcaagcacggaagcggctcttccgccattttctctgcagctagtcagaactaccccctaacaagtaacactgtctactccccacctcccaggccccttcctcgttccacctttagcaggccagcttttactttcaataaaccttacagatgctgcaattggaagtgtactgcgctgtcagcgaccgccattaccgtcacactcgccctcttgttggcctatgtaattgctgtacatctctttggactgacttggcagttgcagccagttgaaggtgaactttacgctaacggagtcagtaaaggaaatagaggcactgaaagcatggataccacgtatagccccattggcggaaaggtttccgacaaatctgaaaagaaggtgttccagaaaggacgggcaatagatacaggagaggtggacataggagctcaggtcatgcagaccattccgccagggcttttttggagatttcagattacaatccatcaccccatctatttaaaattcaacatctccctggcgaaggactccctacttggaatctacggaagacggaacatcccacccacacacacacaattcgatttcgtgaaactgatggatggtaagcagctggtgaaacaagatagcaaaggttcagacgatacacaacatagcccccgcaatttgatactgactagtctacaggaaacagggtttattgaatatatggatcaggggccatggtatttggcattctacaatgatggcaagaaaatggaacaggtgtttgttttaacgacagccattgaaatcatggacgactgctcgaccaactgtaacggaaatggtgagtgtatctcaggccactgccactgttttcctggattcctcgggcctgattgcgcaagagacagttgtccagttctctgcggaggtaacggggaatacgaaaagggacattgtgtgtgcagacatggttggaaaggcccagagtgtgacgttcctgaagagcaatgtattgatccgacctgtttcggacacgggacttgtataatgggggtctgtatatgtgttcccggctacaaaggagaaatttgtgaggaggaagactgtctcgatccgatgtgttccaatcatggcatctgtgtcaaaggcgaatgccattgcagcaccgggtggggcggagtgaactgtgaaacgccgcttccagtctgccaggagcagtgctcaggccacggaacctttttgctcgatgcaggcgtttgttcttgtgatcccaaatggactggctcagattgttcaacagaactgtgcaccatggagtgtggttcccacggtgtttgttccagagggatatgtcaatgcgaggagggatgggtcgggccgacatgcgaggaaaggagttgtcacagtcactgcaccgagcatggccagtgcaaggatggaaagtgtgaatgcagcccaggctgggaaggggaccactgtaccattgctcactacctggatgctgttcgcgatggatgccccggtctctgctttgggaacgggaggtgcactttggaccaaaacggatggcactgtgtttgtcaagtgggctggtcaggtaccggttgtaatgttgtcatggaaatgctgtgcggggataatcttgataatgatggggacggcctcacagattgcgtggacccagattgttgtcagcaatccaattgttatatctcccccctttgccaagggtctcctgatcccctagatcttatacagcagtctcaaacactgttcagtcagcatacttcccggctgttttatgaccgaattaagttcctgatagggaaagatagcacacacgtcatcccgcctgaggtctctttcgacagtagacgagcctgcgtgatccgtggccaggtcgtggcaatcgatggcaccccactagtgggagtcaacgtctcatttcttcatcattccgactacggattcaccatttcccgacaggatggatctttcgatctagtagcaatcggcgggatctcagtcatcttgatctttgaccgatccccttttctgccagagaagcgcacactgtggttgccttggaaccagttcattgttgtagagaaggtcaccatgcagagagtcgtctctgatcccccttcttgcgatatcagtaacttcattagtcccaaccctatcgttctcccatcccccttaacttcgtttggcggcagctgccccgagagaggcacaatcgttccagaattgcaagtggtgcaggaggagattcccatccctagctcctttgtacgcctgtcctacctttcgtctcgaaccccaggatacaaaacacttcttaggattctccttacacattctacaattccagtcggcatgattaaagtccaccttacagttgcggttgaaggtcggctcactcaaaagtggttcccagccgccataaacctggtgtatacctttgcctggaacaagaccgacatttatggtcagaaagtgtggggcctggccgaagctttggtgtcagtcggttatgagtacgagacctgcccagacttcatattgtgggaacaaagaaccgtggtgctccagggcttcgaaatggatgccagtaatctgggtggatggagtctcaataagcatcatattttaaatccacagtcaggtataattcataagggcaacggagagaacatgttcatttctcagcagccaccggtcattagtactatcatgggaaacggacaccagagatccgtagcctgtacaaattgcaacggtccagcgcataataataaactgtttgccccggtcgccctcgcctcaggtccagatggatcagtgtacgtgggagactttaattttgttagaagaatctttccctcaggcaactcggtctcaatactggagcttagaaaccgcgataccagacattcaacgtccccagctcacaagtattaccttgcaatggacccagtatcagagtcattgtatcttagcgacaccaatacccggaaggtgtataagcttaaatcccttgtggaaaccaaagacctttccaaaaattttgaggtggtggcaggcacaggtgaccagtgcttaccatttgaccagtcacattgcggggatggaggaagagcttcagaagcgagtttgaacagcccccgggggattaccgtggatcggcacggctttatctacttcgtcgacggtactatgatacgaaaaattgatgaaaacgcagtaatcacaaccgtgattgggtctaatgggttgactagcacccaacctctctcttgcgattctggaatggacataacccaggtcaggctcgagtggccaactgatctagctgtgaaccctatggacaatagcctgtatgttctcgacaacaacatcgtacttcaaatatctgagaacagacgagtacggattatagctggcaggcccatacactgtcaggtcccgggaattgaccactttttagtcagtaaagttgccatccatagcaccctcgagagtgcaagagccattagtgttagccattccggtcttctctttatcgcggagaccgacgaacggaaggtgaatagaatccagcaggtgacgacgaacggggagatttatattattgcaggcgcacccactgactgtgactgtaagatcgatcccaactgcgattgtttctcaggagatgggggctatgcgaaagatgccaaaatgaaggcaccatcctcattggctgtttcccccgacggaactctttacgtggccgacctgggcaatgtgcgtattaggactattagcagaaatcaagctcatctgaatgacatgaatatctatgaaatagctagcccagccgaccaggaactgtaccaatttactgtgaacggcacgcacctgcatactcttaatctcatcactagggattacgtgtataatttcacttataatagcgaaggcgacctcggagcaattacttccagtaacggtaattcggtccacattaggcgagatgctggcggtatgcccctgtggctggtcgttcctggtggacaggtctactggttgaccataagctccaatggagtgctgaaacgcgtgtcagctcaaggatacaacttagctttaatgacgtaccctggtaatactggcctgctcgcaacgaaaagtaatgaaaacgggtggacgactgtgtacgaatacgatcctgagggccacctgaccaatgcaacgttcccaacaggtgaggtcagctcttttcactccgacttagaaaagctgactaaagtcgaattggatacctctaacagagagaatgtactgatgtcaactaacctgacagccacttccacaatctatattcttaaacaagaaaacacacaatctacgtaccgcgtcaatcccgatggctctctgcgggtgactttcgcttcgggaatggaaattggcctttcatccgagccccatatccttgcgggggcggttaacccaaccctaggtaagtgcaacatctccttgcccggtgagcacaacgccaacctaatcgaatggagacagagaaaggagcagaacaagggaaacgtgagcgcttttgagagaagacttcgagcccacaacaggaatctgctgagcattgatttcgaccacataacccgcactggaaaaatttacgacgaccatcgcaagtttactctgagaattctttatgatcaaaccggacgtcctattctttggtcccccgtgtcacgctacaatgaagtaaacataacttactcaccgtcaggcctcgtaacttttatccagagaggcacctggaacgaaaagatggagtatgaccagagtgggaagataataagccgcacctgggctgacggaaagatctggtcctacacatacctcgaaaaaagcgtgatgttgctgctgcatagtcagagaagatatattttcgagtacgaccaaccagattgcctgctctctgtgactatgccttctatggtgagacactcgctccaaactatgctgtcagtgggttattaccgcaacatctacacgcctccagactcatccacttcattcattcaggattactcgcgcgatggtcgcctcttacagactctacacttaggtaccggccgaagggttctctacaagtacaccaaacaagccaggctgtccgaagtactgtacgataccacccaggtcacccttacttatgaagaatccagcggcgtgataaagaccatccatttgatgcacgacgggttcatctgcacaataagatatagacagacaggacctctcataggccggcagattttcagattcagcgaagaaggactagtgaatgcgcgattcgattatagctacaacaattttcgggtaacctccatgcaggccgtgatcaacgagaccccgctgcctatagacttgtatcgctacgtggatgtgtctgggaggaccgagcagtttggcaaattttccgtgattaattatgacttgaaccaagtaatcacaacaacagttatgaaacacactaaaatcttctccgcgaacggtcaggtaatcgaggtgcagtacgagatcctgaaagctatcgcttattggatgaccattcagtatgataacgtcgggaggatggttatttgtgacatcagagttggggtggacgctaacatcaccagatatttttacgagtacgatgccgatggccaattgcagaccgtaagcgtgaacgacaagacacagtggcgttattcatatgatctaaatggaaatattaacctactttcccacggtaagagtgccaggctcacaccccttagatatgacctgcgagatcggatcactcggcttggcgaaatccagtataaaatggatgaagacgggttcctcagacagcggggaaacgatatatttgagtataattcgaacgggctactgcagaaagcatataacaaggcttccggctggacggtacagtattattatgacgggctcggtcgtcgcgttgctagtaagtcttcactcgggcaacacctgcaattcttctacgcagacttgacaaatccgatacgcgttacccacctctacaatcacactagctctgaaataacatctctctattacgacctgcagggacacctcattgccatggagcttagcagtggggaagaatactatgtagcatgcgataacacagggacccctttggcagtattttcatccagaggacaggtcatcaaggaaattctgtacaccccctatggcgatatataccatgacacctatccagacttccaagtaatcatagggttccatggaggcctatacgattttctgactaaactggtgcacttgggacagagagactatgatgtagtcgcaggccggtggactacccccaaccatcacatttggaagcagctaaacctactacctaagccatttaacttgtactctttcgaaaacaactatccggtgggtaagatacaggatgtagccaaatacacaacagacattcgtagctggctggaattgttcggctttcaacttcacaacgtcctccctgggtttcctaagcccgagctggaaaatcttgaactcacctatgaattgttgcggttgcagaccaagacgcaagaatgggatcccggaaagacaatattgggtatccagtgtgaacttcagaagcagttaagaaattttatttccctggatcagttgcccatgactcctagatacaatgacggcaggtgtttggaagggggaaagcaaccgagattcgccgctgttccctcggtgtttggtaaagggattaaattcgccattaaggacggcatagtgacagcagatattataggcgtggcaaatgaagactcgcgacgcttagcagccattctcaataatgcacactatttggagaacctgcattttaccatcgaaggaagagatactcactatttcattaaactgggctccctggaagaagacttggtgctgataggaaatacagggggcaggcgcattctagaaaacggcgtgaatgtgacggtgtcacagatgacttcagtcttgaacggaagaactaggagatttgcagacattcaactacagcacggcgctctgtgctttaacatccggtatggcacgactgttgaggaagagaaaaatcacgttctcgaaatcgctagacaacgtgctgttgcccaggcatggacaaaggagcaaaggagattacaggagggagaggagggcatcagggcctggacagagggcgaaaaacagcagctgctctctacgggaagggtgcaagggtatgatggatactttgttctgagcgtggaacaatacctggaattatccgatagtgccaacaacatccattttatgcgccagagtgagattggtaggagatag

SEQ ID NO: 325060 - DNA, 8199 bp, Artificial Sequence
  derived and/or modified sequence
atggagcagaccgactgcaagccctaccagcccctgcccaaggtgaagcacgagatggacctggcctacaccagcagcagcgacgagagcgaggacggcagaaagcccagacagagctacaacagcagagagaccctgcacgagtacaaccaggagctgagaatgaactacaacagccagagcagaaagagaaaggaggtggagaagagcacccaggagatggagttctgcgagaccagccacaccctgtgcagcggctaccagaccgacatgcacagcgtgagcagacacggctaccagctggagatgggcagcgacgtggacaccgagaccgagggcgccgccagccccgaccacgccctgagaatgtggatcagaggcatgaagagcgagcacagcagctgcctgagcagcagagccaacagcgccctgagcctgaccgacaccgaccacgagagaaagagcgacggcgagaacggcttcaagttcagccccgtgtgctgcgacatggaggcccaggccggcagcacccaggacgtgcagagcagcccccacaaccagttcaccttcagacccctgccccccccccccccccccccccacgcctgcacctgcgccagaaagcccccccccgccgccgacagcctgcagagaagaagcatgaccaccagaagccagcccagccccgccgcccccgccccccccaccagcacccaggacagcgtgcacctgcacaacagctgggtgctgaacagcaacatccccctggagaccagacacttcctgttcaagcacggcagcggcagcagcgccatcttcagcgccgccagccagaactaccccctgaccagcaacaccgtgtacagccccccccccagacccctgcccagaagcaccttcagcagacccgccttcaccttcaacaagccctacagatgctgcaactggaagtgcaccgccctgagcgccaccgccatcaccgtgaccctggccctgctgctggcctacgtgatcgccgtgcacctgttcggcctgacctggcagctgcagcccgtggagggcgagctgtacgccaacggcgtgagcaagggcaacagaggcaccgagagcatggacaccacctacagccccatcggcggcaaggtgagcgacaagagcgagaagaaggtgttccagaagggcagagccatcgacaccggcgaggtggacatcggcgcccaggtgatgcagaccatcccccccggcctgttctggagattccagatcaccatccaccaccccatctacctgaagttcaacatcagcctggccaaggacagcctgctgggcatctacggcagaagaaacatcccccccacccacacccagttcgacttcgtgaagctgatggacggcaagcagctggtgaagcaggacagcaagggcagcgacgacacccagcacagccccagaaacctgatcctgaccagcctgcaggagaccggcttcatcgagtacatggaccagggcccctggtacctggccttctacaacgacggcaagaagatggagcaggtgttcgtgctgaccaccgccatcgagatcatggacgactgcagcaccaactgcaacggcaacggcgagtgcatcagcggccactgccactgcttccccggcttcctgggccccgactgcgccagagacagctgccccgtgctgtgcggcggcaacggcgagtacgagaagggccactgcgtgtgcagacacggctggaagggccccgagtgcgacgtgcccgaggagcagtgcatcgaccccacctgcttcggccacggcacctgcatcatgggcgtgtgcatctgcgtgcccggctacaagggcgagatctgcgaggaggaggactgcctggaccccatgtgcagcaaccacggcatctgcgtgaagggcgagtgccactgcagcaccggctggggcggcgtgaactgcgagacccccctgcccgtgtgccaggagcagtgcagcggccacggcaccttcctgctggacgccggcgtgtgcagctgcgaccccaagtggaccggcagcgactgcagcaccgagctgtgcaccatggagtgcggcagccacggcgtgtgcagcagaggcatctgccagtgcgaggagggctgggtgggccccacctgcgaggagagaagctgccacagccactgcaccgagcacggccagtgcaaggacggcaagtgcgagtgcagccccggctgggagggcgaccactgcaccatcgcccactacctggacgccgtgagagacggctgccccggcctgtgcttcggcaacggcagatgcaccctggaccagaacggctggcactgcgtgtgccaggtgggctggagcggcaccggctgcaacgtggtgatggagatgctgtgcggcgacaacctggacaacgacggcgacggcctgaccgactgcgtggaccccgactgctgccagcagagcaactgctacatcagccccctgtgccagggcagccccgaccccctggacctgatccagcagagccagaccctgttcagccagcacaccagcagactgttctacgacagaatcaagttcctgatcggcaaggacagcacccacgtgatcccccccgaggtgagcttcgacagcagaagagcctgcgtgatcagaggccaggtggtggccatcgacggcacccccctggtgggcgtgaacgtgagcttcctgcaccacagcgactacggcttcaccatcagcagacaggacggcagcttcgacctggtggccatcggcggcatcagcgtgatcctgatcttcgacagaagccccttcctgcccgagaagagaaccctgtggctgccctggaaccagttcatcgtggtggagaaggtgaccatgcagagagtggtgagcgacccccccagctgcgacatcagcaacttcatcagccccaaccccatcgtgctgcccagccccctgaccagcttcggcggcagctgccccgagagaggcaccatcgtgcccgagctgcaggtggtgcaggaggagatccccatccccagcagcttcgtgagactgagctacctgagcagcagaacccccggctacaagaccctgctgagaatcctgctgacccacagcaccatccccgtgggcatgatcaaggtgcacctgaccgtggccgtggagggcagactgacccagaagtggttccccgccgccatcaacctggtgtacaccttcgcctggaacaagaccgacatctacggccagaaggtgtggggcctggccgaggccctggtgagcgtgggctacgagtacgagacctgccccgacttcatcctgtgggagcagagaaccgtggtgctgcagggcttcgagatggacgccagcaacctgggcggctggagcctgaacaagcaccacatcctgaacccccagagcggcatcatccacaagggcaacggcgagaacatgttcatcagccagcagccccccgtgatcagcaccatcatgggcaacggccaccagagaagcgtggcctgcaccaactgcaacggccccgcccacaacaacaagctgttcgcccccgtggccctggccagcggccccgacggcagcgtgtacgtgggcgacttcaacttcgtgagaagaatcttccccagcggcaacagcgtgagcatcctggagctgagaaacagagacaccagacacagcaccagccccgcccacaagtactacctggccatggaccccgtgagcgagagcctgtacctgagcgacaccaacaccagaaaggtgtacaagctgaagagcctggtggagaccaaggacctgagcaagaacttcgaggtggtggccggcaccggcgaccagtgcctgcccttcgaccagagccactgcggcgacggcggcagagccagcgaggccagcctgaacagccccagaggcatcaccgtggacagacacggcttcatctacttcgtggacggcaccatgatcagaaagatcgacgagaacgccgtgatcaccaccgtgatcggcagcaacggcctgaccagcacccagcccctgagctgcgacagcggcatggacatcacccaggtgagactggagtggcccaccgacctggccgtgaaccccatggacaacagcctgtacgtgctggacaacaacatcgtgctgcagatcagcgagaacagaagagtgagaatcatcgccggcagacccatccactgccaggtgcccggcatcgaccacttcctggtgagcaaggtggccatccacagcaccctggagagcgccagagccatcagcgtgagccacagcggcctgctgttcatcgccgagaccgacgagagaaaggtgaacagaatccagcaggtgaccaccaacggcgagatctacatcatcgccggcgcccccaccgactgcgactgcaagatcgaccccaactgcgactgcttcagcggcgacggcggctacgccaaggacgccaagatgaaggcccccagcagcctggccgtgagccccgacggcaccctgtacgtggccgacctgggcaacgtgagaatcagaaccatcagcagaaaccaggcccacctgaacgacatgaacatctacgagatcgccagccccgccgaccaggagctgtaccagttcaccgtgaacggcacccacctgcacaccctgaacctgatcaccagagactacgtgtacaacttcacctacaacagcgagggcgacctgggcgccatcaccagcagcaacggcaacagcgtgcacatcagaagagacgccggcggcatgcccctgtggctggtggtgcccggcggccaggtgtactggctgaccatcagcagcaacggcgtgctgaagagagtgagcgcccagggctacaacctggccctgatgacctaccccggcaacaccggcctgctggccaccaagagcaacgagaacggctggaccaccgtgtacgagtacgaccccgagggccacctgaccaacgccaccttccccaccggcgaggtgagcagcttccacagcgacctggagaagctgaccaaggtggagctggacaccagcaacagagagaacgtgctgatgagcaccaacctgaccgccaccagcaccatctacatcctgaagcaggagaacacccagagcacctacagagtgaaccccgacggcagcctgagagtgaccttcgccagcggcatggagatcggcctgagcagcgagccccacatcctggccggcgccgtgaaccccaccctgggcaagtgcaacatcagcctgcccggcgagcacaacgccaacctgatcgagtggagacagagaaaggagcagaacaagggcaacgtgagcgccttcgagagaagactgagagcccacaacagaaacctgctgagcatcgacttcgaccacatcaccagaaccggcaagatctacgacgaccacagaaagttcaccctgagaatcctgtacgaccagaccggcagacccatcctgtggagccccgtgagcagatacaacgaggtgaacatcacctacagccccagcggcctggtgaccttcatccagagaggcacctggaacgagaagatggagtacgaccagagcggcaagatcatcagcagaacctgggccgacggcaagatctggagctacacctacctggagaagagcgtgatgctgctgctgcacagccagagaagatacatcttcgagtacgaccagcccgactgcctgctgagcgtgaccatgcccagcatggtgagacacagcctgcagaccatgctgagcgtgggctactacagaaacatctacaccccccccgacagcagcaccagcttcatccaggactacagcagagacggcagactgctgcagaccctgcacctgggcaccggcagaagagtgctgtacaagtacaccaagcaggccagactgagcgaggtgctgtacgacaccacccaggtgaccctgacctacgaggagagcagcggcgtgatcaagaccatccacctgatgcacgacggcttcatctgcaccatcagatacagacagaccggccccctgatcggcagacagatcttcagattcagcgaggagggcctggtgaacgccagattcgactacagctacaacaacttcagagtgaccagcatgcaggccgtgatcaacgagacccccctgcccatcgacctgtacagatacgtggacgtgagcggcagaaccgagcagttcggcaagttcagcgtgatcaactacgacctgaaccaggtgatcaccaccaccgtgatgaagcacaccaagatcttcagcgccaacggccaggtgatcgaggtgcagtacgagatcctgaaggccatcgcctactggatgaccatccagtacgacaacgtgggcagaatggtgatctgcgacatcagagtgggcgtggacgccaacatcaccagatacttctacgagtacgacgccgacggccagctgcagaccgtgagcgtgaacgacaagacccagtggagatacagctacgacctgaacggcaacatcaacctgctgagccacggcaagagcgccagactgacccccctgagatacgacctgagagacagaatcaccagactgggcgagatccagtacaagatggacgaggacggcttcctgagacagagaggcaacgacatcttcgagtacaacagcaacggcctgctgcagaaggcctacaacaaggccagcggctggaccgtgcagtactactacgacggcctgggcagaagagtggccagcaagagcagcctgggccagcacctgcagttcttctacgccgacctgaccaaccccatcagagtgacccacctgtacaaccacaccagcagcgagatcaccagcctgtactacgacctgcagggccacctgatcgccatggagctgagcagcggcgaggagtactacgtggcctgcgacaacaccggcacccccctggccgtgttcagcagcagaggccaggtgatcaaggagatcctgtacaccccctacggcgacatctaccacgacacctaccccgacttccaggtgatcatcggcttccacggcggcctgtacgacttcctgaccaagctggtgcacctgggccagagagactacgacgtggtggccggcagatggaccacccccaaccaccacatctggaagcagctgaacctgctgcccaagcccttcaacctgtacagcttcgagaacaactaccccgtgggcaagatccaggacgtggccaagtacaccaccgacatcagaagctggctggagctgttcggcttccagctgcacaacgtgctgcccggcttccccaagcccgagctggagaacctggagctgacctacgagctgctgagactgcagaccaagacccaggagtgggaccccggcaagaccatcctgggcatccagtgcgagctgcagaagcagctgagaaacttcatcagcctggaccagctgcccatgacccccagatacaacgacggcagatgcctggagggcggcaagcagcccagattcgccgccgtgcccagcgtgttcggcaagggcatcaagttcgccatcaaggacggcatcgtgaccgccgacatcatcggcgtggccaacgaggacagcagaagactggccgccatcctgaacaacgcccactacctggagaacctgcacttcaccatcgagggcagagacacccactacttcatcaagctgggcagcctggaggaggacctggtgctgatcggcaacaccggcggcagaagaatcctggagaacggcgtgaacgtgaccgtgagccagatgaccagcgtgctgaacggcagaaccagaagattcgccgacatccagctgcagcacggcgccctgtgcttcaacatcagatacggcaccaccgtggaggaggagaagaaccacgtgctggagatcgccagacagagagccgtggcccaggcctggaccaaggagcagagaagactgcaggagggcgaggagggcatcagagcctggaccgagggcgagaagcagcagctgctgagcaccggcagagtgcagggctacgacggctacttcgtgctgagcgtggagcagtacctggagctgagcgacagcgccaacaacatccacttcatgagacagagcgagatcggcagaagatag

SEQ ID NO: 325061 - DNA, 8199 bp, Artificial Sequence
  derived and/or modified sequence
atggaacagacagactgcaagccataccagccactcccaaaagtgaagcacgagatggaccttgcgtataccagctctagcgatgaatctgaagacggtagaaagcctaggcagagctacaacagtagggaaacactgcacgaatataatcaggaattaagaatgaattacaattcacagtctcggaagcggaaagaagtcgagaaatcaacacaggagatggaattctgcgagaccagtcacaccctgtgctctggttaccaaactgacatgcacagcgtgagccggcatggatatcaactggagatgggttctgacgttgacacagaaacggagggggcggcaagccctgaccacgcacttcgcatgtggattaggggcatgaaatccgagcacagctcatgtctgagctctagagccaattccgcacttagcctgacggatactgatcacgagaggaaaagtgacggggaaaatggctttaagttctcccctgtatgctgtgatatggaggcccaagcaggcagtacacaggatgtccagtcctcaccccataaccagtttacattccgaccactacctcccccgccgccaccacctcatgcatgcacatgtgctcgaaagcccccccccgcggcggatagcctgcaaagacgctctatgacaacaaggtctcagccttcaccagctgcacctgctccacccacatccactcaagacagcgttcatctccacaattcttgggtgttaaatagcaacattccgctagagactagacactttctctttaagcacggaagtggctcttccgcaatcttcagtgcagctagtcagaactatccccttacgagcaatactgtgtacagccctccacctaggccacttccccggagcacctttagtcgccccgccttcacctttaacaaaccctatcgatgctgtaactggaagtgcacagctctcagcgctaccgcaatcacagttacactcgcattgttgctcgcctatgtgatcgccgtgcatttattcggcttgacttggcagttgcagccagttgagggtgagttgtacgccaacggcgtgagcaagggaaataggggaacagagtccatggatacaacctacagtcccattggtggtaaagtgagcgataagagtgagaagaaggtatttcagaaaggtcgagctattgacacaggagaggtggacatcggggcacaggtcatgcagacaattcctcctggcctcttctggcggtttcagataacaatccaccatcccatctaccttaagtttaacattagcctggcaaaggactctctactcggcatttatggccgcagaaatataccacccacccacacacaattcgattttgtgaagctgatggacggcaagcagctggtaaagcaggattccaagggcagcgacgacactcagcacagccctcgtaacctcatactcactagcctgcaagagacaggcttcatagaatacatggaccaagggccatggtatcttgctttctacaacgatgggaaaaagatggaacaggtgtttgtcctgactaccgctattgaaatcatggacgactgctccacaaactgcaacggaaatggagagtgcatctctggccattgccattgcttccctggattcctcggccctgattgtgctcgagattcctgcccggtgctgtgcggcggaaacggggaatacgagaaaggccattgtgtctgtcggcacggatggaagggaccagagtgtgatgtgccagaggagcagtgcatcgaccccacttgctttgggcacggaacgtgcattatgggcgtttgcatctgtgtgcccggctacaagggggagatctgtgaggaggaggactgcctcgatccaatgtgttcaaatcacggcatctgtgtcaagggggagtgtcactgtagtacaggctggggtggcgtgaactgcgaaacacctttaccggtttgtcaggaacagtgctcaggacatggtactttcctgctcgacgccggagtgtgctcttgtgatcctaagtggaccggttccgattgctcaaccgagctgtgtacgatggaatgtggatctcatggggtctgctcaagaggcatctgtcaatgcgaagaaggatgggtaggacctacttgtgaggagcggtcctgtcacagtcactgtacagaacatgggcagtgtaaggacggcaaatgcgagtgctcccccggatgggaaggcgatcattgtaccatagctcattatctggatgccgtccgggacggctgtcctggactgtgttttgggaacgggcgttgcactttagatcagaatgggtggcattgtgtgtgccaagtcggttggtcagggactggttgcaatgtggttatggaaatgttatgcggagataatctggacaacgatggtgatgggctcacagattgcgtcgatcccgactgttgccagcagagcaattgttacattagtcctttatgccagggttcacctgatcccctcgacctgatccagcagagtcagaccctcttcagtcaacacacgagcagactgttttacgacagaataaagttccttatcggcaaagatagcacgcatgtaatcccaccggaagtgagcttcgattcccgccgagcctgtgtgatccgtgggcaggtggtagcgatagacggaaccccattagtgggagtcaacgtgtcattcctccaccatagcgactatgggttcactatctctcgacaggatggttctttcgacctggtagcaataggcggtatttctgtaattctgattttcgatcgctcccccttcctgcccgagaagcgtaccctgtggctgccatggaaccagttcattgtggtggaaaaggtgacaatgcagagggtggtgtccgatccaccaagttgcgacatcagcaactttatctctcctaatccgattgttttgccgagtccactgacgtctttcggcgggtcctgccccgaacgaggtacgatcgttcctgaactccaggtggtacaggaggaaatccccattccatcttcttttgttaggctttcttatctcagcagcaggacacccgggtataaaacactgttacgcatcctcctgactcactctacaatacccgtggggatgatcaaggtccacttgaccgttgccgtcgaaggccgtcttacccaaaaatggttccccgccgccattaatctggtatacacattcgcatggaacaaaactgatatctacgggcaaaaagtttggggcctggcagaggctctcgtgtcggttggttatgagtatgaaacttgtcccgacttcatcttgtgggagcagcgaaccgtcgtcttgcaaggctttgaaatggatgccagcaacctgggaggttggagtctgaacaagcaccatatcctcaacccacagtctggtattattcacaagggaaatggagagaatatgttcatatcacagcagccccccgtgataagcactattatgggaaacggccaccagagatcggtcgcatgcaccaattgcaacggacccgctcataacaacaaactgttcgcacctgtcgcgttggctagtggaccagatgggagtgtgtacgtcggagatttcaatttcgtgaggcgaatttttccttctggtaatagcgtgtcaatcctggagctcagaaaccgggacacgaggcatagtaccagccctgctcacaaatactacctggcgatggatcccgtgagtgagtcgctttatctatctgacacgaacactcgaaaggtctataagctgaagtctctggtggagactaaggatctgagcaagaacttcgaggtcgtcgctgggaccggcgatcagtgcctgccttttgaccagtcgcattgcggtgatggcggtcgagcctccgaggcatctctcaactctccaagagggatcacagtcgacaggcacgggtttatatactttgtcgacgggacaatgatccgtaaaatcgacgagaacgctgtcattacaacagtgattggatctaatggcctgacctccacacagcccctttcttgcgactccggaatggacataactcaagtcagactagagtggcccaccgacctggcagtaaacccaatggacaattctttgtatgtgcttgacaacaatatagtgttgcagatcagtgaaaataggagggttcggataattgccggccggcccatacattgccaggtccccgggatcgaccatttccttgtgtccaaagttgcaattcacagcacattggaatctgctagggccattagcgtttcccactccggcctgctttttatcgctgaaaccgacgagcgcaaagtaaataggatccaacaagtgacaacaaacggtgagatctatatcatcgcaggagcccctacagactgtgactgcaagattgatcctaattgcgactgtttcagtggagacggcggctatgccaaggatgctaagatgaaggccccatcctcactggccgttagtcctgacggcactttatacgtggccgaccttggaaacgtccgcattagaacgatatcccgcaatcaggctcatttaaacgacatgaatatatatgagatcgcatcacccgcagaccaggaactttaccagtttacagtcaacgggactcacttgcacacactgaacttgattacgagggactacgtctacaatttcacatataattccgaaggagacctcggggcaatcacatcttctaacgggaattctgtgcatattagacgagacgccggggggatgcccctctggttggtagttccaggagggcaagtctattggctaacgatttcttctaatggagtgctgaagcgggtatctgctcaggggtataacctggcattaatgacatacccaggtaacaccggcctacttgctactaagagcaacgagaacggctggactactgtctacgagtacgaccccgaggggcacctgacgaatgctactttccctaccggagaggtttccagttttcactcagatcttgaaaaactgaccaaggtagaactcgacacatctaatcgcgagaacgtcctgatgagtacaaacctgaccgcgaccagtacgatttacatcctgaagcaggaaaatactcagtccacatacagggtcaatccggatggctcgctgcgcgtgactttcgcctccggaatggagatcggtctcagtagtgagccgcacattctggcgggggctgttaatccaacgttggggaagtgtaacatttcccttccgggcgagcacaatgcaaatttgattgaatggcggcagcggaaagagcagaataaggggaatgtcagcgcattcgaacggcggctaagggcccacaatcgaaacttgctcagtatcgactttgatcatattaccaggaccggtaagatttatgacgaccacaggaaattcacactgcgtattctgtacgaccagaccggtaggcctatcctctggtctcccgtttcaaggtacaacgaggtaaacattacctacagcccctcaggtctagtcacatttattcagcgggggacctggaacgagaagatggagtatgatcaatctggcaaaattatctccagaacatgggcagatggcaaaatatggagttacacatacctggaaaaaagcgtgatgttgcttcttcattcacaaagaaggtacatttttgagtacgaccagcccgactgtttattgtccgtgacaatgccgagtatggtccgacacagtctccagacaatgctcagcgtcgggtattaccgcaatatctacaccccccccgatagctccacgagctttatccaggactactctcgcgatggaagactcctccagacattgcacctgggtaccggccgcagggtgctttataaatacacaaagcaagccagacttagcgaagtgttgtatgatacaactcaggttactttaacctatgaagaaagcagtggtgtgatcaagacaattcatctgatgcacgatggtttcatttgcaccattcgataccgtcagacggggccactaattgggagacagatcttcaggttctcggaggaggggttggtcaacgctagatttgactattcttacaacaacttccgcgtaacatcgatgcaggcagttattaacgaaaccccccttccgattgacctctacagatacgtggatgtgtcaggccggacagaacaatttggcaagttttctgtgatcaattacgacctaaatcaggttattacaacaaccgtgatgaagcataccaaaatttttagcgcaaatggtcaggtaatcgaagtccagtacgagatcctgaaggctatcgcctattggatgacgattcagtacgataacgtgggacgcatggttatctgtgatatcagggtaggggtggatgctaatattactcgttacttttatgagtacgatgctgatggccagctgcagaccgtctcagtgaacgataagacacagtggagatactcttatgatttaaatggcaatattaacctgctgtcacatggcaagagtgccagacttacccctctgaggtatgatctccgcgaccggatcacacggctcggtgagattcaatacaagatggatgaggatggatttctcagacagcgcggcaatgatatctttgaatacaattcaaatggactgctgcaaaaagcttataataaggctagcggctggacagtacagtattactacgacggacttggtcgcagggtggctagcaagagctcacttggtcagcatctgcagttcttctacgccgacttaaccaatcccataagggtaacccacctctacaaccatacttcatcggaaatcacctccctgtattatgatctccaaggacacttgatcgccatggagctgagcagtggtgaggaatactatgtggcctgcgacaatacgggcacacccctcgccgtgttcagcagcagaggccaagtgataaaggagattttgtacactccatacggcgacatttaccacgatacttatcccgacttccaggtcatcataggctttcacgggggactttatgattttcttacaaagctggtgcatcttggccagagagactatgatgtcgtagctggcaggtggactactccaaatcaccatatatggaagcaactgaacctactgcctaaaccctttaatctctattcctttgaaaacaattatccagtgggtaagatccaggatgtggccaagtacactaccgacatccgaagctggctagagctgttcggcttccaactccacaacgtgctgcccggctttccgaaacccgaactggaaaatctagagctaacatacgagctattgcgactgcagaccaaaacccaggaatgggatcctggtaaaaccattctaggaatccagtgcgaactgcagaagcaattgcggaacttcattagcctcgatcagctccccatgaccccgaggtataacgacgggagatgcctcgaaggaggcaagcaaccccgatttgccgctgtgccgtcggtcttcggcaagggcataaagttcgcaatcaaggacgggatcgtgacagccgacatcatcggcgtcgccaatgaggactctcggaggctggctgccattctgaacaatgcccactacttagagaacttgcatttcaccatcgaagggagagatacacattattttattaaactgggctcccttgaagaggacctggtattgattggaaacaccggaggcagaaggatcttggagaatggtgtgaacgtgacagtgtctcaaatgacgagcgttctcaatgggcggacccgccggttcgccgatatccagctccagcatggagctctctgtttcaatatccgctacggtacaacggtggaggaggaaaagaaccacgtgctggagatcgcgcggcagagagccgtggctcaggcctggacaaaggagcaaagacggttgcaggagggagaagaggggatccgggcttggacagaaggtgaaaaacagcaattgctcagcacagggagagtacaggggtatgatggatactttgtgctgagcgtcgagcagtatctggaattatctgattcagcaaataacatccattttatgcggcaatccgagatcggccggaggtag

SEQ ID NO: 325062 - DNA, 8199 bp, Artificial Sequence
  derived and/or modified sequence
atggagcagacagactgcaagccctaccagcccctgcccaaggtgaagcatgagatggacctggcctacaccagcagcagtgatgaaagtgaagatggcaggaagccccggcagagctacaacagccgggagaccctgcacgagtacaaccaggagctgaggatgaactacaacagccagagcaggaagaggaaggaggtggagaagagcacccaggagatggagttctgtgagaccagccacaccctgtgcagcggctaccagacagacatgcacagcgtgtccagacatggctaccagctggagatgggcagtgatgtggacacagaaacagaaggagctgccagcccagaccacgccctgaggatgtggatccggggcatgaagtctgagcacagcagctgcctgagcagccgggccaacagcgccctgagcctgacagacacagaccacgagaggaagagtgatggagaaaatggcttcaagttcagccctgtgtgctgtgacatggaggcccaggccggcagcacccaggatgtgcagagcagcccccacaaccagttcaccttccggcccctgcccccacctcctcctcctcctcatgcctgcacctgtgccaggaagcccccacctgctgctgacagcctgcagaggaggtccatgaccaccaggagccagcccagccctgctgccccagccccacccaccagcacccaggacagcgtgcacctgcacaacagctgggtgctgaacagcaacatccccctggagaccaggcacttcctgttcaagcacggcagcggcagcagcgccatcttctctgctgccagccagaactaccccctgaccagcaacacagtgtacagccccccaccccggcccctgcccaggagcaccttcagcaggcctgccttcaccttcaacaagccctaccgctgctgcaactggaagtgcacagccctgagcgccacagccatcaccgtgaccctggccctgctgctggcctacgtgattgctgtgcacctgtttggcctgacctggcagctgcagcctgtggagggggagctgtatgccaatggagtgtccaaaggaaacagaggaacagagagcatggacaccacctacagccccatcggcggcaaggtgtctgacaagtctgagaagaaggtgttccagaagggccgggccatcgacacaggagaggtggacatcggggcccaggtgatgcagaccatccccccaggcctcttctggaggttccagatcaccatccaccaccccatctacctgaagttcaacatcagcctggccaaggacagcctgctgggcatctatggaagaagaaacatcccccccacccacacccagtttgattttgtgaagctgatggatggcaagcagctggtgaagcaggacagcaagggcagtgatgacacccagcacagccccaggaacctgatcctgaccagcctgcaggagaccggcttcatcgagtacatggaccagggcccctggtacctggccttctacaatgatggcaagaagatggagcaggtgtttgtgctgaccacagccatcgagatcatggatgactgcagcaccaactgcaatggaaatggagagtgcatcagcggccactgccactgcttccctggcttcctgggccctgactgtgcccgggacagctgccctgtgctgtgtggcggcaatggagaatatgagaagggccactgtgtgtgccgccacggctggaagggcccagaatgtgatgtgcctgaggagcagtgcatcgaccccacctgcttcggccacggcacctgcatcatgggcgtgtgcatctgtgtgcccggctacaagggggagatctgtgaggaggaggactgcctggaccccatgtgcagcaaccacggcatctgtgtgaagggggagtgccactgcagcacaggctggggcggcgtgaactgtgagacccccctgcctgtgtgccaggagcagtgcagcggccacggcaccttcctgctggatgctggggtgtgcagctgtgaccccaagtggacaggcagtgactgcagcacagagctgtgcaccatggagtgtggcagccacggcgtgtgcagccggggcatctgccagtgtgaggagggctgggtgggccccacctgtgaggagaggagctgccacagccactgcacagaacatggccagtgcaaggatggaaaatgtgagtgcagccctggctgggagggggaccactgcaccatcgcccactacctggatgctgtgagagatggctgccccggcctgtgctttggaaatggccgctgcaccctggaccagaatggctggcactgtgtgtgccaggtgggctggagcggcaccggctgcaatgtggtgatggagatgctgtgtggggacaacctggacaatgatggagatggcctgacagactgtgtggaccctgactgctgccagcagagcaactgctacatcagccccctgtgccagggcagcccagaccccctggacctgatccagcagagccagaccctcttcagccagcacaccagccgcctcttctatgaccgcatcaagttcctgattggcaaggacagcacccacgtgatccccccagaggtgtcctttgacagccggcgggcctgtgtgatccggggccaggtggtggccattgatggcacccccctggtgggcgtgaatgtgtccttcctgcaccacagcgactatggcttcaccatcagccggcaggacggcagctttgacctggtggccatcggcggcatcagcgtcatcctgatctttgacaggagccccttcctgcctgagaagaggaccctgtggctgccctggaaccagttcatcgtggtggagaaggtgaccatgcagagggtggtgtctgacccccccagctgtgacatcagcaacttcatcagccccaaccccatcgtgctgcccagccccctgaccagctttggaggcagctgcccagagcggggcaccatcgtgcctgagctgcaggtggtgcaggaggagatccccatccccagcagctttgtgcggctgagctacctgagcagcaggaccccaggctacaagaccctgctgcgcatcctgctgacccacagcaccatccctgtgggcatgatcaaggtgcacctgactgtggccgtggagggccgcctgacccagaagtggttccctgctgccatcaacctggtgtacacctttgcctggaacaagacagacatctacggccagaaggtgtggggcctggccgaggccctggtgtctgtgggctatgaatatgagacctgcccagacttcatcctgtgggagcagaggacagtggtgctgcagggctttgagatggatgccagcaacctgggcggctggagcctgaacaagcaccacatcctgaacccccagagcggcatcatccacaagggaaatggagagaacatgttcatcagccagcagccccctgtgatcagcaccatcatgggaaatggccaccagaggtctgtggcctgcaccaactgcaatggacctgcccacaacaacaagctgtttgcccctgtggccctggccagcggcccagatggctctgtgtatgtgggggacttcaactttgtgcggcgcatcttccccagcggcaacagcgtgtccatcctggagctgaggaacagagacaccaggcacagcaccagccctgcccacaagtactacctggccatggaccctgtgtctgagagcctgtacctgagtgacaccaacaccaggaaggtgtacaagctgaagagcctggtggagaccaaggacctgagcaagaactttgaggtggtggccggcactggagaccagtgcctgccctttgaccagagccactgtggagatggcggccgggccagcgaggccagcctgaacagcccccggggcatcaccgtggacagacatggcttcatctactttgtggatggcaccatgatcaggaagattgatgaaaatgctgtgatcaccaccgtgattggcagcaatggcctgaccagcacccagcccctgagctgtgacagcggcatggacatcacccaggtgcggctggagtggcccacagacctggccgtgaaccccatggacaacagcctgtatgtgctggacaacaacatcgtgctgcagatcagtgaaaatagaagagtgcgcatcatcgccggccggcccatccactgccaggtgcccggcatcgaccacttcctggtgtccaaggtggccatccacagcaccctggagagcgcccgggccatctctgtgagccacagcggcctgctcttcatcgccgagacagatgagaggaaggtgaaccgcatccagcaggtgaccaccaatggagagatctacatcatcgccggggcccccacagactgtgactgcaagattgaccccaactgtgactgcttctctggagatggcggctacgccaaggatgccaagatgaaggcccccagcagcctggccgtgtccccagatggcaccctgtatgtggccgacctgggcaatgtgcgcatccgcaccatcagcaggaaccaggcccacctgaatgacatgaacatctatgaaattgccagccctgctgaccaggagctgtaccagttcaccgtgaatggcacccacctgcacaccctgaacctgatcacccgggactatgtgtacaacttcacctacaacagcgagggggacctgggcgccatcaccagcagcaatggaaattctgtgcacatcagaagagatgctgggggcatgcccctgtggctggtggtgcctgggggccaggtgtactggctgaccatcagcagcaatggagtgctgaagagggtgtctgcccagggctacaacctggccctgatgacctacccaggcaacacaggcctgctggccaccaagagcaatgaaaatggctggaccaccgtgtatgaatatgaccctgagggccacctgaccaatgccaccttccccactggagaggtgagcagcttccacagcgacctggagaagctgaccaaggtggagctggacaccagcaacagagaaaatgtgctgatgagcaccaacctgacagccaccagcaccatctacatcctgaagcaggagaacacccagagcacctacagagtgaacccagatggcagcctgcgggtgacctttgccagcggcatggagatcggcctgagcagcgagccccacatcctggccggggctgtgaaccccaccctgggcaagtgcaacatcagcctgcccggggagcacaatgccaacctgattgagtggaggcagaggaaggagcagaacaagggaaatgtgtctgcctttgagcggcggctgcgggcccacaacagaaacctgctgagcattgactttgaccacatcaccaggacaggcaagatctatgatgaccacaggaagttcaccctgcgcatcctgtatgaccagacaggccggcccatcctgtggagccctgtgagccgctacaatgaggtgaacatcacctacagccccagcggcctggtgaccttcatccagaggggcacctggaatgagaagatggagtatgaccagagcggcaagatcatcagcaggacctgggcagatggcaagatctggagctacacctacctggagaagtctgtgatgctgctgctgcacagccagaggcgctacatctttgaatatgaccagcctgactgcctgctgtctgtgaccatgcccagcatggtgcgccacagcctgcagaccatgctgtctgtgggctactacagaaacatctacaccccaccagacagcagcaccagcttcatccaggactacagcagagatggccgcctgctgcagaccctgcacctgggcactggaagaagagtgctgtacaagtacaccaagcaggcccggctgtctgaggtgctgtatgacaccacccaggtgaccctgacctatgaggagagcagtggagtcatcaagaccatccacctgatgcatgatggcttcatctgcaccatccgctaccggcagacaggccccctgattggccggcagatcttccgcttcagcgaggagggcctggtgaatgccaggtttgactacagctacaacaacttccgggtgacctccatgcaggccgtcatcaatgagacccccctgcccatcgacctgtaccgctacgtggatgtgtctggccgcacagagcagtttgggaagttcagcgtcatcaactatgacctgaaccaggtgatcaccaccaccgtgatgaagcacaccaagatcttcagcgccaacggccaggtgattgaggtgcagtatgagatcctgaaggccatcgcctactggatgaccatccagtatgacaacgtgggccgcatggtgatctgtgacatccgggtgggcgtggatgccaacatcacccgctacttctatgaatatgatgctgatggccagctgcagacagtgtctgtgaatgacaagacccagtggagatacagctatgacctgaatggaaacatcaacctgctgagccacggcaagagcgcccggctgacccccctgcgctatgacctgcgggaccgcatcacccggctgggggagatccagtacaagatggatgaagatggcttcctgcggcagagaggaaatgacatctttgagtacaacagcaatggcctgctgcagaaggcctacaacaaggccagcggctggacagtgcagtactactatgatggcctgggccggcgggtggccagcaagagcagcctgggccagcacctgcagttcttctatgctgacctgaccaaccccatccgggtgacccacctgtacaaccacaccagcagcgagatcaccagcctgtactatgacctgcagggccacctgattgccatggagctgagcagcggggaggagtactacgtggcctgtgacaacacaggcacccccctggccgtgttcagcagccggggccaggtgatcaaggagatcctgtacaccccctatggagacatctaccatgacacctacccagacttccaggtgatcatcggcttccatggaggcctgtatgacttcctgaccaagctggtgcacctgggccagagggactatgatgtggtggccggccgctggaccacccccaaccaccacatctggaagcagctgaacctgctgcccaagcccttcaacctgtacagctttgagaacaactaccctgtgggcaagatccaggatgtggccaagtacaccacagacatccgctcctggctggagctgtttggcttccagctgcacaacgtgctgcccggcttccccaagccagagctggagaacctggagctgacctatgagctgctgcggctgcagaccaagacccaggagtgggaccccgggaagaccatcctgggcatccagtgtgagctgcagaagcagctgaggaacttcatcagcctggaccagctgcccatgaccccccgctacaatgatggccgctgcctggagggcggcaagcagcccaggtttgctgctgtgcccagcgtgtttgggaagggcatcaagtttgccatcaaggatggcatcgtgacagctgacatcattggagtggccaatgaagacagccggcggctggccgccatcctgaacaatgcccactacctggagaacctgcacttcaccatcgagggccgggacacccactacttcatcaagctgggcagcctggaggaggacctggtgctgattggcaacacaggaggaagacgcatcctggagaatggagtgaatgtgacagtgtcccagatgacctctgtgctgaatggccgcaccaggagatttgctgacatccagctgcagcacggggccctgtgcttcaacatccgctatggcaccaccgtggaggaggagaagaaccacgtgctggagatcgcccggcagagagctgtggcccaggcctggaccaaggagcagaggcggctgcaggagggggaggagggcatccgggcctggacagaaggagagaagcagcagctgctgagcacaggccgggtgcagggctatgatggctactttgtgctgtctgtggagcagtacctggagctgagtgacagcgccaacaacatccacttcatgaggcagagcgagattggaagaagatag

SEQ ID NO: 325063 - DNA, 8199 bp, Artificial Sequence
  derived and/or modified sequence
atggagcagaccgactgcaagccctaccagcccctgcccaaggtgaagcacgagatggatctagcctatacctctagttcagatgaatccgaagacggcaggaagccacgacagagctataactcccgggagactcttcacgaatataatcaggagctgcggatgaactacaactcccagtctaggaagagaaaggaggtagaaaagagcacgcaagagatggagttctgcgagacgtctcatacgctgtgttccggctatcagaccgatatgcatagcgtcagtcggcacgggtatcaacttgaaatgggaagcgacgtggacacagagacggagggtgccgcatcccccgatcacgctctgagaatgtggataagggggatgaaatcagaacatagtagctgcctgagttctcgtgccaactcggcactctccctgactgataccgaccatgagcgcaagagcgatggagagaacggttttaaattctctcctgtttgttgcgatatggaggcacaggccgggtccacccaggacgtgcaaagttcaccccacaaccagtttacattcagacctttaccaccgccccctccacctccccatgcttgtacctgtgcaagaaaaccccctccggctgcggattccctgcagcgtaggagcatgactacccgctcgcagccgtctcctgccgcccccgcacccccaacgtctacccaggacagtgttcatctgcacaacagctgggtcctgaattctaacatcccactggagacgaggcatttcctgttcaaacatggctctggctccagcgctatcttttctgcagcaagccaaaactaccctttgacgagcaacactgtgtattctcctccacccagacctctcccaaggagtacatttagtagacctgcctttacgtttaataagccatatagatgctgcaattggaaatgtaccgcactgtccgcaaccgctatcacagttacccttgccctgctgctagcgtacgtgattgccgtgcacctgtttggactgacctggcagctacagcctgtagaaggtgaactgtacgccaatggcgtgagtaagggaaacaggggaaccgagtctatggacaccacatattctcccattggtgggaaggtgtcagacaagagcgagaaaaaggtctttcagaagggccgtgctatcgatacaggcgaggtagatattggagcccaggtgatgcagacaattcctccagggctgttttggcgttttcaaattactattcaccaccctatctacttaaaatttaatatctcactcgccaaggatagcctgctggggatctatgggaggcgtaacatccctccaactcacacacaattcgacttcgtcaaacttatggatggcaagcagctggttaagcaggatagtaagggatctgatgacacacagcacagcccacgaaatctcattcttactagcttgcaagagaccggctttattgagtatatggatcaagggccatggtatttggcattttataatgatgggaagaaaatggagcaagtgttcgtactgactacagctatcgagattatggatgactgctccactaattgtaatggaaatggggaatgcatttcagggcactgtcactgcttccccggcttcctgggtcctgactgtgctcgagattcttgcccagtgctctgtggaggaaacggcgaatatgaaaaaggacactgtgtctgtaggcacgggtggaagggtcccgagtgtgacgtgccagaagagcaatgcatcgaccctacctgcttcgggcacggcacttgcattatgggggtttgtatctgtgttccaggatataaaggcgagatttgtgaagaggaagattgccttgatcccatgtgcagtaaccatggtatttgcgtcaagggagagtgtcactgttccaccggatggggaggtgtcaactgcgaaaccccattgccagtctgccaggaacagtgctctggtcacggtacttttcttctcgacgctggcgtgtgctcctgtgatcccaagtggactggatccgactgttctacagaactgtgtactatggaatgtgggtcccacggagtctgcagtagagggatttgccagtgcgaggaagggtgggtggggcctacctgcgaggagcggagttgtcactctcattgcactgaacacgggcagtgtaaagacgggaaatgcgaatgcagtccaggatgggagggcgaccactgtacgatcgcccactacctagatgctgtgcgtgatgggtgtcccgggctgtgcttcggaaacgggagatgtactctagatcagaatggatggcactgcgtctgccaggtgggatggtctggaaccggctgtaatgtcgtcatggaaatgctgtgtggcgataacctcgataatgacggggacgggctgacagattgtgtggatccagattgctgtcaacaatcaaattgctacatctcccctctgtgccagggttctcccgatccactggacttaatccaacaaagccagacccttttttcccagcatacctccaggctgttctacgaccgaattaaattcttaataggcaaggactctacacatgtcatacctcccgaggtgtcctttgactccaggagggcgtgtgttattagaggccaggtggtcgcaatcgatggtactcctttggtgggtgtgaacgtgtcattcctccaccatagcgattatggatttacgatatcccgacaggacggctccttcgatctggtggccatcggcggcatctctgtcattctgattttcgaccggtccccattcctcccggaaaagcgtacattgtggctgccatggaaccagtttatcgtggtggagaaagtcaccatgcaaagagtcgtaagcgacccgccaagttgtgatatttctaactttatttccccgaatccgattgtgttgccatcccctctcactagctttggaggctcttgcccggagaggggcacaattgtgcccgagcttcaggttgtgcaggaggagattccaatccccagcagcttcgttcgcttgagctacctgagttccaggactcccggttacaagacactactacgcatcctcctgactcattccaccatccccgtgggaatgattaaggtgcatctaacagtggccgtagaagggaggttgacccagaaatggttccccgccgctatcaacttggtctacactttcgcctggaacaagaccgacatatatggccagaaggtttggggattggcggaagccctggtctccgtcggttacgagtacgaaacctgtcctgactttattctgtgggaacagcgaaccgtggtattacaaggttttgagatggacgcctctaacctcggaggatggtctctgaataaacaccatatattgaacccacaatcagggatcatccacaaaggcaacggcgagaacatgttcatttcccaacagcctcctgtcatctccactatcatgggtaacgggcatcagcgtagcgttgcatgcactaattgtaatggccccgcacataataacaaactgtttgccccagtcgccttggctagtggcccggacgggagcgtgtacgttggcgatttcaactttgtgagacggattttcccctccgggaacagcgtgtctatactggagttgcggaatcgagatacccggcactcaacctctcctgcccacaaatattaccttgccatggaccctgtctctgaaagcctatatctgagtgacaccaatacacgtaaggtctacaagctgaagagcctggtggagaccaaagatctgtccaaaaatttcgaggtggtcgccggaactggcgatcaatgtttgccctttgatcagtcccactgtggcgatggtggtagggcaagtgaagcctcgttgaactcacctagaggaatcaccgtcgatcgccatggatttatttattttgtcgatggaaccatgatcagaaagatcgacgaaaacgctgtaattacaacagtgatcggctcaaacgggctgacctccacccagcccctttcttgtgatagtggtatggatatcacgcaggtaaggctggagtggccaacggatctcgccgttaacccaatggacaactctttatacgtgctggataacaatattgtgctccagatttctgaaaataggagggttcgcataatcgcaggacgacctattcactgccaggttccggggatagatcatttcctggtctctaaggtcgccatccacagcactctcgagtcagctagggcaatctccgtctctcattcaggtttactcttcattgccgaaacggatgagaggaaagttaataggatccagcaagtgaccacgaacggagaaatctatataattgcgggcgcccctacagattgtgattgcaagatagaccctaattgcgactgcttctccggcgatggaggctacgcaaaggatgcaaagatgaaggcgcccagtagtttggccgtatcacccgacggaaccctgtacgtggccgatcttggtaacgtgagaatacgcaccattagcagaaaccaggctcacctgaacgatatgaacatctacgagatcgcctcccctgcagaccaggagttatatcagtttactgtgaacggaactcacctgcatactcttaacctgattactcgcgattacgtgtacaactttacctataactcagagggggaccttggcgcaattacatcgagtaacggcaattctgtgcacatcagaagagatgccggcggaatgcccctatggctcgttgtgcctggggggcaggtctactggctcacaatcagcagcaacggcgtactgaaacgagtttctgcacagggctacaatcttgccttgatgacatatccaggcaacactggattgctggctacaaagagtaatgaaaacggatggactacagtgtatgaatatgatcccgagggccatctcacaaacgccactttccccacaggcgaggtgtctagcttccacagcgacctcgagaagctaaccaaagtagaactggatactagtaaccgagagaatgtgctaatgtccaccaacttaacggctactagcacgatttacattctcaaacaagaaaacacccaaagtacgtaccgagtgaaccccgacggaagccttcgggttaccttcgcttccgggatggagatcgggctgtcttcagaaccgcacatcctggcaggtgccgtgaaccctacacttggcaagtgtaacatttctcttcccggagagcacaatgctaatctgatcgagtggagacaacgcaaggagcaaaataaggggaacgtgagcgcgtttgagaggcgattaagagcgcataaccggaatctgttgtcgatcgactttgatcatatcacccgaactggaaagatatatgacgaccatcgcaaatttactcttcgcatcctctatgaccagacgggcaggcccattctgtggagtccggtgtcccgctataacgaggttaatatcacctactctccctctgggctagttacttttattcagcgcgggacttggaacgaaaagatggagtatgatcagagtggtaagatcatcagccgaacttgggctgacgggaagatctggagttatacctacctggagaagagtgtgatgctcctgctgcacagccagcgaaggtacatctttgaatacgaccaacccgattgcctcctctctgttacgatgccgtctatggtacggcactccctgcagacgatgctgtctgtcggatattaccggaacatatatactcctcccgacagcagtacctccttcattcaggactacagccgcgacggccgactgttgcaaaccttgcatctcggcaccggacggagggtgctttacaagtacactaaacaggctaggctctcagaggtgctgtatgatacaacccaggtgacattaacttatgaagaaagctccggtgttattaagactatccacctaatgcatgacggatttatctgtaccataagatataggcagaccgggcccctgattggcaggcagatcttccgatttagcgaagagggcctcgtaaatgcccgattcgactattcctacaataacttccgagtgacgagcatgcaggctgtgattaacgagactcctttgccaattgatctataccgatatgtcgacgtctccggaaggaccgaacagttcggcaagtttagtgtgatcaactatgacctcaaccaagtgataactactactgttatgaaacacacgaagattttttcggctaatggtcaggttatcgaagtgcagtatgaaatattgaaagccattgcttattggatgacaatccagtacgacaatgtgggacggatggttatttgtgatatccgtgtgggtgttgatgccaatattactcgatacttttacgagtatgacgccgatggtcagctgcaaacagtttctgttaacgacaagacccagtggcggtactcttacgacctcaatgggaatatcaatctgcttagccacggtaaatcagcacgactcacgcccctgcgatatgacttaagagatagaatcactagactgggggaaattcaatataagatggacgaagatggctttcttcgccaacgggggaatgacatattcgaatataattcaaacggactgttgcagaaggcatataataaagcgagtgggtggactgtgcagtattattatgatggcctcgggaggcgcgtggctagtaagagcagtttaggccagcacctgcagtttttctacgctgatttgaccaaccccatcagggtgacacacctctacaatcacactagcagcgagatcacttcattatattacgacttacaagggcacctcattgccatggaactgagttcaggagaagaatattacgtggcctgcgataatacaggcacacctttggcggtattttcgagcagaggacaagtgatcaaagaaatcttgtacactccctatggagacatataccacgacacttatccggatttccaagttattatcggatttcatggggggctgtacgacttcctgactaaactggttcaccttggacagagggattacgacgttgttgctggtaggtggacaacacccaaccatcacatctggaagcagctcaatcttttgccaaagccttttaatctttactctttcgagaacaattatccggttggtaagatacaagacgtggcaaagtacacaacagatattcgaagttggttagagctcttcggtttccagctgcacaatgtgctgcctggcttccctaaacctgaactggagaatctggagctgacttacgagctactgagattgcaaaccaaaactcaggagtgggacccgggcaagacaattctaggcatccagtgtgaactccagaaacagctgcgaaattttatcagcctcgaccagttgcctatgacacctcgttacaacgatggaaggtgcttggagggcggcaaacagccacgatttgcggccgtgccaagcgtgttcgggaaaggcattaagtttgcaattaaagatggaatcgtgactgccgacatcattggcgtggcaaatgaggattcccggcggcttgccgcgatcctaaacaacgcccactaccttgagaacctgcacttcaccattgagggtagggatacacactatttcatcaagttggggtcgctggaggaagacctggtccttatcgggaataccggaggccgtagaatcctggagaatggagtcaacgtgactgtatcacagatgacatcggtacttaatggtcgaacaagacgctttgctgacattcaactgcagcacggggcgctgtgctttaacatcaggtacggaaccacagtggaagaagagaagaaccacgttttggagattgctcgccagcgagctgtcgcacaggcctggacaaaagaacagagacgcctccaggaaggcgaggaagggatccgcgcctggacagaaggtgaaaagcagcagttacttagtacaggcagagtgcaaggctacgacggctatttcgtgctgtccgtggaacagtatctggagctctctgattctgctaataatatccacttcatgcggcagagcgagattgggcgccgctag

SEQ ID NO: 325064 - RNA, 8199 nt, Artificial Sequence
  derived and/or modified sequence
auggagcaaacagauuguaaaccguaccagccccugcccaagguaaaacacgaaauggaccucgcauauaccuccaguagcgaugaguccgaggacggcaggaaaccgagacaguccuacaauucucgugaaacauuacaugaguacaaucaggaacuccgcaugaauuacaacucacaaucacgaaagagaaaggaaguggaaaaguccacacaggagauggaauuuugcgagacaucucacacacucuguucagguuaccagaccgacaugcacagcgugucgcgccauggauaccagcuggagaugggguccgacguugauacugagaccgaaggagccgcuucuccagaccaugccuuacgcauguggauacgcggaaugaagagcgagcauucaucaugccugucuucucgggcaaacuccgcacuuucccugaccgauacggaccacgaaagaaagagcgacggggagaacggcuucaaguuuucaccuguguguugugacauggaggcccaggcaggaagcacccaggacgugcaaucauccccccacaaccaguucaccuuucggccacuaccucccccacccccaccuccccacgcuugcacaugugcccgaaagccaccucccgcggcggacagucuucagcgccgcucuaugaccaccaggucccagccuucaccagcagcaccugcucccccuaccucaacccaggauaguguccaucugcauaauaguuggguccugaauucuaacaucccccucgagacucggcacuuuuuguuuaagcacggaucuggcucaucugcuauuuuuucugccgccucacaaaauuauccuuugacuagcaauacuguguauucuccaccaccuaggccauuaccucggagcacauucucccgcccugcuuuuacuuucaacaagccauaucggugcuguaauuggaaauguacugcucuguccgcaacagccaucacaguuacucuggcccuccuacucgcauacgucauugccguucaucuuuucggccucacauggcaacugcagccuguggagggcgaguuauaugcaaacgggguaucuaagggcaaucgggggaccgaaaguauggauaccaccuauucuccuauuggcggaaagguuucggacaaguccgaaaagaaaguuuuccagaaagggagggccauugauaccggcgaggucgacaucggggcucagguaaugcaaacuauacccccuggucucuucuggcguuuucagauuaccauucaccauccuaucuaccugaaguuuaauaucuccuuggccaaggauucacugcuaggcauuuauggccgcaggaauauccccccaacccacacucaguucgacuucgucaaguugauggaugggaagcagcugguuaaacaggacagcaaggguagcgacgacacacagcacucuccacggaaucugauccugacaucucugcaggagacaggguucauugaguacauggaccagggcccaugguaucuugcuuucuacaacgacggcaaaaaaauggaacaagucuucguguugaccacugcaaucgaaauuauggaugauugcuccaccaacugcaacggaaacggagagugcauuaguggacacugucacugcuuucccggauuuuuaggccccgauugcgcuagagacuccugccccgugcugugcgggggaaauggcgaauaugaaaaaggacacugcguuugucgacacgguuggaagggaccggaaugcgacgugccggaagagcaauguaucgaucccacuuguuucggucacggcacauguauuaugggcguuuguaucugcgugccgggguauaaaggggaaaucugugaggaggaagacugucuggacccuauguguaguaaucacggcaucugugugaaaggcgagugucauugcuccacgggaugggggggaguuaacugcgagacuccucugcccgugugccaagaacaguguagcggacaugggaccuuuuugcucgacgccggaguauguucgugcgauccuaaauggaccgggagcgauugcucuacagagcuguguacgauggagugcggcucucacggagucuguuccagagggauuugucaaugugaggaaggcugggugggccccacuugugaggaaagaucuugucauagccacugcacugaacacggacaguguaaagauggcaagugcgagugcagccccgguugggagggagaccacuguacuaucgcucauuaucuggacgcaguaagagacggcugccccgggcugugcuucgggaaugguagguguacccuagaucagaacggcuggcacugugucugucaagucgggugguccgguaccgggugcaacgucgugauggagaugcuuugcggcgauaaccucgacaaugacggggacggcuugacggacugcguugacccugauuguugucagcagucuaacugcuacaucuccccacucugccaggggucuccggauccccuggaucugauucagcaaucccagacucuguuuucccagcauaccucccgccuguuuuacgaucgaaucaaguuucucauuggcaaagauucaacacaugucauuccuccagagguaaguuucgacagccgcagagcguguguuauaaggggacaggucguggcaaucgacgggacuccacuggucggcgucaaugugagcuuccugcaucauagugauuacggcuuuacaauaucacggcaagauggcaguuucgacuugguggcuaucggugggaucucggugauccugaucuuugaccgcucaccauuucuccccgaaaagcgcacgcuguggcugccauggaaccaauucauugugguagaaaaaguaacaaugcaaagagucgugagcgaccccccauccugugauauauccaacuucauaucuccaaauccaaucgugcuccccucaccccuuacaucauuugguggcuccuguccagaaagagggacaaucguaccagaacugcaagucguccaagaggagauucccauuccuagcucuuuugugagacuuuccuaccugucaagcaggacacccggcuacaagacauuauugcgcauccuccugacacacucuacaauaccugucggcaugauuaagguacaccuuaccguugcaguugaggggcgcuugacucagaagugguuucccgcugccaucaaccugguuuauacauuugccuggaacaaaacggacaucuacgggcagaaagucugggggcuggcagaggcccuggugagugugggauaugaauacgagacgugcccagacuuuauucucugggagcagaggacagugguguugcagggauucgaaauggaugcuucuaaccugggagguuggagccugaauaaacaucacauccucaacccacaauccggaauuauucauaagggaaauggcgagaauauguuuauuucacaacaaccaccugugauaaguaccauuauggggaauggucaucaacgcaguguugcauguacgaauugcaaugguccugcccacaauaauaagcuguucgccccuguggcuuuggccuccgggcccgacgguucuguauacgucggcgacuuuaacuucguucggcguauuuucccuagcggaaauucuguaucaauccuggagcuucgcaaucgcgacacucgacauucaacaucgcccgcgcacaaguauuaccuggcuauggauccugugagcgaaagucuuuaucugagcgacaccaauacucgcaagguguauaaacugaagucucuaguagagaccaaagauuuaaguaagaauuuugaggugguggccgggacaggagaccaguguuugccauucgaccagucccauuguggggauggugggcgcgccagcgaagccaguuuaaauuccccacgaggcaucacaguggacagacauggguuuaucuacuucgucgacggcaccaugauacggaagaucgaugagaacgccgucauaacaacagucaucgggagcaacggguugacguccacucagccacugaguugcgauaguggaauggacauuacacaaguucguuuagaauggccaaccgaucucgcugugaaucccauggauaauucucuguaugugcuggacaauaacauuguacuccagaucagugaaaaccggagagugcggauaaucgccggucggccuauucacugccaggugcccgguauagaucauuuucugguuagcaaaguagcuauccauucaacccuagagucugcgcgcgcaaucucugugucacauaguggccuguuauuuaucgccgagaccgacgagaggaaggugaaccggauccaacaggugacgaccaauggggagaucuacaucaucgcuggggccccaacugauugcgacuguaagauugacccuaauugcgacuguuuuucaggugacggaggcuacgcuaaggacgcuaagaugaaggcucccucuagccuagcaguuagccccgauggaaccuuauacguggccgaccuugggaacguucgaauucgcaccaucagcagaaaccaagcucauuugaacgauaugaauauuuacgagauugccucacccgccgaccaagagcucuaucaguuuacagugaacggaacgcaccuucauacccugaaucuuaucacgagggauuauguuuauaacuuuacguauaacagcgaaggggaucuuggcgccaucaccagcuccaaugguaacucggugcacauucggagagaugcaggaggcaugccuuuauggcucguuguuccaggcggccaagucuauuggcugacuauuaguuccaacgguguccuuaaaaggguauccgcacagggcuauaaccuugcucucaugaccuauccaggaaauacuggccucuuagcuaccaagaguaacgagaauggcuggacgacaguguacgaguaugauccugaaggacaucugaccaaugcuacauuucccaccggcgaagucagcagcuuucacucugaucuggagaaguuaacgaaggucgaacuggacacguccaaccgagaaaacguccugauguccacaaaccugacagccaccagcacuaucuauauucuuaaacaggagaauacacagucgaccuaccgcgucaacccugauggcucucugcgcguuacauuugccuccggaauggaaauuggcuugagcagcgagccucauauccuggcaggcgccgugaacccuacacugggcaagugcaacaucagcuugccaggcgaacacaacgcgaacuugaucgaguggcgccagcgaaaagagcagaacaagggcaacgugagcgccuucgagcgaagacuccgggcccauaacagaaaccugcucagcaucgacuuugaccacaucacgaggaccgguaaaaucuaugaugaccaccgaaaguuuacacuaagaauccuuuacgaucagaccggccgacccauccucugguccccagugucccgguacaaugaaguuaauauaacuuauuccccuagcgggcugguuaccuucauucaacgcgguacauggaaugaaaagauggaauacgaucagaguggcaagaucauuuccaggaccugggccgacgguaagaucuggaguuacacuuaccuugagaaguccgucaugcuacuguuacauagccagaggagauacaucuucgaauaugaccagccugacugucuccucucugugacuaugccuaguauggugcggcacucucugcaaaccauguugagcgucggguacuauagaaacaucuacacuccaccugacagcaguaccucuuucauccaggacuauucucgagacggucgccuccugcagacccuccaucugggaacuggcagaaggguccuuuacaaauacaccaaacaggcucgguuguccgaaguccuguaugacacaacucaggugacgcuaacauacgaggagagcagugggguuauaaagaccauucacuugaugcaugacggcuucauuugcacgauuagauauagacagacaggcccuuugaucggacgacaaauuuucagguuuuccgaagagggucuggugaacgcccgcuucgacuauucguacaauaauuuucggguuacuaguaugcaggcggucauuaaugaaacuccgcuccccauagaucuguaucgcuacguugaugucucaggccgcacugaacaguucgguaaauucucugucauuaacuacgauuuaaaccagguaauaacaaccacagugaugaagcauacuaagaucuuuuccgccaauggccagguuauugaagugcaguaugagauucuuaaagccauagcuuacuggaugacaauccaguaugacaaugugggaaggauggugauaugcgauauccgcguagggguugacgcaaacauuacucgauacuuuuacgaauaugacgcugacggccagcugcagacggugucagugaacgauaaaacucaguggcgcuacagcuacgaucucaaugggaauauuaaucuccuuagccacgguaaguccgcccguuugacgccccuaagauaugaccuccgggaccggaucacaagguuaggcgagauacaguauaaaauggaugaagacggcuuucugcgacaacgcgguaacgauaucuuugaauacaauagcaacggucuguuacagaaggccuauaacaaagcgagcgguuggaccguacaguacuauuacgauggacucgguagacgggucgccagcaaaucuucuuuggggcagcaucuccaguucuucuaugccgaccugacuaauccgaucaggguuacucaccuguauaaucacacaucuagcgagaucacaucucuguacuacgaccuccagggccaccuaauugcuauggaacucuccucuggggaagaguauuacgucgccugcgauaauacaggaacaccacuggcagucuucucuucacggggacaagugauuaaagagauccuguacacuccguauggcgauauuuaucacgauacauaucccgauuuucaggugauuauugguuuucacgguggguuauaugacuuccugacuaaacuggugcaucucggccagagagauuacgaugugguggcuggccgcuggacgacaccgaaccaucauaucuggaagcaacuuaaccuacucccaaagccauucaaucuguauaguuuugaaaacaauuaucccgucggaaaaauccaggacguagcgaaguauaccaccgacauucgaucuuggcuggaacucuuuggcuuccagcuccauaacgugcugcccggguuuccgaaacccgagcuggaaaaccuggaacugaccuacgaguuacugcgcuugcagaccaagacucaggaaugggaccccgggaaaacaauacugggcauacagugcgaacuccagaaacagcugagaaauuucauuucccucgaucagcuaccaaugaccccaagguauaacgaugggcguugccuggagggcggcaaacagccacgcuuugccgcagugcccuccguguuuggaaaggguaucaaauuugcaauaaaggauggcauugucaccgcggauaucaucggggucgccaaugaggauucacguagguuggcugcaauacuuaacaacgcccauuaccuggaaaaccugcauuucacuauugagggccgcgacacucauuacuucaucaaacuuggaucauuggaagaagaucugguguuaauaggcaauacaggcggacggcggauccuggaaaaugggguaaacgucaccgucagccaaaugacuagcguccuuaacggaaggaccaggcgcuucgccgacauccagcuucaacauggagcacucugcuucaauauccgguauggaaccaccguagaggaggaaaagaaccauguucucgaaaucgcccgccagagggcuguggcucaggcauggacaaaggagcagcggagacugcaggagggagaggaagggauucgcgcguggaccgagggcgaaaaacagcagcucuuaucaaccggacggguccaagguuaugauggguauuuugugcuuuccguggaacaguaccuugaacuuuccgauucugcaaacaauauccauuuuaugcgacagucagagauaggcagacgauag

SEQ ID NO: 325065 - RNA, 8199 nt, Artificial Sequence
  derived and/or modified sequence
auggagcagaccgauugcaaaccuuaccagccccuccccaagguuaagcaugaaauggacuuggcuuacacaucuuccagugaugagagugaagacggacggaaaccacgccaaucauacaauagccgugagacccugcacgaguacaaucaagaacugaggaugaacuacaacucacagaguagaaagcgcaaggaagucgaaaaaagcacucaggagauggaauuuugugaaaccucucauacacuauguagcggcuaccagacggauaugcacaguguuaguaggcauggcuaccagcuggagaugggaucugacguggauaccgagaccgaaggcgccgccucaccagaucaugcccuccgcauguggaucagaggaaugaaguccgaacauaguucaugucucucaucacgcgcaaauuccgcccugucccucaccgacaccgaucaugaaagaaaaagcgauggagaaaacggauucaaguuuaguccgguuugcugcgauauggaagcccaagcggggagcacgcaggaugugcagaguucuccccauaaucaauucacuuuucggccccucccgcccccccccccaccaccccacgccuguacaugcgcacgcaagccgccaccagccgcagacucucuccaacggcgaucuaugacgacucgcagucagcccuccccugcagcgccagccccucccacaucaacacaagacucuguacaucugcacaauuccugggugcuaaacuccaauauaccucuggagacacgacauuuccuuuucaagcacggaagcggcucuuccgccauuuucucugcagcuagucagaacuacccccuaacaaguaacacugucuacuccccaccucccaggccccuuccucguuccaccuuuagcaggccagcuuuuacuuucaauaaaccuuacagaugcugcaauuggaaguguacugcgcugucagcgaccgccauuaccgucacacucgcccucuuguuggccuauguaauugcuguacaucucuuuggacugacuuggcaguugcagccaguugaaggugaacuuuacgcuaacggagucaguaaaggaaauagaggcacugaaagcauggauaccacguauagccccauuggcggaaagguuuccgacaaaucugaaaagaagguguuccagaaaggacgggcaauagauacaggagagguggacauaggagcucaggucaugcagaccauuccgccagggcuuuuuuggagauuucagauuacaauccaucaccccaucuauuuaaaauucaacaucucccuggcgaaggacucccuacuuggaaucuacggaagacggaacaucccacccacacacacacaauucgauuucgugaaacugauggaugguaagcagcuggugaaacaagauagcaaagguucagacgauacacaacauagcccccgcaauuugauacugacuagucuacaggaaacaggguuuauugaauauauggaucaggggccaugguauuuggcauucuacaaugauggcaagaaaauggaacagguguuuguuuuaacgacagccauugaaaucauggacgacugcucgaccaacuguaacggaaauggugaguguaucucaggccacugccacuguuuuccuggauuccucgggccugauugcgcaagagacaguuguccaguucucugcggagguaacggggaauacgaaaagggacauugugugugcagacaugguuggaaaggcccagagugugacguuccugaagagcaauguauugauccgaccuguuucggacacgggacuuguauaaugggggucuguauauguguucccggcuacaaaggagaaauuugugaggaggaagacugucucgauccgauguguuccaaucauggcaucugugucaaaggcgaaugccauugcagcaccggguggggcggagugaacugugaaacgccgcuuccagucugccaggagcagugcucaggccacggaaccuuuuugcucgaugcaggcguuuguucuugugaucccaaauggacuggcucagauuguucaacagaacugugcaccauggagugugguucccacgguguuuguuccagagggauaugucaaugcgaggagggaugggucgggccgacaugcgaggaaaggaguugucacagucacugcaccgagcauggccagugcaaggauggaaagugugaaugcagcccaggcugggaaggggaccacuguaccauugcucacuaccuggaugcuguucgcgauggaugccccggucucugcuuugggaacgggaggugcacuuuggaccaaaacggauggcacuguguuugucaagugggcuggucagguaccgguuguaauguugucauggaaaugcugugcggggauaaucuugauaaugauggggacggccucacagauugcguggacccagauuguugucagcaauccaauuguuauaucuccccccuuugccaagggucuccugauccccuagaucuuauacagcagucucaaacacuguucagucagcauacuucccggcuguuuuaugaccgaauuaaguuccugauagggaaagauagcacacacgucaucccgccugaggucucuuucgacaguagacgagccugcgugauccguggccaggucguggcaaucgauggcaccccacuagugggagucaacgucucauuucuucaucauuccgacuacggauucaccauuucccgacaggauggaucuuucgaucuaguagcaaucggcgggaucucagucaucuugaucuuugaccgauccccuuuucugccagagaagcgcacacugugguugccuuggaaccaguucauuguuguagagaaggucaccaugcagagagucgucucugaucccccuucuugcgauaucaguaacuucauuagucccaacccuaucguucucccaucccccuuaacuucguuuggcggcagcugccccgagagaggcacaaucguuccagaauugcaaguggugcaggaggagauucccaucccuagcuccuuuguacgccuguccuaccuuucgucucgaaccccaggauacaaaacacuucuuaggauucuccuuacacauucuacaauuccagucggcaugauuaaaguccaccuuacaguugcgguugaaggucggcucacucaaaagugguucccagccgccauaaaccugguguauaccuuugccuggaacaagaccgacauuuauggucagaaaguguggggccuggccgaagcuuuggugucagucgguuaugaguacgagaccugcccagacuucauauugugggaacaaagaaccguggugcuccagggcuucgaaauggaugccaguaaucuggguggauggagucucaauaagcaucauauuuuaaauccacagucagguauaauucauaagggcaacggagagaacauguucauuucucagcagccaccggucauuaguacuaucaugggaaacggacaccagagauccguagccuguacaaauugcaacgguccagcgcauaauaauaaacuguuugccccggucgcccucgccucagguccagauggaucaguguacgugggagacuuuaauuuuguuagaagaaucuuucccucaggcaacucggucucaauacuggagcuuagaaaccgcgauaccagacauucaacguccccagcucacaaguauuaccuugcaauggacccaguaucagagucauuguaucuuagcgacaccaauacccggaagguguauaagcuuaaaucccuuguggaaaccaaagaccuuuccaaaaauuuugaggugguggcaggcacaggugaccagugcuuaccauuugaccagucacauugcggggauggaggaagagcuucagaagcgaguuugaacagcccccgggggauuaccguggaucggcacggcuuuaucuacuucgucgacgguacuaugauacgaaaaauugaugaaaacgcaguaaucacaaccgugauugggucuaauggguugacuagcacccaaccucucucuugcgauucuggaauggacauaacccaggucaggcucgaguggccaacugaucuagcugugaacccuauggacaauagccuguauguucucgacaacaacaucguacuucaaauaucugagaacagacgaguacggauuauagcuggcaggcccauacacugucaggucccgggaauugaccacuuuuuagucaguaaaguugccauccauagcacccucgagagugcaagagccauuaguguuagccauuccggucuucucuuuaucgcggagaccgacgaacggaaggugaauagaauccagcaggugacgacgaacggggagauuuauauuauugcaggcgcacccacugacugugacuguaagaucgaucccaacugcgauuguuucucaggagaugggggcuaugcgaaagaugccaaaaugaaggcaccauccucauuggcuguuucccccgacggaacucuuuacguggccgaccugggcaaugugcguauuaggacuauuagcagaaaucaagcucaucugaaugacaugaauaucuaugaaauagcuagcccagccgaccaggaacuguaccaauuuacugugaacggcacgcaccugcauacucuuaaucucaucacuagggauuacguguauaauuucacuuauaauagcgaaggcgaccucggagcaauuacuuccaguaacgguaauucgguccacauuaggcgagaugcuggcgguaugccccuguggcuggucguuccugguggacaggucuacugguugaccauaagcuccaauggagugcugaaacgcgugucagcucaaggauacaacuuagcuuuaaugacguacccugguaauacuggccugcucgcaacgaaaaguaaugaaaacggguggacgacuguguacgaauacgauccugagggccaccugaccaaugcaacguucccaacaggugaggucagcucuuuucacuccgacuuagaaaagcugacuaaagucgaauuggauaccucuaacagagagaauguacugaugucaacuaaccugacagccacuuccacaaucuauauucuuaaacaagaaaacacacaaucuacguaccgcgucaaucccgauggcucucugcgggugacuuucgcuucgggaauggaaauuggccuuucauccgagccccauauccuugcgggggcgguuaacccaacccuagguaagugcaacaucuccuugcccggugagcacaacgccaaccuaaucgaauggagacagagaaaggagcagaacaagggaaacgugagcgcuuuugagagaagacuucgagcccacaacaggaaucugcugagcauugauuucgaccacauaacccgcacuggaaaaauuuacgacgaccaucgcaaguuuacucugagaauucuuuaugaucaaaccggacguccuauucuuuggucccccgugucacgcuacaaugaaguaaacauaacuuacucaccgucaggccucguaacuuuuauccagagaggcaccuggaacgaaaagauggaguaugaccagagugggaagauaauaagccgcaccugggcugacggaaagaucugguccuacacauaccucgaaaaaagcgugauguugcugcugcauagucagagaagauauauuuucgaguacgaccaaccagauugccugcucucugugacuaugccuucuauggugagacacucgcuccaaacuaugcugucaguggguuauuaccgcaacaucuacacgccuccagacucauccacuucauucauucaggauuacucgcgcgauggucgccucuuacagacucuacacuuagguaccggccgaaggguucucuacaaguacaccaaacaagccaggcuguccgaaguacuguacgauaccacccaggucacccuuacuuaugaagaauccagcggcgugauaaagaccauccauuugaugcacgacggguucaucugcacaauaagauauagacagacaggaccucucauaggccggcagauuuucagauucagcgaagaaggacuagugaaugcgcgauucgauuauagcuacaacaauuuucggguaaccuccaugcaggccgugaucaacgagaccccgcugccuauagacuuguaucgcuacguggaugugucugggaggaccgagcaguuuggcaaauuuuccgugauuaauuaugacuugaaccaaguaaucacaacaacaguuaugaaacacacuaaaaucuucuccgcgaacggucagguaaucgaggugcaguacgagauccugaaagcuaucgcuuauuggaugaccauucaguaugauaacgucgggaggaugguuauuugugacaucagaguugggguggacgcuaacaucaccagauauuuuuacgaguacgaugccgauggccaauugcagaccguaagcgugaacgacaagacacaguggcguuauucauaugaucuaaauggaaauauuaaccuacuuucccacgguaagagugccaggcucacaccccuuagauaugaccugcgagaucggaucacucggcuuggcgaaauccaguauaaaauggaugaagacggguuccucagacagcggggaaacgauauauuugaguauaauucgaacgggcuacugcagaaagcauauaacaaggcuuccggcuggacgguacaguauuauuaugacgggcucggucgucgcguugcuaguaagucuucacucgggcaacaccugcaauucuucuacgcagacuugacaaauccgauacgcguuacccaccucuacaaucacacuagcucugaaauaacaucucucuauuacgaccugcagggacaccucauugccauggagcuuagcaguggggaagaauacuauguagcaugcgauaacacagggaccccuuuggcaguauuuucauccagaggacaggucaucaaggaaauucuguacacccccuauggcgauauauaccaugacaccuauccagacuuccaaguaaucauaggguuccauggaggccuauacgauuuucugacuaaacuggugcacuugggacagagagacuaugauguagucgcaggccgguggacuacccccaaccaucacauuuggaagcagcuaaaccuacuaccuaagccauuuaacuuguacucuuucgaaaacaacuauccgguggguaagauacaggauguagccaaauacacaacagacauucguagcuggcuggaauuguucggcuuucaacuucacaacguccucccuggguuuccuaagcccgagcuggaaaaucuugaacucaccuaugaauuguugcgguugcagaccaagacgcaagaaugggaucccggaaagacaauauuggguauccagugugaacuucagaagcaguuaagaaauuuuauuucccuggaucaguugcccaugacuccuagauacaaugacggcagguguuuggaagggggaaagcaaccgagauucgccgcuguucccucgguguuugguaaagggauuaaauucgccauuaaggacggcauagugacagcagauauuauaggcguggcaaaugaagacucgcgacgcuuagcagccauucucaauaaugcacacuauuuggagaaccugcauuuuaccaucgaaggaagagauacucacuauuucauuaaacugggcucccuggaagaagacuuggugcugauaggaaauacagggggcaggcgcauucuagaaaacggcgugaaugugacggugucacagaugacuucagucuugaacggaagaacuaggagauuugcagacauucaacuacagcacggcgcucugugcuuuaacauccgguauggcacgacuguugaggaagagaaaaaucacguucucgaaaucgcuagacaacgugcuguugcccaggcauggacaaaggagcaaaggagauuacaggagggagaggagggcaucagggccuggacagagggcgaaaaacagcagcugcucucuacgggaagggugcaaggguaugauggauacuuuguucugagcguggaacaauaccuggaauuauccgauagugccaacaacauccauuuuaugcgccagagugagauugguaggagauag

SEQ ID NO: 325066 - protein, 638 aa, Artificial Sequence
  derived and/or modified sequence
LPFDPANNNEPLQFGSASGPLVTEGLIENGGESSKKRKRTNTPSADNSRTLNVDSTAMTLPMSDPTAWATAMNNLGMAPLGIAGQPILPDFDPALGMMTGIPPITPMMPGLGIVPPPIPPDMPVVKEIIHCKSCTLFPPNPNLPPPATRERPPGCKTVFVGGLPENGTEQIIVEVFEQCGEIIAIRKSKKNFCHIRFAEEYMVDKALYLSGYRIRLGSSTDKKDTGRLHVDFAQARDDLYEWECKQRMLAREERHRRRMEEERLRPPSPPPVVHYSDHECSIVAEKLKDDSKFSEAVQTLLTWIERGEVNRRSANNFYSMIQSANSHVRRLVNEKAAHEKDMEEAKEKFKQALSGILIQFEQIVAVYHSASKQKAWDHFTKAQRKNISVWCKQAEEIRNIHNDELMGIRREEEMEMSDDEIEEMTETKETEESALVSQAEALKEENDSLRWQLDAYRNEVELLKQEQGKVHREDDPNKEQQLKLLQQALQGMQQHLLKVQEEYKKKEAELEKLKDDKLQVEKMLENLKEKESCASRLCASNQDSEYPLEKTMNSSPIKSEREALLVGIISTFLHVHPFGASIEYICSYLHRLDNKICTSDVECLMGRLQHTFKQEMTGVGASLEKRWKFCGFEGLKLT

SEQ ID NO: 325067 - protein, 581 aa, Artificial Sequence
  derived and/or modified sequence
MTLPMSDPTAWATAMNNLGMAPLGIAGQPILPDFDPALGMMTGIPPITPMMPGLGIVPPPIPPDMPVVKEIIHCKSCTLFPPNPNLPPPATRERPPGCKTVFVGGLPENGTEQIIVEVFEQCGEIIAIRKSKKNFCHIRFAEEYMVDKALYLSGYRIRLGSSTDKKDTGRLHVDFAQARDDLYEWECKQRMLAREERHRRRMEEERLRPPSPPPVVHYSDHECSIVAEKLKDDSKFSEAVQTLLTWIERGEVNRRSANNFYSMIQSANSHVRRLVNEKAAHEKDMEEAKEKFKQALSGILIQFEQIVAVYHSASKQKAWDHFTKAQRKNISVWCKQAEEIRNIHNDELMGIRREEEMEMSDDEIEEMTETKETEESALVSQAEALKEENDSLRWQLDAYRNEVELLKQEQGKVHREDDPNKEQQLKLLQQALQGMQQHLLKVQEEYKKKEAELEKLKDDKLQVEKMLENLKEKESCASRLCASNQDSEYPLEKTMNSSPIKSEREALLVGIISTFLHVHPFGASIEYICSYLHRLDNKICTSDVECLMGRLQHTFKQEMTGVGASLEKRWKFCGFEGLKLT

SEQ ID NO: 325068 - protein, 468 aa, Artificial Sequence
  derived and/or modified sequence
MTLPMSDPTAWATAMNNLGMAPLGIAGQPILPDFDPALGMMTGIPPITPMMPGLGIVPPPIPPDMPVVKEIIHCKSCTLFPPNPNLPPPATRERPPGCKTVFVGGLPENGTEQIIVEVFEQCGEIIAIRKSKKNFCHIRFAEEYMVDKALYLSGYRIRLGSSTDKKDTGRLHVDFAQARDDLYEWECKQRMLAREERHRRRMEEERLRPPSPPPVVHYSDHECSIVAEKLKDDSKFSEAVQTLLTWIERGEVNRRSANNFYSMIQSANSHVRRLVNEKAAHEKDMEEAKEKFKQALSGILIQFEQIVAVYHSASKQKAWDHFTKAQRKNISVWCKQAEEIRNIHNDELMGIRREEEMEMSDDEIEEMTETKETEESALVSQAEALKEENDSLRWQLDAYRNEVELLKQEQGKVHREDDPNKEQQLKLLQQALQGMQQHLLKVQEEYKKKEAELEKLKDDKLQVEKMKK

SEQ ID NO: 325069 - DNA, 1917 bp, Artificial Sequence
  derived and/or modified sequence
ttacctttcgacccggctaataataatgagccactccagttcgggtccgccagtggaccgctcgtaaccgaaggattaattgaaaatggtggagaatccagcaagaaaagaaagcggactaataccccctccgctgacaacagccgcacgcttaatgttgatagcactgccatgaccctccctatgagtgatcctaccgcctgggccacagctatgaacaatctgggcatggctccactgggcatcgcgggccaacccatcttgcctgactttgatcccgccctggggatgatgacgggcattccaccaattacccctatgatgcccgggttaggcattgttcctccccccatcccccccgatatgcctgtggtcaaagagattattcactgcaaaagttgcaccttgttccccccaaatcctaacctgcccccacccgccacccgagagcgcccccccggctgtaaaactgtgtttgtcggcggtctgccagagaacggaacagagcaaatcattgtagaagtgttcgagcagtgtggcgagatcatcgccatcaggaaaagtaagaagaatttttgtcatataagatttgcagaggaatacatggtggacaaagcgctatacctttctggatatcgaattagattgggctcctctaccgataagaaggacactggcaggctccacgtggactttgctcaggctagagacgatctgtatgaatgggagtgcaaacagaggatgctggcaagggaagaaagacaccggcggcggatggaggaggagaggttgaggcctcccagccctccaccagtcgtccactacagcgatcatgagtgctcaatcgtggccgagaaactgaaggacgactcaaaatttagtgaagccgtacagactctactgacctggatcgaacggggggaggtcaacaggaggtcggctaataacttttactcaatgatacagtccgccaactctcacgtgagaagactggtcaatgagaaagccgcgcatgaaaaggatatggaggaggcaaaggagaagttcaaacaggccttgtcaggaatcctaatccaatttgagcagatcgtggcagtataccactccgcatccaaacagaaagcctgggatcattttaccaaagcgcagcgaaagaatattagtgtgtggtgtaaacaagcagaagaaatacggaacatccacaacgacgaattaatgggaatcagacgtgaagaagagatggagatgtcagacgacgagatagaagagatgactgagactaaggaaacagaagagtccgctcttgtttcacaggcggaggccctgaaggaagagaacgactccctgcggtggcagctcgatgcttaccgcaacgaggttgaactgttgaagcaagagcagggcaaggtgcaccgcgaggacgatcctaataaggaacagcagttgaaactgctgcagcaggcattgcagggaatgcagcaacatctcctgaaggtgcaggaggagtacaaaaagaaggaggctgaactggagaagctgaaggatgataagcttcaggtagaaaagatgctggagaatctcaaggagaaggagagctgtgcaagtagactgtgtgccagtaatcaggactccgaatacccgctggagaagaccatgaacagtagcccaataaagagcgagcgcgaggcccttcttgtgggcatcataagcacctttttacatgtgcacccatttggagcgtccatcgaatacatttgctcttacctccatcgactggataataaaatttgcacgtctgacgtcgaatgcctgatgggacgattgcaacacacctttaaacaggaaatgactggggtgggggccagtttggaaaagaggtggaaattctgtggcttcgagggactcaagcttacttag

SEQ ID NO: 325070 - DNA, 1917 bp, Artificial Sequence
  derived and/or modified sequence
ctgccctttgatcctgccaacaacaatgagcccctgcagtttggcagcgccagcggccccctggtgacagagggcctgattgaaaatggaggagagagcagcaagaagaggaagaggaccaacacccccagcgctgacaacagcaggaccctgaatgtggacagcacagccatgaccctgcccatgtctgaccccacagcctgggccacagccatgaacaacctgggcatggcccccctgggcattgctggccagcccatcctgcctgactttgatcctgccctgggcatgatgacaggcatcccccccatcacccccatgatgcctggcctgggcatcgtgcccccacccatccccccagacatgcctgtggtgaaggagatcatccactgcaagagctgcaccctcttcccccccaaccccaacctgcccccaccagccacccgggagcggcccccaggctgcaagacagtgtttgtgggcggcctgcctgaaaatggaacagagcagatcatcgtggaggtgtttgagcagtgtggggagatcatcgccatcaggaagagcaagaagaacttctgccacatccgctttgctgaggagtacatggtggacaaggccctgtacctgagcggctaccgcatccggctgggcagcagcacagacaagaaggacaccggccgcctgcacgtggactttgcccaggccagagatgacctgtatgagtgggagtgcaagcagaggatgctggcccgggaggagcggcacagaagaaggatggaggaggagcggctgcggccccccagccccccacctgtggtgcactacagcgaccatgaatgttccatcgtggccgagaagctgaaggatgacagcaagttcagcgaggccgtgcagaccctgctgacctggattgaaagaggagaggtgaacagaagaagtgccaacaacttctacagcatgatccagagcgccaacagccacgtgcggcggctggtgaatgagaaggccgcccacgagaaggacatggaggaggccaaggagaagttcaagcaggccctgagcggcatcctgatccagtttgagcagatcgtggccgtgtaccacagcgccagcaagcagaaggcctgggaccacttcaccaaggcccagaggaagaacatctctgtgtggtgcaagcaggccgaggagatccggaacatccacaatgatgagctgatgggcatcagaagagaggaggagatggagatgtctgatgatgaaattgaggagatgacagagaccaaggagacagaggagagcgccctggtgtcccaggccgaggccctgaaggaggagaatgacagcctgcgctggcagctggatgcctacagaaatgaggtggagctgctgaagcaggagcagggcaaggtgcacagagaagatgaccccaacaaggagcagcagctgaagctgctgcagcaggccctgcagggcatgcagcagcacctgctgaaggtgcaggaggagtacaagaagaaggaggccgagctggagaagctgaaggatgacaagctgcaggtggagaagatgctggagaacctgaaggagaaggagagctgtgccagccggctgtgtgccagcaaccaggacagcgagtaccccctggagaagaccatgaacagcagccccatcaagtctgagcgggaggccctgctggtgggcatcatcagcaccttcctgcacgtgcacccctttggagccagcattgagtacatctgcagctacctgcaccggctggacaacaagatctgcaccagtgatgtggagtgcctgatgggccgcctgcagcacaccttcaagcaggagatgactggagtgggcgccagcctggagaagcgctggaagttctgtggctttgagggcctgaagctgacctag

SEQ ID NO: 325071 - DNA, 1917 bp, Artificial Sequence
  derived and/or modified sequence
ctgcccttcgaccccgccaacaacaacgagcccctgcagttcggctcggcaagtggtcccttggttaccgaagggctgatcgagaatggcggcgagtcttccaaaaaaaggaagaggacgaatacccccagtgcagacaattcacgcaccctgaacgttgactccacggcaatgacgctccctatgagcgatccaaccgcgtgggccaccgctatgaataatctggggatggcgccactgggcatcgctgggcaaccaatcctccctgactttgaccccgctttgggaatgatgacaggcatcccaccaataacaccaatgatgccaggcttagggattgtacctccgcccatcccacctgacatgcctgtggtaaaagaaattatccactgcaaaagctgtaccttgtttcctcccaatccaaacctgcccccgcccgccacccgtgagcgcccccctggctgtaaaacagtgtttgttggagggctccctgagaatggtactgaacaaatcattgtcgaggtgtttgagcaatgcggggaaatcattgcgatccggaaatcaaagaagaacttttgtcacattagattcgccgaggaatacatggttgacaaggctctgtacctgtctgggtatcggattaggttggggtcaagcactgacaagaaagacacggggcggctgcacgtcgatttcgctcaagctcgagacgatctgtatgagtgggagtgtaagcagagaatgctcgctcgcgaggagaggcatcggcgaaggatggaggaagagcgtttaaggcccccaagccctcctccagtggtccactacagcgaccatgagtgctccatcgtcgctgaaaagctgaaagacgatagtaaattttctgaagccgttcagactttgcttacctggatagaacgcggcgaagttaataggcgctcggccaacaatttttacagcatgatccagagcgctaatagccatgtgcggcgacttgtgaacgagaaggccgcccacgaaaaggacatggaggaggccaaagagaagtttaagcaggctctgtcaggcattctgatccagttcgaacagatcgtagccgtgtaccatagcgccagcaaacagaaggcctgggatcactttaccaaagctcagcgtaagaacatttctgtgtggtgtaagcaggctgaggagattagaaacatacataatgatgagctgatggggatccgacgggaggaggaaatggagatgagcgatgatgagattgaagaaatgaccgaaacaaaagaaactgaagaaagcgctctcgtttctcaggccgaggctctaaaagaggaaaacgacagtctcagatggcagctggatgcataccgcaatgaagtggagctcttgaagcaggagcagggtaaggtacaccgggaagatgaccctaacaaagaacagcagttgaaactgttgcagcaggctctgcaggggatgcagcagcatctcctaaaggttcaggaggaatacaagaagaaggaggcagagcttgaaaaactgaaagatgacaagttgcaagtggaaaagatgctcgagaaccttaaggaaaaggaatcgtgcgcaagtcggctctgcgcgagcaaccaagactctgaatatcccttggagaaaactatgaacagcagcccgattaagtctgagcgggaggctctgctggtagggattatctccacctttctgcacgtgcacccatttggcgcaagtattgaatatatctgtagctatcttcacagactggacaacaaaatatgtacttcagatgttgagtgtctaatggggcgtctccagcataccttcaaacaggagatgaccggagtgggcgcttctctagaaaaacgatggaaattttgtgggttcgaaggattgaaacttacgtag

SEQ ID NO: 325072 - DNA, 1917 bp, Artificial Sequence
  derived and/or modified sequence
cttccattcgaccccgcaaataacaatgagccactgcagttcggctccgcttccggaccgctggtaactgaaggattgattgagaacggtggggaatcttcaaaaaagcgtaaacgtacaaacacacctagcgcagacaactctcgcacactgaatgttgacagtaccgcaatgactttgcctatgtccgatccaacggcatgggcaacagccatgaacaatctgggaatggcccctctgggaatcgctggccagcctatcctgcctgacttcgacccagccctgggaatgatgactggtatccctcctatcactcccatgatgccaggcctcggaatcgtaccgcctcctatccctcctgatatgccggtagtgaaagaaatcatccactgtaaatcatgtaccttgtttccccctaatcccaatctgcctccccctgccacccgagaaagaccccctggctgcaagacggtgtttgtcggaggtctacccgaaaatggcacagagcaaataatagtcgaggtgtttgagcagtgcggggagatcattgccattagaaaatctaagaagaacttctgccacatccgtttcgccgaagaatacatggtggacaaagccttgtatctcagtggatatcgcatccgcctgggctcgagtacggataaaaaagataccggcagactgcacgtagacttcgcccaggccagggacgacctgtatgagtgggaatgtaagcagaggatgctcgcccgtgaggaacgccatcggagaagaatggaggaggaacggttacggccaccgtcccctccaccagttgtccactacagtgaccatgagtgctctatcgtagctgagaaactaaaagatgacagcaagtttagcgaagccgtgcagaccctcttaacctggatagaacgcggtgaggtgaaccggcgatctgctaacaatttctattccatgatccagtcagccaactcgcatgtgcggagattagttaacgaaaaggctgctcacgagaaggacatggaggaagccaaagagaaatttaagcaagccctgtcaggtatcttgatccagttcgaacagatcgtggccgtgtatcactctgctagcaagcagaaagcctgggatcacttcactaaagctcagcgcaagaatatttctgtgtggtgtaagcaggccgaagaaatccggaacatacataatgatgaactgatgggcattcggagagaggaggagatggaaatgtctgacgatgagattgaagaaatgacagagaccaaagagaccgaggagagtgctttggtgagtcaggccgaggccctgaaagaagaaaacgattctctccggtggcagctggacgcctacaggaacgaggttgagttgctcaagcaggaacagggcaaagtacatcgtgaggacgaccctaacaaagaacaacagctgaagctgctgcagcaagccctgcagggaatgcaacagcatctgctgaaggttcaggaagaatacaaaaagaaggaggccgagctggagaagctgaaagatgataagttgcaagtagaaaagatgctggagaatctcaaggaaaaagagagctgcgctagtagactctgcgccagtaaccaggatagtgaatatccgttggaaaaaaccatgaactccagccctattaagtctgaaagggaagcacttttggtgggaatcatcagcacattccttcatgtccaccctttcggagccagcatcgagtacatttgttcctacctccatcgcctggacaataagatatgtacctccgatgtggaatgcctcatgggcaggttgcagcacacttttaagcaggagatgacaggcgttggcgcttccctggagaagcggtggaaattttgtggctttgagggcctgaagctcacatag

SEQ ID NO: 325073 - DNA, 1917 bp, Artificial Sequence
  derived and/or modified sequence
ctgcccttcgaccccgccaacaacaacgagcccctgcagttcggcagcgccagcggccccctggtgaccgagggcctgatcgagaacggcggcgagagcagcaagaagagaaagagaaccaacacccccagcgccgacaacagcagaaccctgaacgtggacagcaccgccatgaccctgcccatgagcgaccccaccgcctgggccaccgccatgaacaacctgggcatggcccccctgggcatcgccggccagcccatcctgcccgacttcgaccccgccctgggcatgatgaccggcatcccccccatcacccccatgatgcccggcctgggcatcgtgcccccccccatcccccccgacatgcccgtggtgaaggagatcatccactgcaagagctgcaccctgttcccccccaaccccaacctgcccccccccgccaccagagagagaccccccggctgcaagaccgtgttcgtgggcggcctgcccgagaacggcaccgagcagatcatcgtggaggtgttcgagcagtgcggcgagatcatcgccatcagaaagagcaagaagaacttctgccacatcagattcgccgaggagtacatggtggacaaggccctgtacctgagcggctacagaatcagactgggcagcagcaccgacaagaaggacaccggcagactgcacgtggacttcgcccaggccagagacgacctgtacgagtgggagtgcaagcagagaatgctggccagagaggagagacacagaagaagaatggaggaggagagactgagaccccccagccccccccccgtggtgcactacagcgaccacgagtgcagcatcgtggccgagaagctgaaggacgacagcaagttcagcgaggccgtgcagaccctgctgacctggatcgagagaggcgaggtgaacagaagaagcgccaacaacttctacagcatgatccagagcgccaacagccacgtgagaagactggtgaacgagaaggccgcccacgagaaggacatggaggaggccaaggagaagttcaagcaggccctgagcggcatcctgatccagttcgagcagatcgtggccgtgtaccacagcgccagcaagcagaaggcctgggaccacttcaccaaggcccagagaaagaacatcagcgtgtggtgcaagcaggccgaggagatcagaaacatccacaacgacgagctgatgggcatcagaagagaggaggagatggagatgagcgacgacgagatcgaggagatgaccgagaccaaggagaccgaggagagcgccctggtgagccaggccgaggccctgaaggaggagaacgacagcctgagatggcagctggacgcctacagaaacgaggtggagctgctgaagcaggagcagggcaaggtgcacagagaggacgaccccaacaaggagcagcagctgaagctgctgcagcaggccctgcagggcatgcagcagcacctgctgaaggtgcaggaggagtacaagaagaaggaggccgagctggagaagctgaaggacgacaagctgcaggtggagaagatgctggagaacctgaaggagaaggagagctgcgccagcagactgtgcgccagcaaccaggacagcgagtaccccctggagaagaccatgaacagcagccccatcaagagcgagagagaggccctgctggtgggcatcatcagcaccttcctgcacgtgcaccccttcggcgccagcatcgagtacatctgcagctacctgcacagactggacaacaagatctgcaccagcgacgtggagtgcctgatgggcagactgcagcacaccttcaagcaggagatgaccggcgtgggcgccagcctggagaagagatggaagttctgcggcttcgagggcctgaagctgacctag

SEQ ID NO: 325074 - DNA, 4095 bp, Artificial Sequence
  derived and/or modified sequence
gtgtgtgagagtccagccttgggccagagtgccgggtctaggcctggaagcgcgaggcgggcatttcggaagagagtggcgcggcgtggggcgccgcgagggcactacgagcccaggaactgccgcgccggcccgattttccgcggctgtataaggactagcgcttcggtagccggggagctggagggaacctgatttgagatcaattcttggagaacacaaagaagtgtgatggattgaaccagctgccctttgaccctgctaacaacaacgagcccctgcagtttggtagtgccagtggccctctggtcacagaaggcctcattgagaatggaggggaatcaagcaagaaaagaaagagaacaaatactccttcagccgataacagtagaactctgaacgtggattccactgcaatgacactacctatgtctgatccaactgcatgggccacagcaatgaataatcttggaatggcaccgctgggaattgccggacaaccaattttacctgactttgatcctgctcttggaatgatgactggaattccaccaataactccaatgatgcctggtttgggaatagtacctccaccaattcctccagatatgccagtagtaaaagagatcatacactgtaaaagctgcacgctcttccctccaaatccaaatctcccacctcctgcaacccgagaaagaccaccaggatgcaaaacagtatttgtgggtggtctgcctgaaaatgggacagagcaaatcattgtggaagttttcgagcagtgtggagagatcattgccattcgcaagagcaagaagaacttctgccacattcgctttgctgaggagtacatggtggacaaagccctgtatctgtctggttaccgcattcgcctgggctctagtactgacaagaaggacacaggcagactccacgttgatttcgcacaggctcgagatgacctgtatgagtgggagtgtaaacagcgtatgctagccagagaggagcgccatcgtagaagaatggaagaagaaagattgcgtccaccatctccacccccagtggtccactattcagatcatgaatgcagcattgttgctgaaaaattaaaagatgattccaaattctcagaagctgtacagaccttgcttacctggatagagcgaggagaggtcaaccgtcgtagcgccaataacttctactccatgatccagtcggccaacagccatgtccgccgcctggtgaacgagaaagctgcccatgagaaagatatggaagaagcaaaggagaagttcaagcaggccctttctggaattctcattcaatttgagcagatagtggctgtgtaccattccgcctccaagcagaaggcatgggaccacttcacaaaagcccagcggaagaacatcagcgtgtggtgcaaacaagctgaggaaattcgcaacattcataatgatgaattaatgggaatcaggcgagaagaagaaatggaaatgtctgatgatgaaatagaagaaatgacagaaacaaaagaaactgaggaatcagccttagtatcacaggcagaagctctgaaggaagaaaatgacagcctccgttggcagctcgatgcctaccggaatgaagtagaactgctcaagcaagaacaaggcaaagtccacagagaagatgaccctaacaaagaacagcagctgaaactcctgcaacaagccctgcaaggaatgcaacagcatctactcaaagtccaagaggaatacaaaaagaaagaagctgaacttgaaaaactcaaagatgacaagttacaggtggaaaaaatgttggaaaatcttaaagaaaaggaaagctgtgcttctaggctgtgtgcctcaaaccaggatagcgaataccctcttgagaagaccatgaacagcagtcctatcaaatctgaacgtgaagcactgctagtggggattatctccacattccttcatgttcacccatttggagcaagcattgaatacatctgttcctacttgcaccgtcttgataataagatctgcaccagcgatgtggagtgtctcatgggtagactccagcataccttcaagcaggaaatgactggagttggagccagcctggaaaagagatggaaattctgtggcttcgagggcttgaagctgacctaaatctctttgcctaacaacttgggatcctgaagataaatatgtgttggacaagcatagaaagtgatttatatttttaatggttttcaagtggaagttcctttgaatttgtcagttcattcctggaaaatcttttgagttaaaataaggatcctaggacagcacctcgaactacaggccctaaagagaaattgcctcaaaccacaagtgctgtaacttcctcccctttctgtcaattggttgtctttaaatattgcaaaagtcctgatgctaaacagtatttggagtgttttcagtgtctgtactactgttgtagaccttggtatttttttaaacactgttaactgaaatgttttgatgatttgtatgtgatttgtgtttctaaacttctctttacattaatgttgttactggtgaaaggcatgagagcagcactaagtcctctgtgtaactgccattgtctttccaatccccagtagaccagtaaataaataacacatcagtgtcttctagaaggtgcctgaccaggttcaccttttaaacgacaaagcatggtttgtggctttttgcaaaattactatgaaccaaaagttgacaaatgttccaaagttattttctctaacatatcacattaaagatctgtttcagaattgtaaaaagtacatctagatgtgtttacagaaagcaagtatccagtatgactggcatgtgttcatgctattcagaatcacttgtaaatagtctgcttttaaaggagggcatgttcagttttctgtgaattaaaatatgctcatgtgtgggcacacacgcacaaacacacacacgcacgcacacagtggcagaagggatttatattaatattctttcccctctggccttcttacagtctgttggtccctttgcttctgttgtcagtgtgttgaattgcaaaccgagtactgctgtaaatactatgtttacttcatgctgaatgtttgcaaagacttgatataagtattaatagtaatgaatcaatgaataaataatgagctagggtttgtgaggctttctacaaataggtcagctccacctggagtgcgaattgccagagacaccttggtagtgcccatcggcaaatcgcaatggcagcatgtgagtggaccattcagaaacttctgcttggtggaaagtaaacagagaggatggaggtttggggcgaatgtcctgaggcagagatggtctttattgtgtgtggtggtggttgtggtatttataataatgcaagcataccctcccttgagtctcaattgaagataaaagaatgtactgagcaagcaaagccaatggagagtatttcacaaaaatactttgtaaatgagatgccagtagtgttcaaagttgtatttttaaaagataaatattcctttttatacctcagttttgtgtcctgtttttaatgacttacgctctaagtaatccattagtagttatctcagttccttcctttgggttactagaatgttggaaaaagatgccaagtctgtcttgacaactggaaacagggttccacagcagcccattcgtgctgaaaactggcttccccctgaagcaccctgctgtggcaccagcaggaagctcaggttaattttacactagcttgctcactgatgcatctctcatcaatgctacggaaggctttgattcatcagtctcgggctcttggaatacctaattttaataatatctatgaaatcaagggaaactttccatttacagttatttcttgtttaaataaactaaattaatttttaggggagagcagtaggaaaaagagctaatgcatgcggggtttaatacctaggtgatgggttgaggtgcagcaaaaccaccatggcacacgttcacctatgtaacaaacctgcacatcctgcacatgtaccccggaacttacttaaaa

SEQ ID NO: 325075 - DNA, 3956 bp, Artificial Sequence
  derived and/or modified sequence
gtgtgtgagagtccagccttgggccagagtgccgggtctaggcctggaagcgcgaggcgggcatttcggaagagagtggcgcggcgtggggcgccgcgagggcactacgagcccaggaactgccgcgccggcccgattttccgcggctgtataaggactagcgcttcggtagccggggagctggagggaacctgatttgagatcaattcttggagaacacaaagaagtgtgatgccgataacagtagaactctgaacgtggattccactgcaatgacactacctatgtctgatccaactgcatgggccacagcaatgaataatcttggaatggcaccgctgggaattgccggacaaccaattttacctgactttgatcctgctcttggaatgatgactggaattccaccaataactccaatgatgcctggtttgggaatagtacctccaccaattcctccagatatgccagtagtaaaagagatcatacactgtaaaagctgcacgctcttccctccaaatccaaatctcccacctcctgcaacccgagaaagaccaccaggatgcaaaacagtatttgtgggtggtctgcctgaaaatgggacagagcaaatcattgtggaagttttcgagcagtgtggagagatcattgccattcgcaagagcaagaagaacttctgccacattcgctttgctgaggagtacatggtggacaaagccctgtatctgtctggttaccgcattcgcctgggctctagtactgacaagaaggacacaggcagactccacgttgatttcgcacaggctcgagatgacctgtatgagtgggagtgtaaacagcgtatgctagccagagaggagcgccatcgtagaagaatggaagaagaaagattgcgtccaccatctccacccccagtggtccactattcagatcatgaatgcagcattgttgctgaaaaattaaaagatgattccaaattctcagaagctgtacagaccttgcttacctggatagagcgaggagaggtcaaccgtcgtagcgccaataacttctactccatgatccagtcggccaacagccatgtccgccgcctggtgaacgagaaagctgcccatgagaaagatatggaagaagcaaaggagaagttcaagcaggccctttctggaattctcattcaatttgagcagatagtggctgtgtaccattccgcctccaagcagaaggcatgggaccacttcacaaaagcccagcggaagaacatcagcgtgtggtgcaaacaagctgaggaaattcgcaacattcataatgatgaattaatgggaatcaggcgagaagaagaaatggaaatgtctgatgatgaaatagaagaaatgacagaaacaaaagaaactgaggaatcagccttagtatcacaggcagaagctctgaaggaagaaaatgacagcctccgttggcagctcgatgcctaccggaatgaagtagaactgctcaagcaagaacaaggcaaagtccacagagaagatgaccctaacaaagaacagcagctgaaactcctgcaacaagccctgcaaggaatgcaacagcatctactcaaagtccaagaggaatacaaaaagaaagaagctgaacttgaaaaactcaaagatgacaagttacaggtggaaaaaatgttggaaaatcttaaagaaaaggaaagctgtgcttctaggctgtgtgcctcaaaccaggatagcgaataccctcttgagaagaccatgaacagcagtcctatcaaatctgaacgtgaagcactgctagtggggattatctccacattccttcatgttcacccatttggagcaagcattgaatacatctgttcctacttgcaccgtcttgataataagatctgcaccagcgatgtggagtgtctcatgggtagactccagcataccttcaagcaggaaatgactggagttggagccagcctggaaaagagatggaaattctgtggcttcgagggcttgaagctgacctaaatctctttgcctaacaacttgggatcctgaagataaatatgtgttggacaagcatagaaagtgatttatatttttaatggttttcaagtggaagttcctttgaatttgtcagttcattcctggaaaatcttttgagttaaaataaggatcctaggacagcacctcgaactacaggccctaaagagaaattgcctcaaaccacaagtgctgtaacttcctcccctttctgtcaattggttgtctttaaatattgcaaaagtcctgatgctaaacagtatttggagtgttttcagtgtctgtactactgttgtagaccttggtatttttttaaacactgttaactgaaatgttttgatgatttgtatgtgatttgtgtttctaaacttctctttacattaatgttgttactggtgaaaggcatgagagcagcactaagtcctctgtgtaactgccattgtctttccaatccccagtagaccagtaaataaataacacatcagtgtcttctagaaggtgcctgaccaggttcaccttttaaacgacaaagcatggtttgtggctttttgcaaaattactatgaaccaaaagttgacaaatgttccaaagttattttctctaacatatcacattaaagatctgtttcagaattgtaaaaagtacatctagatgtgtttacagaaagcaagtatccagtatgactggcatgtgttcatgctattcagaatcacttgtaaatagtctgcttttaaaggagggcatgttcagttttctgtgaattaaaatatgctcatgtgtgggcacacacgcacaaacacacacacgcacgcacacagtggcagaagggatttatattaatattctttcccctctggccttcttacagtctgttggtccctttgcttctgttgtcagtgtgttgaattgcaaaccgagtactgctgtaaatactatgtttacttcatgctgaatgtttgcaaagacttgatataagtattaatagtaatgaatcaatgaataaataatgagctagggtttgtgaggctttctacaaataggtcagctccacctggagtgcgaattgccagagacaccttggtagtgcccatcggcaaatcgcaatggcagcatgtgagtggaccattcagaaacttctgcttggtggaaagtaaacagagaggatggaggtttggggcgaatgtcctgaggcagagatggtctttattgtgtgtggtggtggttgtggtatttataataatgcaagcataccctcccttgagtctcaattgaagataaaagaatgtactgagcaagcaaagccaatggagagtatttcacaaaaatactttgtaaatgagatgccagtagtgttcaaagttgtatttttaaaagataaatattcctttttatacctcagttttgtgtcctgtttttaatgacttacgctctaagtaatccattagtagttatctcagttccttcctttgggttactagaatgttggaaaaagatgccaagtctgtcttgacaactggaaacagggttccacagcagcccattcgtgctgaaaactggcttccccctgaagcaccctgctgtggcaccagcaggaagctcaggttaattttacactagcttgctcactgatgcatctctcatcaatgctacggaaggctttgattcatcagtctcgggctcttggaatacctaattttaataatatctatgaaatcaagggaaactttccatttacagttatttcttgtttaaataaactaaattaatttttaggggagagcagtaggaaaaagagctaatgcatgcggggtttaatacctaggtgatgggttgaggtgcagcaaaaccaccatggcacacgttcacctatgtaacaaacctgcacatcctgcacatgtaccccggaacttacttaaaaaataa

SEQ ID NO: 325076 - protein, 376 aa, Artificial Sequence
  derived and/or modified sequence
MTLPMSDPTAWATAMNNLGMAPLGIAGQPILPDFDPALGMMTGIPPITPMMPGLGIVPPPIPPDMPVVKEIIHCKSCTLFPPNPNLPPPATRERPPGCKTVFVGGLPENGTEQIIVEVFEQCGEIIAIRKSKKNFCHIRFAEEYMVDKALYLSGYRIRLGSSTDKKDTGRLHVDFAQARDDLYEWECKQRMLAREERHRRRMEEERLRPPSPPPVVHYSDHECSIVAEKLKDDSKFSEAVQTLLTWIERGEVNRRSANNFYSMIQSANSHVRRLVNEKAAHEKDMEEAKEKFKQALSGILIQFEQIVAVYHSASKQKAWDHFTKAQRKNISVWCKQAEEIRNIHNDELMGIRREEEMEMSDDEIEEMTETKETEES

SEQ ID NO: 325077 - DNA, 1515 bp, Artificial Sequence
  derived and/or modified sequence
gccgggtctaggcctggaagcgcgaggcgggcatttcggaagagagtggcgcggcgtggggcgccgcgagggcactacgagcccaggaactgccgcgccggcccgattttccgcggctgtataaggactagcgcttcggtagccggggagctggagggaacctgatttgagatcaattcttggagaacacaaagaagtgtgatggattgaaccagctgccctttgaccctgctaacaacaacgagcccctgcagtttggtagtgccagtggccctctggtcacagaaggcctcattgagaatggaggggaatcaagcaagaaaagaaagagaacaaatactccttcagccgataacagtagaactctgaacgtggattccactgcaatgacactacctatgtctgatccaactgcatgggccacagcaatgaataatcttggaatggcaccgctgggaattgccggacaaccaattttacctgactttgatcctgctcttggaatgatgactggaattccaccaataactccaatgatgcctggtttgggaatagtacctccaccaattcctccagatatgccagtagtaaaagagatcatacactgtaaaagctgcacgctcttccctccaaatccaaatctcccacctcctgcaacccgagaaagaccaccaggatgcaaaacagtatttgtgggtggtctgcctgaaaatgggacagagcaaatcattgtggaagttttcgagcagtgtggagagatcattgccattcgcaagagcaagaagaacttctgccacattcgctttgctgaggagtacatggtggacaaagccctgtatctgtctggttaccgcattcgcctgggctctagtactgacaagaaggacacaggcagactccacgttgatttcgcacaggctcgagatgacctgtatgagtgggagtgtaaacagcgtatgctagccagagaggagcgccatcgtagaagaatggaagaagaaagattgcgtccaccatctccacccccagtggtccactattcagatcatgaatgcagcattgttgctgaaaaattaaaagatgattccaaattctcagaagctgtacagaccttgcttacctggatagagcgaggagaggtcaaccgtcgtagcgccaataacttctactccatgatccagtcggccaacagccatgtccgccgcctggtgaacgagaaagctgcccatgagaaagatatggaagaagcaaaggagaagttcaagcaggccctttctggaattctcattcaatttgagcagatagtggctgtgtaccattccgcctccaagcagaaggcatgggaccacttcacaaaagcccagcggaagaacatcagcgtgtggtgcaaacaagctgaggaaattcgcaacattcataatgatgaattaatgggaatcaggcgagaagaagaaatggaaatgtctgatgatgaaatagaagaaatgacagaaacaaaagaaactgaggaatcag

SEQ ID NO: 325078 - protein, 610 aa, Artificial Sequence
  derived and/or modified sequence
MQRDFRWLWVYEIGYAADNSRTLNVDSTAMTLPMSDPTAWATAMNNLGMAPLGIAGQPILPDFDPALGMMTGIPPITPMMPGLGIVPPPIPPDMPVVKEIIHCKSCTLFPPNPNLPPPATRERPPGCKTVFVGGLPENGTEQIIVEVFEQCGEIIAIRKSKKNFCHIRFAEEYMVDKALYLSGYRIRLGSSTDKKDTGRLHVDFAQARDDLYEWECKQRMLAREERHRRRMEEERLRPPSPPPVVHYSDHECSIVAEKLKDDSKFSEAVQTLLTWIERGEVNRRSANNFYSMIQSANSHVRRLVNEKAAHEKDMEEAKEKFKQALSGILIQFEQIVAVYHSASKQKAWDHFTKAQRKNISVWCKQAEEIRNIHNDELMGIRREEEMEMSDDEIEEMTETKETEESALVSQAEALKEENDSLRWQLDAYRNEVELLKQEQGKVHREDDPNKEQQLKLLQQALQGMQQHLLKVQEEYKKKEAELEKLKDDKLQVEKMLENLKEKESCASRLCASNQDSEYPLEKTMNSSPIKSEREALLVGIISTFLHVHPFGASIEYICSYLHRLDNKICTSDVECLMGRLQHTFKQEMTGVGASLEKRWKFCGFEGLKLT

SEQ ID NO: 325079 - DNA, 1833 bp, Artificial Sequence
  derived and/or modified sequence
atgcagcgggacttccgctggctctgggtgtatgaaatcggctacgccgcagacaactcccggaccttaaatgttgatagtacggccatgacgctaccaatgtctgaccccacagcttgggccaccgcgatgaacaacctgggaatggcccccttgggtatcgccgggcagccaatattgcctgacttcgatccagcgctcggaatgatgaccggtatcccaccaattacccccatgatgcccggtctcggcattgtacctcctccaatccctccagatatgcccgtggtgaaggaaattattcactgcaaatcttgcaccttgtttcccccaaatcctaacttaccccctcctgccacccgggaaaggcctcccgggtgtaagactgtttttgtgggtggcttgcccgagaacggaactgaacagatcattgtggaagtgtttgagcagtgcggcgagattattgccatacgaaagtctaagaagaatttttgtcacatcagattcgccgaagagtatatggtcgataaagcgctatacctatctggttaccggatcagactgggctcatctaccgataaaaaagacacaggaaggcttcatgttgatttcgcccaagcccgtgatgatctgtacgagtgggaatgtaagcagaggatgttagcacgcgaagagagacataggaggcgcatggaagaggagcgtttgagaccaccaagtccccctccagtggtgcactacagcgatcacgagtgttccattgtggccgagaaattgaaggatgatagcaaattcagtgaagccgtgcagaccctactcacatggattgagagaggcgaagtgaacaggagatctgcgaataatttctacagcatgatccagagtgctaatagccacgtgaggcgcctagttaacgaaaaagcagctcacgagaaggacatggaggaggctaaagagaagttcaaacaggctctgagcggaatcctcattcagtttgagcagatcgtggcggtctatcacagtgccagcaaacagaaagcatgggatcacttcacgaaggctcaacgcaaaaatatatctgtgtggtgtaaacaggccgaggagattaggaatatccacaacgatgagcttatgggcattcggcgggaggaggagatggagatgagtgacgatgaaatcgaagagatgaccgagacaaaggaaacagaagagtccgcgctggtgagccaggcggaggccttgaaagaggagaacgacagcttgcggtggcagttggatgcctatcgcaatgaggtcgagctgctcaagcaggagcaggggaaggtgcatagggaagacgacccaaacaaagagcagcagctgaagctgctgcaacaggctctgcagggaatgcagcaacatttgttgaaggtccaggaagaatacaaaaagaaggaggccgagctggagaagctcaaggatgacaagttgcaggtcgagaagatgctcgaaaatctcaaggagaaagagtcttgtgcaagccggttgtgtgcttcaaatcaagactcagagtatcctttagagaagacgatgaacagttcccccatcaagagtgagagggaggccttgctggtgggtattatcagcacttttctgcacgtgcatcctttcggagcgagtattgaatacatctgctcgtacctgcaccggctcgacaacaagatttgcacctccgacgtcgagtgcttgatggggcggttacagcatacattcaagcaggaaatgaccggggtgggagcttcattggaaaagaggtggaaattttgcgggtttgagggcttgaagcttacatag

SEQ ID NO: 325080 - DNA, 1833 bp, Artificial Sequence
  derived and/or modified sequence
atgcaacgcgatttccgatggctatgggtctacgagattgggtatgctgccgataattccaggacactgaacgtggattcaacagccatgacacttcctatgtctgatcccacagcatgggccacagcaatgaataacttgggcatggcccccctgggcattgctgggcaacccatcctgccggatttcgatcctgccttaggaatgatgacagggattccccccatcacccctatgatgcccggcctgggtatcgtgccaccacccatccctcccgacatgcctgtggtgaaagagattatacactgcaaaagctgcaccctgtttccacctaatccaaacttgcccccccccgccaccagagagagacctcccgggtgcaaaaccgttttcgtgggagggctcccagagaatgggaccgagcagattattgtggaggtctttgaacagtgtggcgaaattatagcaatcaggaaatcaaagaaaaatttctgccacataaggtttgccgaagagtatatggtggataaagccctgtatctgtctgggtatcgcattcgcctgggatcaagtactgacaaaaaggatactggccgtttacatgttgatttcgcacaagccagggatgatttgtatgaatgggaatgcaaacagcgtatgttggcccgagaagagagacaccgtcggcggatggaagaagagaggctcaggcccccctccccaccaccagtggtgcactacagcgatcatgagtgtagcatcgttgccgagaagctgaaagacgattcaaaattttccgaggcggtgcagaccctactaacttggatcgaacggggcgaggtgaacaggcggagcgcaaacaacttttacagtatgatacagagcgcaaattcccatgtgagacgactggttaatgagaaagcagcacatgagaaggacatggaggaggctaaagagaaatttaagcaggcactctccggcatcctgatccagtttgagcagatcgttgccgtctaccattcagcatctaagcagaaggcatgggatcactttactaaagcccaaagaaagaatatttcagtgtggtgtaaacaagctgaagaaattcgcaacatccataatgacgaattgatggggataaggagagaagaggagatggaaatgagcgatgacgagattgaagaaatgacagagacaaaggaaactgaggaatctgcacttgtttcgcaggctgaggcactgaaggaagaaaatgactcacttcgttggcagctagatgcctataggaacgaagttgaactgctaaagcaagagcaggggaaggtgcacagagaggatgatccgaataaagagcaacagctcaagctgctacagcaggcattgcagggcatgcagcagcatctgctgaaggtccaggaggagtacaagaagaaagaggccgagctcgagaaactgaaggatgataaactccaggtggagaagatgctggagaacctcaaggagaaagaatcttgtgcgtcacgcctgtgcgcaagcaaccaggactccgaataccctctggagaagaccatgaactcttcacccataaagtctgagcgagaagctcttctggtcggtataataagcactttcctgcatgtacaccccttcggtgcttcaattgaatacatttgttcctacctgcataggctggacaataagatttgcacgtcagacgtggaatgcttgatggggcggctgcagcacacctttaagcaggagatgacaggagttggggccagtctggagaagcgatggaagttttgtggcttcgagggactgaaattgacctag

SEQ ID NO: 325081 - DNA, 1833 bp, Artificial Sequence
  derived and/or modified sequence
atgcagagggacttccgctggctgtgggtgtatgaaattggctacgccgctgacaacagcaggaccctgaatgtggacagcacagccatgaccctgcccatgtctgaccccacagcctgggccacagccatgaacaacctgggcatggcccccctgggcattgctggccagcccatcctgcctgactttgatcctgccctgggcatgatgacaggcatcccccccatcacccccatgatgcctggcctgggcatcgtgcccccacccatccccccagacatgcctgtggtgaaggagatcatccactgcaagagctgcaccctcttcccccccaaccccaacctgcccccaccagccacccgggagcggcccccaggctgcaagacagtgtttgtgggcggcctgcctgaaaatggaacagagcagatcatcgtggaggtgtttgagcagtgtggggagatcatcgccatcaggaagagcaagaagaacttctgccacatccgctttgctgaggagtacatggtggacaaggccctgtacctgagcggctaccgcatccggctgggcagcagcacagacaagaaggacaccggccgcctgcacgtggactttgcccaggccagagatgacctgtatgagtgggagtgcaagcagaggatgctggcccgggaggagcggcacagaagaaggatggaggaggagcggctgcggccccccagccccccacctgtggtgcactacagcgaccatgaatgttccatcgtggccgagaagctgaaggatgacagcaagttcagcgaggccgtgcagaccctgctgacctggattgaaagaggagaggtgaacagaagaagtgccaacaacttctacagcatgatccagagcgccaacagccacgtgcggcggctggtgaatgagaaggccgcccacgagaaggacatggaggaggccaaggagaagttcaagcaggccctgagcggcatcctgatccagtttgagcagatcgtggccgtgtaccacagcgccagcaagcagaaggcctgggaccacttcaccaaggcccagaggaagaacatctctgtgtggtgcaagcaggccgaggagatccggaacatccacaatgatgagctgatgggcatcagaagagaggaggagatggagatgtctgatgatgaaattgaggagatgacagagaccaaggagacagaggagagcgccctggtgtcccaggccgaggccctgaaggaggagaatgacagcctgcgctggcagctggatgcctacagaaatgaggtggagctgctgaagcaggagcagggcaaggtgcacagagaagatgaccccaacaaggagcagcagctgaagctgctgcagcaggccctgcagggcatgcagcagcacctgctgaaggtgcaggaggagtacaagaagaaggaggccgagctggagaagctgaaggatgacaagctgcaggtggagaagatgctggagaacctgaaggagaaggagagctgtgccagccggctgtgtgccagcaaccaggacagcgagtaccccctggagaagaccatgaacagcagccccatcaagtctgagcgggaggccctgctggtgggcatcatcagcaccttcctgcacgtgcacccctttggagccagcattgagtacatctgcagctacctgcaccggctggacaacaagatctgcaccagtgatgtggagtgcctgatgggccgcctgcagcacaccttcaagcaggagatgactggagtgggcgccagcctggagaagcgctggaagttctgtggctttgagggcctgaagctgacctag

SEQ ID NO: 325082 - DNA, 1833 bp, Artificial Sequence
  derived and/or modified sequence
atgcagcgggacttccggtggctgtgggtgtacgagatcggctacgccgccgataattccagaacactgaacgtggatagcacggcaatgactctgcctatgtccgatcctacagcctgggcaactgctatgaataacctgggcatggctcccttaggtatcgccggtcagcccatcctccctgacttcgatcccgccttgggaatgatgacgggtatccctcctatcacgcctatgatgccaggcctcggcattgttccacctccgattcctcctgacatgccggtagttaaagaaatcatccattgcaagtcctgtactttgtttccgccaaacccaaacctgcctcctccagccacaagagaacgcccaccagggtgcaagaccgtctttgttggcgggcttcctgagaatggcacagaacaaatcatcgtggaggtctttgaacaatgcggcgagatcatcgcgattaggaagtccaagaagaatttttgccatatacgattcgcggaagagtacatggttgataaggccctgtacctaagtggctatcgcattcggctggggtcttcgactgataagaaagatacaggacgattgcatgttgacttcgcccaggccagagacgacctttatgaatgggaatgcaaacagagaatgctggctagagaagagcggcatcggaggcgaatggaagaggagcgcctcagaccaccttctcccccccccgtggtacactattcagatcacgaatgctctatagtggcagagaagctgaaggatgactctaagttctctgaggccgtgcaaacccttcttacatggatcgagcgcggcgaggtgaatcgcagatctgctaataatttctattcgatgattcagtccgctaacagccacgtccggcgcctggtgaacgaaaaagccgcccatgaaaaggacatggaggaggccaaagagaagtttaaacaagccctatccgggatcctcatccagtttgagcagattgtggcagtgtaccatagcgcctccaagcaaaaggcctgggatcacttcactaaggcccagcggaaaaacatcagtgtttggtgcaagcaagccgaggagatcaggaacattcacaatgatgaactcatgggtatacgcagagaagaagaaatggaaatgtcagatgatgagatcgaggaaatgacagaaacgaaggagaccgaagaaagcgccctcgtcagtcaagctgaggccctgaaagaggagaacgattcgcttagatggcagctggatgcctataggaacgaagttgagttgctaaagcaagaacaaggaaaagttcacagggaagacgacccaaataaggagcagcaattgaagctactccagcaagcactacaggggatgcagcagcatctcttaaaggtgcaggaggagtacaaaaagaaagaagcggaactcgaaaagctgaaagatgacaaactgcaggtcgagaagatgctggagaacctgaaagagaaagagagctgtgcgagtaggctttgtgctagtaaccaggatagcgaatacccacttgagaagaccatgaatagcagtccgattaagtccgaacgcgaggctttactggtcgggattatctctactttcctgcatgtgcacccctttggagcctcaatcgaatatatctgtagctacctccacagacttgacaataagatttgcacttccgatgttgagtgtttaatgggccgactccagcacaccttcaaacaggagatgacaggcgtgggcgcatccttggaaaaaaggtggaagttctgtggctttgagggcttaaagctaacctag

SEQ ID NO: 325083 - DNA, 1833 bp, Artificial Sequence
  derived and/or modified sequence
atgcagcgggacttccggtggctgtgggtgtacgagatcggctacgccgccgataatagccgcaccctcaacgttgatagtactgccatgacattgcctatgtcggaccctacagcctgggctaccgcgatgaacaacctgggtatggccccactcggcattgccggccagcccattctccccgattttgatccagcacttgggatgatgactggtatcccacccatcacccccatgatgcctgggttgggtatcgtgccgccccccattccccctgacatgcccgtggtgaaagaaatcattcattgtaagtcgtgtaccttatttcctccaaacccaaaccttccaccacctgcaacaagagagagacctccaggctgcaagacagtttttgtggggggattgcccgaaaacggcactgagcagatcatcgttgaggtctttgagcaatgtggggagattatagccatccggaaatcaaaaaaaaacttttgtcacattaggttcgctgaagagtatatggtagacaaagctctgtacctttctggttaccgcatcaggctggggtcaagcaccgataagaaggacacagggaggcttcatgtggacttcgcccaggctagagacgatctctacgagtgggagtgcaagcaacggatgttggctagagaagagcgtcacagacgaaggatggaagaggaaagactccgaccgccatccccaccgcctgtagtgcattactccgatcacgagtgctccatagtcgcggagaaactgaaagacgatagtaagttctcagaggctgtccagacactgctcacctggatcgagcgcggtgaagtgaaccggcgcagcgcgaacaacttctacagtatgatccagtcagccaacagccacgtgcggcggctggtgaatgaaaaagccgcgcatgaaaaggacatggaggaggcaaaggagaagttcaaacaggctctctccggcatcctcattcagttcgagcaaattgtggctgtatatcactcagcttctaaacagaaggcctgggaccacttcactaaagcgcagcggaaaaacatctcagtgtggtgcaagcaggccgaggagatcagaaacattcacaatgatgagctgatgggtatcagaagggaagaggaaatggagatgagtgatgatgaaatagaagaaatgacagagactaaggagaccgaggaaagcgctcttgtgagccaggccgaagccttgaaagaggaaaacgactcgctacggtggcagctggatgcttatagaaacgaggtggagttactaaagcaggagcaggggaaagtgcatagggaagatgaccctaataaggagcaacagctgaaactcctccaacaggccttacaggggatgcaacagcatttgctgaaagtgcaagaggagtataagaaaaaagaggcagagctggaaaagctgaaggacgataaattgcaggtggagaagatgttagaaaaccttaaagaaaaggagagttgcgctagcaggctttgcgccagcaaccaggatagcgaatatccactggaaaagacgatgaactccagcccaattaagagtgaaagagaagcactgctggttggcatcatcagcactttcctccacgtgcatccatttggggccagtattgaatacatctgctcatacctgcaccggcttgacaataagatatgtacctctgatgtggaatgtcttatgggtcgcctgcagcacacctttaagcaggaaatgacaggagtgggggcgagccttgagaagagatggaaattctgcggattcgagggccttaagctgacatag

SEQ ID NO: 325084 - DNA, 1833 bp, Artificial Sequence
  derived and/or modified sequence
atgcaacgagatttcaggtggctgtgggtgtatgagataggttacgcagctgacaattccagaactctgaatgtcgactctactgctatgactctgcctatgtcagaccctaccgcctgggccacggcaatgaacaacctcggaatggcccctcttggtatcgccggacagccaattcttcccgatttcgaccctgctttggggatgatgactggcatcccccctattaccccaatgatgcctggtctcgggatcgttccaccacccatcccccctgatatgcccgtcgttaaggagatcatacattgcaaatcctgcaccctgttcccacccaaccccaacctcccgcctcctgccacgcgggagaggccacccggatgcaagaccgtgtttgtcggagggctccctgaaaacggcactgagcagatcatagtggaggtattcgaacagtgcggagagattatcgctattagaaaatccaaaaaaaacttttgccacatccggttcgcagaggaatacatggtggataaggcgctgtacctgagcggctaccgcattcggcttggctcttcaacagataagaaggataccggcagactgcatgtggacttcgcccaagcccgtgacgacctgtatgagtgggaatgtaagcaacggatgcttgctcgggaggagcgtcatcgtcgacgaatggaagaggaacgtcttcggccacctagccccccacccgtggtgcactacagtgatcatgagtgttctatcgtggcggagaagctgaaagatgatagtaagttttcagaggccgttcaaacgttgctgacctggatcgaaagaggagaggtaaatcgcagaagcgcaaacaacttctactccatgatacagagcgccaactcacacgttcgacgcctagtgaacgaaaaagctgcccatgagaaggacatggaggaagctaaagagaagttcaagcaggcgctgtctgggatcctgatccaattcgagcagattgtggccgtataccacagcgcaagtaaacagaaggcatgggatcacttcactaaggcccagcgcaaaaatatttccgtctggtgtaaacaagccgaggaaattaggaatattcataatgatgagcttatgggcattcgaagggaggaagagatggaaatgagtgatgatgagattgaagagatgaccgagacaaaggaaacggaagaatcggctctggtgtctcaggccgaggccctgaaggaggaaaacgattctctaaggtggcagctggacgcctaccgaaacgaggtggaactgcttaagcaggagcaaggcaaagttcaccgcgaggatgacccaaataaagagcaacagctcaaactgctacaacaggcactgcagggcatgcagcagcacctgctgaaggtccaggaggagtataagaagaaggaagccgaactagagaagctcaaggatgacaagttacaggttgagaagatgctggagaatctgaaagagaaggagagctgcgcctccagactgtgcgcttccaatcaggatagtgaataccctctggaaaaaaccatgaattcctcaccgattaaatctgaacgcgaggccctcttggttgggattatatcaacatttttgcacgtgcatccgtttggtgcatccatcgaatatatctgctcatacttacatagactcgacaacaaaatttgtacatcagatgtcgaatgcttgatgggaagactccaacacacctttaagcaggaaatgactggggtgggggctagtctggagaagagatggaaattctgtggatttgaggggctgaagctgacatag

SEQ ID NO: 325085 - DNA, 1833 bp, Artificial Sequence
  derived and/or modified sequence
atgcaacgtgatttcagatggctgtgggtgtacgaaattgggtacgccgctgacaattcacggacgctgaacgtcgacagcaccgccatgacactcccaatgtcagatccgacggcctgggctaccgctatgaacaatttgggaatggcaccactcggcattgctggccagccaatcctcccagattttgacccggcactgggaatgatgaccggtattcccccaatcacacccatgatgcctggtcttggcattgtacctcccccaattccacctgatatgcctgtagtaaaggaaattatccattgcaaaagctgcaccttattccctcctaatcctaacctcccacctcccgcaacccgtgagaggcccccaggctgcaaaacagtgttcgtcggcggactgcccgaaaacggtacagagcagatcatcgttgaggtgttcgagcaatgtggcgagataatcgctattcgaaagtcaaagaaaaacttttgccatattcggttcgccgaagagtatatggtggataaggcactttatctgagtggatatagaatcagacttggatcaagtaccgacaaaaaagacactggcaggcttcacgtggattttgcccaggctcgagacgacttgtatgagtgggagtgcaaacaaaggatgctcgcgcgtgaggaacgccatagaaggaggatggaagaagaacgattgcgcccaccgtcgcccccacctgttgtccattattcagaccacgaatgttcgattgtggcagagaaacttaaagacgattccaaattctctgaggccgtccagacactcctgacttggatagagagaggcgaggtgaataggcgatcagcaaataatttctatagtatgattcagtctgcaaattctcacgtccggaggctagtgaacgaaaaggcggctcatgagaaggacatggaggaagcaaaggaaaagttcaaacaggccctatctggaattttgattcagtttgagcagatagtcgctgtctatcactccgcatccaaacaaaaggcctgggaccacttcactaaagcccagcgaaagaacatttcagtttggtgcaagcaggccgaggaaattcgcaacattcacaatgacgagctgatgggcatcagaagagaagaggaaatggagatgagcgacgatgagatcgaagaaatgacagaaacaaaggaaacagaggagtcagctcttgttagccaagcagaagccttaaaggaggagaacgatagcctaagatggcaacttgacgcctaccggaacgaagtagagctcctaaagcaggaacaaggtaaggtccatagagaagacgatcccaataaggaacagcagctgaaactcctgcaacaagccctgcaaggtatgcagcagcatcttctgaaagtgcaggaagagtataaaaagaaggaggctgaactcgagaaactcaaagacgataagttgcaggtggagaagatgctcgaaaacctgaaggaaaaggagtcctgtgcaagcagactgtgtgcttccaaccaggacagcgaataccctctggagaagaccatgaattcctctcctattaaatcagagcgtgaggcattgttagttggcattattagcacgttcctccacgttcaccccttcggggcatctatcgagtatatctgctcctacctgcacagacttgataataagatttgtactagcgacgttgagtgtctgatgggacgcctccagcacacctttaaacaggaaatgactggggtcggtgcttcactggagaagagatggaaattttgcggcttcgaaggactgaagttaacttag

SEQ ID NO: 325086 - DNA, 1833 bp, Artificial Sequence
  derived and/or modified sequence
atgcagagagacttcagatggctgtgggtgtacgagatcggctacgccgccgacaacagcagaaccctgaacgtggacagcaccgccatgaccctgcccatgagcgaccccaccgcctgggccaccgccatgaacaacctgggcatggcccccctgggcatcgccggccagcccatcctgcccgacttcgaccccgccctgggcatgatgaccggcatcccccccatcacccccatgatgcccggcctgggcatcgtgcccccccccatcccccccgacatgcccgtggtgaaggagatcatccactgcaagagctgcaccctgttcccccccaaccccaacctgcccccccccgccaccagagagagaccccccggctgcaagaccgtgttcgtgggcggcctgcccgagaacggcaccgagcagatcatcgtggaggtgttcgagcagtgcggcgagatcatcgccatcagaaagagcaagaagaacttctgccacatcagattcgccgaggagtacatggtggacaaggccctgtacctgagcggctacagaatcagactgggcagcagcaccgacaagaaggacaccggcagactgcacgtggacttcgcccaggccagagacgacctgtacgagtgggagtgcaagcagagaatgctggccagagaggagagacacagaagaagaatggaggaggagagactgagaccccccagccccccccccgtggtgcactacagcgaccacgagtgcagcatcgtggccgagaagctgaaggacgacagcaagttcagcgaggccgtgcagaccctgctgacctggatcgagagaggcgaggtgaacagaagaagcgccaacaacttctacagcatgatccagagcgccaacagccacgtgagaagactggtgaacgagaaggccgcccacgagaaggacatggaggaggccaaggagaagttcaagcaggccctgagcggcatcctgatccagttcgagcagatcgtggccgtgtaccacagcgccagcaagcagaaggcctgggaccacttcaccaaggcccagagaaagaacatcagcgtgtggtgcaagcaggccgaggagatcagaaacatccacaacgacgagctgatgggcatcagaagagaggaggagatggagatgagcgacgacgagatcgaggagatgaccgagaccaaggagaccgaggagagcgccctggtgagccaggccgaggccctgaaggaggagaacgacagcctgagatggcagctggacgcctacagaaacgaggtggagctgctgaagcaggagcagggcaaggtgcacagagaggacgaccccaacaaggagcagcagctgaagctgctgcagcaggccctgcagggcatgcagcagcacctgctgaaggtgcaggaggagtacaagaagaaggaggccgagctggagaagctgaaggacgacaagctgcaggtggagaagatgctggagaacctgaaggagaaggagagctgcgccagcagactgtgcgccagcaaccaggacagcgagtaccccctggagaagaccatgaacagcagccccatcaagagcgagagagaggccctgctggtgggcatcatcagcaccttcctgcacgtgcaccccttcggcgccagcatcgagtacatctgcagctacctgcacagactggacaacaagatctgcaccagcgacgtggagtgcctgatgggcagactgcagcacaccttcaagcaggagatgaccggcgtgggcgccagcctggagaagagatggaagttctgcggcttcgagggcctgaagctgacctag

SEQ ID NO: 325087 - DNA, 4184 bp, Artificial Sequence
  derived and/or modified sequence
gtgtgtgagagtccagccttgggccagagtgccgggtctaggcctggaagcgcgaggcgggcatttcggaagagagtggcgcggcgtggggcgccgcgagggcactacgagcccaggaactgccgcgccggcccgattttccgcggctgtataaggactagcgcttcggtagccggggagctggagggaacctgatttgagatcaattcttggagaacacaaagaagtgtgatggattgaaccagctgccctttgaccctgctaacaacaacgagcccctgcagtttggtagtgccagtggccctctggtcacagaaggcctcattgagaatggaggggaatcaagcaagaaaagaaagagaacaaatactccttcagaaatgatgacagagctaagttcacagttgaggaccacacaatgcaaagagattttagatggctgtgggtctacgaaataggctatgcagccgataacagtagaactctgaacgtggattccactgcaatgacactacctatgtctgatccaactgcatgggccacagcaatgaataatcttggaatggcaccgctgggaattgccggacaaccaattttacctgactttgatcctgctcttggaatgatgactggaattccaccaataactccaatgatgcctggtttgggaatagtacctccaccaattcctccagatatgccagtagtaaaagagatcatacactgtaaaagctgcacgctcttccctccaaatccaaatctcccacctcctgcaacccgagaaagaccaccaggatgcaaaacagtatttgtgggtggtctgcctgaaaatgggacagagcaaatcattgtggaagttttcgagcagtgtggagagatcattgccattcgcaagagcaagaagaacttctgccacattcgctttgctgaggagtacatggtggacaaagccctgtatctgtctggttaccgcattcgcctgggctctagtactgacaagaaggacacaggcagactccacgttgatttcgcacaggctcgagatgacctgtatgagtgggagtgtaaacagcgtatgctagccagagaggagcgccatcgtagaagaatggaagaagaaagattgcgtccaccatctccacccccagtggtccactattcagatcatgaatgcagcattgttgctgaaaaattaaaagatgattccaaattctcagaagctgtacagaccttgcttacctggatagagcgaggagaggtcaaccgtcgtagcgccaataacttctactccatgatccagtcggccaacagccatgtccgccgcctggtgaacgagaaagctgcccatgagaaagatatggaagaagcaaaggagaagttcaagcaggccctttctggaattctcattcaatttgagcagatagtggctgtgtaccattccgcctccaagcagaaggcatgggaccacttcacaaaagcccagcggaagaacatcagcgtgtggtgcaaacaagctgaggaaattcgcaacattcataatgatgaattaatgggaatcaggcgagaagaagaaatggaaatgtctgatgatgaaatagaagaaatgacagaaacaaaagaaactgaggaatcagccttagtatcacaggcagaagctctgaaggaagaaaatgacagcctccgttggcagctcgatgcctaccggaatgaagtagaactgctcaagcaagaacaaggcaaagtccacagagaagatgaccctaacaaagaacagcagctgaaactcctgcaacaagccctgcaaggaatgcaacagcatctactcaaagtccaagaggaatacaaaaagaaagaagctgaacttgaaaaactcaaagatgacaagttacaggtggaaaaaatgttggaaaatcttaaagaaaaggaaagctgtgcttctaggctgtgtgcctcaaaccaggatagcgaataccctcttgagaagaccatgaacagcagtcctatcaaatctgaacgtgaagcactgctagtggggattatctccacattccttcatgttcacccatttggagcaagcattgaatacatctgttcctacttgcaccgtcttgataataagatctgcaccagcgatgtggagtgtctcatgggtagactccagcataccttcaagcaggaaatgactggagttggagccagcctggaaaagagatggaaattctgtggcttcgagggcttgaagctgacctaaatctctttgcctaacaacttgggatcctgaagataaatatgtgttggacaagcatagaaagtgatttatatttttaatggttttcaagtggaagttcctttgaatttgtcagttcattcctggaaaatcttttgagttaaaataaggatcctaggacagcacctcgaactacaggccctaaagagaaattgcctcaaaccacaagtgctgtaacttcctcccctttctgtcaattggttgtctttaaatattgcaaaagtcctgatgctaaacagtatttggagtgttttcagtgtctgtactactgttgtagaccttggtatttttttaaacactgttaactgaaatgttttgatgatttgtatgtgatttgtgtttctaaacttctctttacattaatgttgttactggtgaaaggcatgagagcagcactaagtcctctgtgtaactgccattgtctttccaatccccagtagaccagtaaataaataacacatcagtgtcttctagaaggtgcctgaccaggttcaccttttaaacgacaaagcatggtttgtggctttttgcaaaattactatgaaccaaaagttgacaaatgttccaaagttattttctctaacatatcacattaaagatctgtttcagaattgtaaaaagtacatctagatgtgtttacagaaagcaagtatccagtatgactggcatgtgttcatgctattcagaatcacttgtaaatagtctgcttttaaaggagggcatgttcagttttctgtgaattaaaatatgctcatgtgtgggcacacacgcacaaacacacacacgcacgcacacagtggcagaagggatttatattaatattctttcccctctggccttcttacagtctgttggtccctttgcttctgttgtcagtgtgttgaattgcaaaccgagtactgctgtaaatactatgtttacttcatgctgaatgtttgcaaagacttgatataagtattaatagtaatgaatcaatgaataaataatgagctagggtttgtgaggctttctacaaataggtcagctccacctggagtgcgaattgccagagacaccttggtagtgcccatcggcaaatcgcaatggcagcatgtgagtggaccattcagaaacttctgcttggtggaaagtaaacagagaggatggaggtttggggcgaatgtcctgaggcagagatggtctttattgtgtgtggtggtggttgtggtatttataataatgcaagcataccctcccttgagtctcaattgaagataaaagaatgtactgagcaagcaaagccaatggagagtatttcacaaaaatactttgtaaatgagatgccagtagtgttcaaagttgtatttttaaaagataaatattcctttttatacctcagttttgtgtcctgtttttaatgacttacgctctaagtaatccattagtagttatctcagttccttcctttgggttactagaatgttggaaaaagatgccaagtctgtcttgacaactggaaacagggttccacagcagcccattcgtgctgaaaactggcttccccctgaagcaccctgctgtggcaccagcaggaagctcaggttaattttacactagcttgctcactgatgcatctctcatcaatgctacggaaggctttgattcatcagtctcgggctcttggaatacctaattttaataatatctatgaaatcaagggaaactttccatttacagttatttcttgtttaaataaactaaattaatttttaggggagagcagtaggaaaaagagctaatgcatgcggggtttaatacctaggtgatgggttgaggtgcagcaaaaccaccatggcacacgttcacctatgtaacaaacctgcacatcctgcacatgtaccccggaacttacttaaaa

SEQ ID NO: 325088 - DNA, 3788 bp, Artificial Sequence
  derived and/or modified sequence
gttcacagttgaggaccacacaatgcaaagagattttagatggctgtgggtctacgaaataggctatgcagccgataacagtagaactctgaacgtggattccactgcaatgacactacctatgtctgatccaactgcatgggccacagcaatgaataatcttggaatggcaccgctgggaattgccggacaaccaattttacctgactttgatcctgctcttggaatgatgactggaattccaccaataactccaatgatgcctggtttgggaatagtacctccaccaattcctccagatatgccagtagtaaaagagatcatacactgtaaaagctgcacgctcttccctccaaatccaaatctcccacctcctgcaacccgagaaagaccaccaggatgcaaaacagtatttgtgggtggtctgcctgaaaatgggacagagcaaatcattgtggaagttttcgagcagtgtggagagatcattgccattcgcaagagcaagaagaacttctgccacattcgctttgctgaggagtacatggtggacaaagccctgtatctgtctggttaccgcattcgcctgggctctagtactgacaagaaggacacaggcagactccacgttgatttcgcacaggctcgagatgacctgtatgagtgggagtgtaaacagcgtatgctagccagagaggagcgccatcgtagaagaatggaagaagaaagattgcgtccaccatctccacccccagtggtccactattcagatcatgaatgcagcattgttgctgaaaaattaaaagatgattccaaattctcagaagctgtacagaccttgcttacctggatagagcgaggagaggtcaaccgtcgtagcgccaataacttctactccatgatccagtcggccaacagccatgtccgccgcctggtgaacgagaaagctgcccatgagaaagatatggaagaagcaaaggagaagttcaagcaggccctttctggaattctcattcaatttgagcagatagtggctgtgtaccattccgcctccaagcagaaggcatgggaccacttcacaaaagcccagcggaagaacatcagcgtgtggtgcaaacaagctgaggaaattcgcaacattcataatgatgaattaatgggaatcaggcgagaagaagaaatggaaatgtctgatgatgaaatagaagaaatgacagaaacaaaagaaactgaggaatcagccttagtatcacaggcagaagctctgaaggaagaaaatgacagcctccgttggcagctcgatgcctaccggaatgaagtagaactgctcaagcaagaacaaggcaaagtccacagagaagatgaccctaacaaagaacagcagctgaaactcctgcaacaagccctgcaaggaatgcaacagcatctactcaaagtccaagaggaatacaaaaagaaagaagctgaacttgaaaaactcaaagatgacaagttacaggtggaaaaaatgttggaaaatcttaaagaaaaggaaagctgtgcttctaggctgtgtgcctcaaaccaggatagcgaataccctcttgagaagaccatgaacagcagtcctatcaaatctgaacgtgaagcactgctagtggggattatctccacattccttcatgttcacccatttggagcaagcattgaatacatctgttcctacttgcaccgtcttgataataagatctgcaccagcgatgtggagtgtctcatgggtagactccagcataccttcaagcaggaaatgactggagttggagccagcctggaaaagagatggaaattctgtggcttcgagggcttgaagctgacctaaatctctttgcctaacaacttgggatcctgaagataaatatgtgttggacaagcatagaaagtgatttatatttttaatggttttcaagtggaagttcctttgaatttgtcagttcattcctggaaaatcttttgagttaaaataaggatcctaggacagcacctcgaactacaggccctaaagagaaattgcctcaaaccacaagtgctgtaacttcctcccctttctgtcaattggttgtctttaaatattgcaaaagtcctgatgctaaacagtatttggagtgttttcagtgtctgtactactgttgtagaccttggtatttttttaaacactgttaactgaaatgttttgatgatttgtatgtgatttgtgtttctaaacttctctttacattaatgttgttactggtgaaaggcatgagagcagcactaagtcctctgtgtaactgccattgtctttccaatccccagtagaccagtaaataaataacacatcagtgtcttctagaaggtgcctgaccaggttcaccttttaaacgacaaagcatggtttgtggctttttgcaaaattactatgaaccaaaagttgacaaatgttccaaagttattttctctaacatatcacattaaagatctgtttcagaattgtaaaaagtacatctagatgtgtttacagaaagcaagtatccagtatgactggcatgtgttcatgctattcagaatcacttgtaaatagtctgcttttaaaggagggcatgttcagttttctgtgaattaaaatatgctcatgtgtgggcacacacgcacaaacacacacacgcacgcacacagtggcagaagggatttatattaatattctttcccctctggccttcttacagtctgttggtccctttgcttctgttgtcagtgtgttgaattgcaaaccgagtactgctgtaaatactatgtttacttcatgctgaatgtttgcaaagacttgatataagtattaatagtaatgaatcaatgaataaataatgagctagggtttgtgaggctttctacaaataggtcagctccacctggagtgcgaattgccagagacaccttggtagtgcccatcggcaaatcgcaatggcagcatgtgagtggaccattcagaaacttctgcttggtggaaagtaaacagagaggatggaggtttggggcgaatgtcctgaggcagagatggtctttattgtgtgtggtggtggttgtggtatttataataatgcaagcataccctcccttgagtctcaattgaagataaaagaatgtactgagcaagcaaagccaatggagagtatttcacaaaaatactttgtaaatgagatgccagtagtgttcaaagttgtatttttaaaagataaatattcctttttatacctcagttttgtgtcctgtttttaatgacttacgctctaagtaatccattagtagttatctcagttccttcctttgggttactagaatgttggaaaaagatgccaagtctgtcttgacaactggaaacagggttccacagcagcccattcgtgctgaaaactggcttccccctgaagcaccctgctgtggcaccagcaggaagctcaggttaattttacactagcttgctcactgatgcatctctcatcaatgctacggaaggctttgattcatcagtctcgggctcttggaatacctaattttaataatatctatgaaatcaagggaaactttccatttacagttatttcttgtttaaataaactaaattaatttttaggggagagcagtaggaaaaagagctaatgcatgcggggtttaatacctaggtgatgggttgaggtgcagcaaaaccaccatggcacacgttcacctatgtaacaaacctgcacatcctgcacatgtaccccggaacttacttaaaa

SEQ ID NO: 325089 - DNA, 1912 bp, Artificial Sequence
  derived and/or modified sequence
gtgtgtgagagtccagccttgggccagagtgccgggtctaggcctggaagcgcgaggcgggcatttcggaagagagtggcgcggcgtggggcgccgcgagggcactacgagcccaggaactgccgcgccggcccgattttccgcggctgtataaggactagcgcttcggtagccggggagctggagggaacctgatttgagatcaattcttggagaacacaaagaagtgtgatggattgaaccagctgccctttgaccctgctaacaacaacgagcccctgcagtttggtagtgccagtggccctctggtcacagaaggcctcattgagaatggaggggaatcaagcaagaaaagaaagagaacaaatactccttcagaaatgatgacagagctaagttcacagttgaggaccacacaatgcaaagagattttagatggctgtgggtctacgaaataggctatgcagccgataacagtagaactctgaacgtggattccactgcaatgacactacctatgtctgatccaactgcatgggccacagcaatgaataatcttggaatggcaccgctgggaattgccggacaaccaattttacctgactttgatcctgctcttggaatgatgactggaattccaccaataactccaatgatgcctggtttgggaatagtacctccaccaattcctccagatatgccagtagtaaaagagatcatacactgtaaaagctgcacgctcttccctccaaatccaaatctcccacctcctgcaacccgagaaagaccaccaggatgcaaaacagtatttgtgggtggtctgcctgaaaatgggacagagcaaatcattgtggaagttttcgagcagtgtggagagatcattgccattcgcaagagcaagaagaacttctgccacattcgctttgctgaggagtacatggtggacaaagccctgtatctgtctggttaccgcattcgcctgggctctagtactgacaagaaggacacaggcagactccacgttgatttcgcacaggctcgagatgacctgtatgagtgggagtgtaaacagcgtatgctagccagagaggagcgccatcgtagaagaatggaagaagaaagattgcgtccaccatctccacccccagtggtccactattcagatcatgaatgcagcattgttgctgaaaaattaaaagatgattccaaattctcagaagctgtacagaccttgcttacctggatagagcgaggagaggtcaaccgtcgtagcgccaataacttctactccatgatccagtcggccaacagccatgtccgccgcctggtgaacgagaaagctgcccatgagaaagatatggaagaagcaaaggagaagttcaagcaggccctttctggaattctcattcaatttgagcagatagtggctgtgtaccattccgcctccaagcagaaggcatgggaccacttcacaaaagcccagcggaagaacatcagcgtgtggtgcaaacaagctgaggaaattcgcaacattcataatgatgaattaatgggaatcaggcgagaagaagaaatggaaatgtctgatgatgaaatagaagaaatgacagaaacaaaagaaactgaggaatcagccttagtatcacaggcagaagctctgaaggaagaaaatgacagcctccgttggcagctcgatgcctaccggaatgaagtagaactgctcaagcaagaacaaggcaaagtccacagagaagatgaccctaacaaagaacagcagctgaaactcctgcaacaagccctgcaaggaatgcaacagcatctactcaaagtccaagaggaatacaaaaagaaagaagctgaacttgaaaaactcaaagatgacaagttacaggtggaaaaaatgaaaaaatga

SEQ ID NO: 325090 - DNA, 1746 bp, Artificial Sequence
  derived and/or modified sequence
atgactctcccaatgtccgacccgactgcctgggctaccgctatgaataacctggggatggcaccactggggatcgcaggacagcccatcctgcccgatttcgatcccgctcttgggatgatgactgggatacctccaataacccccatgatgcccggtctgggtatcgtccctccccccatccccccagatatgccagtcgtcaaggaaatcattcattgtaaatcctgtaccctcttccctcccaaccctaatctccctccacctgccacccgcgagagaccccccggatgtaagaccgttttcgtcggcggccttccagaaaacggaaccgaacagatcattgtggaagtgtttgaacaatgcggcgagataattgccattaggaagtccaagaagaacttctgtcacattaggtttgcagaagaatatatggtggacaaagctctctacctctctgggtatcgtatccgactcggtagttcaacagataaaaaagatactggacggttgcatgtggacttcgctcaagcacgtgacgatctgtatgaatgggagtgcaagcaacggatgctggctagagaggaacgacaccggagacggatggaagaggagcgactccgccccccttcccctccccctgtcgtccactacagtgatcatgagtgttccatcgtggctgagaagctcaaggatgacagcaaattcagtgaggctgttcagactctcctcacctggatcgaacggggggaggtcaaccggcgatctgccaacaacttttattctatgatccagagcgctaactctcatgtgcggcgtctcgtgaacgaaaaagccgctcatgagaaagatatggaagaagccaaggaaaaatttaagcaggccctcagcggaattctcatccagttcgagcaaattgtggctgtgtatcattctgcaagtaagcagaaggcatgggatcactttacaaaggcacagaggaagaacatcagcgtatggtgcaaacaggctgaggagatccggaacattcacaacgacgagctcatggggatacggcgcgaggaagagatggaaatgagcgacgacgagatcgaggaaatgactgagactaaagaaacagaggagtcggcccttgtctcacaggccgaggcactcaaagaagagaatgactctttaaggtggcagctggatgcttataggaatgaggtcgaactcctcaaacaagagcagggcaaagtccaccgagaagatgaccccaataaagagcaacagttgaagttgcttcagcaggcactgcagggtatgcaacaacatctcctgaaagtgcaggaggaatacaagaagaaagaggctgagcttgagaaattaaaggatgataagcttcaggtggaaaagatgttagaaaacctgaaggaaaaagagagttgcgcctcccgcctctgcgccagtaaccaggattccgagtatcctctggaaaagaccatgaattcatcacctatcaagtcggagcgcgaagctctcctggtgggaattattagcacctttctgcacgtgcatccatttggggctagcatagagtacatctgcagctatctccaccgcctcgataacaagatttgtacatcagacgtagagtgcctgatgggtagacttcagcacacattcaaacaggagatgacaggtgtgggggcgagcctcgaaaagcgctggaaattttgcgggtttgagggactgaaactcacctag

SEQ ID NO: 325091 - DNA, 1746 bp, Artificial Sequence
  derived and/or modified sequence
atgacactccctatgagcgatcccacagcttgggctaccgccatgaataacctcgggatggcgcctctagggatcgctgggcagcccattctaccagactttgaccccgcattaggcatgatgaccggtatccctccgattacaccgatgatgcccggattaggtatcgttccaccgcccattcctcccgacatgccggtagtgaaggagataattcattgcaagagctgcacattgtttcctcccaaccctaacctcccccctccagccaccagggaacgaccaccgggctgcaagaccgtattcgtcggtggccttcctgaaaacggtaccgagcaaatcattgtggaagtgtttgagcagtgtggtgagatcatcgctatcagaaaatctaaaaaaaacttttgccatataagattcgctgaagagtacatggttgataaggcgctgtatctctccggataccgcatccgtttgggatcctccacggataagaaggataccgggagactgcatgtcgacttcgctcaggcaagagacgatctttacgaatgggagtgtaaacaacgaatgctggcccgggaggagaggcaccgtcggcgcatggaggaggagagattgcggcctccatctcctcctcccgtggtgcattacagcgaccacgaatgtagcattgtggctgagaagctaaaggatgacagcaaattctcggaggcagtgcaaactctcttgacatggattgagagaggcgaggtcaatcgtcgaagtgcgaataatttttattccatgattcagagcgccaacagtcatgttcggaggctggtaaatgaaaaggcagcacacgagaaggacatggaggaggccaaagaaaagttcaagcaggctctgtcaggcatccttattcagtttgaacagatagtagctgtttaccactcagcttctaaacagaaggcctgggatcattttactaaggcacagagaaaaaacattagtgtatggtgtaagcaggcggaagagatccgcaacatccacaatgatgagctgatgggcatacggcgagaggaagaaatggaaatgagcgacgacgaaattgaagaaatgactgagacaaaagagacggaggaaagcgccctcgtttcccaagccgaggcactcaaggaggagaacgattccctgagatggcagttggatgcgtatcgcaatgaggtcgagctgctcaagcaagagcagggcaaggtgcaccgcgaggacgatccaaataaggagcagcaacttaaactactgcagcaggcccttcagggcatgcagcagcaccttcttaaagtgcaggaggagtataagaagaaggaagccgaactggaaaaactcaaagacgacaagctacaggtggaaaagatgctggagaacctcaaagagaaggagagctgcgcctcgagactgtgcgcctccaaccaggactcagaatacccgcttgagaagactatgaactcatcccccatcaagagtgagcgggaggccctcctggtgggcatcatatcgacctttctgcacgtgcacccgtttggagcttcgatcgaatacatatgcagctatctgcaccgcctagataacaagatttgcacctcagatgtggaatgcctaatggggcggctgcagcacacctttaagcaagaaatgaccggtgtgggcgcaagtcttgagaagcggtggaaattctgtggcttcgaggggctgaagctcacatag

SEQ ID NO: 325092 - DNA, 1131 bp, Artificial Sequence
  derived and/or modified sequence
atgaccctcccgatgtccgaccctacagcctgggctaccgcaatgaataacctcgggatggctccattggggattgccggacagccgatcttgcccgattttgatccagctctcgggatgatgactggcattccccccattactccaatgatgcctggccttggcattgtgcctcctcccattcccccagatatgccagtagtcaaggagatcatccactgtaagtcctgtacactttttccacccaatcctaacctgcccccacccgcaacaagggagcgtccgcctggctgcaaaacagtattcgtgggcggcctccccgagaatggcaccgaacagattatagtggaggtgtttgagcagtgtggggagattattgccatccggaagagtaagaaaaacttttgtcatattaggttcgccgaggagtacatggtggacaaggccctctatctttccggttacaggatcagattgggctcaagcacggacaaaaaggatactggccggctccacgttgattttgcacaggccagggacgacctgtatgaatgggaatgcaaacagcgtatgctcgcccgcgaagaacggcaccgacggcggatggaagaggagaggctcagacccccgtctcctcctcctgtggtgcattatagtgatcacgagtgctctatcgtggccgaaaagcttaaggatgacagcaagttcagcgaagccgtgcaaacccttctgacatggatagagaggggcgaggtaaacaggagatccgcgaataacttctattcaatgattcagtctgcaaatagtcacgtacgacgcttagtgaacgaaaaagctgcccatgaaaaagacatggaggaagcaaaggaaaagttcaaacaggcgttgagcgggatactgatacaatttgaacagatcgttgccgtgtaccactcggcatccaagcagaaagcttgggaccacttcaccaaagctcaacgcaagaatatctcagtctggtgcaagcaagctgaagagattaggaacatccataacgatgagctcatgggaattagacgcgaagaagaaatggagatgtcggatgacgagatcgaggagatgactgagacaaaggaaaccgaggaaagttag

SEQ ID NO: 325093 - DNA, 1407 bp, Artificial Sequence
  derived and/or modified sequence
atgactcttcccatgagcgacccaactgcctgggcaactgcaatgaataacttagggatggctcccttgggcattgctggccaacccattcttccagatttcgaccccgccctaggcatgatgaccggcattccaccaatcaccccaatgatgccaggattggggattgttcctccccccattccacccgacatgccagtcgtcaaggagataattcattgcaaatcctgcaccctctttccacccaacccaaacctccctccaccggcaacccgggagcggccgcctggatgtaagacagtatttgtggggggactcccagagaatggcacagagcaaataattgtggaggtctttgaacaatgtggagaaattatagctatcagaaaaagcaagaagaacttttgtcacatccgttttgccgaggagtatatggtggacaaggccttatatctcagcggctacaggatcaggctgggctcttccaccgacaagaaagatactggcagactgcatgtggatttcgctcaggcccgagacgatctttacgaatgggagtgcaagcagcgcatgctcgcccgggaagaacgccaccggagacgcatggaggaggaaagattgcgtccgccctcccccccacccgtagtccactactccgatcatgaatgcagcatagtggctgaaaagttgaaggatgatagcaagttttctgaagctgtccagacgctgctgacctggatagagcgtggagaggttaaccgacggtccgccaacaacttttactccatgatccagagcgcgaactctcatgttaggcgactggttaatgagaaggcagcacatgaaaaagacatggaggaggcaaaagaaaagtttaagcaggccttgagcggaattctgatccaattcgagcagatcgtcgcagtttaccacagcgcatctaagcagaaggcatgggatcactttacaaaagcacaaagaaagaatattagtgtctggtgtaaacaggctgaagagataagaaacatacacaatgacgagctgatggggataagaagagaagaagaaatggaaatgagtgacgatgagattgaggaaatgactgagaccaaagaaactgaggaatcggccctcgtgtcacaggccgaggcactgaaagaagaaaacgattctctgaggtggcagttggacgcctatagaaacgaagtggaactgctgaagcaggagcagggaaaggtgcatcgggaggacgacccaaacaaggaacagcagctgaagcttttgcagcaggcacttcagggcatgcaacagcacttactgaaggtgcaggaggaatacaagaagaaggaggccgaactggaaaaactgaaggacgacaaattgcaagtggagaaaatgaaaaaatag

SEQ ID NO: 325094 - DNA, 1746 bp, Artificial Sequence
  derived and/or modified sequence
atgaccctgcccatgtctgaccccacagcctgggccacagccatgaacaacctgggcatggcccccctgggcattgctggccagcccatcctgcctgactttgatcctgccctgggcatgatgacaggcatcccccccatcacccccatgatgcctggcctgggcatcgtgcccccacccatccccccagacatgcctgtggtgaaggagatcatccactgcaagagctgcaccctcttcccccccaaccccaacctgcccccaccagccacccgggagaggcctcctggctgcaagacagtgtttgtgggcggcctgcctgaaaatggaacagagcagatcatcgtggaggtgtttgagcagtgtggggagatcatcgccatcaggaagagcaagaagaacttctgccacatccgctttgctgaggagtacatggtggacaaggccctgtacctgagcggctaccgcatccggctgggcagcagcacagacaagaaggacaccggccgcctgcacgtggactttgcccaggccagagatgacctgtatgagtgggagtgcaagcagaggatgctggcccgggaggagcggcacagaagaaggatggaggaggagcggctgcggccccccagccccccacctgtggtgcactacagcgaccacgagtgcagcatcgtggccgagaagctgaaggatgacagcaagttcagcgaggccgtgcagaccctgctgacctggattgagcggggggaggtgaacagaagaagtgccaacaacttctacagcatgatccagagcgccaacagccacgtgcggcggctggtgaatgagaaggccgcccacgagaaggacatggaggaggccaaggagaagttcaagcaggccctgagcggcatcctgatccagtttgagcagatcgtggccgtgtaccacagcgccagcaagcagaaggcctgggaccacttcaccaaggcccagaggaagaacatctctgtgtggtgcaagcaggccgaggagatccggaacatccacaatgatgagctgatgggcatccggcgggaggaggagatggagatgtctgatgatgaaattgaggagatgacagagaccaaggagacagaggagagcgccctggtgtcccaggccgaggccctgaaggaggagaatgacagcctgcgctggcagctggatgcctacagaaatgaggtggagctgctgaagcaggagcagggcaaggtgcaccgggaggatgaccccaacaaggagcagcagctgaagctgctgcagcaggccctgcagggcatgcagcagcacctgctgaaggtgcaggaggagtacaagaagaaggaggccgagctggagaagctgaaggatgacaagctgcaggtggagaagatgctggagaacctgaaggagaaggagagctgtgccagccggctgtgtgccagcaaccaggacagcgagtaccccctggagaagaccatgaacagcagccccatcaagtctgagcgggaggccctgctggtgggcatcatcagcaccttcctgcacgtgcacccctttggagccagcattgagtacatctgcagctacctgcaccggctggacaacaagatctgcaccagtgatgtggagtgcctgatgggccgcctgcagcacaccttcaagcaggagatgactggagtgggcgccagcctggagaagcgctggaagttctgtggctttgagggcctgaagctgacctag

SEQ ID NO: 325095 - DNA, 1131 bp, Artificial Sequence
  derived and/or modified sequence
atgaccctgcccatgtctgaccccacagcctgggccacagccatgaacaacctgggcatggcccccctgggcattgctggccagcccatcctgcctgactttgatcctgccctgggcatgatgacaggcatcccccccatcacccccatgatgcctggcctgggcatcgtgcccccacccatccccccagacatgcctgtggtgaaggagatcatccactgcaagagctgcaccctcttcccccccaaccccaacctgcccccaccagccacccgggagaggcctcctggctgcaagacagtgtttgtgggcggcctgcctgaaaatggaacagagcagatcatcgtggaggtgtttgagcagtgtggggagatcatcgccatcaggaagagcaagaagaacttctgccacatccgctttgctgaggagtacatggtggacaaggccctgtacctgagcggctaccgcatccggctgggcagcagcacagacaagaaggacaccggccgcctgcacgtggactttgcccaggccagagatgacctgtatgagtgggagtgcaagcagaggatgctggcccgggaggagcggcacagaagaaggatggaggaggagcggctgcggccccccagccccccacctgtggtgcactacagcgaccacgagtgcagcatcgtggccgagaagctgaaggatgacagcaagttcagcgaggccgtgcagaccctgctgacctggattgagcggggggaggtgaacagaagaagtgccaacaacttctacagcatgatccagagcgccaacagccacgtgcggcggctggtgaatgagaaggccgcccacgagaaggacatggaggaggccaaggagaagttcaagcaggccctgagcggcatcctgatccagtttgagcagatcgtggccgtgtaccacagcgccagcaagcagaaggcctgggaccacttcaccaaggcccagaggaagaacatctctgtgtggtgcaagcaggccgaggagatccggaacatccacaatgatgagctgatgggcatccggcgggaggaggagatggagatgtctgatgatgaaattgaggagatgacagagaccaaggagacagaggagagctag

SEQ ID NO: 325096 - DNA, 1407 bp, Artificial Sequence
  derived and/or modified sequence
atgaccctgcccatgtctgaccccacagcctgggccacagccatgaacaacctgggcatggcccccctgggcattgctggccagcccatcctgcctgactttgatcctgccctgggcatgatgacaggcatcccccccatcacccccatgatgcctggcctgggcatcgtgcccccacccatccccccagacatgcctgtggtgaaggagatcatccactgcaagagctgcaccctcttcccccccaaccccaacctgcccccaccagccacccgggagaggcctcctggctgcaagacagtgtttgtgggcggcctgcctgaaaatggaacagagcagatcatcgtggaggtgtttgagcagtgtggggagatcatcgccatcaggaagagcaagaagaacttctgccacatccgctttgctgaggagtacatggtggacaaggccctgtacctgagcggctaccgcatccggctgggcagcagcacagacaagaaggacaccggccgcctgcacgtggactttgcccaggccagagatgacctgtatgagtgggagtgcaagcagaggatgctggcccgggaggagcggcacagaagaaggatggaggaggagcggctgcggccccccagccccccacctgtggtgcactacagcgaccacgagtgcagcatcgtggccgagaagctgaaggatgacagcaagttcagcgaggccgtgcagaccctgctgacctggattgagcggggggaggtgaacagaagaagtgccaacaacttctacagcatgatccagagcgccaacagccacgtgcggcggctggtgaatgagaaggccgcccacgagaaggacatggaggaggccaaggagaagttcaagcaggccctgagcggcatcctgatccagtttgagcagatcgtggccgtgtaccacagcgccagcaagcagaaggcctgggaccacttcaccaaggcccagaggaagaacatctctgtgtggtgcaagcaggccgaggagatccggaacatccacaatgatgagctgatgggcatccggcgggaggaggagatggagatgtctgatgatgaaattgaggagatgacagagaccaaggagacagaggagagcgccctggtgtcccaggccgaggccctgaaggaggagaatgacagcctgcgctggcagctggatgcctacagaaatgaggtggagctgctgaagcaggagcagggcaaggtgcaccgggaggatgaccccaacaaggagcagcagctgaagctgctgcagcaggccctgcagggcatgcagcagcacctgctgaaggtgcaggaggagtacaagaagaaggaggccgagctggagaagctgaaggatgacaagctgcaggtggagaagatgaagaagtag

SEQ ID NO: 325097 - DNA, 1746 bp, Artificial Sequence
  derived and/or modified sequence
atgaccctgcccatgagcgaccccaccgcctgggccaccgccatgaataatctggggatggcgcctctgggcattgcgggccagccaattttaccagacttcgatcccgctttgggaatgatgaccggcatcccacccattacaccaatgatgccaggactagggatcgttccaccccccatcccacccgacatgccagtcgtcaaggaaattattcactgcaaatcgtgtacactgttcccacccaaccccaatctcccccctccagctaccagagaacggcctcccggttgtaaaacagtgtttgtaggcggtctgcccgagaatggcaccgaacaaatcattgtggaggtattcgagcagtgtggcgaaatcatcgcgattcggaaaagtaaaaaaaacttctgccacatacgtttcgcagaagagtacatggttgataaggcactgtacctgagcggatacagaatcaggctgggatccagcactgacaagaaagacactggccggcttcatgtcgacttcgcgcaggcgagagacgacctatatgagtgggaatgcaaacaacggatgttggcgcgtgaagaaagacacagaagacggatggaagaggaaagactccgcccaccttcgccacctcccgtagtccattatagcgatcacgaatgcagtatcgtagccgaaaaattgaaagacgattcgaagttcagcgaggccgttcagaccttattgacctggatagaacgaggcgaggtgaatagaaggtctgcaaacaatttttacagtatgattcagagcgctaacagtcacgttcgtcgcctggtcaacgagaaagctgcacatgagaaagacatggaagaggctaaagagaagttcaagcaggcactttcgggaattcttatccagttcgagcaaatcgtcgctgtatatcattccgcgtcaaaacagaaggcatgggatcactttaccaaggctcagcggaagaatatttcagtgtggtgcaaacaggcggaggaaattcgaaatatccataatgacgagctgatgggcatacgccgggaggaagaaatggagatgagcgatgatgaaattgaagagatgaccgaaactaaggagacagaagaaagcgctttggtgtctcaggctgaagccctgaaggaagaaaatgactcacttcgatggcagctcgacgcttatcggaatgaagtcgagctgctgaagcaggagcaggggaaagtccacagagaagatgacccgaataaggaacagcagttaaaactcctacagcaggcactacagggtatgcagcagcacttgctgaaggtgcaggaagagtacaaaaagaaggaggctgaactggagaaactgaaggacgacaagctgcaagttgagaagatgctggaaaatctcaaagaaaaagaatcttgtgctagccgcctttgcgcaagcaatcaggattctgagtatcctcttgagaaaaccatgaactccagtcctatcaaatccgaacgcgaggctctactagtgggaatcattagcacctttctgcatgtccaccctttcggcgcctccatagaatacatttgcagctacttgcatagactggacaacaaaatctgtacgagtgacgttgagtgtcttatggggaggctccagcatacatttaaacaggaaatgacaggggtcggcgcttccctggagaagagatggaagttctgcggattcgaaggtctgaaactgacttag

SEQ ID NO: 325098 - DNA, 1746 bp, Artificial Sequence
  derived and/or modified sequence
atgaccctgcccatgagcgaccccaccgcctgggccaccgccatgaataatctgggcatggcccccctgggcatcgcgggacagcctattttgccagacttcgatcccgcgttaggcatgatgactggcataccacctatcacgccgatgatgcctggtctcggcatcgtccctccgccgattcccccagacatgccagttgtgaaagagatcatacactgcaaatcctgcacattgtttcctccaaaccctaaccttccacctccagctactcgggagaggccccccgggtgcaaaaccgtgttcgtcggcggcctgcctgagaatggtactgaacagattatcgtggaagtctttgaacagtgtggcgaaatcattgccattcggaagagtaagaagaacttctgtcatattagattcgccgaggaatacatggtggacaaggctttgtatctctcaggatatcgaatccgtttgggctcatctacagataagaaggacaccggccggttacacgtcgatttcgctcaggctcgcgacgatttgtatgagtgggaatgtaaacaacgcatgctcgcacgggaggagcggcacagaagacgaatggaagaagaacgcctgcgcccgcccagtcctccacccgtggtgcactatagtgaccacgaatgcagcattgtggcagagaagctcaaggacgactctaagtttagcgaggctgtccagacgctgttgacctggattgaacgcggagaagtaaacagacgctcagcaaataatttttactccatgattcagtcggcgaactcacatgtccgccgattagttaatgaaaaggcagctcatgagaaggacatggaggaggccaaggagaaatttaagcaagccctctcaggaatcctgatccagttcgagcagatagtggctgtgtatcatagtgccagcaaacagaaggcatgggatcacttcaccaaagcccagcgaaagaacatctctgtgtggtgtaagcaggccgaggaaatacgcaatatccataacgatgagttaatgggcatcaggcgcgaagaagaaatggagatgagcgacgacgagattgaagaaatgactgagaccaaggaaactgaggaatccgcattggttagccaggccgaggccctgaaggaagaaaacgactctctgcggtggcagctggacgcttaccgcaacgaggttgagctgctgaagcaggagcagggcaaggttcacagggaagatgaccctaataaagaacagcagctcaagctactccaacaggcacttcagggcatgcagcaacacctgttgaaggtccaggaggagtataagaaaaaagaggcagaactggaaaaacttaaggatgataaactccaggtagagaagatgctggaaaacttaaaggaaaaggagtcatgtgcttcaaggctctgcgcatcaaatcaggactcagagtaccccctggaaaagaccatgaattcatccccaattaaatccgagagagaagcccttctggtgggcatcatatccaccttcctacacgtgcatcctttcggtgctagcatcgagtacatttgcagctacctgcacagactggacaataagatatgtacctccgacgtggaatgtctaatgggtagactgcagcacacttttaagcaggagatgaccggcgtgggggcttcattggaaaagcggtggaagttctgcggctttgagggactgaaacttacctag

SEQ ID NO: 325099 - DNA, 1131 bp, Artificial Sequence
  derived and/or modified sequence
atgaccctgcccatgagcgaccccaccgcctgggccaccgccatgaataatctgggaatggcgcctctggggattgctggccagccgattttgcccgacttcgaccccgcactcggaatgatgacaggaattccacccataacgcccatgatgccagggctgggtattgtccctcctcctatccccccggatatgccagtcgtaaaggaaatcatccactgcaagtcgtgtacactgtttcctcctaacccaaacctcccgccacccgcaacccgcgaacgcccaccggggtgtaaaaccgtgtttgtcgggggattaccagagaatggaactgaacaaattattgtggaggtatttgaacaatgtggagagatcatcgctatccgtaagtccaagaagaatttctgccatattcgctttgcagaagaatacatggttgacaaggcactctacctcagcgggtacaggataaggttgggaagctcaacagacaagaaggacaccggtcgacttcacgtggacttcgcccaggccagggacgacttgtacgaatgggagtgtaagcagcgaatgctagcccgggaggaaaggcacagaaggcggatggaggaggagcgccttagacccccttcccccccgccagtggtccattattcagaccacgagtgttcgatcgttgcagagaaactaaaggacgattcaaagttctccgaggctgtgcaaactttactgacatggatagaacgaggcgaagtaaacagacgcagtgccaacaatttctactccatgattcaatccgcaaacagccacgttcggagactggtcaacgagaaggctgcacacgaaaaagatatggaggaggccaaagaaaaatttaagcaggccctgagcggcatcttgattcagttcgagcagattgttgcagtgtatcacagcgcatccaaacagaaggcatgggatcactttactaaagcccagcggaagaatatttccgtttggtgtaaacaagcagaagaaattcgtaacattcacaatgatgagctgatgggcattaggcgggaggaagagatggagatgtccgatgatgagatcgaagagatgactgaaactaaagagacggaagaaagctag

SEQ ID NO: 325100 - DNA, 1407 bp, Artificial Sequence
  derived and/or modified sequence
atgaccctgcccatgagcgaccccaccgcctgggccaccgccatgaataacctcggcatggcgcccctcgggattgctggtcagccgatacttccggatttcgaccctgctttgggtatgatgacaggaataccgcccatcacccccatgatgccaggactcggcatagtccccccaccaatccctccggatatgccagtggtaaaggagattatccactgtaaatcttgtaccctgtttccacctaacccaaatctgcctccccccgctacgagggaaaggcctcctggttgtaagactgtgtttgtgggcggcttaccagagaacggtactgaacagatcatagtcgaagtgttcgagcaatgtggggagattattgctatccggaaatccaaaaaaaatttttgccacatccggtttgctgaagagtatatggtcgacaaagctctgtacctgtccgggtaccggattcggcttggttccagcactgataagaaggatacagggagactccacgtagactttgcacaggcgagagacgacctgtatgaatgggaatgcaagcaaaggatgctcgctcgcgaagagcggcataggagacgcatggaagaggaaaggctccgtccacccagtcctcccccagtcgtacattacagtgaccatgagtgttctatagttgcagagaagctcaaagacgacagcaagttttctgaggccgttcagactcttctgacttggattgagcggggtgaggtgaaccgcaggtccgcgaataatttctactctatgatccagagtgcgaacagccacgtcaggcggcttgtgaacgagaaggcagcccacgagaaggacatggaggaagctaaggaaaaattcaagcaggccctgagcggcattctcatccagttcgagcagattgtggccgtgtatcattccgcttccaaacaaaaggcctgggatcactttacaaaagcccaaaggaaaaatatcagtgtgtggtgcaagcaggcggaggagatcagaaatatccataatgatgagctgatgggcatcagacgcgaagaagaaatggagatgtcagatgacgagatagaagagatgactgaaactaaggagaccgaggaaagcgcgctggtgtcccaggcagaggcactgaaagaagagaacgactccttgcgttggcagctagacgcataccgcaatgaagtggaactactgaagcaggagcagggtaaagtgcaccgcgaggacgatcctaataaagagcaacagctgaagctgcttcagcaggctcttcagggtatgcaacaacacttgctcaaagtgcaagaggagtacaagaagaaggaggctgagctggagaagttgaaagatgataaattgcaagtggagaagatgaaaaaatag

SEQ ID NO: 325101 - DNA, 1746 bp, Artificial Sequence
  derived and/or modified sequence
atgaccctccccatgagtgatccaaccgcctgggccaccgctatgaacaacctaggaatggctcccttagggatcgctggccagccaatccttcctgactttgatcccgcactgggaatgatgactgggatacctcctattacccccatgatgccagggttaggaattgtgcctccccctatccccccagatatgcccgtcgttaaggaaatcatacattgcaagtcatgcacgctatttccacctaaccctaatttgccaccaccagctacgagggagcgtcccccagggtgcaagactgtattcgtgggaggccttcctgaaaatggcaccgagcagatcattgtcgaggtgtttgaacagtgcggtgagatcatcgctattagaaagagtaagaaaaatttttgtcacatacgcttcgcggaagaatatatggttgataaagccctctatttgagtgggtaccgaatcaggctagggtcatcgacagataagaaggacactggcaggctgcatgtggactttgcacaggctcgtgatgatctttatgagtgggaatgtaaacagcgtatgcttgcacgggaagaacgccatcgtcgcagaatggaagaggagaggctgagaccaccttcacctccgcctgttgtgcactactcagaccacgagtgctccatcgtggcagaaaaactaaaagatgactccaaattttctgaagcagtgcagacactgttgacctggatcgagcggggtgaagtgaatcggaggtctgccaataacttttactccatgattcagagcgcaaactcgcacgtcagacgcctggttaacgagaaagccgcacacgagaaagacatggaggaggcaaaagaaaaatttaaacaggccctgtctggcatcctgatacaattcgaacagatcgtggctgtgtaccattccgcgagtaaacagaaagcctgggaccattttaccaaggcccaacggaaaaatatctccgtatggtgtaagcaagcagaagaaatccgcaacatccacaatgacgagctaatggggatccgcagggaggaagaaatggaaatgtccgacgacgaaattgaggagatgaccgaaaccaaggagactgaggaatcggcgctcgtctcacaggcagaagccctcaaggaggagaacgacagcttaaggtggcagttagacgcttacaggaacgaggttgagctgctgaagcaggaacagggcaaagtgcacagagaggacgatcccaacaaagagcaacagctgaagttacttcagcaagcactgcagggcatgcagcagcacctccttaaagtacaggaagagtataaaaagaaagaggctgaactggaaaaactcaaggatgataagctgcaggtggaaaagatgttggaaaacctgaaggaaaaagagagctgcgcgagccgactctgcgctagcaatcaagatagtgaatatcccctggaaaagacaatgaatagctccccaatcaagtcggagcgggaggccctgttggttggaataatctctacgtttctccacgtccacccctttggagctagtatagagtacatctgctcctacctccacagattggacaacaaaatttgcactagcgatgtagagtgtctcatgggacgattacagcacacattcaaacaagagatgactggggtgggcgcaagtctagagaaaaggtggaagttctgcgggttcgaaggactcaaactcacctag

SEQ ID NO: 325102 - DNA, 1746 bp, Artificial Sequence
  derived and/or modified sequence
atgactctgcccatgtccgaccccacagcttgggccacggccatgaacaatctgggcatggccccactggggattgcagggcaacccattctcccagactttgatcctgcactcgggatgatgaccggtatcccccctataacaccaatgatgccgggtttggggatcgttccaccccctattcctcccgacatgccagtggtcaaagagataattcattgcaaatcctgtacgctgttccccccaaatcccaacctccccccacctgccactagggagcggccacccggttgtaagactgtgttcgtcggcggattgcctgagaacgggaccgaacagattatagtggaggtgtttgagcagtgtggggaaatcattgccatccggaagagcaagaaaaacttttgtcacatcaggtttgccgaggagtatatggtggacaaggcgctgtacctcagcgggtaccgaatcaggcttggaagctcgacagacaagaaggatacagggcgtctccacgtcgactttgcgcaggccagagatgacctctacgaatgggagtgcaagcagaggatgcttgcccgagaggagagacaccggagacggatggaagaagagcggttgcggccaccatcaccacctccagtcgttcattatagcgaccacgagtgttccatagtggctgagaagctgaaggacgacagtaagtttagtgaagcagtacagaccctgctgacctggattgagcgaggcgaggtgaaccggcgttcagccaacaacttctactccatgatccaaagtgcgaactcccatgtcagaagattagtgaatgagaaggcagcgcacgagaaggatatggaagaggctaaagagaagtttaagcaggctttatctggaattttgatccagtttgagcaaatcgtggccgtttaccactcagccagcaagcagaaagcctgggatcacttcacaaaggcacagcgcaagaacattagcgtgtggtgcaagcaggcggaggagattcggaatattcacaatgacgagctgatgggaattaggagagaggaggagatggagatgtcagatgacgagatcgaagaaatgacagagacaaaagagactgaagagagcgctctagtttcccaagcagaggcgctgaaagaggagaatgatagccttaggtggcagctcgatgcttacaggaacgaagtggagctcctgaagcaggaacagggcaaggtccatcgagaggatgatcccaataaagagcagcagctcaagctgctacagcaagccctgcaggggatgcagcagcacctcctgaaagttcaagaagagtataaaaagaaggaagctgaactcgaaaagcttaaggacgacaagctgcaggtggagaagatgctggaaaacctcaaggagaaggagagctgtgcaagtcggctgtgcgccagtaaccaagattccgaatatccgctggagaagaccatgaattcttctcctattaagagcgagcgcgaggccctccttgtaggcataatctcaactttccttcacgtgcatccatttggagcctcaattgagtatatctgttcatatctacatcgcctggataacaagatttgcacaagtgacgttgagtgccttatggggagactgcagcacacttttaagcaggagatgacgggggtgggcgcaagcctggaaaaaagatggaaattttgcggctttgagggccttaaactgacatag

SEQ ID NO: 325103 - DNA, 1131 bp, Artificial Sequence
  derived and/or modified sequence
atgacacttcctatgtccgacccaactgcctgggctaccgctatgaacaatctgggaatggcccctctgggcattgcgggtcagcccattcttccagactttgatccagcccttgggatgatgacggggattccacccatcaccccgatgatgccgggtctcggcattgttccacccccaatacccccagatatgcccgtcgtgaaggagattatccactgtaagtcttgcacactgtttcctcctaaccccaacctaccccctccagccactcgagagcgcccacctggctgtaagaccgtgttcgtagggggtctgccggagaatggcactgagcagatcatcgtcgaggtgtttgaacaatgcggcgaaattatcgctatcaggaagagcaagaagaacttctgtcacatccgcttcgctgaagaatatatggttgacaaggcactgtacctcagcggatataggataaggctggggtctagtaccgacaagaaagatactggtcgactgcacgtcgattttgcccaggccagagacgatctgtacgagtgggagtgcaagcagaggatgctggccagggaagagcggcaccggagacggatggaggaggaaaggctgagaccaccatctccaccgcctgtggttcattacagcgatcacgaatgctctatcgtcgccgaaaaattgaaggacgatagcaagttttccgaggccgtgcagacccttctgacatggatcgaacgcggtgaagtgaatagaagaagcgccaacaatttctactcaatgatacagtctgccaactctcatgtgcggaggctggtgaacgaaaaggccgcacatgagaaagacatggaagaggctaaagagaaattcaaacaggccctcagcggcattctgatccaattcgaacagatcgtggcagtttaccactctgcgtcaaaacagaaggcttgggaccactttacaaaggcgcagcgaaagaacatttccgtgtggtgtaagcaggccgaggaaatcaggaatatccacaacgacgagctcatgggtattcggagagaagaagagatggaaatgtctgatgatgaaatagaggagatgactgagacgaaagaaaccgaggagagctag

SEQ ID NO: 325104 - DNA, 1407 bp, Artificial Sequence
  derived and/or modified sequence
atgacactgcccatgagtgatcctactgcatgggccacagctatgaataatctcggcatggcccctttggggattgcaggacagccaattttgccagatttcgaccccgcactgggtatgatgactggtattccgccaattacccccatgatgcctgggcttggaattgtgccccctcccatcccaccagacatgccagtcgtgaaagagataattcactgcaagagctgcacgctgttccctccaaatcccaatttgcctccacctgctacacgggaaagaccccctggctgtaaaacagtgtttgtcggcggactgcctgagaacggaaccgaacagataattgtagaggtcttcgagcagtgtggggaaatcattgccatcagaaagtccaaaaagaatttttgtcacatcagatttgccgaagagtacatggtggacaaggccctatatctgtcgggctatcggatccgtttgggatcatctaccgataaaaaagatacagggaggcttcacgtcgactttgcccaggcgagagacgatctgtatgaatgggagtgcaaacagcgtatgttggccagggaggagcggcacagacgcaggatggaggaggagagacttcggcctccatcaccccctcctgtggtgcattattcagaccatgagtgttcaatagtcgccgaaaaactgaaagatgactcaaagttcagtgaggctgtgcagaccctattgacctggattgagcgcggtgaagtcaatagaaggtcggctaataacttttatagcatgattcaaagcgctaactcacacgttagaagactcgtcaatgagaaggcggcacatgagaaggatatggaagaggctaaagagaagttcaaacaggccctgagcggcatccttatccaatttgagcagatcgtggctgtttaccattccgctagcaagcagaaagcatgggaccattttaccaaggctcagcgaaaaaacatctcggtatggtgtaagcaggccgaagaaatccgcaacatccataatgacgaactcatgggaatccgtagagaagaggagatggaaatgtccgatgacgagatcgaggagatgaccgaaaccaaggagaccgaagaatcagcccttgtgagccaggctgaagccctgaaggaggagaacgactcattaaggtggcaactagatgcataccgcaacgaggtggaactgctgaagcaggaacagggaaaggtgcatagggaggacgaccccaacaaggaacagcagctgaagcttctgcagcaggccctgcaaggaatgcagcaacatctgttgaaagtgcaagaagagtacaagaaaaaggaagcagagctcgagaaactgaaagatgacaagcttcaggtggaaaagatgaagaagtag

SEQ ID NO: 325105 - DNA, 1746 bp, Artificial Sequence
  derived and/or modified sequence
atgaccctgcccatgagcgaccccaccgcctgggccaccgccatgaacaacctgggcatggcccccctgggcatcgccggccagcccatcctgcccgacttcgaccccgccctgggcatgatgaccggcatcccccccatcacccccatgatgcccggcctgggcatcgtgcccccccccatcccccccgacatgcccgtggtgaaggagatcatccactgcaagagctgcaccctgttcccccccaaccccaacctgcccccccccgccaccagagagagaccccccggctgcaagaccgtgttcgtgggcggcctgcccgagaacggcaccgagcagatcatcgtggaggtgttcgagcagtgcggcgagatcatcgccatcagaaagagcaagaagaacttctgccacatcagattcgccgaggagtacatggtggacaaggccctgtacctgagcggctacagaatcagactgggcagcagcaccgacaagaaggacaccggcagactgcacgtggacttcgcccaggccagagacgacctgtacgagtgggagtgcaagcagagaatgctggccagagaggagagacacagaagaagaatggaggaggagagactgagaccccccagccccccccccgtggtgcactacagcgaccacgagtgcagcatcgtggccgagaagctgaaggacgacagcaagttcagcgaggccgtgcagaccctgctgacctggatcgagagaggcgaggtgaacagaagaagcgccaacaacttctacagcatgatccagagcgccaacagccacgtgagaagactggtgaacgagaaggccgcccacgagaaggacatggaggaggccaaggagaagttcaagcaggccctgagcggcatcctgatccagttcgagcagatcgtggccgtgtaccacagcgccagcaagcagaaggcctgggaccacttcaccaaggcccagagaaagaacatcagcgtgtggtgcaagcaggccgaggagatcagaaacatccacaacgacgagctgatgggcatcagaagagaggaggagatggagatgagcgacgacgagatcgaggagatgaccgagaccaaggagaccgaggagagcgccctggtgagccaggccgaggccctgaaggaggagaacgacagcctgagatggcagctggacgcctacagaaacgaggtggagctgctgaagcaggagcagggcaaggtgcacagagaggacgaccccaacaaggagcagcagctgaagctgctgcagcaggccctgcagggcatgcagcagcacctgctgaaggtgcaggaggagtacaagaagaaggaggccgagctggagaagctgaaggacgacaagctgcaggtggagaagatgctggagaacctgaaggagaaggagagctgcgccagcagactgtgcgccagcaaccaggacagcgagtaccccctggagaagaccatgaacagcagccccatcaagagcgagagagaggccctgctggtgggcatcatcagcaccttcctgcacgtgcaccccttcggcgccagcatcgagtacatctgcagctacctgcacagactggacaacaagatctgcaccagcgacgtggagtgcctgatgggcagactgcagcacaccttcaagcaggagatgaccggcgtgggcgccagcctggagaagagatggaagttctgcggcttcgagggcctgaagctgacctag

SEQ ID NO: 325106 - DNA, 1131 bp, Artificial Sequence
  derived and/or modified sequence
atgaccctgcccatgagcgaccccaccgcctgggccaccgccatgaacaacctgggcatggcccccctgggcatcgccggccagcccatcctgcccgacttcgaccccgccctgggcatgatgaccggcatcccccccatcacccccatgatgcccggcctgggcatcgtgcccccccccatcccccccgacatgcccgtggtgaaggagatcatccactgcaagagctgcaccctgttcccccccaaccccaacctgcccccccccgccaccagagagagaccccccggctgcaagaccgtgttcgtgggcggcctgcccgagaacggcaccgagcagatcatcgtggaggtgttcgagcagtgcggcgagatcatcgccatcagaaagagcaagaagaacttctgccacatcagattcgccgaggagtacatggtggacaaggccctgtacctgagcggctacagaatcagactgggcagcagcaccgacaagaaggacaccggcagactgcacgtggacttcgcccaggccagagacgacctgtacgagtgggagtgcaagcagagaatgctggccagagaggagagacacagaagaagaatggaggaggagagactgagaccccccagccccccccccgtggtgcactacagcgaccacgagtgcagcatcgtggccgagaagctgaaggacgacagcaagttcagcgaggccgtgcagaccctgctgacctggatcgagagaggcgaggtgaacagaagaagcgccaacaacttctacagcatgatccagagcgccaacagccacgtgagaagactggtgaacgagaaggccgcccacgagaaggacatggaggaggccaaggagaagttcaagcaggccctgagcggcatcctgatccagttcgagcagatcgtggccgtgtaccacagcgccagcaagcagaaggcctgggaccacttcaccaaggcccagagaaagaacatcagcgtgtggtgcaagcaggccgaggagatcagaaacatccacaacgacgagctgatgggcatcagaagagaggaggagatggagatgagcgacgacgagatcgaggagatgaccgagaccaaggagaccgaggagagctag

SEQ ID NO: 325107 - DNA, 1407 bp, Artificial Sequence
  derived and/or modified sequence
atgaccctgcccatgagcgaccccaccgcctgggccaccgccatgaacaacctgggcatggcccccctgggcatcgccggccagcccatcctgcccgacttcgaccccgccctgggcatgatgaccggcatcccccccatcacccccatgatgcccggcctgggcatcgtgcccccccccatcccccccgacatgcccgtggtgaaggagatcatccactgcaagagctgcaccctgttcccccccaaccccaacctgcccccccccgccaccagagagagaccccccggctgcaagaccgtgttcgtgggcggcctgcccgagaacggcaccgagcagatcatcgtggaggtgttcgagcagtgcggcgagatcatcgccatcagaaagagcaagaagaacttctgccacatcagattcgccgaggagtacatggtggacaaggccctgtacctgagcggctacagaatcagactgggcagcagcaccgacaagaaggacaccggcagactgcacgtggacttcgcccaggccagagacgacctgtacgagtgggagtgcaagcagagaatgctggccagagaggagagacacagaagaagaatggaggaggagagactgagaccccccagccccccccccgtggtgcactacagcgaccacgagtgcagcatcgtggccgagaagctgaaggacgacagcaagttcagcgaggccgtgcagaccctgctgacctggatcgagagaggcgaggtgaacagaagaagcgccaacaacttctacagcatgatccagagcgccaacagccacgtgagaagactggtgaacgagaaggccgcccacgagaaggacatggaggaggccaaggagaagttcaagcaggccctgagcggcatcctgatccagttcgagcagatcgtggccgtgtaccacagcgccagcaagcagaaggcctgggaccacttcaccaaggcccagagaaagaacatcagcgtgtggtgcaagcaggccgaggagatcagaaacatccacaacgacgagctgatgggcatcagaagagaggaggagatggagatgagcgacgacgagatcgaggagatgaccgagaccaaggagaccgaggagagcgccctggtgagccaggccgaggccctgaaggaggagaacgacagcctgagatggcagctggacgcctacagaaacgaggtggagctgctgaagcaggagcagggcaaggtgcacagagaggacgaccccaacaaggagcagcagctgaagctgctgcagcaggccctgcagggcatgcagcagcacctgctgaaggtgcaggaggagtacaagaagaaggaggccgagctggagaagctgaaggacgacaagctgcaggtggagaagatgaagaagtag

SEQ ID NO: 325108 - protein, 603 aa, Artificial Sequence
  derived and/or modified sequence
MKGDFRKKKSEARTPLEQEIFNLLHKNKQPVTDPLLTPVEKASLRAMSLEEAKMRRAELQRARALQSYYEAKARREKKIKSKKYHKVVKKGKAKKALKEFEQLRKVNPAAALEELEKIEKARMMERMSLKHQNSGKWAKSKAIMAKYDLEARQAMQEQLSKNKELTQKLQVASESEEEEGGTEDVEELLVPDVVNEVQMNADGPNPWMLRSCTSDTKEAATQEDPEQLPELEAHGVSESEGEERPVAEEEILLREFEERRSLRKRSELSQDAEPAGSQETKDSGSQEVLSELRVLSQKLKENHQSRKQKASSEGTIPQVQREEPAPEEEEPLLLQRPERVQTLEELEELGKEECFQNKELPRPVLEGQQSERTPNNRPDAPKEKKKKEQMIDLQNLLTTQSPSVKSLAVPTIEELEDEEERNHRQMIKEAFAGDDVIRDFLKEKREAVEASKPKDVDLTLPGWGEWGGVGLKPSAKKRRRFLIKAPEGPPRKDKNLPNVIINEKRNIHAAAHQVRVLPYPFTHHWQFERTIQTPIGSTWNTQRAFQKLTTPKVVTKPGHIINPIKAEDVGYRSSSRSDLSVIQRNPKRITTRHKKQLKKCSVD

SEQ ID NO: 325109 - protein, 320 aa, Artificial Sequence
  derived and/or modified sequence
MKGDFRKKKSEARTPLEQEIFNLLHKNKQPVTDPLLTPVEKASLRAMSLEEAKMRRAELQRARALQSYYEAKARREKKIKSKKYHKVVKKGKAKKALKEFEQLRKVNPAAALEELEKIEKARMMERMSLKHQNSGKWAKSKAIMAKYDLEARQAMQEQLSKNKELTQKLQVASESEEEEGGTEDVEELLVPDVVNEVQMNADGPNPWMLRSCTSDTKEAATQEDPEQLPELEAHGVSESEGEERPVAEEEILLREFEERRSLRKRSELSQDAEPAGSQETKDSGSQEVLSELRVLSQKLKENHQSRKQKASSEGTIPQVQ

SEQ ID NO: 325110 - DNA, 1812 bp, Artificial Sequence
  derived and/or modified sequence
atgaagggcgacttcagaaagaagaagagcgaggccagaacccccctggagcaggagatcttcaacctgctgcacaagaacaagcagcccgtgaccgaccccctgctgacccccgtggagaaggccagcctgagagccatgagcctggaggaggccaagatgagaagagccgagctgcagagagccagagccctgcagagctactacgaggccaaggccagaagagagaagaagatcaagagcaagaagtaccacaaggtggtgaagaagggcaaggccaagaaggccctgaaggagttcgagcagctgagaaaggtgaaccccgccgccgccctggaggagctggagaagatcgagaaggccagaatgatggagagaatgagcctgaagcaccagaacagcggcaagtgggccaagagcaaggccatcatggccaagtacgacctggaggccagacaggccatgcaggagcagctgagcaagaacaaggagctgacccagaagctgcaggtggccagcgagagcgaggaggaggagggcggcaccgaggacgtggaggagctgctggtgcccgacgtggtgaacgaggtgcagatgaacgccgacggccccaacccctggatgctgagaagctgcaccagcgacaccaaggaggccgccacccaggaggaccccgagcagctgcccgagctggaggcccacggcgtgagcgagagcgagggcgaggagagacccgtggccgaggaggagatcctgctgagagagttcgaggagagaagaagcctgagaaagagaagcgagctgagccaggacgccgagcccgccggcagccaggagaccaaggacagcggcagccaggaggtgctgagcgagctgagagtgctgagccagaagctgaaggagaaccaccagagcagaaagcagaaggccagcagcgagggcaccatcccccaggtgcagagagaggagcccgcccccgaggaggaggagcccctgctgctgcagagacccgagagagtgcagaccctggaggagctggaggagctgggcaaggaggagtgcttccagaacaaggagctgcccagacccgtgctggagggccagcagagcgagagaacccccaacaacagacccgacgcccccaaggagaagaagaagaaggagcagatgatcgacctgcagaacctgctgaccacccagagccccagcgtgaagagcctggccgtgcccaccatcgaggagctggaggacgaggaggagagaaaccacagacagatgatcaaggaggccttcgccggcgacgacgtgatcagagacttcctgaaggagaagagagaggccgtggaggccagcaagcccaaggacgtggacctgaccctgcccggctggggcgagtggggcggcgtgggcctgaagcccagcgccaagaagagaagaagattcctgatcaaggcccccgagggcccccccagaaaggacaagaacctgcccaacgtgatcatcaacgagaagagaaacatccacgccgccgcccaccaggtgagagtgctgccctaccccttcacccaccactggcagttcgagagaaccatccagacccccatcggcagcacctggaacacccagagagccttccagaagctgaccacccccaaggtggtgaccaagcccggccacatcatcaaccccatcaaggccgaggacgtgggctacagaagcagcagcagaagcgacctgagcgtgatccagagaaaccccaagagaatcaccaccagacacaagaagcagctgaagaagtgcagcgtggactag

SEQ ID NO: 325111 - DNA, 963 bp, Artificial Sequence
  derived and/or modified sequence
atgaagggcgacttcagaaagaagaagagcgaggccagaacccccctggagcaggagatcttcaacctgctgcacaagaacaagcagcccgtgaccgaccccctgctgacccccgtggagaaggccagcctgagagccatgagcctggaggaggccaagatgagaagagccgagctgcagagagccagagccctgcagagctactacgaggccaaggccagaagagagaagaagatcaagagcaagaagtaccacaaggtggtgaagaagggcaaggccaagaaggccctgaaggagttcgagcagctgagaaaggtgaaccccgccgccgccctggaggagctggagaagatcgagaaggccagaatgatggagagaatgagcctgaagcaccagaacagcggcaagtgggccaagagcaaggccatcatggccaagtacgacctggaggccagacaggccatgcaggagcagctgagcaagaacaaggagctgacccagaagctgcaggtggccagcgagagcgaggaggaggagggcggcaccgaggacgtggaggagctgctggtgcccgacgtggtgaacgaggtgcagatgaacgccgacggccccaacccctggatgctgagaagctgcaccagcgacaccaaggaggccgccacccaggaggaccccgagcagctgcccgagctggaggcccacggcgtgagcgagagcgagggcgaggagagacccgtggccgaggaggagatcctgctgagagagttcgaggagagaagaagcctgagaaagagaagcgagctgagccaggacgccgagcccgccggcagccaggagaccaaggacagcggcagccaggaggtgctgagcgagctgagagtgctgagccagaagctgaaggagaaccaccagagcagaaagcagaaggccagcagcgagggcaccatcccccaggtgcagtag

SEQ ID NO: 325112 - DNA, 1812 bp, Artificial Sequence
  derived and/or modified sequence
atgaagggggactttagaaaaaagaaatcagaagcacggacaccactcgagcaggagatctttaacctgctgcacaagaacaaacagcccgtgacagaccctctcctaacccctgtggagaaggccagcttgagagcaatgtcactggaagaggctaagatgagacgggctgaacttcaaagagctcgagccctccagtcttattacgaagcgaaggcccggcgtgagaagaagatcaaatcaaagaagtatcataaggtcgtcaagaagggtaaggcgaagaaggccttaaaggaattcgagcagctcagaaaagtgaatcctgcggccgccctggaggaactagagaagatcgaaaaggctagaatgatggaaagaatgtcgttgaagcatcaaaatagtgggaaatgggccaagtccaaagccattatggccaagtacgatcttgaagcccgccaggctatgcaagagcagctatcgaagaacaaagaactgactcagaaactccaggtagctagcgaatccgaagaggaagagggcggcaccgaagatgtggaggagcttttagttccagacgtggtgaatgaggtgcagatgaacgccgacggaccaaacccctggatgctgagaagctgcaccagcgacaccaaagaggcagcgacacaggaagacccggaacaactccctgagttggaagcccatggtgtgagtgagagtgaaggcgaggagaggccagtagccgaggaggagatcctgctgcgcgaatttgaggaacgacgttctctgagaaagcgatccgagctgagtcaggatgcagagcccgcggggagccaggaaaccaaagattcaggctcccaagaagtactgagtgagctgcgtgtgctaagccaaaagctgaaagaaaatcatcagtcacgtaagcaaaaagcaagttcagaagggaccattcctcaggtacagcgagaggaaccagctcctgaagaggaggagcccctgttattgcagcgacctgaacgcgttcaaacccttgaagaattggaagagctggggaaggaagagtgttttcagaataaggagctgccacgcccggtcctggaggggcagcagtccgaaaggacgcccaataatagacccgatgctcccaaagagaagaaaaagaaagaacagatgattgacctgcagaatttactcactacacaatccccgagcgttaagtctctggcggtgccaactatcgaagagctcgaggatgaagaggagcgcaatcacaggcagatgattaaagaggccttcgcaggagatgatgtgatccgtgattttcttaaagaaaaacgagaggctgtagaagcatcaaagccgaaggacgttgaccttacactgcctgggtggggagagtggggcggcgtgggcctcaagccctctgccaaaaagaggaggcgcttcctgatcaaagcaccagaggggcctccacgtaaggataaaaatctgccaaatgttattattaatgaaaagaggaacattcatgctgccgcccaccaggtacgagttctgccgtatcctttcacccaccactggcagtttgagaggactattcagactcccatcggcagtacatggaatacacaaagagcttttcaaaaactgactactccaaaggtggtgacaaaaccaggacacatcatcaacccaattaaggcggaggatgtcggctaccgtagcagcagcagatccgacctttccgtgatacagcgaaatcccaaaagaattaccacccgccacaagaagcaactcaaaaagtgttctgtggattag

SEQ ID NO: 325113 - DNA, 963 bp, Artificial Sequence
  derived and/or modified sequence
atgaaaggcgattttaggaagaagaaaagcgaggctcggacaccactggagcaggaaatttttaatctactgcacaagaacaagcagcccgtgactgacccattgctgaccccggtcgagaaggcttccctgagggcaatgtcactggaggaagctaagatgcgcagggctgagctccagcgcgcgcgagcattgcagtcttactacgaggctaaagctcgccgggagaagaaaatcaagtcaaagaaataccataaggtcgttaaaaaggggaaagcgaagaaggcccttaaagagttcgaacagctgagaaaggtgaaccctgcggctgccctggaggagctggagaagatcgaaaaggcaaggatgatggaaaggatgagcttgaaacatcagaatagtggaaaatgggccaaaagtaaggccatcatggccaagtacgacctagaggcacgtcaggctatgcaggagcagttgagtaaaaacaaggagctcacacagaaactgcaggttgctagcgagtcagaagaagaagagggtggaaccgaggatgttgaagagctgctggtgccagatgtcgtgaatgaggtacagatgaacgcagacggaccgaatccatggatgcttaggagttgtacatccgatactaaagaagcagcgactcaggaggaccctgaacagctgcctgagctcgaggctcacggagtcagcgagagcgaaggggaagaacgccccgtggccgaagaagagatcctactgagggagttcgaagagaggagatctcttaggaagaggtctgagcttagtcaagatgccgaacccgcaggtagtcaggaaacaaaagactcaggttcacaagaggtgctaagcgaactgcgtgtcctttctcagaagttgaaggaaaaccatcagtcgcgtaagcagaaagcatccagcgaaggcacgataccacaggtccagtag

SEQ ID NO: 325114 - DNA, 1812 bp, Artificial Sequence
  derived and/or modified sequence
atgaagggggacttcaggaagaagaagtctgaggcccggacccccctggagcaggagatcttcaacctgctgcacaagaacaagcagcctgtgacagaccccctgctgacccctgtggagaaggccagcctgcgggccatgagcctggaggaggccaagatgagaagagctgagctgcagagggcccgggccctgcagagctactatgaggccaaggcccggcgggagaagaagatcaagagcaagaagtaccacaaggtggtgaagaagggcaaggccaagaaggccctgaaggagtttgagcagctgaggaaggtgaacccagctgctgccctggaggagctggagaagattgagaaggccaggatgatggagaggatgagcctgaagcaccagaacagcggcaagtgggccaagagcaaggccatcatggccaagtatgacctggaggcccggcaggccatgcaggagcagctgagcaagaacaaggagctgacccagaagctgcaggtggccagcgagagcgaggaggaggagggcggcacagaagatgtggaggagctgctggtgcctgatgtggtgaatgaggtgcagatgaatgctgatggccccaacccctggatgctgcggagctgcaccagtgacaccaaggaggccgccacccaggaggaccctgagcagctgcctgagctggaggcccacggcgtgtctgagagcgagggggaggagaggcctgtggccgaggaggagatcctgctgcgggagtttgaggagaggaggagcctgaggaagaggtctgagctgagccaggatgctgagcctgctggcagccaggagaccaaggacagcggcagccaggaggtgctgtctgagctgcgggtgctgagccagaagctgaaggagaaccaccagagcaggaagcagaaggccagcagcgagggcaccatcccccaggtgcagcgggaggagcccgcccctgaggaggaggagcccctgctgctgcagaggcctgagcgggtgcagaccctggaggagctggaggagctgggcaaggaggagtgcttccagaacaaggagctgcccaggcctgtgctggagggccagcagagcgagaggacccccaacaacagaccagatgcccccaaggagaagaagaagaaggagcagatgattgacctgcagaacctgctgaccacccagagccccagcgtgaagagcctggccgtgcccaccatcgaggagctggaggatgaggaggagaggaaccaccggcagatgatcaaggaggcctttgctggagatgatgtgatccgggacttcctgaaggagaagcgggaggccgtggaggccagcaagcccaaggatgtggacctgaccctgcccggctggggcgagtggggcggcgtgggcctgaagcccagcgccaagaagagaagacgcttcctgatcaaggcccctgagggcccccccaggaaggacaagaacctgcccaacgtcatcatcaatgagaagaggaacatccatgctgctgcccaccaggtgcgggtgctgccctaccccttcacccaccactggcagtttgagaggaccatccagacccccatcggcagcacctggaacacccagagggccttccagaagctgaccacccccaaggtggtgaccaagccaggccacatcatcaaccccatcaaggcagaagatgtgggctaccgcagcagcagcagaagtgacctgagcgtcatccagaggaaccccaagaggatcaccaccaggcacaagaagcagctgaagaagtgcagcgtggactag

SEQ ID NO: 325115 - DNA, 963 bp, Artificial Sequence
  derived and/or modified sequence
atgaagggggacttcaggaagaagaagtctgaggcccggacccccctggagcaggagatcttcaacctgctgcacaagaacaagcagcctgtgacagaccccctgctgacccctgtggagaaggccagcctgcgggccatgagcctggaggaggccaagatgagaagagctgagctgcagagggcccgggccctgcagagctactatgaggccaaggcccggcgggagaagaagatcaagagcaagaagtaccacaaggtggtgaagaagggcaaggccaagaaggccctgaaggagtttgagcagctgaggaaggtgaacccagctgctgccctggaggagctggagaagattgagaaggccaggatgatggagaggatgagcctgaagcaccagaacagcggcaagtgggccaagagcaaggccatcatggccaagtatgacctggaggcccggcaggccatgcaggagcagctgagcaagaacaaggagctgacccagaagctgcaggtggccagcgagagcgaggaggaggagggcggcacagaagatgtggaggagctgctggtgcctgatgtggtgaatgaggtgcagatgaatgctgatggccccaacccctggatgctgcggagctgcaccagtgacaccaaggaggccgccacccaggaggaccctgagcagctgcctgagctggaggcccacggcgtgtctgagagcgagggggaggagaggcctgtggccgaggaggagatcctgctgcgggagtttgaggagaggaggagcctgaggaagaggtctgagctgagccaggatgctgagcctgctggcagccaggagaccaaggacagcggcagccaggaggtgctgtctgagctgcgggtgctgagccagaagctgaaggagaaccaccagagcaggaagcagaaggccagcagcgagggcaccatcccccaggtgcagtag

SEQ ID NO: 325116 - DNA, 1812 bp, Artificial Sequence
  derived and/or modified sequence
atgaagggcgacttccggaagaagaagagcgaggcccggacccccctggaacaggaaatttttaacttgctgcataaaaacaaacagcctgtgaccgaccctttactcacccccgttgagaaagcgagcctgcgcgccatgtcgcttgaagaagcaaagatgcgcagagcggaactccaacgtgctagagcattacagagttattacgaggcgaaagctcgccgagagaagaagatcaaaagcaagaaatatcacaaagtggtgaaaaagggcaaggcaaaaaaggcattaaaggagttcgaacaactacgaaaagtgaatcctgcggccgcgctagaagaattggagaagattgagaaagccagaatgatggaacgcatgagtctgaaacatcagaacagcgggaagtgggccaaatcaaaggccattatggccaaatacgacctggaggcaagacaagcaatgcaggagcagttgagcaaaaataaagagctgactcagaagctgcaggtcgcaagcgaatccgaagaggaagaaggcgggacagaggacgtggaggagctgttggtgccagatgtagtcaatgaggtacagatgaacgctgatggcccaaacccgtggatgcttcggtcctgcacgtccgacacaaaagaggccgccacacaggaagaccccgagcaattgcctgaattggaagcacatggagtgtctgaatccgagggagaggagcgccccgtagccgaggaagagatcctcttgagggaatttgaggagagacgtagcctgagaaagcgcagtgagttgagtcaagacgctgaaccggccggctctcaagaaaccaaagatagtggcagccaggaggtgctctccgagctgcgtgtgctttcccagaagctcaaggagaaccaccaatcccgaaagcagaaggcttcatccgagggtactatccctcaggtccagcgggaagagcccgccccggaggaagaagagccacttctgctgcaaagacccgaaagggtgcagactctcgaggaactggaggagctgggaaaggaagagtgtttccagaacaaggagctgccacggcctgttttggaagggcagcagtcagagcggacccccaataaccggcctgatgcacctaaagagaaaaaaaagaaagagcagatgatagatctgcaaaacctgcttaccacacaatctccatcggtcaagtcactggcagtgccaaccatagaagagctcgaggacgaggaggagagaaaccatcggcagatgattaaggaggcttttgccggcgacgacgttattagagacttcctcaaggagaagcgcgaggctgtcgaagcaagcaaacctaaggatgtggacctgaccctgcccggctggggtgagtggggcggcgtcgggctaaagccttccgcaaagaagagaagacgcttccttataaaggcacccgaagggcctccccggaaagacaaaaatctgccgaatgtgatcatcaacgagaagaggaacattcacgccgccgcacaccaagtcagagtactgccttacccctttactcatcactggcagtttgaacgcaccatccagacgcctataggcagcacatggaacactcaaagggctttccagaagctcactactcccaaggtagtgactaaaccaggccacatcatcaaccctattaaggccgaagacgtgggctacagatccagttcccggagcgacctctcagtcattcagcggaaccccaagaggattacaaccaggcacaagaagcagcttaagaagtgcagtgtggattag

SEQ ID NO: 325117 - DNA, 963 bp, Artificial Sequence
  derived and/or modified sequence
atgaagggcgacttccggaagaagaagagcgaggcccggacccccctcgagcaggagatctttaatctattacataagaataaacagcccgtgaccgaccctctcttgactccagtcgagaaggcttctctccgggctatgtctctggaagaggcaaaaatgaggagggcagagttgcagagggcgagagcactgcagagttattacgaggctaaggccagacgcgagaagaagatcaagagcaagaaatatcataaggtggtgaaaaaaggaaaagctaaaaaagccctcaaagagtttgaacagttacgaaaggttaaccccgctgccgctctggaggagctggaaaaaatcgagaaggctcgcatgatggagcggatgtcgctgaagcaccaaaactcaggcaagtgggccaaaagtaaggcaatcatggccaagtatgatcttgaggctcgccaagcaatgcaggaacagctgtccaaaaataaagaactgacacagaaactgcaggttgcttctgagtcagaggaggaggagggaggcaccgaggatgtcgaggagttgttagttccagatgtggtgaacgaggtgcaaatgaatgcagatggacctaatccttggatgctgagaagctgcacgtcagataccaaggaagcagcaacccaggaagaccccgagcagcttcctgagctcgaggcccacggagtgtccgaatctgagggcgaagaacgcccagtggctgaggaggaaattctgttgcgcgaattcgaggaacggcgatctcttcgtaaacgctcggagctgtcgcaggacgcagagcctgctgggtcccaggagacaaaagactccggcagccaggaggtactgagtgagctgagagtcctatcacagaaactcaaggagaaccaccagtctcgtaaacagaaggcttcctctgaaggaaccattcctcaagtgcagtag

SEQ ID NO: 325118 - DNA, 1812 bp, Artificial Sequence
  derived and/or modified sequence
atgaagggcgattttcgaaaaaaaaaatctgaagctcgtactcctctcgagcaggagatcttcaacctattgcacaaaaataaacaaccggtgaccgacccgctcctcaccccagtggaaaaggccagcttaagagcaatgtcactagaggaggctaaaatgaggagggcagagcttcagagggccagggctctgcagtcatactacgaggcaaaagcaaggcgggagaagaagataaagagcaaaaaataccacaaggtagttaagaagggcaaggctaagaaagcgctcaaggaatttgagcagctacgcaaagtgaatccggcagcagccctggaggagttagagaaaatagaaaaggcgcgaatgatggagagaatgagtctcaagcaccaaaacagcgggaagtgggccaaaagtaaggccattatggcaaaatatgatctcgaggccagacaggcaatgcaggagcagcttagcaagaacaaggagctgacccagaaattacaggtggcatccgaatcagaagaagaagaaggcggtaccgaggacgtcgaggaactgctagtcccagatgttgtcaatgaggtgcagatgaacgccgacgggcctaatccttggatgctgaggtcctgcacatccgacaccaaagaggctgccacccaggaggaccccgaacagctgcccgaactggaagcacacggggtctcagagagtgagggggaggagcggccagtagcagaagaggagatacttttgagggaatttgaggagcggagatcccttagaaagcgcagcgagctgtctcaagatgccgagcctgctggtagccaggaaaccaaagacagcggaagccaagaggtcttaagcgaacttcgcgtccttagccagaaattgaaagagaatcaccaaagtcgcaagcagaaagcttccagtgaggggaccattcctcaggtgcagagggaggaaccagcgcctgaggaggaggagcctctcttgctgcagagacctgaaagggtacagacgctcgaagaacttgaagagctggggaaagaggaatgttttcagaataaagaacttcctagacctgtgcttgaaggacagcaatcagagcgcaccccgaacaatcgccctgacgcaccgaaagaaaagaagaagaaagagcagatgattgatctgcaaaacttactgacaacgcagagtcctagcgtgaagagtctggcggtgcccaccatagaggagctggaggatgaagaagaacggaaccatcgacagatgatcaaggaggctttcgcaggagacgatgtcattcgtgattttctgaaagagaagcgtgaggccgtggaagcgtctaagccaaaagacgttgatctgaccttgcccggatggggggagtgggggggtgtcggcttaaagccaagcgcgaagaaaaggcgtaggttcctcatcaaggcccctgaaggccctccgaggaaggacaaaaacctgcctaatgtgattataaatgagaagcggaatatccatgctgccgcacaccaggttcgcgtgctcccatacccatttacgcaccattggcagttcgaaagaaccatccagacacccatcggctcaacttggaacacccaacgggctttccaaaaactgacaacccctaaggtcgtcactaagccgggacacattattaatcccatcaaggcagaggacgtcggttacagatccagctctcggtcggatctgtccgtcatacagagaaatccaaaaaggattaccaccaggcacaagaagcagctgaagaagtgttcggtagattag

SEQ ID NO: 325119 - DNA, 963 bp, Artificial Sequence
  derived and/or modified sequence
atgaagggcgactttcgcaaaaaaaaatctgaggcaagaactccccttgagcaggagatctttaatctgcttcataaaaataagcaaccggttactgaccccctcctcaccccagtagagaaggcctccctacgggcaatgagtcttgaggaagcaaaaatgcgtagagcagagctacagcgcgctagggccctgcagagttattatgaggccaaggccagacgggagaagaagatcaagagtaagaagtaccacaaggtcgtgaagaaggggaaagccaaaaaagcattaaaggagtttgaacagctgagaaaggtcaatccagcagcagcactggaggagctcgaaaagatcgagaaagcccgaatgatggagcgaatgagtctcaaacatcagaactctgggaagtgggcgaagagcaaggcaattatggcgaagtatgatctggaagctagacaggctatgcaggagcagttgtctaagaataaggaactgacgcaaaagctgcaggtcgccagtgaatcagaggaggaggaggggggaactgaggatgttgaagagttgttggtacccgacgtggtgaatgaggtgcagatgaacgctgatggtccaaatccctggatgttgagatcatgtacctctgacactaaagaagcggctacacaggaggatccagaacagttgcccgagttggaggcccatggtgtttccgagagtgaaggagaggaacgaccagtagccgaggaagagattctgctccgcgagtttgaagagcgcaggtccctgaggaagaggagcgagctatctcaagatgctgagccagccggttcccaggagacaaaggactcgggcagccaggaggttctctccgagttgcgggtgctatcacagaagctcaaggagaatcatcaatcccgcaagcaaaaggctagttctgaagggaccattcctcaggtgcagtag

SEQ ID NO: 325120 - DNA, 1965 bp, Artificial Sequence
  derived and/or modified sequence
atgaagggagactttagaaaaaaaaaatcagaggcaagaactcccctggagcaggaaattttcaacctcctccataagaacaagcagccagtgacagaccctttactgacccctgtggaaaaggcctctctccgagccatgagcctagaagaggcaaagatgcgacgagcagagcttcagagggctcgggctctgcagtcctactatgaggccaaggctcgaagagagaagaaaatcaaaagtaaaaagtatcacaaagtcgtgaagaaaggaaaggccaagaaagccctaaaagagtttgagcagctgcggaaggttaatccagctgcagcactagaagaactggaaaaaattgaaaaggccagaatgatggaaagaatgagccttaagcaccaaaacagtgggaaatgggccaagtcaaaggcaattatggccaaatatgacctggaggctcgccaagctatgcaggaacagttgtctaagaacaaagaactgacacagaaactccaggtagcctctgagagtgaggaagaggagggaggcacagaagatgtggaagaactccttgtccctgatgtagtgaatgaagtgcagatgaatgcagatgggccgaatccctggatgctcaggagctgcaccagtgacaccaaagaggctgcaacccaggaggaccctgagcaactgccagagcttgaggcccatggagtttctgaaagtgagggagaagaaagaccagtggcagaagaagaaattttgttgagagaatttgaggaaaggcgatcccttagaaaaagatctgagctcagccaagatgctgagccagcaggcagtcaagaaacaaaagattctggcagccaggaggtgctgtctgaattgagagtactatctcagaaattgaaggaaaaccatcagtccaggaagcaaaaagcaagttcagaggggactattccccaggtccagagagaggaacctgccccagaagaagaggagcccctgttgctacagagaccagagagagtacagacgctggaagagctagaagagctgggaaaagaagaatgttttcaaaataaggagcttcccagacctgtgttagaagggcagcagtcagagaggaccccaaataatcgccctgatgcccctaaggagaagaaaaagaaggagcaaatgatcgacctacagaacctcctaaccacacaatctccctccgtgaagtctttggcagttcccacaatagaggagctggaagatgaagaggagagaaaccataggcagatgataaaggaagcttttgctggggatgatgtcatcagagatttcttgaaagagaagagggaagctgtggaggcgagtaagccaaaggacgtggacctgacactacctggctggggcgagtggggtggtgtgggcctaaagcccagtgccaagaaaagacgccggtttctcattaaagcccctgagggtcctccaagaaaagataagaatttgccaaatgtgattatcaatgagaagcgcaacatccacgcagctgctcatcaggtacgagtgcttccatatccatttacccaccattggcaatttgaaaggaccatccagacccccataggatccacatggaacacccagagggctttccaaaagctgactactcccaaggtcgtcaccaagccaggccatatcattaaccccataaaagcagaagacgtgggctaccggtcttcctcaaggtcggacctgtctgtcatacagaggaatccaaaacgaatcaccacacgtcacaaaaaacagctgaagaaatgctctgtagattgagttgctggaggagtgacagccaggagccctgacttcacttcctttggtccagttttactctgatacagggtggattccaaaactggctcagtacattgcatgtagttaagccacattttaaaaataaaggcattttttaatctatttacctgg

SEQ ID NO: 325121 - DNA, 979 bp, Artificial Sequence
  derived and/or modified sequence
tttaaagtgtggctgcaggatgaagggagactttagaaaaaaaaaatcagaggcaagaactcccctggagcaggaaattttcaacctcctccataagaacaagcagccagtgacagaccctttactgacccctgtggaaaaggcctctctccgagccatgagcctagaagaggcaaagatgcgacgagcagagcttcagagggctcgggctctgcagtcctactatgaggccaaggctcgaagagagaagaaaatcaaaagtaaaaagtatcacaaagtcgtgaagaaaggaaaggccaagaaagccctaaaagagtttgagcagctgcggaaggttaatccagctgcagcactagaagaactggaaaaaattgaaaaggccagaatgatggaaagaatgagccttaagcaccaaaacagtgggaaatgggccaagtcaaaggcaattatggccaaatatgacctggaggctcgccaagctatgcaggaacagttgtctaagaacaaagaactgacacagaaactccaggtagcctctgagagtgaggaagaggagggaggcacagaagatgtggaagaactccttgtccctgatgtagtgaatgaagtgcagatgaatgcagatgggccgaatccctggatgctcaggagctgcaccagtgacaccaaagaggctgcaacccaggaggaccctgagcaactgccagagcttgaggcccatggagtttctgaaagtgagggagaagaaagaccagtggcagaagaagaaattttgttgagagaatttgaggaaaggcgatcccttagaaaaagatctgagctcagccaagatgctgagccagcaggcagtcaagaaacaaaagattctggcagccaggaggtgctgtctgaattgagagtactatctcagaaattgaaggaaaaccatcagtccaggaagcaaaaagcaagttcagaggggactattccccaggtccag

SEQ ID NO: 325122 - protein, 266 aa, Artificial Sequence
  derived and/or modified sequence
MPAAGMPPLPQSPPEIPPQGPPKISPQGPPQSPPQSPLDSCSSPLLWTRLDEESSSEEEDTATWHALPESESLPRYALDEKVAELVQFLLLKYQTKEPVTKAEMLTTVIKKYKDYFPMIFGKAHEFIELIFGIALTDMDPDNHSYFFEDTLDLTYEGSLIDDQGMPKNCLLILILSMIFIKGSCVPEEVIWEVLSAIGVCAGREHFIYGDPRKLLTIHWVQRKYLEYREVPNSAPPRYEFLWGPRAHSEASKRSLRVFIQAIQYHP

SEQ ID NO: 325123 - protein, 346 aa, Artificial Sequence
  derived and/or modified sequence
MPLFPNLPRLSFEEDFQNPSVTEDLVDAQDSIDEEEEDASSTSSSSFHFLFPSSSSLSSSSPLSSPLPSTLILGVPEDEDMPAAGMPPLPQSPPEIPPQGPPKISPQGPPQSPPQSPLDSCSSPLLWTRLDEESSSEEEDTATWHALPESESLPRYALDEKVAELVQFLLLKYQTKEPVTKAEMLTTVIKKYKDYFPMIFGKAHEFIELIFGIALTDMDPDNHSYFFEDTLDLTYEGSLIDDQGMPKNCLLILILSMIFIKGSCVPEEVIWEVLSAIGVCAGREHFIYGDPRKLLTIHWVQRKYLEYREVPNSAPPRYEFLWGPRAHSEASKRSLRVFIQAIQYHP

SEQ ID NO: 325124 - DNA, 801 bp, Artificial Sequence
  derived and/or modified sequence
atgcctgccgctggaatgcctcctctgcctcagtcaccaccggaaatacccccccagggcccccctaagattagccctcaagggcctccacagtccccgcctcagtcacccttagactcctgttcaagccccttgctctggacccggctggatgaagagtcctctagcgaggaggaggacacagcaacctggcacgccctgccagaaagtgagtctttgccgcgatacgccctagacgaaaaggtggctgaactggtccaatttctcctcctgaagtatcagactaaggagcctgtgacaaaggcagagatgctaaccactgtgataaagaagtataaggactatttcccaatgattttcggcaaagctcacgaattcattgaactgatattcggaattgccttgaccgatatggaccccgataatcattcgtatttcttcgaggatactctggatctgacatacgaaggttctctcatagatgatcagggcatgcctaaaaattgcctccttattttgattcttagtatgattttcatcaagggctcctgtgtgcccgaggaagtcatctgggaggtgctgtccgctataggtgtgtgtgcaggacgcgagcattttatctatggcgatcccaggaaacttctgactatccactgggtgcaacgcaaataccttgagtatagagaagttccaaactcggcgccaccacggtacgaattcctctggggtccacgggcacactctgaggcgagcaagcggagcctgagagtctttatccaggccattcagtatcacccatag

SEQ ID NO: 325125 - DNA, 1041 bp, Artificial Sequence
  derived and/or modified sequence
atgccactgttccccaatctgccccggttatctttcgaggaagacttccaaaacccatccgtgaccgaagacctggttgacgctcaggattccattgacgaggaggaggaggacgcctccagcacttcctcatcgagcttccactttctgtttccctcttccagttcactgagctctagctcacccctatcgtctccgttacccagcacactgatcctcggggtacccgaggacgaggacatgcccgccgctggtatgcctcctcttccccagtctcctcccgagataccacctcaggggccacccaaaatttcccctcaggggcccccacagtcaccaccccagagtcccctggacagctgtagctcaccactgctttggacccgcctcgatgaggagtcctcaagtgaggaggaggacacggctacttggcatgcacttccagaatctgaaagcctgccccgctatgccctggacgaaaaagtggcagagcttgtacagtttttactgctcaaatatcagactaaggaacctgtgacgaaagcggaaatgctgaccacagtgattaagaagtacaaggactacttccctatgatcttcggaaaagcccacgagtttattgagctgatctttggcatcgccctcaccgacatggatcccgataatcacagctacttctttgaggatacactggacctgacttacgaaggatccctaatcgacgatcagggcatgcccaaaaattgtctgctcatcctgattctgagtatgatcttcattaagggctcatgcgtgcctgaggaggtcatctgggaggtcctttccgccattggtgtttgtgcaggccgggagcatttcatctatggtgatccacggaaactacttacaatccactgggtccagcggaagtatctggaataccgggaggtgcccaattctgctccacctcgctacgaattcctgtggggtcccagagcccattctgaggcaagcaaacgctcactccgggtctttattcaggccatccaataccacccctag

SEQ ID NO: 325126 - DNA, 1041 bp, Artificial Sequence
  derived and/or modified sequence
atgcctctgttcccaaacctgcctagactctccttcgaagaggactttcagaacccttcagtaacggaagatctcgttgatgcccaggacagcatcgatgaggaggaggaggatgccagctccacatcatcttccagctttcatttcctgtttccctctagttcctctctctcctctagttcccccctgagttcacccttaccctcaacactcatcctcggagttcccgaagatgaggacatgcccgcggcaggtatgccacccctccctcaaagcccacccgaaatcccgcctcagggtcccccgaagatctctccacagggcccccctcagtctccaccccaaagtcccctggactcttgtagttcaccgctgctgtggactcgcctcgacgaggaatcttcttccgaggaggaggataccgccacttggcacgcgctcccagaaagtgaaagtctccctcgctatgcccttgatgaaaaagtggcggagctcgtacagttcctgctcctcaaataccagactaaggaacccgtcaccaaggcagagatgctgacgacagtgataaagaagtacaaggactactttcccatgattttcggcaaggctcacgaatttatcgagctgatctttgggatcgcgttgacagacatggacccagataaccatagctactttttcgaagataccctcgatctgacctacgagggctcactgatcgacgatcaaggcatgcctaagaattgtctcctcatcctcatcctgtccatgatctttatcaagggctcatgcgtacccgaagaagtcatttgggaggttcttagcgcaataggcgtttgcgcaggtagagagcattttatctacggagaccctcgaaagttgcttaccatacattgggtccagcgaaagtacctagaatacagggaggtcccgaactcagcacccccaagatacgagtttctctggggaccacgggcccattctgaggctagcaagcggagcctgcgtgtctttatccaggcgattcagtaccatccttag

SEQ ID NO: 325127 - DNA, 801 bp, Artificial Sequence
  derived and/or modified sequence
atgcctgctgctggcatgccacccctgccccagagccccccagagatccccccccagggcccccccaagatcagcccccagggccccccccagagccccccccagagccccctggacagctgcagcagccccctgctgtggacccggctggatgaggagagcagcagcgaggaggaggacacagccacctggcacgccctgcctgagagcgagagcctgcccaggtatgccctggatgagaaggtggccgagctggtgcagttcctgctgctgaagtaccagaccaaggagcctgtgaccaaggccgagatgctgaccaccgtcatcaagaagtacaaggactacttccccatgatctttgggaaggcccacgagttcatcgagctgatctttggaattgccctgacagacatggaccctgacaaccacagctacttctttgaggacaccctggacctgacctatgagggcagcctgattgatgaccagggcatgcccaagaactgcctgctgatcctgatcctgtccatgatcttcatcaagggcagctgtgtgcctgaggaggtgatctgggaggtgctgagcgccatcggcgtgtgtgccggccgggagcacttcatctacggggaccccaggaagctgctgaccatccactgggtgcagaggaagtacctggagtaccgggaggtgcccaacagcgccccacccaggtatgagttcctgtggggcccccgggcccacagcgaggccagcaagaggagcctgcgggtcttcatccaggccatccagtaccacccctag

SEQ ID NO: 325128 - DNA, 1041 bp, Artificial Sequence
  derived and/or modified sequence
atgcccctcttccccaacctgccccggctgagctttgaggaggacttccagaaccccagcgtgacagaggacctggtggatgcccaggacagcattgatgaggaggaggaggatgccagcagcaccagcagcagcagcttccacttcctgttccccagcagcagcagcctgagcagcagcagccccctgagcagccccctgcccagcaccctcatcctgggcgtgcctgaagatgaggacatgcctgctgctggcatgccacccctgccccagagccccccagagatccccccccagggcccccccaagatcagcccccagggccccccccagagccccccccagagccccctggacagctgcagcagccccctgctgtggacccggctggatgaggagagcagcagcgaggaggaggacacagccacctggcacgccctgcctgagagcgagagcctgcccaggtatgccctggatgagaaggtggccgagctggtgcagttcctgctgctgaagtaccagaccaaggagcctgtgaccaaggccgagatgctgaccaccgtcatcaagaagtacaaggactacttccccatgatctttgggaaggcccacgagttcatcgagctgatctttggaattgccctgacagacatggaccctgacaaccacagctacttctttgaggacaccctggacctgacctatgagggcagcctgattgatgaccagggcatgcccaagaactgcctgctgatcctgatcctgtccatgatcttcatcaagggcagctgtgtgcctgaggaggtgatctgggaggtgctgagcgccatcggcgtgtgtgccggccgggagcacttcatctacggggaccccaggaagctgctgaccatccactgggtgcagaggaagtacctggagtaccgggaggtgcccaacagcgccccacccaggtatgagttcctgtggggcccccgggcccacagcgaggccagcaagaggagcctgcgggtcttcatccaggccatccagtaccacccctag

SEQ ID NO: 325129 - DNA, 1100 bp, Artificial Sequence
  derived and/or modified sequence
gtcagcacagcagaggaggcccaggcaatatcaggagtcaaggttctgagggagcaaacctcttaggaagacaggcgacctgtgaggccctagagcaccaccttaagagaagaagagctgtaagccagcctttgtcagaaccatcatagaagatgaggatatgcctgctgctgggatgccacctcttccccagagtcctcctgagattcctccccagggtcctcccaagatctctccccagggtcctccgcagagtcctccccagagtcctctagactcctgctcatcccctcttttgtggacccgattggatgaggagtccagcagtgaagaggaggatacagctacttggcatgccttgccagaaagtgaatccttgcccaggtatgccctggatgaaaaggtggctgagttggtgcagtttcttctcctcaaatatcaaacaaaagagcctgtcacaaaggcagagatgctgacgactgtcatcaagaagtataaggactattttcccatgatcttcgggaaagcccatgagttcatagagctaatttttggcattgccctgactgatatggaccccgacaaccactcctatttctttgaagacacattagacctcacctatgagggaagcctgattgatgaccagggcatgcccaagaactgtctcctgattcttattctcagtatgatcttcataaagggcagctgtgtccccgaggaggtcatctgggaagtgttgagtgcaataggggtgtgtgctgggagggagcactttatatatggggatcccagaaagctgctcactatacattgggtgcagagaaagtacctggagtaccgggaggtgcccaacagtgctcctccacgttatgaatttttgtggggtccaagagcccattcagaggccagcaagagaagtcttagagtttttatccaagctatccagtatcatccctagtgcctttccatcctggtacatggatgctttgaaagatatggaagacagagcccaggccataattgacaccacagatgatgctactgccatggccagtgcaagccccagtgtcatgtccaccaacttctgtcctgagtga

SEQ ID NO: 325130 - DNA, 1290 bp, Artificial Sequence
  derived and/or modified sequence
gtcagcacagcagaggaggcccaggcaatatcaggagtcaaggcctgtgggatcccatcatccccatccctgctcacacgtttacctgctgctcctgaacaacaggcctcatgcctctctttccaaaccttccacgcctcagctttgaggaagacttccagaacccgagtgtgacagaggacttggtagatgcacaggattccatagatgaggaggaggaggatgcctcctccacttcctcttcctctttccactttttattcccctcctcctcttccttgtcctcatcctcacccttgtcctcacccttaccctctactctcattctgggtgttccagaagatgaggatatgcctgctgctgggatgccacctcttccccagagtcctcctgagattcctccccagggtcctcccaagatctctccccagggtcctccgcagagtcctccccagagtcctctagactcctgctcatcccctcttttgtggacccgattggatgaggagtccagcagtgaagaggaggatacagctacttggcatgccttgccagaaagtgaatccttgcccaggtatgccctggatgaaaaggtggctgagttggtgcagtttcttctcctcaaatatcaaacaaaagagcctgtcacaaaggcagagatgctgacgactgtcatcaagaagtataaggactattttcccatgatcttcgggaaagcccatgagttcatagagctaatttttggcattgccctgactgatatggaccccgacaaccactcctatttctttgaagacacattagacctcacctatgagggaagcctgattgatgaccagggcatgcccaagaactgtctcctgattcttattctcagtatgatcttcataaagggcagctgtgtccccgaggaggtcatctgggaagtgttgagtgcaataggggtgtgtgctgggagggagcactttatatatggggatcccagaaagctgctcactatacattgggtgcagagaaagtacctggagtaccgggaggtgcccaacagtgctcctccacgttatgaatttttgtggggtccaagagcccattcagaggccagcaagagaagtcttagagtttttatccaagctatccagtatcatccctagtgcctttccatcctggtacatggatgctttgaaagatatggaagacagagcccaggccataattgacaccacagatgatgctactgccatggccagtgcaagccccagtgtcatgtccaccaacttctgtcctgagtga

SEQ ID NO: 325131 - DNA, 1707 bp, Artificial Sequence
  derived and/or modified sequence
gaaaggagccccggggctggccaacaagcaagaagggaactctgtggaaggatagctatctcccaacacggagggaaggcccaggcgtcgcccagccactccttgctgtcacccctggacaaaacagatggagaggtgaaaacggagagccctggtcagccttggcagggttcgcggatgtgctttcccgacttgcactgtgggagtctgaaggacctgaagcattttgcgaggagtctggactcaggtcagcagagggaagcgtcttagacctggccaatcctcaaggtgctccaggaaccaggagttgaagacctgggtctgaggcacacttcctaaagtcagcacagcagaggaggcccaggcaatatcaggagtcaaggttctgagggagcaaacctcttaggaagacaggcgacctgtgaggccctagagcaccaccttaagagaagaagagctgcctgtgggatcccatcatccccatccctgctcacacgtttacctgctgctcctgaacaacaggcctcatgcctctctttccaaaccttccacgcctcagctttgaggaagacttccagaacccgagtgtgacagaggacttggtagatgcacaggattccatagatgaggaggaggaggatgcctcctccacttcctcttcctctttccactttttattcccctcctcctcttccttgtcctcatcctcacccttgtcctcacccttaccctctactctcattctgggtgttccagaagatgaggatatgcctgctgctgggatgccacctcttccccagagtcctcctgagattcctccccagggtcctcccaagatctctccccagggtcctccgcagagtcctccccagagtcctctagactcctgctcatcccctcttttgtggacccgattggatgaggagtccagcagtgaagaggaggatacagctacttggcatgccttgccagaaagtgaatccttgcccaggtatgccctggatgaaaaggtggctgagttggtgcagtttcttctcctcaaatatcaaacaaaagagcctgtcacaaaggcagagatgctgacgactgtcatcaagaagtataaggactattttcccatgatcttcgggaaagcccatgagttcatagagctaatttttggcattgccctgactgatatggaccccgacaaccactcctatttctttgaagacacattagacctcacctatgagggaagcctgattgatgaccagggcatgcccaagaactgtctcctgattcttattctcagtatgatcttcataaagggcagctgtgtccccgaggaggtcatctgggaagtgttgagtgcaataggggtgtgtgctgggagggagcactttatatatggggatcccagaaagctgctcactatacattgggtgcagagaaagtacctggagtaccgggaggtgcccaacagtgctcctccacgttatgaatttttgtggggtccaagagcccattcagaggccagcaagagaagtcttagagtttttatccaagctatccagtatcatccctagtgcctttccatcctggtacatggatgctttgaaagatatggaagacagagcccaggccataattgacaccacagatgatgctactgccatggccagtgcaagccccagtgtcatgtccaccaacttctgtcctgagtga

SEQ ID NO: 325132 - DNA, 333 bp, Artificial Sequence
  derived and/or modified sequence
atgagctgccagcagaaccagcagcagtgccagcccccccccaagtgtccccccaaatgcaccccgaagtgtcccccaaaatgtccccccaagtgccccccacagtgcccagccccatgcttcccagccgtttcaagttgttgtggaccaagctccggatcatgctgcggcccttcgtccggaggatgctgtagcagcggcgccggtggctgttcccttagccatcaccgcccccgactctttcatcgaagaaggcaccaatctccagactgctgtgagtccgagcccagcggaggctctggctgttgccactcctccggtgggtgttgttag

SEQ ID NO: 325133 - DNA, 801 bp, Artificial Sequence
  derived and/or modified sequence
atgcccgccgccggcatgccccccctgccccagagcccccccgagataccaccacagggacctccaaaaatctccccccagggaccaccgcagtcccccccgcagagccctctagactcgtgtagtagcccccttctgtggacccgacttgatgaggaatctagtagtgaagaagaagatacagctacttggcacgccctgcctgagtctgagagcttgccacgttacgcgctggatgagaaagtggcggaacttgtccagtttttgctgttaaagtaccagaccaaagaacccgtcacgaaggccgaaatgctaacaacggtaatcaagaagtacaaggactacttccccatgatctttggaaaagcccacgagtttatcgagttgatatttggcattgccctgaccgacatggatcccgacaaccattcatattttttcgaagataccttagacttaacctacgaagggagcctgatagatgaccagggcatgcccaaaaattgtctgctcatcctgatcttatctatgatatttattaagggtagttgtgttcctgaggaggtaatctgggaagttctgtcagctattggtgtctgcgcaggtcgggagcattttatttatggtgacccaagaaagctgcttacgattcactgggtgcagaggaagtatctggaataccgagaagttcctaattccgctccacctagatatgagttcctttggggacccagagcacactctgaagcttcaaaacgatctctgcgcgtgtttattcaggcgatccaataccacccttag

SEQ ID NO: 325134 - DNA, 1041 bp, Artificial Sequence
  derived and/or modified sequence
atgcccctgttccccaacctgccccggctgagcttcgaggaggactttcaaaatccaagtgtaactgaggacctcgtggacgcccaggattcaattgatgaagaggaggaagatgccagttcaacttcctcgtcgtcattccactttctcttccccagctcatcctctctttctagcagcagcccgctgtcctctcccctgcccagcaccctgattctcggggtacccgaagacgaagacatgccagcagctggtatgccaccactcccacaatcaccccccgaaatccccccccagggtcctcccaagatttccccgcagggtccccctcagagtccaccgcagagcccgctggatagctgttccagcccactgctttggacacgcctcgacgaagagtcttcctctgaggaggaagacactgctacctggcacgccctgccggagtccgagtccctcccacgctacgcgctggatgagaaagtggctgagctggtgcaattcctcctgctgaaataccaaacaaaagagccagtgacaaaagcagaaatgcttacaaccgtgatcaagaaatacaaagactatttccccatgatttttggcaaggcccacgaatttattgagctgattttcggtatagcacttacagacatggatcctgataatcattcctattttttcgaagatacactggatctgacctatgaagggagtctgatcgatgatcagggaatgccgaaaaactgcctgctgatactgatcctcagcatgatcttcataaagggtagctgtgtccctgaggaggttatctgggaagtcttgtccgctatcggcgtgtgcgctgggcgtgagcactttatttacggggatccccggaagctccttaccatccattgggttcagcgcaagtatctggaatatcgggaagtccctaactccgccccacccagatacgaatttctctggggaccaagagcacattcggaggccagtaaaagatcactgagggtattcatccaagccatccagtaccacccatag

SEQ ID NO: 325135 - DNA, 1041 bp, Artificial Sequence
  derived and/or modified sequence
atgcccctgttccccaacctgccccggctgagcttcgaggaggactttcagaacccaagcgtgaccgaggacttggtcgacgcacaggactctatcgacgaagaagaggaggacgcctccagtacctcttcatcctcgtttcatttcctgttcccttcttctagtagcctgtccagctcatcacccctgagtagtccgctgccctcgacactgattctaggggtgccagaggatgaggatatgcctgccgccggtatgccacccttgccacagtctccaccagagatcccgccgcaaggccctccaaaaatatccccccagggccccccacagtccccacctcagagccctcttgacagctgtagttccccacttttgtggactcggttagatgaggagagtagttcggaagaagaggataccgcaacctggcacgccttgccagaatctgaaagcttgccacggtatgcgctcgatgaaaaggtggccgaactggtccaatttttgctcttaaaatatcagaccaaagaacccgtgaccaaggccgagatgctcaccaccgtgataaaaaaatacaaagactacttccccatgattttcggcaaagcccatgaattcatcgagttgattttcgggatcgccctcaccgatatggatcctgataatcacagctatttctttgaggacactctggacctgacctatgagggttctcttattgacgatcagggtatgcccaaaaactgccttctgattctcatcctgagtatgatttttatcaagggcagctgcgtgccagaagaggtcatttgggaggtgctgtctgcaataggagtatgcgctggacgtgaacacttcatctatggggatccccgcaaattgcttacaatccactgggtgcagcgtaagtacctcgaataccgagaagtgccgaattcagcccctcctagatacgagttcctctggggtccacgtgcccactccgaggcatcgaagaggtcgttgcgggtgtttattcaggctatccagtaccacccctag

SEQ ID NO: 325136 - DNA, 801 bp, Artificial Sequence
  derived and/or modified sequence
atgccagccgctggcatgccgcctctcccccagtcccctcctgagattccaccacagggtcctcctaaaatctctccgcagggccctcctcagtccccaccacaatctcccctcgattcctgcagcagccctctcctctggaccaggctggatgaggaatcgtcctccgaagaagaagatactgccacctggcacgcgctgcctgagtcagagtccttgccacgctatgctcttgatgaaaaggtggctgaactggtacagtttctgcttctgaaataccagacaaaggagccagtgactaaggctgaaatgctaactaccgtgatcaaaaagtataaagattattttccaatgatatttgggaaagcacacgagtttattgagctgatatttggaattgcactcacagacatggacccagataatcatagctattttttcgaagataccttggacctgacgtacgagggaagtcttattgacgatcaaggaatgcctaaaaattgtctactcatcttaatcctgagcatgatcttcataaaagggtcttgcgtaccagaggaagtcatctgggaagtactgtcggcaatcggcgtttgcgccggaagagagcacttcatctatggagaccccagaaagttactgaccatccactgggttcagagaaagtaccttgagtatcgggaggtgcctaacagtgcacctcctagatatgaattcctctggggcccacgggcacacagcgaggcgagcaagagaagtcttcgggtgttcattcaggctatacaatatcatccttag

SEQ ID NO: 325137 - DNA, 1041 bp, Artificial Sequence
  derived and/or modified sequence
atgcctctctttcctaatttacctcggctatctttcgaggaggattttcagaacccgtccgttaccgaagacttggttgatgcccaagattccatcgatgaggaggaggaagatgcatcaagtacttctagcagcagcttccacttcctatttccaagctcttctagcctcagctctagctcacctttgtccagcccactgccctctactctgatcctcggagtgcccgaggacgaagacatgcctgctgcaggcatgccgcctcttccccagtccccaccagaaatcccaccacaaggcccacccaagatctctccacaaggcccaccccagtcaccacctcagtccccactggattcctgtagcagtcctttgctctggacacgcttggatgaagagtccagctccgaagaggaggatactgccacctggcacgcgctgcccgagtccgagtcactgcccaggtacgccttggatgaaaaagttgccgaactggtccagttcctcctgttgaagtaccagacaaaggaaccagtgacaaaagccgagatgctgaccaccgtgattaagaagtataaagattattttccaatgatctttggtaaggcccatgaattcatcgagctgatctttgggattgccctgaccgacatggatcccgacaatcactcttacttcttcgaagataccctggatctcacgtacgagggcagtctcatcgacgaccagggaatgccaaagaattgcctactgatcctgatcctctccatgatttttattaaggggtcctgtgttcccgaggaagtaatctgggaggtgttgtccgccatcggggtatgcgccggacgagaacatttcatttacggcgaccctaggaagcttctgacgatacactgggtccagaggaagtatctggaatatcgagaagtgcctaattcagctcctcccagatatgagttcctttggggaccgagagcgcactccgaagcaagcaaacgaagcctaagggtgttcatccaggctattcagtatcatccatag

SEQ ID NO: 325138 - DNA, 1041 bp, Artificial Sequence
  derived and/or modified sequence
atgcccctgttccccaatctcccccgtttgtcttttgaggaagactttcaaaacccctctgtcacagaagacctagtggacgcacaggactcgattgacgaggaggaagaggacgcctcctcaacttcctctagcagcttccacttcctcttccccagcagtagttcccttagcagctcatcacctttgtccagccccctgcctagcactctgatattgggcgtgcccgaagacgaggatatgccagccgcaggcatgcctcccctccctcagtccccacccgagattcctccacagggccctcctaaaataagtccgcagggaccacctcaatcgcccccacaatcaccgctggacagttgctcctctcctctgttatggactcgtttagatgaagagagctcaagcgaagaggaggacaccgccacctggcacgccctccccgaatctgagtctctcccccgttacgcgctcgacgagaaagtcgccgagctggtccagtttctcttgctgaagtatcagactaaggagcccgtaactaaggccgaaatgttgacgacggtgattaagaaatacaaggattactttcctatgattttcggcaaagctcatgagttcatagagctaatctttggcatcgctctcacagatatggatccggataaccattcctacttttttgaggacactctggatctgacctacgagggaagcctgatagatgatcaggggatgccgaagaattgcctcctaattctgatcctgtcgatgatcttcatcaaaggatcatgtgttcccgaggaagtgatctgggaagtcttaagcgccattggggtgtgtgcgggaagggaacacttcatttatggcgatcccagaaagttgctgactatacactgggtccagcggaaatacctagagtacagagaggtgccaaactccgcaccacctcgatatgagttcctatggggaccaagagcccactccgaagcctcaaagcggtccctgagagtgttcatccaggccatccagtatcacccctag

SEQ ID NO: 325139 - DNA, 801 bp, Artificial Sequence
  derived and/or modified sequence
atgcccgccgccggcatgccccccctgccccagagcccccccgagatccccccccagggcccccccaagatcagcccccagggccccccccagagccccccccagagccccctggacagctgcagcagccccctgctgtggaccagactggacgaggagagcagcagcgaggaggaggacaccgccacctggcacgccctgcccgagagcgagagcctgcccagatacgccctggacgagaaggtggccgagctggtgcagttcctgctgctgaagtaccagaccaaggagcccgtgaccaaggccgagatgctgaccaccgtgatcaagaagtacaaggactacttccccatgatcttcggcaaggcccacgagttcatcgagctgatcttcggcatcgccctgaccgacatggaccccgacaaccacagctacttcttcgaggacaccctggacctgacctacgagggcagcctgatcgacgaccagggcatgcccaagaactgcctgctgatcctgatcctgagcatgatcttcatcaagggcagctgcgtgcccgaggaggtgatctgggaggtgctgagcgccatcggcgtgtgcgccggcagagagcacttcatctacggcgaccccagaaagctgctgaccatccactgggtgcagagaaagtacctggagtacagagaggtgcccaacagcgccccccccagatacgagttcctgtggggccccagagcccacagcgaggccagcaagagaagcctgagagtgttcatccaggccatccagtaccacccctag

SEQ ID NO: 325140 - DNA, 1041 bp, Artificial Sequence
  derived and/or modified sequence
atgcccctgttccccaacctgcccagactgagcttcgaggaggacttccagaaccccagcgtgaccgaggacctggtggacgcccaggacagcatcgacgaggaggaggaggacgccagcagcaccagcagcagcagcttccacttcctgttccccagcagcagcagcctgagcagcagcagccccctgagcagccccctgcccagcaccctgatcctgggcgtgcccgaggacgaggacatgcccgccgccggcatgccccccctgccccagagcccccccgagatccccccccagggcccccccaagatcagcccccagggccccccccagagccccccccagagccccctggacagctgcagcagccccctgctgtggaccagactggacgaggagagcagcagcgaggaggaggacaccgccacctggcacgccctgcccgagagcgagagcctgcccagatacgccctggacgagaaggtggccgagctggtgcagttcctgctgctgaagtaccagaccaaggagcccgtgaccaaggccgagatgctgaccaccgtgatcaagaagtacaaggactacttccccatgatcttcggcaaggcccacgagttcatcgagctgatcttcggcatcgccctgaccgacatggaccccgacaaccacagctacttcttcgaggacaccctggacctgacctacgagggcagcctgatcgacgaccagggcatgcccaagaactgcctgctgatcctgatcctgagcatgatcttcatcaagggcagctgcgtgcccgaggaggtgatctgggaggtgctgagcgccatcggcgtgtgcgccggcagagagcacttcatctacggcgaccccagaaagctgctgaccatccactgggtgcagagaaagtacctggagtacagagaggtgcccaacagcgccccccccagatacgagttcctgtggggccccagagcccacagcgaggccagcaagagaagcctgagagtgttcatccaggccatccagtaccacccctag

SEQ ID NO: 325141 - protein, 184 aa, Artificial Sequence
  derived and/or modified sequence
MARSLVHDTVFYCLSVYQVKISPTPQLGAASSAEGHVGQGAPGLMGNMNPEGGVNHENGMNRDGGMIPEGGGGNQEPRQQPQPPPEEPAQAAMEGPQPENMQPRTRRTKFTLLQVEELESVFRHTQYPDVPTRRELAENLGVTEDKVRVWFKNKRARCRRHQRELMLANELRADPDDCVYIVVD

SEQ ID NO: 325142 - DNA, 755 bp, Artificial Sequence
  derived and/or modified sequence
aactagctccaccctctaacccccactccagctgcagacgccacggagtttgtgcaggggcgcagcgctccagccatggcgcgttcgctcgtccacgacaccgtgttctactgcctgagtgtataccaggtaaaaataagccccacacctcagctgggggcagcatcaagcgcagaaggccatgttggccaaggagctccaggcctcatgggtaatatgaaccctgagggcggtgtgaaccacgagaacggcatgaaccgcgatggcggcatgatccccgagggcggcggtggaaaccaggagcctcggcagcagccgcagcccccgccggaggagccggcccaggcggccatggagggtccgcagcccgagaacatgcagccacgaactcggcgcacgaagttcacgctgttgcaggtggaggagctggaaagtgttttccgacacactcaataccctgatgtgcccacaagaagggaacttgccgaaaacttaggtgtgactgaagacaaagtgcgggtttggtttaagaataaaagggccagatgtaggcgacatcagagagaattaatgctcgccaatgaactacgtgctgacccagacgactgtgtctacatcgtcgtggactagccctagaatgccatccttcttcaggagctagtttggagatgggtttttctggtgccactgacacctgggctgcccatgccgctcaggctacccttatctcctctgcacttatgttatcaataaag

SEQ ID NO: 325143 - DNA, 352 bp, Artificial Sequence
  derived and/or modified sequence
acctccttccccccccccgccacccgacacctcctaatcctaaactccttatccaccccaaccctccgggaaggcaggagtttgcacccttcgacacgccgcgtgcaaagcagggggatctatcctccctggccacatgggcctttggctgatggaaaggctgggctttgaggaagctgcatagttctggatgacgccccccctggcacacaggaatacattatgttacgacaagattccatccaatctgcggaattaaagaaaaaagagtccccctttcgtgctaagtgtcacgaaatcttctgctgcccgctgaagcaagtacaccacaaagagaacacagagccggaag

SEQ ID NO: 325144 - DNA, 2450 bp, Artificial Sequence
  derived and/or modified sequence
gtggctctctaggaccggagagttctttggaaggagagcgcgagcgagggagcgggcgagctccgagggggtgtgggtgtagggagagagagaaagagagcaggcagcggcggcggcggcagcggtggggaaaagcggattccgccccgaaccacaccgaggggagctcgtggtcgagacttgccgccctaagcactctcccaagtccgacccgctcggcgaggacttccgtcttctgagcgaaccttgtcaagcaagctgggatctatgagtggaaaggtgaccaagcccaaagaggagaaagatgcttctaagggagtttctctgcacaagctctctgtttgcctgctgtcgtccacataagatgtgacttgctcctgcttgccttcctccatgattgtgaggcctccccagccacgtggaactttctggatgacgccccccctggcacacaggaatacattatgttacgacaagattccatccaatctgcggaattaaagaaaaaagagtccccctttcgtgctaagtgtcacgaaatcttctgctgcccgctgaagcaagtacaccacaaagagaacacagagccggaagagcctcagcttaagggtatagttaccaagctatacagccgacaaggctaccacttgcagctgcaggcggatggaaccattgatggcaccaaagatgaggacagcacttacactctgtttaacctcatccctgtgggtctgcgagtggtggctatccaaggagttcaaaccaagctgtacttggcaatgaacagtgagggatacttgtacacctcggaacttttcacacctgagtgcaaattcaaagaatcagtgtttgaaaattattatgtgacatattcatcaatgatataccgtcagcagcagtcaggccgagggtggtatctgggtctgaacaaagaaggagagatcatgaaaggcaaccatgtgaagaagaacaagcctgcagctcattttctgcctaaaccactgaaagtggccatgtacaaggagccatcactgcacgatctcacggagttctcccgatctggaagcgggaccccaaccaagagcagaagtgtctctggcgtgctgaacggaggcaaatccatgagccacaatgaatcaacgtagccagtgagggcaaaagaagggctctgtaacagaaccttacctccaggtgctgttgaattcttctagcagtccttcacccaaaagttcaaatttgtcagtgacatttaccaaacaaacaggcagagttcactattctatctgccattagaccttcttatcatccatactaaagccccattatttagattgagcttgtgcataagaatgccaagcattttagtgaactaaatctgagagaaggactgccaaattttctcatgatctcacctatactttggggatgataatccaaaagtatttcacagcactaatgctgatcaaaatttgctctcccaccaagaaaatgtaaaagaccacaattgttcttcaaaaacaaacaaaacaaaacaaaacaaaattaactgcttaaatgttttgtcggggcaaacaaaattatgtgaattgtgttgttttcttggcttgatgttttctatctacgcttgattcacatgtactcttttctttggcatagtgcaactttatgatttctgaaattcaatggttctattgactttttgcgtcacttaatccaaatcaaccaaattcagggttgaatctgaattggcttctcaggctcaaggtaacagtgttcttgtggtttgaccaattgtttttctttctttttttttttttttagatttgtggtattctggtcaagttattgtgctgtactttgtgcgtagaaattgagttgtattgtcaaccccagtcagtaaagagaacttcaaaaaattatcctcaagtgtagatttctcttaattccatttgtgtatcatgttaaactattgttgtggcttcttgtgtaaagacaggaactgtggaactgtgatgttgtcttttgtgttgttaaaataagaaatgtcttatctgtatatgtatgagtcttcctgtcattgtatttggcacatgaatattgtgtacaaggaattgttaagactggttttccctcaacaacatatattatacttgctactggaaaagtgtttaagacttagctaggtttccatttagatcttcatatctgttgcatggaagaaagttgggttcttggcatagagttgcatgatatgtaagattttgtgcattcataattgttaaaaatctgtgttccaaaagtggacatagcatgtacaggcagttttctgtcctgtgcacaaaaagtttaaaaaagttgtttaatatttgttgttgtatacccaaatacgcaccgaataaactctttatattcattcaaagaaaaaaaaaaaaaaaaaaaaaaaaaaaaaa

SEQ ID NO: 325145 - protein, 210 aa, Artificial Sequence
  derived and/or modified sequence
MASHRHSGPSSYKVGTMAEKFDCHYCRDPLQGKKYVQKDGHHCCLKCFDKFCANTCVECRKPIGADSKEVHYKNRFWHDTCFRCAKCLHPLANETFVAKDNKILCNKCTTREDSPKCKGCFKAIVAGDQNVEYKGTVWHKDCFTCSNCKQVIGTGSFFPKGEDFYCVTCHETKFAKHCVKCNKGLVKAPVWWPMKDNPGTTTASTAKNAP

SEQ ID NO: 325146 - DNA, 833 bp, Artificial Sequence
  derived and/or modified sequence
gtatgttcacaaatgagccacagccttatcagctggggttgagggaagactggtctaggtgctgctcctgaacttggtctctgagccatggcttcccatagacactcaggtccctccagctacaaggtgggcaccatggcggagaagtttgactgccactactgcagggatcccttgcaggggaagaagtatgtgcaaaaggatggccaccactgctgcctgaaatgctttgacaagttctgtgccaacacctgtgtggaatgccgcaagcccatcggtgcggactccaaggaggtgcactataagaaccgcttctggcatgacacctgcttccgctgtgccaagtgccttcaccccttggccaatgagacctttgtggccaaggacaacaagatcctgtgcaacaagtgcaccactcgggaggactcccccaagtgcaaggggtgcttcaaggccattgtggcaggagatcaaaacgtggagtacaaggggaccgtctggcacaaagactgcttcacctgtagtaactgcaagcaagtcatcgggactggaagcttcttccctaaaggggaggacttctactgcgtgacttgccatgagaccaagtttgccaagcattgcgtgaagtgcaacaagggtttggtaaaggctccagtgtggtggcctatgaaggacaatcctggcacgactactgcttccactgcaaaaaatgctccgtgaatctggccaacaagcgctttgttttccaccaggagcaagtgtattgtcccgactgtgccaaaaagctgtaaactgacaggggctcctgtcctgtaaaatggcatttgaatctc

SEQ ID NO: 325147 - DNA, 539 bp, Artificial Sequence
  derived and/or modified sequence
tttttccctaacttaggcaccttggaagttgttttcaaccatatccagcctttgccgaatacatcctatctgccacacatccagcgtgaggtccctccagctacaaggtgggcaccatggcggagaagtttgactgccactactgcagggatcccttgcaggggaagaagtatgtgcaaaaggatggccaccactgctgcctgaaatgctttgacaagttctgtgccaacacctgtgtggaatgccgcaagcccatcggtgcggactccaaggaggtgcactataagaaccgcttctggcatgacacctgcttccgctgtgccaagtgccttcaccccttggccaatgagacctttgtggccaaggacaacaagatcctgtgcaacaagtgcaccactcgggaggactcccccaagtgcaaggggtgcttcaaggccattgtggcaggagatcaaaacgtggagtacaaggggaccgtctggcacaaagactgcttcacctgtagtaactgcaagcaagtcatcgggactggaagcttc

SEQ ID NO: 325148 - DNA, 601 bp, Artificial Sequence
  derived and/or modified sequence
tagcaggggctgtggggagcgggtgaggatgaagcggcaccttggaagttgttttcaaccatatccagcctttgccgaatacatcctatctgccacacatccagcgtgaggtccctccagctacaaggtgggcaccatggcggagaagtttgactgccactactgcagggatcccttgcaggggaagaagtatgtgcaaaaggatggccaccactgctgcctgaaatgctttgacaagttctgtgccaacacctgtgtggaatgccgcaagcccatcggtgcggactccaaggaggtgcactataagaaccgcttctggcatgacacctgcttccgctgtgccaagtgccttcaccccttggccaatgagacctttgtggccaaggacaacaagatcctgtgcaacaagtgcaccactcgggaggactcccccaagtgcaaggggtgcttcaaggccattgtggcaggagatcaaaacgtggagtacaaggggaccgtctggcacaaagactgcttcacctgtagtaactgcaagcaagtcatcgggactggaagcttcttccctaaaggggaggacttctactgcgtgacttgccatgag

SEQ ID NO: 325149 - DNA, 633 bp, Artificial Sequence
  derived and/or modified sequence
atggcctcccacagacacagcggcccatcaagctacaaggtgggtacaatggcggaaaagttcgactgtcactactgcagagatcccttacagggaaaaaagtacgttcagaaggacgggcatcactgctgcttaaaatgctttgacaaattttgcgcaaatacctgtgtcgagtgcaggaaacccattggcgcagacagcaaagaagtccactacaagaacaggttttggcatgatacttgctttcggtgtgccaaatgtctgcaccctctggctaacgagacattcgtggcgaaagacaataagatcttgtgcaataagtgcaccactcgcgaggattctcctaagtgtaaaggttgctttaaggccatcgttgccggagaccagaacgtggagtacaaagggactgtttggcacaaggactgcttcacttgctcaaactgtaagcaggtgattggaacgggctccttctttcccaagggggaggacttctattgcgtgacctgtcatgaaaccaaatttgccaagcactgtgtaaagtgtaataaaggactcgtcaaggcccccgtctggtggcccatgaaggacaaccccgggactacgacagctagtaccgcaaaaaacgcgccttag

SEQ ID NO: 325150 - DNA, 633 bp, Artificial Sequence
  derived and/or modified sequence
atggccagccaccgccacagcggccccagcagctacaaggtgggcaccatggccgagaagtttgactgccactactgccgggaccccctgcagggcaagaagtatgtgcagaaggatggccaccactgctgcctgaagtgctttgacaagttctgtgccaacacctgtgtggagtgcaggaagcccatcggggctgacagcaaggaggtgcactacaagaaccgcttctggcatgacacctgcttccgctgtgccaagtgcctgcaccccctggccaatgagacctttgtggccaaggacaacaagatcctgtgcaacaagtgcaccacccgggaggacagccccaagtgcaagggctgcttcaaggccatcgtggccggggaccagaatgtggagtacaagggcaccgtgtggcacaaggactgcttcacctgcagcaactgcaagcaggtgattggcaccggcagcttcttccccaagggggaggacttctactgtgtgacctgccacgagaccaagtttgccaagcactgtgtgaagtgcaacaagggcctggtgaaggcccctgtgtggtggcccatgaaggacaaccctggcaccaccacagccagcacagccaagaatgccccctag

SEQ ID NO: 325151 - DNA, 633 bp, Artificial Sequence
  derived and/or modified sequence
atggccagccaccggcacagcggccccagcagctacaaggtgggcacaatggccgaaaagttcgactgtcattattgccgagatcccctccagggtaagaaatatgtacagaaggacggccatcattgctgcttgaagtgctttgacaaattttgtgcaaacacctgtgtagagtgtcgaaaacccattggggctgactcaaaagaagtgcattacaaaaaccggttctggcacgatacttgttttcggtgtgccaagtgcctgcaccccctggccaatgaaacattcgtcgccaaagacaataagattctgtgcaataagtgcacaactcgggaagactctcctaagtgcaaagggtgcttcaaagcaatcgttgcgggggaccagaatgtagagtacaaaggcacggtatggcacaaggactgctttacctgctctaactgtaagcaggttatcggcactgggagcttctttcccaagggggaggatttctattgcgtgacatgccacgagaccaagtttgctaaacattgtgtgaaatgcaataagggcctggtgaaggcccccgtgtggtggccaatgaaagacaatccggggaccactactgcttcaacagcaaaaaacgcaccgtag

SEQ ID NO: 325152 - DNA, 633 bp, Artificial Sequence
  derived and/or modified sequence
atggccagccatcggcactccggtccttcatcctacaaggtggggacaatggctgaaaagtttgactgccattactgccgcgaccctctgcagggcaagaagtatgtgcagaaggacgggcatcattgctgcctgaagtgttttgacaaattttgtgcaaacacatgcgtcgagtgtcggaagcctatcggggctgattccaaagaggttcactataagaatcgcttctggcatgatacctgctttaggtgtgcgaagtgtctgcaccctctggcaaatgagacatttgtggctaaggacaataagattctgtgcaacaaatgtactactcgggaggacagcccaaagtgcaaagggtgctttaaggctatagtagctggcgatcagaacgtcgagtacaagggcaccgtctggcacaaggattgcttcacatgttcgaattgtaaacaggttatcggcactggaagttttttccctaaaggggaagacttctactgcgtgacctgccatgaaacaaagttcgctaagcactgtgtcaaatgcaacaagggtcttgtgaaggcaccagtgtggtggcctatgaaagacaaccctgggactaccactgcttccacggccaagaatgcgccttag

SEQ ID NO: 325153 - DNA, 633 bp, Artificial Sequence
  derived and/or modified sequence
atggccagccacagacacagcggccccagcagctacaaggtgggcaccatggccgagaagttcgactgccactactgcagagaccccctgcagggcaagaagtacgtgcagaaggacggccaccactgctgcctgaagtgcttcgacaagttctgcgccaacacctgcgtggagtgcagaaagcccatcggcgccgacagcaaggaggtgcactacaagaacagattctggcacgacacctgcttcagatgcgccaagtgcctgcaccccctggccaacgagaccttcgtggccaaggacaacaagatcctgtgcaacaagtgcaccaccagagaggacagccccaagtgcaagggctgcttcaaggccatcgtggccggcgaccagaacgtggagtacaagggcaccgtgtggcacaaggactgcttcacctgcagcaactgcaagcaggtgatcggcaccggcagcttcttccccaagggcgaggacttctactgcgtgacctgccacgagaccaagttcgccaagcactgcgtgaagtgcaacaagggcctggtgaaggcccccgtgtggtggcccatgaaggacaaccccggcaccaccaccgccagcaccgccaagaacgccccctag

SEQ ID NO: 325154 - protein, 369 aa, Artificial Sequence
  derived and/or modified sequence
MDTLFNTKFEGEPATHTQPGVQLQSNTYDLQESNVRLKLTIVSTVGFGDQINKEDSYKPIVEFIDAQFEAYLQEELKIRRVLHTYHDSRIHVCLYFIAPTGHSLKSLDLVTMKKLDSKVNIIPIIAKADAISKSELTKFKIKITSELVSNGVQIYQFPTDDESVAEINGTMNAHLPFAVIGSTEELKIGNKMMRARQYPWGTVQVENEAHCDFVKLREMLIRVNMEDLREQTHTRHYELYRRCKLEEMGFKDTDPDSKPFSLQETYEAKRNEFLGELQKKEEEMRQMFVQRVKEKEAELKEAEKELHEKFDRLKKLHQDEKKKLEDKKKSLDDEVNAFKQRKTAAELLQSQGSQAGGSQTLKRDKEKKK

SEQ ID NO: 325155 - DNA, 2609 bp, Artificial Sequence
  derived and/or modified sequence
gaagaactggaactggtctggccatagggggaagcggcgcgttaaatccgccccctctccataccctactttcaaggggtgggcggtagaggggaggttggggttggagcagcggcgagggggcccctcccttgcacctccccccaccggacttggtcgcgcccgaagtgtaacactttctctttgtcggaggagctcctctgtttcctgtgcagtagctcccgttgcggcggcacccgtggcagccctggcggacgcaggagcgatggcagcgaccgatatagctcgccaggtgggtgaaggttgccgaactgtccccctggctggacatgtggggtttgacagcttgcctgaccagctggtgaataagtccgtcagccagggcttctgcttcaacatcctgtgcgtgggagagacaggtttgggcaagtccaccctcatggacaccctgttcaacaccaaattcgaaggggagccagccacccacacacagccgggtgtccagctccagtctaatacctatgacctccaagagagcaacgtgaggctaaagctcacgatcgttagcacagttggctttggggaccagatcaacaaagaggacagctacaagcctatcgtggaattcatcgatgcacaattcgaggcctacctgcaggaagagctaaagatccgaagagtgctacacacctaccatgactcccgaatccatgtctgcttgtatttcattgcccccacgggtcattccctgaagtctctggacctagtgactatgaagaagctggacagtaaggtgaacatcatccccatcattgccaaagcagatgccatttcgaagagtgagctaacaaagttcaaaatcaaaatcaccagcgagcttgtcagcaacggagtccagatctatcagtttcctacagatgatgagtcggtggcagagatcaatggaaccatgaacgcccacctgccgtttgctgtcattggcagcacagaagaactgaagataggcaacaagatgatgagggcgcggcagtatccttggggcactgtgcaggttgaaaacgaggcccactgcgactttgtgaagctgcgggagatgctgattcgggtcaacatggaggatctgcgggagcagacccacacccggcactatgagctgtatcgccgctgtaagctggaggagatgggcttcaaggacaccgaccctgacagcaaacccttcagtttacaggagacatatgaggccaaaaggaacgagttcctaggggaactccagaaaaaagaagaggagatgagacagatgttcgtccagcgagtcaaagagaaagaagcggagctcaaagaggcagagaaagagctgcacgagaagtttgaccgtctgaagaaactgcaccaggacgagaagaagaaactggaggataagaagaaatccctggatgatgaagtgaatgctttcaagcaaagaaagacggcggctgagctgctccagtcccagggctcccaggctggaggctcacagactctgaagagagacaaagagaagaaaaattaactctgctgtttgctgcatgctgcatgagacccagggtcctgctttttttaatcttgtcttcagcagctgcactaagtctaaaggagaagactgccattatagaagagttagggttccatattgtctcaaatcagaaatcaaccaatttcctctcccctcaaactgcaagcacacacacatacaccacaccactcaacaagtgttcatgtgtccctgtgtccaggcaagaagctctcttcctgactcacatggtattttaaatggaagtgtcttgtcctaactaacaaggcaggaaaagaaccatcagagctggaaaatggacgaaatgtaacctcagagaaacaactacaggaccactcacccaagtgtaagtgactggggcaggacacctcagctgtgggtatgaaagtactgttctgttcacaaggttttgtttgagttttatgtttttcttttaaacatttctctggttcgatgggttgactgtctacagccactgttaaacatttctgaatatgcaagagaaagtcaagtgacatttgtatcttcttcagcattcgcagaccttctatagattccagcaaagggggaaaatgtatccactatctaacacttaggtagagaagggagggggtttaagcttagtgagggcaaaattactccattccaccttccgagaccagttagggttttgagagaggtttctgctcaacctgggatctggagggagagctttgatgttggtaaatctgccttgaattcattggtttaacttgcatcaaaataccatgtgagtgtgctcattctcatatatcccctaccaccatcaccaccattctgctgttcagtgtctcttgagagagcctctttgcatgttttccagaatctgtgtgtgtttttcctttcttctcctttgttctttttgctcaaaggtgtgaccagtcattgcccctctggggctttcattctccaggagaaacatcccagaaccagcactgtttagcctgatacctttctaatgtccatgtcaattttcaataaaattcaaagaaatgctaaa

SEQ ID NO: 325156 - DNA, 1617 bp, Artificial Sequence
  derived and/or modified sequence
gaagaactggaactggtctggccatagggggaagcggcgcgttaaatccgccccctctccataccctactttcaaggggtgggcggtagaggggaggttggggttggagcagcggcgagggggcccctcccttgcacctccccccaccggacttggtcgcgcccgaagtgtaacactttctctttgtcggaggagctcctctgtttcctgtgcagtagctcccgttgcggcggcacccgtggcagccctggcggacgcaggagcgatggcagcgaccgatatagctcgccaggtgggtgaaggttgccgaactgtccccctggctggacatgtggggtttgacagcttgcctgaccagctggtgaataagtccgtcagccagggcttctgcttcaacatcctgtgcgtgggagagacaggtttgggcaagtccaccctcatggacaccctgttcaacaccaaattcgaaggggagccagccacccacacacagccgggtgtccagctccagtctaatacctatgacctccaagagagcaacgtgaggctaaagctcacgatcgttagcacagttggctttggggaccagatcaacaaagaggacagctacaagcctatcgtggaattcatcgatgcacaattcgaggcctacctgcaggaagagctaaagatccgaagagtgctacacacctaccatgactcccgaatccatgtctgcttgtatttcattgcccccacgggtcattccctgaagtctctggacctagtgactatgaagaagctggacagtaaggtgaacatcatccccatcattgccaaagcagatgccatttcgaagagtgagctaacaaagttcaaaatcaaaatcaccagcgagcttgtcagcaacggagtccagatctatcagtttcctacagatgatgagtcggtggcagagatcaatggaaccatgaacgcccacctgccgtttgctgtcattggcagcacagaagaactgaagataggcaacaagatgatgagggcgcggcagtatccttggggcactgtgcaggttgaaaacgaggcccactgcgactttgtgaagctgcgggagatgctgattcgggtcaacatggaggatctgcgggagcagacccacacccggcactatgagctgtatcgccgctgtaagctggaggagatgggcttcaaggacaccgaccctgacagcaaacccttcagtttacaggagacatatgaggccaaaaggaacgagttcctaggggaactccagaaaaaagaagaggagatgagacagatgttcgtccagcgagtcaaagagaaagaagcggagctcaaagaggcagagaaagagctgcacgagaagtttgaccgtctgaagaaactgcaccaggacgagaagaagaaactggaggataagaagaaatccctggatgatgaagtgaatgctttcaagcaaagaaagacggcggctgagctgctccagtcccagggctcccaggctggaggctcacagactctgaagagagacaaagagaagaaaaattaactctgctgtttgctgcatgctgcatgagacccagggtcctgctttttttaatcttgtcttcagcagct

SEQ ID NO: 325157 - protein, 13 aa, Artificial Sequence
  derived and/or modified sequence
DLNHVCVISETGK

SEQ ID NO: 325158 - protein, 497 aa, Artificial Sequence
  derived and/or modified sequence
MTFNSFEGSKTCVPADINKEEEFVEEFNRLKTFANFPSGSPVSASTLARAGFLYTGEGDTVRCFSCHAAVDRWQYGDSAVGRHRKVSPNCRFINGFYLENSATQSTNSGIQNGQYKVENYLGSRDHFALDRPSETHADYLLRTGQVVDISDTIYPRNPAMYSEEARLKSFQNWPDYAHLTPRELASAGLYYTGIGDQVQCFCCGGKLKNWEPCDRAWSEHRRHFPNCFFVLGRNLNIRSESDAVSSDRNFPNSTNLPRNPSMADYEARIFTFGTWIYSVNKEQLARAGFYALGEGDKVKCFHCGGGLTDWKPSEDPWEQHAKWYPGCKYLLEQKGQEYINNIHLTHSLEECLVRTTEKTPSLTRRIDDTIFQNPMVQEAIRMGFSFKDIKKIMEEKIQISGSNYKSLEVLVADLVNAQKDSMQDESSQTSLQKEISTEEQLRRLQEEKLCKICMDRNIAIVFVPCGHLVTCKQCAEAVDKCPMCYTVITFKQKIFMS

SEQ ID NO: 325159 - protein, 16 aa, Artificial Sequence
  derived and/or modified sequence
MTFNSFEGSKTCVPAD

SEQ ID NO: 325160 - protein, 156 aa, Artificial Sequence
  derived and/or modified sequence
MTFNSFEGSKTCVPADINKEEEFVEEFNRLKTFANFPSGSPVSASTLARAGFLYTGEGDTVRCFSCHAAVDRWQYGDSAVGRHRKVSPNCRFINGFYLENSATQSTNSGIQNGQYKVENYLGSRDHFALDRPSETHADYLLRTGQVVDISDTIYPR

SEQ ID NO: 325161 - protein, 13 aa, Artificial Sequence
  derived and/or modified sequence
AGFLYTGEGDTVR

SEQ ID NO: 325162 - protein, 18 aa, Artificial Sequence
  derived and/or modified sequence
DHFALDRPSETHADYLLR

SEQ ID NO: 325163 - protein, 13 aa, Artificial Sequence
  derived and/or modified sequence
IFTFGTWIYSVNK

SEQ ID NO: 325164 - DNA, 1494 bp, Artificial Sequence
  derived and/or modified sequence
atgaccttcaacagcttcgagggcagcaagacctgcgtgcccgccgacatcaacaaggaggaggagttcgtggaggagttcaacagactgaagaccttcgccaacttccccagcggcagccccgtgagcgccagcaccctggccagagccggcttcctgtacaccggcgagggcgacaccgtgagatgcttcagctgccacgccgccgtggacagatggcagtacggcgacagcgccgtgggcagacacagaaaggtgagccccaactgcagattcatcaacggcttctacctggagaacagcgccacccagagcaccaacagcggcatccagaacggccagtacaaggtggagaactacctgggcagcagagaccacttcgccctggacagacccagcgagacccacgccgactacctgctgagaaccggccaggtggtggacatcagcgacaccatctaccccagaaaccccgccatgtacagcgaggaggccagactgaagagcttccagaactggcccgactacgcccacctgacccccagagagctggccagcgccggcctgtactacaccggcatcggcgaccaggtgcagtgcttctgctgcggcggcaagctgaagaactgggagccctgcgacagagcctggagcgagcacagaagacacttccccaactgcttcttcgtgctgggcagaaacctgaacatcagaagcgagagcgacgccgtgagcagcgacagaaacttccccaacagcaccaacctgcccagaaaccccagcatggccgactacgaggccagaatcttcaccttcggcacctggatctacagcgtgaacaaggagcagctggccagagccggcttctacgccctgggcgagggcgacaaggtgaagtgcttccactgcggcggcggcctgaccgactggaagcccagcgaggacccctgggagcagcacgccaagtggtaccccggctgcaagtacctgctggagcagaagggccaggagtacatcaacaacatccacctgacccacagcctggaggagtgcctggtgagaaccaccgagaagacccccagcctgaccagaagaatcgacgacaccatcttccagaaccccatggtgcaggaggccatcagaatgggcttcagcttcaaggacatcaagaagatcatggaggagaagatccagatcagcggcagcaactacaagagcctggaggtgctggtggccgacctggtgaacgcccagaaggacagcatgcaggacgagagcagccagaccagcctgcagaaggagatcagcaccgaggagcagctgagaagactgcaggaggagaagctgtgcaagatctgcatggacagaaacatcgccatcgtgttcgtgccctgcggccacctggtgacctgcaagcagtgcgccgaggccgtggacaagtgccccatgtgctacaccgtgatcaccttcaagcagaagatcttcatgagctag

SEQ ID NO: 325165 - DNA, 51 bp, Artificial Sequence
  derived and/or modified sequence
atgaccttcaacagcttcgagggcagcaagacctgcgtgcccgccgactag

SEQ ID NO: 325166 - DNA, 471 bp, Artificial Sequence
  derived and/or modified sequence
atgaccttcaacagcttcgagggcagcaagacctgcgtgcccgccgacatcaacaaggaggaggagttcgtggaggagttcaacagactgaagaccttcgccaacttccccagcggcagccccgtgagcgccagcaccctggccagagccggcttcctgtacaccggcgagggcgacaccgtgagatgcttcagctgccacgccgccgtggacagatggcagtacggcgacagcgccgtgggcagacacagaaaggtgagccccaactgcagattcatcaacggcttctacctggagaacagcgccacccagagcaccaacagcggcatccagaacggccagtacaaggtggagaactacctgggcagcagagaccacttcgccctggacagacccagcgagacccacgccgactacctgctgagaaccggccaggtggtggacatcagcgacaccatctaccccagatag

SEQ ID NO: 325167 - DNA, 1494 bp, Artificial Sequence
  derived and/or modified sequence
atgacctttaatagctttgagggatcaaaaacttgcgttcccgccgatattaacaaggaggaagaatttgttgaagagtttaaccgactaaagacctttgctaactttccaagcggctcccctgtttcagcttctacacttgctcgggcaggatttctatatactggggagggtgacacagttcgctgtttctcctgccatgcggcagttgacagatggcagtacggagactccgccgtggggcgccatcggaaagtatctcctaattgtagattcatcaacgggttctacctggaaaatagcgctacgcagtctactaattcaggcatccagaacggccagtataaagtggagaactaccttggttcacgcgatcatttcgcattggataggcccagcgagactcacgccgattatctgttgagaacagggcaggtggtggacattagcgacacaatatatccccgaaatccagcaatgtactcagaagaagcgcgactgaaaagtttccagaattggcccgattacgctcatctgacacctcgcgaactcgcctcagccggattgtattacacgggaattggtgatcaggttcagtgcttctgttgcggcggcaagctcaagaactgggagccctgcgacagagcctggtcagagcacaggcgccatttccccaactgcttctttgtgctagggcggaacttgaacattcgatccgagtctgacgccgtgagcagcgacagaaactttccaaattcaactaatctgccacgcaacccttcaatggccgactatgaagcacgcatttttacatttgggacatggatctacagcgtcaataaagaacagctggcgagggccggattttacgctctcggcgaaggtgataaggtcaaatgttttcactgtgggggcggactgacagactggaaaccatctgaggacccctgggaacagcacgccaaatggtaccccgggtgcaagtacctgctggaacagaagggacaagagtacattaataacattcacctaactcactctctggaagaatgcctcgtcagaacaaccgaaaagaccccttctctgacacggcgcatcgacgatacgatttttcagaaccctatggtacaggaggcaatcaggatgggtttttcctttaaggatataaagaagattatggaggagaaaatccagatcagtggttcaaactacaagtcactggaggtgctggtcgcagacctggtaaacgctcagaaggactctatgcaagatgagtcatcgcagacttctctacagaaagagatctccactgaggagcaactgcggcgcctgcaggaagagaagctctgtaaaatatgcatggacagaaacattgcaatcgtatttgtgccctgcggccacctggtgacctgcaaacaatgcgccgaggctgtggacaagtgtcctatgtgttataccgtgatcacctttaagcagaaaatatttatgtcctag

SEQ ID NO: 325168 - DNA, 1494 bp, Artificial Sequence
  derived and/or modified sequence
atgaccttcaattcatttgaaggctctaaaacgtgtgtgcctgcagatattaataaagaggaggagtttgtcgaagaatttaatagacttaaaacatttgctaactttcccagcgggtcacccgttagtgcaagcaccctggcccgagcaggcttcctgtacactggggaaggcgataccgtgcgctgcttcagctgccatgcagctgtcgatcgctggcagtatggagactctgcggtcggccgacataggaaggtgtcaccaaactgtagattcattaacggtttctatcttgagaatagcgctacacagagtactaactctggcatccagaatggacagtacaaggtcgaaaattacctcggatctagggaccacttcgctcttgaccgccctagcgagacacacgcagactacctcttgcgaaccggccaggttgtggacattagtgatacaatttacccccgcaaccctgccatgtactcagaggaggcgaggctgaagtccttccagaactggcctgactacgcacatctgacacccagagagctggcctctgccggcttgtattatactggcatcggcgaccaagtgcaatgcttctgctgtggcggcaaactgaaaaactgggagccatgcgaccgggcgtggtctgaacacaggagacactttccaaactgtttcttcgtgctgggcagaaacctgaacatccggtccgagtctgacgctgtttcttccgatcggaactttccaaactccacgaacctgcctcggaatccgtctatggccgactatgaagctcggatttttacattcgggacctggatttactccgtgaataaggagcagcttgcacgagcaggcttctacgcactgggcgaaggagacaaagtgaagtgcttccattgtgggggcggactgaccgattggaaaccaagtgaggatccatgggaacaacacgctaagtggtatcctggatgtaaatacctgctcgagcagaagggacaggaatacattaataatattcatctcacccactctctggaggaatgtctcgtgcgaacaactgagaaaactcccagcctgacaagacgtatagacgacaccatcttccagaaccccatggtgcaggaggcaatccggatgggattcagcttcaaggacataaaaaagataatggaagagaagatccagattagtggctctaactacaagagcctggaggtgctggtagctgatttagtcaacgctcaaaaagatagcatgcaggatgaatctagtcagacatctctgcagaaggaaatttctaccgaagagcagctccggcggttacaggaagagaagctctgcaaaatctgcatggaccggaacatcgcaattgtttttgtgccctgtgggcatttggtgacgtgcaaacaatgtgccgaggcagtggataaatgtcccatgtgctataccgtgatcacattcaagcagaagattttcatgagctag

SEQ ID NO: 325169 - DNA, 51 bp, Artificial Sequence
  derived and/or modified sequence
atgacctttaactcattcgagggctcaaaaacatgtgtgcctgctgattag

SEQ ID NO: 325170 - DNA, 471 bp, Artificial Sequence
  derived and/or modified sequence
atgacctttaactcctttgagggcagcaaaacttgcgttcctgctgatatcaataaagaagaggagttcgtggaggagttcaaccgtcttaaaacattcgcaaattttccaagcggtagccctgtgagcgcttccaccctagctcgggcagggttcctatatacaggcgaaggagataccgtccgctgtttctcctgtcacgcggcagtggaccgatggcaatacggggattccgccgttgggcgccatcggaaggtgtcgcctaactgccggttcattaacggattctacctggagaattccgcgacacagtctacgaacagcggcattcaaaatggccaatataaggttgaaaactacctcgggtctcgagaccatttcgccctcgatcggccatccgagacccacgctgattacttgttacgtacagggcaggtcgtagatatttctgataccatctatcctcggtag

SEQ ID NO: 325171 - DNA, 1494 bp, Artificial Sequence
  derived and/or modified sequence
atgacgttcaactcttttgagggcagcaaaacctgtgtgcctgcagacatcaacaaggaagaggagtttgtggaagagttcaaccggctgaagaccttcgcaaatttcccttccgggagcccggtgagcgccagcacactcgcccgcgcaggctttttatacacaggcgagggcgataccgtgcgctgctttagctgtcacgcagcagtggatcgttggcagtacggtgactcggccgtgggtcggcatcggaaggtgtcgccaaactgtcgttttattaatggcttctacctggagaattctgccactcaaagcaccaactcaggtatccagaatggacagtacaaggtggagaattacctgggaagcagagatcactttgctttggacagaccctcagaaacacacgctgactatctgcttcggaccggtcaggtggttgatattagcgacacgatctacccccgcaatcccgctatgtattctgaggaagcccgcctcaaatcattccaaaattggcccgactatgctcacctcacgcctagagaactcgcctctgccggactctattacactggcatcggagaccaggttcagtgtttttgctgcggcgggaagctaaaaaattgggaaccctgcgatcgggcctggagcgaacacaggaggcactttcctaattgcttcttcgtcctcggccgcaatctgaatatcaggagtgaaagtgatgcagttagctcagaccgcaactttccaaacagtactaatctcccacggaacccatcaatggcagattatgaagctcgcatcttcaccttcggaacatggatatactccgtcaacaaggaacagttagctcgcgctgggttctacgcactgggcgaaggcgacaaggttaaatgcttccactgcggcggaggcctgacggattggaagccgagcgaggatccatgggagcagcatgccaagtggtaccccggatgcaagtatctcctggagcagaagggccaggaatatattaacaatatacatcttactcattctctcgaagagtgcttggtgcggacaaccgagaagaccccatccctgaccagaaggattgacgacacaatctttcagaatcctatggtacaggaggccataaggatgggttttagctttaaagatatcaagaagattatggaagaaaaaatacagatctctggcagcaactataaatccttggaagtactggttgctgaccttgttaatgctcagaaagatagtatgcaagatgaatcttcccagaccagtctccagaaagagataagtactgaggaacagctgcggagattacaggaggagaaattgtgcaaaatctgcatggacagaaatatcgccatcgtattcgtgccttgtggacatctggtgacatgcaaacagtgtgccgaagccgttgataaatgtccaatgtgctatacagtcattacatttaagcagaagattttcatgagctag

SEQ ID NO: 325172 - DNA, 1494 bp, Artificial Sequence
  derived and/or modified sequence
atgaccttcaacagctttgagggcagcaagacctgtgtgcctgctgacatcaacaaggaggaggagtttgtggaggagttcaaccggctgaagacctttgccaacttccccagcggcagccctgtgtctgccagcaccctggcccgggccggcttcctgtacacaggagagggggacacagtgcgctgcttcagctgccacgccgctgtggaccgctggcagtatggagacagcgctgtgggccgccacaggaaggtgagccccaactgccgcttcatcaatggcttctacctggagaacagcgccacccagagcaccaacagcggcatccagaatggccagtacaaggtggagaactacctgggcagccgggaccactttgccctggaccggcccagcgagacccatgctgactacctgctgaggacaggccaggtggtggacatcagtgacaccatctaccccaggaacccagccatgtacagcgaggaggcccggctgaagagcttccagaactggccagactatgcccacctgaccccccgggagctggccagcgctggcctgtactacacaggcatcggggaccaggtgcagtgcttctgctgcggcggcaagctgaagaactgggagccctgtgaccgggcctggagcgagcacagaagacacttccccaactgcttctttgtgctgggcaggaacctgaacatccgctctgagagtgatgctgtgtccagtgacaggaacttccccaacagcaccaacctgcccaggaaccccagcatggctgactatgaggcccgcatcttcaccttcggcacctggatctacagcgtgaacaaggagcagctggcccgggccggcttctacgccctgggggagggggacaaggtgaagtgcttccactgcggcggcggcctgacagactggaagcccagcgaggacccctgggagcagcacgccaagtggtacccaggctgcaagtacctgctggagcagaagggccaggagtacatcaacaacatccacctgacccacagcctggaggagtgcctggtgaggaccacagagaagacccccagcctgaccaggagaattgatgacaccatcttccagaaccccatggtgcaggaggccatccgcatgggcttctccttcaaggacatcaagaagatcatggaggagaagatccagatcagcggcagcaactacaagagcctggaggtgctggtggccgacctggtgaatgcccagaaggacagcatgcaggatgagagcagccagaccagcctgcagaaggagatcagcacagaggagcagctgcggcggctgcaggaggagaagctgtgcaagatctgcatggacaggaacatcgccatcgtgtttgtgccctgtggccacctggtgacctgcaagcagtgtgccgaggccgtggacaagtgccccatgtgctacaccgtcatcaccttcaagcagaagatcttcatgtcctag

SEQ ID NO: 325173 - DNA, 51 bp, Artificial Sequence
  derived and/or modified sequence
atgaccttcaacagctttgagggcagcaagacctgtgtgcctgctgactag

SEQ ID NO: 325174 - DNA, 471 bp, Artificial Sequence
  derived and/or modified sequence
atgaccttcaacagctttgagggcagcaagacctgtgtgcctgctgacatcaacaaggaggaggagtttgtggaggagttcaaccggctgaagacctttgccaacttccccagcggcagccctgtgtctgccagcaccctggcccgggccggcttcctgtacacaggagagggggacacagtgcgctgcttcagctgccacgccgctgtggaccgctggcagtatggagacagcgctgtgggccgccacaggaaggtgagccccaactgccgcttcatcaatggcttctacctggagaacagcgccacccagagcaccaacagcggcatccagaatggccagtacaaggtggagaactacctgggcagccgggaccactttgccctggaccggcccagcgagacccatgctgactacctgctgaggacaggccaggtggtggacatcagtgacaccatctaccccaggtag

SEQ ID NO: 325175 - DNA, 1494 bp, Artificial Sequence
  derived and/or modified sequence
atgaccttcaacagcttcgagggcagcaagacctgcgtgcccgccgacattaataaggaggaagaattcgtggaagagttcaatagactgaagacattcgctaacttccccagcggctcccccgtgtcagcctctaccctggccagagcgggctttttgtacaccggcgagggcgatacagtcagatgtttttcttgccacgccgccgtagacaggtggcagtatggggacagcgcggtcgggcggcaccggaaggtgtcccccaactgtcgctttattaatggcttttaccttgaaaacagtgctacccagtcaacaaactccggaatccagaatgggcagtataaggttgagaactacctcggcagtcgtgaccactttgccttagaccgccctagtgaaacacacgcagactatttgctgagaaccggacaggttgtggacatcagcgacaccatttaccctaggaatcccgctatgtattctgaagaggcgcgacttaagtccttccaaaattggcctgattacgcccacctgactcctagagaattagcaagtgccgggctttattacacgggcataggcgatcaggtgcagtgcttttgttgtggcggaaagcttaaaaattgggaaccatgcgacagagcatggagtgagcaccggagacacttccccaattgcttttttgtcctgggccggaacctaaacatccggtctgagtccgacgcggtcagtagcgatcgcaactttcccaatagtacaaatctacctcggaacccctctatggccgactacgaagctcggattttcacatttggaacttggatctactctgtaaacaaggagcagcttgccagggccggcttttatgccctgggcgagggagataaagtcaagtgtttccactgcgggggtgggcttacagattggaaaccgagcgaggacccttgggagcaacatgcaaagtggtatccagggtgcaagtatctgctggagcaaaaaggacaggagtatataaataatattcaccttacacactcactcgaggaatgtcttgtcagaaccaccgaaaagaccccatctctgacacggcggatagacgataccatcttccagaaccctatggtgcaggaagctatccggatggggtttagtttcaaggacattaaaaaaattatggaggagaagatccagattagcggcagcaattataagtctctcgaagtgctggtggctgacctcgtcaatgcccagaaggattcgatgcaggatgagtcttctcagaccagtttacagaaggagattagtaccgaggagcagctgcggaggctgcaggaagagaagttgtgtaaaatctgcatggacaggaacatcgctattgtcttcgtgccgtgcggccacctcgtgacgtgtaagcaatgtgctgaggctgtcgataaatgccctatgtgctatacagtgatcactttcaagcagaaaatcttcatgagctag

SEQ ID NO: 325176 - DNA, 1494 bp, Artificial Sequence
  derived and/or modified sequence
atgaccttcaacagcttcgagggcagcaagacctgcgtgcccgccgacattaacaaggaggaagagtttgtcgaggagtttaacaggctgaagacatttgcgaactttccttcaggcagtccagtgagcgcctccacgctagccagagctggcttcttatatactggcgagggcgacacagtgagatgcttctcttgtcatgctgcggtggacaggtggcaatatggggacagtgcggtggggcggcatcggaaggtctcccctaactgcaggttcattaatgggttctacctcgaaaactctgcaacccagtcgaccaattctggcatccagaacggccaatacaaggtggaaaactatctgggctcgcgggaccactttgcactggaccggcctagcgagactcacgcggactacttgctacgcaccggtcaggtcgtggacatcagcgatacaatctatcccagaaaccctgctatgtacagtgaagaagcccggctgaaatcatttcagaactggcccgattatgcacatcttaccccaagagaactggccagcgctgggctgtactacaccggcatcggagatcaggtccagtgcttctgttgcggaggcaagctgaaaaactgggaaccctgcgatagagcctggtctgagcataggcgccacttcccgaactgcttcttcgtgcttggccggaatctgaacatcagaagtgaaagcgacgctgtttcctcggacaggaactttcctaacagcacaaatctcccccgcaacccttccatggccgactatgaggctcgcatattcacattcgggacttggatctactccgtgaataaggagcagctggccagagctggcttttacgcacttggagagggtgataaggtgaaatgctttcattgtggaggagggctgacagattggaaaccctccgaggatccctgggagcaacatgctaaatggtacccagggtgtaaatatttactggaacaaaagggtcaggagtacataaataatatccatttgacccactcgttggaggagtgtctggtgcggactacagagaaaaccccgagcctgactagacgaatagacgataccatctttcagaatcctatggttcaggaagccatcaggatgggcttcagcttcaaagatattaagaaaattatggaagagaagatccaaatctctggcagtaattataagtcccttgaggtcctggtggccgatctcgtgaatgcccagaaagactctatgcaagacgagtcctcgcagacatcactccagaaagaaataagcactgaggaacagctgcggagactacaggaagaaaaattgtgtaagatatgtatggatcgcaacattgccatcgtgtttgtgccctgcggacatctggtcacgtgcaagcaatgcgctgaggccgtggacaagtgccctatgtgttacaccgtcataactttcaaacaaaagatctttatgtcttag

SEQ ID NO: 325177 - DNA, 51 bp, Artificial Sequence
  derived and/or modified sequence
atgaccttcaacagcttcgagggcagcaagacctgcgtgcccgccgattag

SEQ ID NO: 325178 - DNA, 471 bp, Artificial Sequence
  derived and/or modified sequence
atgaccttcaacagcttcgagggcagcaagacctgcgtgcccgccgatattaataaagaggaggaatttgtagaggagttcaacagattgaagaccttcgcaaacttcccttctgggtcccctgtttccgcttccacccttgctagagccggcttcctctatacaggcgagggcgatacggtgcgctgtttttcatgtcatgccgcagtcgacagatggcaatatggcgactccgccgttggaaggcaccggaaagtcagccccaactgccgcttcattaatggcttttatctggagaacagtgccactcagagtacaaactctggaatacagaacggacagtacaaggttgaaaactatctggggagcagagatcactttgcactcgaccggccttccgaaacacacgccgactacctcttaagaacagggcaagttgttgacatcagcgacaccatatatccacgctag

SEQ ID NO: 325179 - DNA, 1494 bp, Artificial Sequence
  derived and/or modified sequence
atgaccttcaacagcttcgagggcagcaagacctgcgtgcccgccgacatcaacaaggaagaagaattcgtggaagagtttaatcggctcaaaacattcgccaactttccgtcaggttcccctgtttctgcgagcactttggcccgcgccggattcctgtacaccggcgaaggcgataccgtgcggtgtttcagctgtcacgccgctgtggatcgctggcagtacggggacagcgctgtcgggcgccaccgcaaagtcagcccgaactgtaggtttatcaacgggttttatctggaaaactctgccacccagagtacaaactccggcatccaaaacggccagtacaaggtggaaaactatctgggatctcgtgatcactttgctctagatcggcctagtgagacgcacgccgattaccttctgcgcacagggcaggtagttgatatcagcgatacaatttatccaagaaacccggccatgtattccgaagaggcccgactgaagagttttcagaattggccagattatgcccacctcactccacgggaattggcttccgccggattgtactacaccggcatcggagatcaggtccagtgcttttgctgcggaggtaaactcaaaaactgggagccttgcgatagagcctggagcgaacatcggcgacattttccgaattgtttctttgtccttggccgcaacctgaatattaggtctgagagcgacgcggtgtcttctgacaggaattttcccaactccactaatttgccaaggaatcctagcatggcagactacgaggcccgcatctttacctttggtacgtggatttattccgtgaataaagaacagctcgcgagagccggcttctacgctctcggagagggcgataaggtgaaatgcttccactgcgggggcggattgactgattggaagcctagtgaggacccatgggaacagcacgctaagtggtacccgggatgcaaatatctgctggagcaaaaaggtcaggaatacattaataacatccacctgacccacagtctggaggaatgcctagtaaggaccactgagaaaacaccctcactgacaaggcggattgacgacacaatattccaaaacccaatggtgcaagaagccattcggatggggttcagcttcaaggatatcaagaaaatcatggaggaaaagattcagatttccgggagcaattataaatctctggaagtcctggtggccgatcttgtgaacgcacagaaggactctatgcaggacgagtccagccaaactagcttgcagaaggaaatttccaccgaagagcagctccgaagattgcaggaggagaagctctgtaagatctgtatggatcggaacatcgccatcgttttcgtaccatgtgggcatcttgtgacttgcaaacaatgcgctgaagcggtagacaaatgtcctatgtgttataccgtcattacctttaaacagaaaatctttatgtcatag

SEQ ID NO: 325180 - DNA, 1494 bp, Artificial Sequence
  derived and/or modified sequence
atgacatttaactcttttgagggctccaagacatgtgtccctgctgatatcaacaaggaggaagagtttgtggaggagttcaatagacttaaaacttttgcgaacttccccagcggcagtcccgtgtctgccagcacgcttgctagagcaggttttctgtataccggggagggtgacacagtgcggtgtttctcatgccatgctgccgtggatcggtggcaatacggagacagcgctgtcggaagacaccgcaaagttagtcctaactgtcgtttcatcaacggattttacttggagaattccgccacccagtcgactaactcagggatccagaacgggcagtacaaggtggaaaactatctcggtagcagagatcatttcgcgctggaccgaccctctgagacacatgccgactatctccttcggacaggacaggtagtcgacatttctgatactatttatcctagaaatccagcaatgtacagcgaagaggcacggttaaagtctttccagaactggcctgattatgcgcatcttacaccacgcgagcttgctagtgcaggactgtactacacaggcataggcgaccaggtacaatgcttctgttgtggcggtaaattgaaaaactgggagccctgtgaccgggcttggtcagaacatcgtaggcattttcccaattgcttctttgtcctggggaggaacctcaatatcagatcagagtccgacgcggtgagctcagaccgaaatttccctaactcgacaaaccttcccaggaatccatcaatggctgactatgaggccagaatctttacttttggaacatggatctatagcgtcaacaaagagcaattggctcgagccggattctacgccctgggggagggggacaaagtcaagtgtttccactgcggcggagggctaaccgattggaaaccaagcgaagatccatgggaacagcacgcgaagtggtatcccggttgtaaatacctgctcgagcaaaaaggtcaggagtacattaacaacattcacctgactcactctctggaagaatgcctggttcggactaccgaaaagactccttccctcacccggaggatagatgatactatcttccagaaccccatggtgcaggaggcaataagaatgggattctcctttaaggacattaaaaagataatggaggagaaaattcagatatcaggcagcaattataagtccctggaggtcctcgtggctgaccttgttaacgcgcagaaggattccatgcaagatgagtcctctcagacatctttgcagaaagaaataagcacagaggagcagctgcgccgactgcaggaggagaagctgtgcaagatttgcatggaccgaaacattgcaatcgtgtttgtgccttgcggccatcttgtgacctgcaagcagtgcgctgaagcggtggacaaatgtcctatgtgctacactgtgatcacatttaaacagaagatcttcatgtcctag

SEQ ID NO: 325181 - DNA, 1494 bp, Artificial Sequence
  derived and/or modified sequence
atgacattcaacagcttcgaaggcagcaaaacctgtgtgccagctgacattaacaaggaggaggaattcgtggaggaatttaacagattgaaaacgtttgcaaatttcccaagcggaagtccagtcagtgccagtaccctggcccgtgcgggatttctgtacacaggtgaaggcgatacagtgagatgtttctcctgtcacgccgctgttgatcggtggcagtatggcgattctgccgtgggcagacataggaaggtgtcacccaattgtaggtttatcaacgggttctaccttgaaaatagtgcaacccagtccaccaattcaggaatccagaacggccagtacaaggttgagaattacttggggtcgcgtgatcacttcgcattagaccgaccgtcagaaacccatgccgattacctgttgaggacgggacaagttgtggacatctcagacacaatttatccccgaaaccctgccatgtattcagaggaggcacgactcaaaagttttcaaaactggcctgactacgcgcacttgacaccacgcgagctagcatctgcgggtttgtattacactgggatcggagaccaggtgcagtgtttttgctgcggtggtaagctgaagaactgggaaccttgtgacagagcatggtccgagcacaggcgccacttccctaactgtttcttcgtcctgggaaggaatttgaatattcgcagcgagtcagacgcagtatctagtgaccgtaattttccaaatagcaccaacctgcccagaaatccttccatggcagactacgaggctcgtatcttcaccttcggtacttggatctactctgtgaacaaagaacagttggcgcgtgctggcttctacgcgctgggtgagggagataaagttaaatgcttccactgcggcggtggcctgacggactggaaacctagtgaggacccgtgggagcagcatgccaagtggtaccctggctgtaagtatctgctggaacagaaggggcaggagtacatcaacaatatccacctgacacacagcttagaggagtgtctggtccgcaccaccgagaaaactccctcactgacccggaggattgacgacacaatcttccagaacccaatggtgcaagaggctatacgaatgggcttcagctttaaggatatcaaaaaaataatggaggaaaagatacagatctctggatccaactacaaatcgctagaagtcttggtggccgacctggtgaatgctcagaaagattccatgcaggacgaaagttcacaaacaagtctgcagaaggaaataagcactgaggaacagctgaggcgattacaggaggagaagctttgtaagatttgtatggacaggaacatcgctatcgtatttgtcccttgtggacatctggttacctgtaagcaatgtgccgaagccgtggacaaatgcccgatgtgctatacagtcattacatttaagcagaagatcttcatgtcctag

SEQ ID NO: 325182 - DNA, 51 bp, Artificial Sequence
  derived and/or modified sequence
atgactttcaacagttttgagggatccaaaacttgcgtaccagccgactag

SEQ ID NO: 325183 - DNA, 471 bp, Artificial Sequence
  derived and/or modified sequence
atgacctttaattccttcgagggatctaaaacctgcgttcctgccgatattaataaagaggaggagttcgtggaggaatttaatcgcctcaagaccttcgccaacttcccctctggctccccggtttctgccagtaccctcgcacgcgctggctttttgtatacaggggagggggatacggtaagatgttttagttgccatgcagccgtcgaccgttggcagtatggtgattctgcagttgggcgacacagaaaggttagcccgaactgccgcttcatcaacggattctatctggagaatagcgcaacacaaagcacaaactctggaatccagaatggacagtataaggtggaaaactacctgggcagcagggaccatttcgctctggatcgtcccagcgagacacacgcagactaccttttgcgcacaggccaggtcgtagacatctccgacaccatctacccgaggtag

SEQ ID NO: 325184 - DNA, 1494 bp, Artificial Sequence
  derived and/or modified sequence
atgacctttaatagctttgagggaagcaaaacatgcgtcccagcagatatcaataaagaagaggagttcgtggaggagttcaacaggcttaagacatttgcaaactttcctagtggcagcccggtctccgcaagcactctggccagagccggtttcctctataccggcgagggtgacacagtgagatgcttttcctgtcatgccgctgtagatcggtggcagtatggggactcagcggttggtagacatagaaaagtgtcacctaactgtagattcataaatgggttttatctggaaaactccgccacgcaaagtactaatagtgggattcagaatggccagtataaggtagaaaattacttgggatcaagggatcacttcgcgctggataggccttccgagacacatgccgactatcttctgagaacggggcaggtggttgacatttccgacaccatctaccccagaaatcctgccatgtatagcgaggaagcaaggctaaagtcttttcagaattggcccgactatgcccatctgacacctcgagaactggccagcgctgggctgtattacacgggcatcggcgatcaggtgcaatgcttttgttgcggaggaaagcttaaaaactgggaaccctgcgatagagcttggagcgaacaccgtagacacttcccaaactgtttctttgtgcttggacgtaatctgaatatccggtctgagtcagatgccgtgagctccgataggaacttccccaatagtactaatctcccgcgaaacccctcaatggcagattacgaagcaaggatttttacgttcgggacttggatttactctgtgaacaaggaacaactggccagggcaggattttatgccctgggggagggcgacaaagtgaagtgttttcattgcgggggtggcctcaccgattggaaaccctcagaggacccttgggaacagcacgccaagtggtaccccggatgcaaatacctgttagagcagaaagggcaggagtacattaataacatccatctgactcacagtctcgaggagtgtctggtacggacaacagagaaaactccctcgctgactagaagaatcgatgacaccatcttccagaacccaatggtgcaggaggcaattcggatgggtttttctttcaaggacattaaaaaaatcatggaagagaaaatccaaatctccggcagcaactataagtccctggaagtgctcgtagcagacttggtaaatgcccagaaagacagtatgcaagatgagagttcccaaacatccttgcaaaaggagatcagcactgaagaacagctgcgcagactccaagaagaaaaactttgcaagatatgcatggataggaacatcgcaatagtgtttgtgccttgtggccatctcgtaacttgcaagcagtgtgccgaagctgtcgataagtgtcctatgtgttatactgtcattacctttaaacagaaaatttttatgtcttag

SEQ ID NO: 325185 - DNA, 1491 bp, Artificial Sequence
  derived and/or modified sequence
atgacttttaattcatttgaaggatcaaaaacatgcgtgcccgccgatattaacaaggaggaagagttcgtggaggagtttaaccgattgaagacatttgcgaatttcccttccgggagtccggtgtcagcttctacgctggcacgggcaggttttctttacacaggggagggcgacaccgtgcgatgtttttcctgccacgcggcagtagatagatggcagtatggcgattccgcggttggcagacaccgcaaagtatcccccaactgcagattcattaacggtttctatctcgagaacagcgctactcagtccactaattcagggatccaaaacgggcagtacaaggttgagaattacttgggaagccgagaccatttcgctctggatcgacccagcgagacgcatgccgactatcttttgcgcacgggtcaggttgtcgacattagtgatactatctacccaagaaatcccgcaatgtattctgaggaagctagactgaaatcctttcagaactggcccgactatgcacatttgacaccccgggaattggcttctgctggactctactatactggcattggggatcaggtgcaatgcttttgctgcggcggtaaactgaagaactgggagccctgtgaccgggcgtggagtgagcaccggcgccactttccgaattgctttttcgtgcttggccggaacctgaacatccgctctgagtcagatgctgtgtcatcagacagaaacttccccaatagtactaatctccctagaaatcctagcatggcagactatgaagctaggatattcaccttcggcacatggatctatagcgtgaacaaggaacagctggcccgagccggattctatgccctgggcgaaggcgacaaggtcaaatgcttccactgtgggggtggcctgaccgactggaaaccctcagaagacccatgggagcaacatgccaagtggtatcccggatgcaagtatctcttggagcagaagggacaagagtacatcaacaatatccaccttacgcactcactcgaagagtgtctggtgagaactacagagaagactcccagtcttaccagacgcatcgacgacaccatatttcagaatcctatggtacaggaggccatcaggatgggcttttccttcaaggatatcaagaagatcatggaggaaaaaatacaaattagcggatcaaactataagtcccttgaagtcttggtcgctgacctggtcaacgcccagaaagactctatgcaggacgagtcttctcagacctccctgcagaaagagatttccacagaggagcagctccgaaggcttcaggaggagaaactgtgtaaaatttgcatggacagaaacatcgccatcgtctttgttccatgtgggcatctggtgacttgtaagcaatgcgcagaggccgtggacaagtgccctatgtgctacacagttattacatttaagcagaagatatttatgagc

SEQ ID NO: 325186 - DNA, 1491 bp, Artificial Sequence
  derived and/or modified sequence
atgaccttcaatagcttcgaaggttccaagacctgcgtgccagcggacatcaacaaggaagaggaatttgtggaggaattcaataggctgaaaactttcgccaacttcccgtcgggctctcctgtgagcgcaagcaccttggccagagccggattcctgtacaccggagaaggggacactgtgcggtgcttctcatgccatgcggccgtcgatcggtggcagtacggagattccgccgtcgggcgccatcggaaggtcagtccgaactgccggttcatcaatggattctacctggaaaattccgccacccagagcactaactcgggaatccagaacggacagtacaaggtggagaactacctcggatccagggaccacttcgccctggaccgcccgtcagagactcacgccgattacctgcttaggactggacaagtcgttgacatatcagatacgatctacccgcgcaaccccgccatgtacagcgaagaagcgcggctcaaaagttttcagaactggcctgactacgcgcacctgaccccgagagagctggcctccgccgggctgtactacactggaatcggcgaccaggtccagtgcttctgctgtggaggcaagttgaagaactgggagccgtgtgacagagcttggtcggagcataggcggcacttcccgaattgctttttcgtgctgggtcggaatctcaatatccggtcggagtcggatgcagtctcgtcggacagaaactttccaaactcaaccaatctcccgcggaacccatccatggccgattacgaggcccgcatcttcaccttcggcacctggatctactcagtgaataaagaacagcttgcccgtgccggattctacgcgctgggcgagggagacaaggtgaaatgcttccactgcggtggaggcctcacggactggaagccgtccgaagatccttgggagcaacacgcgaagtggtaccctggttgcaagtacctcctcgaacaaaaaggacaggagtacatcaataacatccacctcacccatagcctggaagaatgcctggtccgcacgaccgaaaagaccccgtcgttgaccagacgcattgatgacaccatctttcagaacccgatggtccaagaagccatccgtatgggattctcgtttaaggatatcaagaaaatcatggaggagaaaatccagatctctggatccaactacaaatccctcgaggtgctcgttgcggatttggtgaacgcacaaaaggactctatgcaggatgagtcgagccagacctcacttcagaaagagatctcaaccgaggagcaactccgccggctgcaggaggaaaaactgtgcaagatctgcatggacaggaacatcgccattgtgtttgtgccctgtggacacctggtgacctgtaagcaatgcgctgaggctgtggataagtgtcctatgtgctacactgtgataaccttcaagcaaaagatcttcatgtcg

SEQ ID NO: 325187 - DNA, 1491 bp, Artificial Sequence
  derived and/or modified sequence
atgactttcaactcctttgagggaagcaaaacctgtgtgccggctgatatcaataaagaggaggaatttgtggaggaattcaaccggctcaaaacttttgcgaacttccccagcggatccccagtgtcagcttccacccttgcccgcgccggattcctctacacgggcgagggcgataccgtgcgctgcttctcttgccatgctgccgtggaccggtggcagtatggagacagcgctgtgggcagacacaggaaggtgtcgccgaactgcagattcatcaatggattctacctcgaaaatagcgctactcaatcaaccaactccggcattcagaacggacagtacaaggttgaaaactaccttggttcccgggaccacttcgccttggacagaccgtcagaaacccatgctgactatcttctcagaactggacaagtggtggacatttccgacaccatttacccccgcaatccggccatgtactcggaagaagctcgcctcaagtcgttccagaattggcccgattacgcacatctgaccccgcgcgagctcgcctcggcagggctctactacaccggaattggcgaccaagtgcagtgtttctgctgcggaggtaagctgaagaactgggaaccctgcgacagagcatggagcgaacaccggcgacacttcccgaactgtttcttcgtcctcgggcgcaacctgaatatccgctccgagtctgacgcggtgtcctccgatcgcaacttccctaactcgaccaacctgccccggaatccgtccatggcggactacgaggcgcgcattttcacttttgggacctggatctactcggtcaacaaagagcagctggctagggccggcttttatgctctgggggagggagacaaagtcaaatgcttccattgcgggggaggactcaccgattggaaaccatctgaagatccatgggaacagcatgccaagtggtacccgggatgtaagtacctcctggagcaaaagggacaggagtacatcaacaatatccacctgacccactcactggaagaatgcctggttcgcaccactgaaaaaactccgtcgcttactcgtcggatcgacgacactatctttcagaacccaatggtgcaggaggctatcaggatgggtttctcgttcaaggacatcaagaagatcatggaagaaaagatccagatctcaggctcaaactacaagtccctcgaagtgctcgtggccgaccttgtgaacgcgcaaaaggactcgatgcaggacgagagctcgcagacgtcattgcaaaaagaaatctcgaccgaggaacagctgcggcgcctgcaggaggaaaaactgtgcaaaatctgcatggacagaaacatcgcaattgttttcgtgccttgcggacacctcgtgacttgcaagcagtgcgcggaagcagtggacaaatgcccgatgtgttacactgtgatcaccttcaagcagaaaatctttatgtca

SEQ ID NO: 325188 - DNA, 1491 bp, Artificial Sequence
  derived and/or modified sequence
atgacatttaactcattcgaaggcagtaaaacatgtgtcccagccgatattaacaaagaggaagagtttgtcgaagagtttaatcgtttaaagacatttgcaaactttcccagcggatccccagtctccgccagcacgctagcccgggctggctttctgtatactggtgagggagataccgtcagatgcttttcatgccacgcagctgtcgacaggtggcagtatggcgattccgcggtggggcgccatagaaaggtctcccccaattgcagattcatcaacggcttttacttagagaacagcgcgactcagtcaaccaactctggcatccagaatgggcagtacaaggtagagaactatctgggcagtagagaccactttgctctcgaccgcccttccgagacacatgccgattatttgctgagaacaggccaagtagtggacatctcagataccatctatcctcgaaatccagctatgtattcagaagaagcaagactcaaatcttttcagaactggccagattacgcccatctgacacctcgtgagctggccagtgcaggcttgtactacactggcatcggggaccaggtgcagtgcttttgttgcggtggtaaacttaagaactgggaaccctgtgaccgggcttggtctgaacatcgtaggcatttccccaactgcttcttcgtgcttgggagaaacctgaatattagatctgaatctgacgcagtgagtagcgaccgaaacttcccaaactcgaccaatctcccacggaaccctagcatggctgattacgaagctcgtatctttacgttcggtacctggatctattccgtcaacaaggagcaactggcacgcgccggcttctatgccctgggggagggcgacaaggtgaagtgctttcattgtggcggcggcttgacggactggaaaccatcagaggatccatgggagcagcacgcgaaatggtatcccggttgcaagtatctgctagagcagaagggccaggaatatattaataatatccatctaacacactccctggaagaatgcctggtgcggacaacagagaaaacaccatcactaaccagacggattgacgatacgatcttccaaaatcccatggtgcaagaggcaatacggatgggattcagctttaaagatattaagaagattatggaagagaagattcagataagtggaagtaattataaaagtctggaggtgctcgtggccgacctggtcaatgcccaaaaagattcgatgcaagatgagtccagccagacatctctgcagaaggagatctcgacagaggaacaacttaggaggctgcaggaagagaagctgtgtaaaatttgcatggatcgtaatattgccatcgtcttcgtcccctgtggtcaccttgtgacatgtaagcaatgtgccgaggctgttgacaagtgtcccatgtgttacacagtcatcacctttaagcagaagatttttatgagt

SEQ ID NO: 325189 - DNA, 1491 bp, Artificial Sequence
  derived and/or modified sequence
atgacctttaactcgtttgaaggttcaaagacgtgtgtccccgcagacataaacaaggaggaagaattcgtcgaagagtttaacaggctcaaaacttttgcaaatttcccttcgggttcacctgtttccgcgtcgacgttggcaagggcaggattcctgtacacgggtgaaggcgacaccgtgaggtgtttctcgtgtcacgccgcggtggaccgctggcagtacggagattcggctgtcggcagacaccggaaggtgtctcctaattgtcggtttatcaatggtttctaccttgagaactccgcaacgcaatcaaccaattccggaatccaaaatggacaatacaaagtcgaaaactaccttggatcgagggaccattttgcactggatcgacccagcgaaacccacgcagactacctgctgcggactggtcaagtggtggacattagcgacactatttaccctcgtaatcccgcaatgtattctgaggaagctcgacttaagagctttcaaaattggcctgattacgcacatctgaccccacgagaactggcctcggcaggtctttactacacgggaatcggagatcaggtgcaatgcttttgttgcggaggtaagctgaagaactgggagccatgcgatagagcctggtccgaacatcgacggcatttcccaaactgttttttcgtgctcggaagaaacctgaacatccgaagcgagtcggatgccgtctcatcagacagaaactttcccaactcaactaatcttccgagaaatccatcgatggcagattacgaggcacggattttcactttcggaacctggatttactccgttaacaaagaacagctggcaagagcaggcttctacgcactcggggagggtgataaggtgaagtgtttccactgtggtggtggcctgaccgattggaagccctcagaagatccgtgggagcagcacgccaaatggtaccctgggtgcaaatatcttcttgagcaaaagggtcaagagtatatcaataacatccatctcacccattcgctcgaagaatgcctcgtccgcactactgagaaaacccccagcttgactagaagaatagatgacacgatctttcagaaccctatggtgcaagaagccattaggatgggctttagctttaaggacataaagaagataatggaggagaaaatacagataagcggttcgaactacaaatcacttgaagtccttgtggcggatcttgtgaacgcacaaaaggactcaatgcaggatgagtcctcacagacctcgttgcagaaggaaatttccaccgaagagcagttgcgcagactccaagaagaaaaactttgtaagatttgcatggacaggaacattgcgattgtttttgtcccttgcggacatctggttacttgtaaacaatgcgctgaagccgtggataagtgtcctatgtgttacaccgtgatcacctttaagcagaagattttcatgtcc

SEQ ID NO: 325190 - DNA, 1491 bp, Artificial Sequence
  derived and/or modified sequence
atgacattcaacagcttcgaaggctcaaagacctgtgtgcctgctgacatcaataaggaagaagagttcgttgaagagttcaatcgtctgaagacttttgctaactttccttccggtagcccagttagcgcaagcaccctggccagagcaggctttctgtacactggagaaggtgacactgtccgctgtttcagttgtcatgctgctgtggacaggtggcaatacggcgattctgcagtgggacgccatcgtaaggtgtctccaaactgtaggtttattaacggattctatcttgagaatagtgcaacccagtcaaccaacagtggcatccagaacggtcagtacaaagttgaaaattatttgggctcccgcgaccactttgcattggacaggccctccgaaacccatgcagattacttgcttcgcactggccaggtggtagacatctccgacacaatctacccccgtaatcctgctatgtactctgaggaagctcgtctgaagagtttccaaaattggcccgactacgctcacctgactcctagggagctcgcatccgctggcctctactacactggcattggcgaccaggtgcaatgcttttgttgcggaggcaagcttaagaactgggagccctgcgatcgtgcttggtcagagcatcgccgccatttccctaattgcttcttcgtgctcggccgtaaccttaatatcaggtcagagtcagatgctgtctcctccgaccgtaacttccccaacagtaccaatctgccccgcaacccttccatggccgattacgaggctagaatcttcactttcggaacttggatctatagcgtgaacaaggagcaactggctagagccggattctacgctctcggtgaaggcgacaaggtgaagtgtttccattgcggtggtggcctgacagattggaaaccatccgaagacccctgggaacagcacgcaaaatggtaccccggctgcaaatatctcctggaacagaagggtcaggagtacatcaacaatatccacttgacacatagccttgaagaatgcctggtgcgtacaaccgaaaaaactccttcccttactaggcgcatcgatgatacaattttccagaacccaatggttcaggaggcaatcagaatgggcttctcttttaaggatattaagaagattatggaggaaaagatacagattagtggctctaactacaagagccttgaggtgcttgttgctgatctcgtcaacgcccaaaaagacagcatgcaggatgaaagctcccagacctcactgcagaaggagattagtactgaagagcagttgcgcaggttgcaggaggagaaactgtgcaaaatctgtatggacaggaatatcgcaatcgtcttcgtaccctgcggtcatcttgtgacctgtaaacagtgcgccgaggctgtggacaagtgcccaatgtgttacactgttatcacctttaaacagaaaatcttcatgtca

SEQ ID NO: 325191 - DNA, 1491 bp, Artificial Sequence
  derived and/or modified sequence
atgacgttcaacagcttcgaggggtcgaagacctgcgtgcctgcggacattaacaaagaagaagaattcgtggaggagtttaacaggctgaagactttcgctaactttccaagcggctcacctgtgagcgcatccaccttagcccgggctggcttcttgtacacgggagaaggagataccgttaggtgctttagctgccatgccgctgtagatcgatggcagtacggcgactccgcggtgggacggcaccggaaagtgagcccaaactgcaggttcataaacggattctacctggaaaatagcgctacccagagtaccaactcaggaatccaaaacggacagtataaagtcgagaactatctgggaagcagggatcactttgccctcgataggcctagcgaaacacacgccgattatcttcttagaacaggccaagtcgtcgacattagtgataccatctacccacgcaatcctgctatgtactctgaagaagctcggctgaaatcatttcaaaactggccagattatgcccatctgacacctcgagagttggcttctgctgggctctattacacagggattggtgaccaggtccagtgtttttgctgcggcggaaagcttaaaaattgggaaccatgcgatcgggcatggagtgagcaccgacgccactttcctaactgtttttttgttctcggtcgtaacctgaacattaggtctgaatctgacgctgtttcaagtgatcgaaacttcccaaattctacaaacctgcccagaaatccatctatggccgattatgaagcacgaatctttacttttggcacttggatctactctgtaaacaaagagcaactggccagggcagggttttacgctctgggcgagggcgacaaagtgaagtgttttcactgtggcggaggacttaccgattggaagcctagcgaggatccttgggagcaacacgcgaagtggtacccaggatgtaaatatctgctcgaacagaaaggccaggagtatatcaacaacatccacttaactcactcactggaggagtgtctcgtgagaaccacagagaagacacctagcctgacgagaagaatcgatgataccatcttccaaaatcccatggtgcaagaggcaataaggatgggattctcatttaaggatatcaagaagatcatggaggagaagatccaaatcagtgggagcaattacaagagccttgaggtattggtcgccgacctggttaacgcccaaaaagactccatgcaagacgaatccagtcaaacatccttgcagaaggaaatcagcaccgaagagcagcttcggcgcctccaagaggagaagctctgtaagatctgcatggataggaatatcgcgattgtcttcgtaccctgtggtcaccttgtcacctgcaagcagtgtgcagaagctgtggataaatgccccatgtgctatacagtgatcacatttaagcaaaagatctttatgagt

SEQ ID NO: 325192 - DNA, 1491 bp, Artificial Sequence
  derived and/or modified sequence
atgacgtttaacagtttcgagggctctaaaacctgcgtccctgccgatatcaacaaggaagaagagttcgtagaggaatttaataggctaaaaactttcgcgaatttccctagcggaagtcctgtttccgccagtacactggctcgcgccggctttctatataccggggaaggagacacagtccggtgttttagctgtcatgccgccgttgatcgatggcagtatggtgacagcgctgtcggccgccataggaaagtcagtcctaactgcaggtttataaacggcttttaccttgaaaacagcgcaacccaatctacaaatagtggaatacagaacggccagtacaaggttgaaaactatctgggaagccgagaccatttcgcactggacaggccatccgagacccatgcagactatttattgaggaccggtcaagtagttgacatcagcgatactatatacccccgtaacccagcaatgtactctgaagaagctcgtctgaagtcgttccagaattggccagactatgcccacctgacacctagagaattggcatcagctggcctttattacaccgggattggagaccaggtacagtgcttttgttgtggaggcaagctgaaaaactgggaaccctgcgatcgggcgtggtccgaacaccgacgacacttcccgaactgtttttttgtgctcgggagaaacctgaacattcggtccgaatcagatgcagtgagctccgaccggaactttcccaacagcacgaacctgcctcgtaacccctccatggccgattatgaggcgcgcatctttacattcggcacgtggatctactcggtcaataaagaacagctagcccgagctggtttctacgcacttggcgagggcgataaagtgaagtgtttccactgtgggggagggctgaccgattggaaaccgtcagaagacccctgggagcagcacgcgaagtggtatcctggatgtaaatatctattggagcaaaagggccaggagtatatcaataatatccatctcacgcattccctagaagaatgtctggtgcggacaaccgagaagactccaagcctaaccagaagaatagatgacaccatctttcaaaatcctatggtgcaggaggcaatccgtatggggttttctttcaaggacattaagaaaatcatggaggagaaaattcagatatcgggaagtaattataagtctctggaggtactagtggccgacctggtgaatgcgcagaaggattccatgcaggatgagtctagccagacatcactccagaaggaaatctcaaccgaggaacagctaagacggctccaggaggaaaagctgtgcaaaatttgtatggatcggaacattgctatcgtctttgtgccatgcggtcatcttgtcacatgtaagcaatgtgctgaggccgttgataagtgtcccatgtgctatacggtcattaccttcaagcagaaaatcttcatgtcg

SEQ ID NO: 325193 - DNA, 1491 bp, Artificial Sequence
  derived and/or modified sequence
atgacgttcaactccttcgaaggtagcaaaacgtgcgtgcccgctgatatcaacaaggaggaggagtttgtcgaggagtttaaccggcttaaaacattcgcgaactttcccagcgggagcccggtaagcgcatccaccctcgctagggcaggatttctgtatacaggcgagggggacacagtcaggtgtttcagctgtcacgccgcggtggataggtggcagtacggcgactccgcagtcgggcgccacagaaaggtttctccaaactgccgctttatcaacgggttctacctggagaatagcgcgacacagtccactaatagtgggattcagaacggtcagtataaagtcgaaaattatctcgggtcacgcgatcactttgctcttgataggccgtccgaaacccacgccgactaccttctaaggaccggccaggtcgtggacataagtgataccatatatccccgcaaccctgccatgtatagcgaagaggctagactgaaatctttccagaattggccggactacgctcacctcactcctcgcgagcttgcctcagccggcctctactacaccggcatcggcgatcaggtgcagtgtttctgttgtgggggaaagctgaagaattgggaaccatgcgatcgcgcctggagtgagcatcgcagacacttccccaattgcttctttgtcttgggcaggaatctgaatatcagatcggaatcagatgcggtgagttctgataggaacttccccaattctacgaacctgcctcggaatcctagcatggctgattatgaagccagaatctttaccttcgggacatggatctactccgtcaacaaggaacagctggctagagccggtttttatgccctcggggagggagacaaagttaagtgcttccactgcgggggaggcctcacagactggaagccctcggaagacccatgggagcagcatgctaagtggtatcctggatgtaagtacctgctggaacagaagggacaggagtatattaacaacatacatttgactcattccctcgaggagtgtctagtcagaacaactgagaaaactcccagcctgaccagaaggatcgatgatactatttttcagaacccaatggtccaagaggcaatccgaatgggctttagtttcaaggatatcaagaagatcatggaagagaagattcagattagcgggtcaaactacaagtctctggaggtgctcgtggcggacctggtgaacgcccaaaaagatagcatgcaggatgagagtagtcagactagcctgcagaaggagatcagtactgaggaacaactgcgccgcctgcaggaggaaaaactgtgcaagatatgtatggacagaaacatcgctatcgttttcgtaccatgtggacacctcgtgacctgcaaacagtgtgccgaggcagtcgataagtgtcccatgtgttataccgtgatcactttcaagcagaaaatcttcatgagt

SEQ ID NO: 325194 - DNA, 1491 bp, Artificial Sequence
  derived and/or modified sequence
atgaccttcaacagcttcgaggggtccaagacatgcgtcccggctgatataaataaagaagaggagttcgttgaggaatttaaccgactaaaaacttttgccaatttcccttctggatccccagtttcggcgtctaccttagcccgggccggttttctttatactggtgaaggtgatacggtccgttgcttcagctgtcatgctgctgttgaccgatggcaatatggggactcagccgtcggtcgacatagaaaggtatccccgaattgtaggttcattaacgggttttatttggagaactcagcgactcaatccactaactctggcatacaaaatggccagtataaggtcgagaactaccttgggagccgcgaccacttcgctctggacaggcccagcgagactcacgctgattacttgctacgaacaggccaggtcgtggacatttctgatactatctatcctcggaatccggcgatgtactcggaggaggcacgcctaaaaagtttccagaattggccagattatgcccatttaacccctcgggaattggccagtgcaggcctctattacacaggcatcggggaccaggtacagtgcttctgctgcggaggaaagcttaaaaactgggagccgtgcgacagggcttggagtgagcataggagacacttcccgaactgcttcttcgtcttgggcaggaatctcaatattcgtagtgagtcagatgccgtgtcttccgatagaaattttcccaattccaccaacctccccagaaatccgtctatggctgattatgaggctcggattttcaccttcggaacgtggatctacagcgtgaacaaggaacaattagcccgtgccgggttttacgccctcggagagggagataaagtgaagtgtttccattgcggcggtggtcttaccgattggaaaccatccgaagacccttgggagcagcacgctaaatggtaccctgggtgcaagtatctcctcgagcaaaaggggcaggagtatatcaacaatatacatcttacccattccctcgaggagtgtctggtccgtaccactgaaaagactccttccctgacgagaaggatcgacgataccatctttcagaatcccatggtgcaggaagcgatccgtatgggattttccttcaaggatatcaagaaaattatggaggaaaagatccagattagtgggtctaattacaagtccctagaagtgttagtggccgacctcgtcaatgctcagaaggactctatgcaagacgagtcctcccaaaccagtcttcaaaaagagatctccactgaggagcagttgcgacgtttgcaggaagagaagctctgcaagatttgcatggaccggaacatagctatcgtcttcgtgccatgcgggcatctggtgacttgtaaacagtgtgctgaggcagtcgataagtgtcccatgtgctataccgtcatcactttcaaacagaaaatctttatgtct

SEQ ID NO: 325195 - DNA, 1491 bp, Artificial Sequence
  derived and/or modified sequence
atgaccttcaattcatttgaaggctctaagacctgcgtgccagctgatatcaataaggaggaagaattcgtggaagagttcaaccggcttaagactttcgccaatttccctagcgggtcgccagtttcggcctcgaccttggcaagagccgggttcctgtacacgggggagggcgatactgtcagatgtttttcctgccacgcggcagtggatcgttggcaatacggcgacagcgcagtgggacgccataggaaggtgtcgcctaactgtagatttatcaatggattttacttggaaaattcggcgactcaatcgacgaattcgggaatccaaaacggtcagtacaaagtggaaaactatcttggttcacgggatcattttgctctggatcggccctccgaaacccatgccgattacctgctgcgcactgggcaggtggtggatattagcgatactatttacccgaggaatcctgcaatgtacagcgaggaggcacggcttaaatcgtttcaaaactggcctgactacgcacatctgactccaagagaactggcctcggccggtttgtactacactgggattggtgaccaggtgcaatgtttttgttgcggtggcaagctcaagaattgggaaccatgcgacagagcatggtcagagcatcgccgtcatttcccaaattgcttttttgtgctgggacgaaacctgaacattcggtcggaatcggacgcagtgtcctccgatcgcaatttcccaaatagcaccaacctgccaaggaatccttcgatggcagattacgaagcgaggatattcacttttggaacctggatttactcagtcaataaggagcaactggcgcgggcaggattctacgcactcggtgaaggcgacaaggtcaagtgcttccactgtggaggaggattgaccgactggaagccaagcgaagatccttgggaacagcatgcaaagtggtaccctggatgtaagtacctgcttgagcagaagggccaggaatacatcaataacattcatctgactcacagccttgaggagtgtctcgtgcgcaccaccgagaaaactccttcacttactcgccggattgatgacactattttccaaaaccccatggtgcaagaggcaatcagaatgggcttttcgttcaaggatatcaagaagattatggaagagaagattcaaatttcgggttcgaactacaagtcactggaagtcctggtggcggatctcgtgaatgcccaaaaggattcaatgcaagacgaatcatcacaaacgtcgctccaaaaggaaatctccaccgaggagcagcttcgtcgccttcaggaagagaagctctgtaagatttgtatggatagaaacattgcaattgtgtttgtgccatgtggacaccttgtgacctgcaaacaatgtgcagaggcagtggataagtgcccgatgtgctacaccgtgattacttttaagcaaaagatattcatgtcc

SEQ ID NO: 325196 - DNA, 1491 bp, Artificial Sequence
  derived and/or modified sequence
atgacgtttaactctttcgaaggatccaagacctgtgtgcctgcagacatcaataaagaagaagaatttgtggaggagttcaaccggctcaagacttttgcaaactttccctctggatcccctgtctcagcatcgacccttgcccgagcgggattcctttacactggagagggagataccgtcaggtgcttctcatgtcatgccgccgttgacagatggcaatacggtgacagcgccgtgggacgccaccgcaaagtctcacccaattgccgatttatcaacggattttacctggaaaattcagcgacccagtccacgaattccggaatccagaatggccaatacaaggtggaaaactatctgggctcaagggaccactttgcgctggatcgcccatcggaaacccacgcagattacctgcttcggaccggtcaggtggtcgatatcagcgatactatctaccctcgaaaccctgctatgtattcagaagaagcccgtcttaagagcttccaaaactggccagattacgcgcatctgactccccgtgagcttgcatcagcaggcctgtactacactggcattggtgaccaggtgcaatgcttctgttgtggaggcaaactgaagaattgggaaccttgtgaccgcgcatggtcagaacacaggaggcattttcctaattgtttctttgtgcttggtcgtaacctcaacatcaggtccgaatccgatgccgtgtcatcagataggaactttccgaacagcacgaacctcccgcgtaacccatctatggccgattatgaggcacggatattcacctttggaacgtggatttacagcgtgaacaaggagcaactggcacgcgcaggtttttacgcactcggagaaggagataaggtcaagtgtttccactgcggaggcggtctgactgattggaaaccctccgaagatccatgggagcagcatgcaaagtggtaccctgggtgcaaatacctgcttgagcagaagggacaagagtacataaacaatattcatctcactcatagtcttgaagagtgtctggtccgcaccaccgaaaaaactccatcccttactaggaggatagatgacaccatattccaaaacccgatggtgcaagaagcaatccgcatgggcttttccttcaaggatatcaagaagattatggaagaaaagattcaaatttcagggtcgaactacaaatccttggaagttcttgtggctgatttggtgaacgctcaaaaagactcgatgcaggatgagtcgtcccagacttcactccaaaaggagatttcgaccgaggagcaacttcggaggctgcaggaagaaaagctgtgcaagatatgcatggaccgcaacatcgctattgtttttgtaccatgtggtcatcttgtgacttgtaagcagtgtgcggaggcagtggacaagtgcccaatgtgttacaccgtgatcacttttaagcaaaagatctttatgtcc

SEQ ID NO: 325197 - DNA, 1491 bp, Artificial Sequence
  derived and/or modified sequence
atgacctttaacagtttcgaaggttccaagacttgtgtgccagcagatatcaacaaagaagaggagtttgtggaagagtttaatcgactgaaaacttttgcgaacttcccatccgggagccctgtgtcggcatccaccctcgcaagagcggggtttctctacactggagagggagataccgtgagatgcttctcatgccatgccgctgtggatcgttggcaatatggagattcagctgtgggtcgccataggaaggtgtcgccaaactgtagattcattaatggtttttacctggaaaactcggcaactcagagcaccaactcagggatacaaaacggccagtacaaggtggaaaactatcttggctccagagatcactttgccctggaccggccatcggaaacccatgccgattacctgctccgcaccggacaggtcgtggatatctccgatactatctaccctaggaacccagccatgtactccgaagaagcaagactgaagtcgttccagaactggcctgattacgcacacctgactcctcgtgaactcgcgtccgcaggactttactacaccggcattggtgatcaggtgcaatgtttttgttgtggtgggaagctgaagaactgggaaccttgtgatcgggcatggtcggaacatcgcagacactttcctaattgtttctttgtcctcggccgcaacctgaatattcgttcggaatccgatgccgtgtctagcgaccggaactttcccaacagcactaaccttccccggaaccctagcatggcggattacgaagcccgcattttcacttttgggacctggatttactcagtgaacaaagaacagctggcacgggcgggattctacgcactgggggaaggggataaggtgaagtgttttcactgcgggggcggtctgaccgattggaaaccttccgaggacccttgggaacagcatgcgaagtggtaccctggttgcaagtacctcttggaacaaaaggggcaggaatacatcaacaatattcatcttacccattcgttggaagaatgtctggtgcggaccactgaaaagaccccttcacttacgaggcgaattgacgataccatctttcagaacccaatggtccaagaagcaattagaatggggtttagcttcaaggacattaagaagatcatggaggaaaagatccaaatttccggatcgaactacaaaagccttgaagtgcttgtggcagatcttgtgaacgcccagaaggattccatgcaagatgaatcctcgcaaactagcctccaaaaggaaatctcaaccgaagaacaactgcgccgattgcaagaggaaaaactgtgtaagatatgtatggatagaaacatcgccatcgtctttgtgccttgtggccatctggtcacgtgtaagcagtgtgctgaagcagttgacaaatgcccaatgtgctatactgtgataacgttcaaacaaaagatcttcatgtcc

SEQ ID NO: 325198 - DNA, 1491 bp, Artificial Sequence
  derived and/or modified sequence
atgaccttcaattcgttcgagggctcgaaaacgtgcgtgccggcggacatcaacaaggaggaggaattcgtcgaagagtttaacagactgaaaacgttcgccaacttcccatcgggtagcccggtgtccgcctcgacgctcgcgcgcgctggattcctgtacactggcgagggagacactgtgaggtgtttctcgtgccatgccgcggtcgaccggtggcaatacggcgactcagccgttggacgccacagaaaagtgtcaccaaactgccgcttcataaacggattttacctcgagaactccgccactcagagcactaatagcgggatacagaatgggcagtacaaggtcgaaaactatctcggatcgagagatcattttgcgctggaccgcccgtcggaaacgcacgcagactaccttttgcgcactggccaggtggtcgacatctcggatactatctacccacgcaatccagcgatgtattcagaagaagccaggctgaagtccttccaaaactggccggactatgcccatttgaccccaagagaacttgcttccgccgggctgtactacaccgggatcggcgatcaggtccagtgcttctgctgtggagggaagctgaagaattgggaaccctgtgatagagcatggtcagagcacagacgccattttccgaactgctttttcgtgctcgggcggaacctcaacattcggtcagagagcgacgctgtgagcagcgaccgcaacttcccgaactccaccaatctccctcgcaatccatccatggcagattacgaagcaagaatcttcactttcggcacctggatttactcggttaacaaggagcagcttgctagagccgggttctacgctctgggagaaggcgataaggtgaagtgttttcattgcggcggcggcctcaccgactggaaaccatcagaggacccgtgggaacagcacgcaaagtggtaccctggctgcaaatacctgctggagcagaagggacaggaatacatcaacaatatccacttgacgcactcactcgaggagtgcctggtgaggactactgagaaaactccgtccctcacccgtagaattgacgacaccatctttcagaatccgatggtccaggaagcaataagaatgggtttttcgttcaaggacatcaagaagattatggaggaaaagatccagatttctggatcgaactacaagtccctcgaggtgctcgtggctgacttggtcaacgctcaaaaagattccatgcaggatgaatccagccaaactagccttcagaaggaaatctccaccgaagagcaactgagacgcctgcaagaggaaaagctgtgcaaaatctgcatggatcggaacatcgccatcgtgttcgtcccctgcggacacctggtgacttgtaagcaatgtgccgaagccgtggataagtgcccgatgtgctacaccgtgatcacgtttaaacaaaagatcttcatgtca

SEQ ID NO: 325199 - DNA, 1491 bp, Artificial Sequence
  derived and/or modified sequence
atgacctttaactcttttgagggaagtaagacctgtgtccctgcagatatcaacaaggaagaggagttcgtcgaggagtttaatcggcttaagacctttgccaacttcccttccggatcacccgtgtccgcaagtacgttggctagagcaggattcctgtacacgggagaaggagacactgtgcggtgtttctcatgccatgcagccgtcgatcgatggcaatacggtgattcggcagtggggcgtcatcgcaaagtgtcccccaactgtcgcttcataaacggtttttaccttgagaactcagcaacgcaatcgacgaatagcggcattcaaaacggccagtacaaggtggagaattacttgggttccagagatcatttcgccctggatcgcccttcggaaacccatgccgattacctgctgaggactggacaagtggtcgacattagcgataccatctacccgcggaacccagcgatgtactcggaagaggctcggctgaagtcctttcagaactggcccgactacgcccatctcacccctcgcgagcttgccagcgcgggtctgtactacaccgggattggtgaccaggtacagtgtttctgctgcgggggaaagctcaagaactgggagccttgtgatagagcatggtccgagcataggagacacttcccaaactgcttttttgttttgggccgtaatcttaacattagaagcgaatccgacgcagtgtcatcggatagaaactttccaaattccaccaacctgcctagaaacccaagcatggcagactacgaagcacgaatctttacgtttggcacctggatatactccgtgaataaagaacagcttgcacgggcaggtttttacgcacttggagagggagacaaggtcaagtgtttccattgtggtggaggactgacggattggaagccatcggaagatccatgggaacaacacgcaaaatggtaccccgggtgtaagtacctgcttgaacagaagggacaagaatacattaacaacattcatctgacgcattcgctcgaagaatgccttgtgcgcaccaccgagaaaaccccttcactcactcgtagaattgatgatactatctttcaaaacccgatggtccaggaagctattcgcatgggattctcatttaaggacatcaagaaaatcatggaggaaaagatccagatttccggttcgaattacaaatcactcgaagtgctcgtcgctgatctggtgaacgcccaaaaagactcaatgcaggatgaaagcagtcaaacctcgctgcagaaggaaatttctactgaagaacagctgcgcaggctgcaagaggaaaagctgtgtaagatttgtatggaccgaaacattgcaatcgtgtttgtgccctgtggtcacctggtgacctgtaagcaatgtgcagaagccgtggacaagtgtccaatgtgctacaccgtgatcacctttaagcagaaaatctttatgtcc

SEQ ID NO: 325200 - DNA, 1491 bp, Artificial Sequence
  derived and/or modified sequence
atgacttttaactcttttgaagggtccaagacgtgcgtgccagctgacatcaacaaagaagaggaatttgtggaggagttcaatagactgaaaacttttgctaatttcccttctggctcacccgtgagcgctagcactctggctcgagctggattcttgtacacaggcgagggtgataccgtgcggtgctttagttgccatgccgcggtggatagatggcagtatggagactctgcagttggacgacaccggaaagttagccctaattgtaggtttatcaacggcttttaccttgaaaactcagccactcaatctacaaatagcggaattcagaacggccaatacaaagtggagaattacctaggatctcgggatcattttgctctcgacagaccttccgaaacgcacgcagattatctccttagaacaggtcaggttgtggatatttctgatacaatctatccaaggaaccccgcaatgtatagcgaggaggccagattgaagtcttttcagaactggcccgattacgcgcacttgacgccacgggaactggctagcgctggtctatattacacgggcataggcgaccaggtccagtgtttctgttgtggcggaaaactgaaaaactgggaaccctgtgaccgtgcttggtcagagcatcggagacacttcccgaactgtttttttgtcctgggccggaacctaaacattcgctccgaatctgatgcagtgagtagcgataggaactttcccaattcgactaatcttcccaggaacccatctatggcagactatgaagctcgcatcttcacctttggaacttggatctattcagtgaacaaagaacagctggcaagagccggcttctacgcgctcggagagggcgacaaggtgaaatgttttcactgcggcgggggcctgactgactggaagccctcggaagacccttgggaacaacacgccaaatggtatcccggctgcaaatacctactcgaacaaaaggggcaggagtatattaataacattcatctgactcattccctagaagagtgcttagttcggacgactgagaaaacgccatccctgacgagaaggattgacgatacgatttttcaaaatcccatggtgcaggaggcaatccgcatgggcttctccttcaaggacattaaaaaaatcatggaagagaaaattcagatcagcggcagtaattacaagagtttagaagtactagtggccgatctcgtaaacgcacagaaggatagtatgcaagacgagtcatcccagaccagcttacagaaagagatttctaccgaagaacagctgaggcgcctgcaggaggaaaagctttgcaaaatttgcatggatcggaacatagcaattgtgtttgtgccttgtgggcatctggtcacctgtaagcaatgcgctgaggctgtagataaatgtcctatgtgttatacagtgatcacattcaaacagaaaattttcatgagc

SEQ ID NO: 325201 - DNA, 1491 bp, Artificial Sequence
  derived and/or modified sequence
atgacatttaactcctttgagggctccaaaacatgcgttcctgcagatatcaataaagaggaagaatttgtcgaggaatttaacaggctgaagacctttgccaacttcccttctggaagcccagtctctgcgagtacattggccagagctggctttctgtacacaggagagggagataccgtgcgctgcttctcctgccatgccgccgttgaccgctggcagtacggcgactctgcagtcggtaggcataggaaggtgagtccaaactgcagattcataaatggtttctacctcgagaactctgccactcagagcacaaactcaggtatacaaaatggtcagtacaaagtagaaaactacctgggctcccgcgatcactttgccctggaccgcccgtccgaaacacacgccgactacctgttgagaactggtcaagtggtggatatcagtgatactatctatcctcgcaacccggctatgtattcagaggaagctcgcctgaagtccttccagaattggccagactacgcgcatcttacgccccgcgaactcgcttctgcgggcctctactataccggtattggtgatcaggtgcaatgtttctgttgtggaggcaagctcaaaaactgggagccctgtgatcgcgcatggagtgaacacagacgccacttccctaattgcttttttgtgttgggcagaaaccttaacattcgctctgaaagtgatgctgtgagttctgacaggaactttcctaacagtaccaacctcccacgcaacccctctatggcagactatgaagcgagaatcttcacttttggaacttggatttacagtgtcaacaaggagcaactggccagagctggattctacgcactgggtgagggtgataaggtcaagtgctttcactgcggcggtggactgacggattggaaacccagtgaagatccctgggagcagcatgctaagtggtatcccggctgcaagtacttgctggagcaaaagggccaggagtatatcaataacatacaccttacccattccttggaagagtgcctggtgagaacaacggaaaaaactccctctctgacccgcaggattgacgacacgatcttccagaaccccatggtgcaggaggccatcaggatgggattctcctttaaagacatcaagaagatcatggaggaaaagattcagattagtggttctaactataagtctttggaagtactcgtggcagacttggtgaacgcgcagaaggacagcatgcaagatgagtcatcccaaacgtccctgcagaaggagatttccacagaagagcagctgaggagattgcaagaggaaaagctgtgcaagatttgcatggatagaaacatcgcgatagtgttcgtcccgtgcggccacctggtgacatgtaagcagtgcgctgaggccgtagataagtgcccaatgtgttacactgtgatcacgttcaagcaaaagatatttatgtca

SEQ ID NO: 325202 - DNA, 1491 bp, Artificial Sequence
  derived and/or modified sequence
atgacgttcaactcgtttgagggatcgaaaacttgcgtgcctgcagatatcaacaaggaagaggaatttgtggaggaattcaatcgactcaagactttcgcgaatttcccctcgggctcaccggtgtcagctagtaccctcgcgcgggccgggtttctctacactggagagggtgataccgtgagatgtttttcgtgtcatgcagcagtagatcggtggcagtacggagattcagcagtgggaaggcataggaaggtgtccccaaattgccgttttatcaacggattttacctggagaattcagcaacccagtcgactaattcgggaattcaaaacggacaatacaaggtcgagaactacctcggctcccgggatcattttgcactcgatagaccgtccgaaactcatgcagattacctccttcggaccggccaggttgtagacatcagcgatactatctacccccggaacccagcaatgtacagcgaagaagccagactgaagtcatttcagaattggcctgattatgcacatcttactccaagagagctggcatccgctggcttgtactacaccgggataggtgaccaagtgcagtgcttctgttgcggaggaaaactgaagaattgggaaccttgtgacagggcgtggtctgagcacaggaggcactttccaaactgcttttttgtgcttggcagaaacctcaacatacggagcgagtccgatgctgtctcctcggatagaaactttccaaatagcactaaccttcctagaaatccgtccatggccgattacgaagcacgcattttcacctttggaacttggatctattcggtgaacaaggaacaactggcgcgagcgggattctacgcattgggggaaggtgacaaggtgaagtgctttcattgtggtggtgggctgactgattggaagccatccgaagatccatgggaacagcatgcgaagtggtaccctggctgtaaatacctgctggaacagaaggggcaagagtacattaacaatattcatctcacgcattccctggaagagtgtctggtgagaaccaccgaaaaaacgcccagcctcacccgacgcatagatgataccattttccagaaccctatggtccaagaagccatacgaatgggtttctccttcaaagacatcaagaaaatcatggaggagaagattcaaatctccggttcgaactacaaatcgttggaggtcctcgtggccgacctggtgaacgcccagaaggattcgatgcaagatgaatcatcgcaaaccagcttgcaaaaggaaatttcgaccgaagaacagctccgccgattgcaagaggaaaaactgtgcaagatctgtatggaccggaatattgctatcgtctttgtcccatgtggacatctggtgacgtgtaaacagtgcgccgaagcagtggacaagtgtccaatgtgttacaccgtgattacgtttaaacaaaagattttcatgtcc

SEQ ID NO: 325203 - DNA, 1491 bp, Artificial Sequence
  derived and/or modified sequence
atgaccttcaactcgtttgaaggttcgaagacctgcgtgccggccgacattaacaaggaggaggaattcgtggaggagtttaataggctcaagaccttcgccaacttcccgtcaggctcaccggtgtcagcgtcgaccctggcacgcgcaggattcctttacactggcgagggagacaccgtgcgatgcttcagctgtcacgccgccgtggatcggtggcagtatggagacagcgccgtgggtagacacagaaaagtctcaccgaattgcaggttcatcaacggtttttacctcgaaaatagcgcgactcagagcaccaactccgggatccagaatgggcaatacaaagtggaaaactacctgggatcacgcgaccacttcgcgctcgacagaccgtccgaaactcacgccgactacctgttgcggaccggacaagtcgtagacatcagcgacactatctatccgaggaacccagccatgtactcagaagaggctcggctgaagtcatttcaaaattggcccgactacgcgcacttgactccacgcgagctggcttccgcaggcctctactataccggcattggcgaccaagtgcagtgcttctgttgcggaggaaagctgaagaactgggagccttgcgaccgggcttggtcagagcacagacggcatttcccaaactgcttctttgtgctcggccgcaacttgaatattcggtccgagtcggatgcggtttccagtgacaggaatttccctaactcgaccaacttgccgagaaacccatcaatggcagactacgaagcgaggatcttcaccttcgggacttggatctactccgttaacaaagagcaactcgcgagagctggattctacgcgttgggagaaggagataaggtgaagtgctttcactgcggaggtggactgaccgattggaaaccttccgaggatccttgggaacagcatgctaaatggtaccccggctgcaagtatttgctggagcaaaaagggcaggagtacatcaacaatattcaccttactcactccctggaggaatgccttgtgcgcacgaccgaaaagaccccaagcctgactcggcgaatcgacgatactatattccagaacccgatggtccaggaggcaattcgaatgggattctccttcaaggatatcaaaaagatcatggaagaaaagatccagatctcgggaagcaactacaaatccctggaggtgctggttgccgatctcgttaacgcccaaaaggacagcatgcaggacgaatcctcccaaacctccctgcagaaggaaatttccaccgaggaacagttgagacggctgcaggaagagaagttgtgcaagatctgtatggatcgcaatatcgcgatcgtgtttgtgccatgtggccacctcgtgacctgcaagcaatgtgccgaagcggtcgacaagtgccctatgtgctatacggtcatcactttcaagcagaagatcttcatgtcc

SEQ ID NO: 325204 - DNA, 1491 bp, Artificial Sequence
  derived and/or modified sequence
atgactttcaattcatttgagggttcgaaaacttgtgtgccggctgatatcaacaaagaagaagagttcgtggaggaattcaacaggttgaaaacgttcgcgaacttcccctcaggatcgcctgtgagcgcctcaacgctcgccagagcagggtttctctacaccggagaaggagacactgtgcgctgcttctcgtgccacgccgctgtcgaccgctggcaatacggagattctgcagtgggccgccatcgcaaagtctccccgaactgccgatttatcaatggcttttacctggagaactccgctacgcagtcgactaattcgggtatccagaatggccagtataaggtagaaaactatctcgggtcccgcgaccattttgcactggataggccttccgaaacccacgctgactatctgctgcgcactggccaagtcgtcgacatctcggacactatctatccgagaaacccggctatgtacagcgaagaagcccgactcaagagcttccaaaattggcctgactacgcccatttgaccccccgcgaattggcgagcgcaggactgtactataccgggatcggggatcaggtccaatgtttctgctgtggtggcaagctgaagaactgggagccatgcgaccgcgcctggtccgaacaccgccgccacttcccgaactgcttctttgtgctgggtagaaacctgaatatccggagcgagtccgatgccgtttcctcagacaggaacttcccgaattccaccaacctgccccggaacccatcaatggccgactacgaggcacgcatcttcaccttcggtacctggatttactcggtcaataaagagcaactggcacgggctggattctacgcgctcggagagggggataaggtgaaatgtttccattgcggtggtggactcactgactggaaaccgagcgaagatccgtgggaacagcacgcaaagtggtacccgggatgcaaatacctccttgaacaaaagggccaagaatacatcaacaacattcatctgactcattcgctggaagagtgtctcgtgagaactactgagaaaacccccagcctgacccggcgcatcgatgacacgatcttccaaaacccgatggtgcaggaagcaatccggatgggtttcagcttcaaggacatcaaaaagattatggaagaaaagatccaaatctccgggagcaactacaagagcctggaagtgctggtggcagatctggtcaacgcccaaaaagattcgatgcaagatgaaagctcccagacctccctccagaaggagatatcaacggaggaacagctgcggcggctgcaggaagagaaactttgcaagatctgcatggatagaaatatcgcgattgtgttcgtcccgtgcggacacctggtgacttgtaagcagtgcgccgaagctgtggacaagtgccctatgtgctacaccgttatcacctttaaacaaaagatcttcatgtcc

SEQ ID NO: 325205 - DNA, 1491 bp, Artificial Sequence
  derived and/or modified sequence
atgacctttaattcttttgaggggagcaagacgtgtgtgcctgcagacataaataaagaggaagagtttgtggaagaatttaatagactcaaaaccttcgcgaacttcccctctggctcgcccgtttcagcatctacattggctcgagccggctttctgtatactggtgagggcgatacagtgcggtgcttcagctgccacgctgccgttgacagatggcagtacggggattccgcagttggacggcacaggaaggtctcacccaattgtcgttttatcaatgggttctatttggagaattccgcgacacaaagtaccaattcaggaattcagaacggccagtataaggtcgaaaattacctgggaagcagggaccattttgccctggaccgtccttcggagacgcacgcagattatctgctgaggacaggccaggtggtggatatttcagatacaatttaccctagaaaccccgctatgtactctgaagaggctcgactgaaatcatttcagaactggcccgattacgctcatctgacccctcgggaactggcatctgccggcctctattacaccggtatcggagatcaggtccaatgtttttgctgcggtggaaagcttaagaactgggaaccttgcgacagggcctggtccgaacataggaggcacttcccaaactgcttttttgtcttaggccgcaacctgaacatccgaagtgagtccgacgctgtgtcaagcgacaggaactttccaaactcaaccaatctgccccgcaatcccagcatggccgattacgaggctagaatcttcacctttgggacctggatttactctgtgaacaaagagcagctggcaagagcgggcttctatgccctgggagagggcgataaggtgaagtgtttccactgcggtggtggattgactgactggaagccttccgaagatccatgggagcagcatgcaaaatggtatcccggctgtaagtatctgctcgagcagaaagggcaagaatacatcaacaatatccatctaacacattccctggaggagtgtctagtgcgaacgacagaaaagactccttcacttacaaggagaatcgatgacactatcttccagaatccaatggtgcaggaagctatacggatgggcttttctttcaaggacatcaaaaagatcatggaggagaagattcaaatttccggatccaattacaagagcctagaggtgctggtggcagacctagtgaacgctcaaaaggacagcatgcaagatgaaagtagtcagacctcgctccaaaaggaaatcagcaccgaggagcaactgcggcgactgcaagaagaaaaactgtgtaagatctgtatggatcggaacatcgcaatcgtttttgtgccatgtgggcacctggtcacgtgtaaacagtgtgccgaggccgtagacaaatgtcctatgtgctataccgtgatcacgttcaagcaaaagatattcatgagc

SEQ ID NO: 325206 - DNA, 1491 bp, Artificial Sequence
  derived and/or modified sequence
atgacctttaactcctttgagggaagtaagacctgcgtgcccgctgacatcaataaagaggaagaattcgtggaggagtttaataggctgaaaaccttcgctaattttccatccggtagccctgtctcagcgagcaccctcgcccgcgctggatttttgtacacgggtgagggcgatactgtgcggtgcttctcctgccacgccgccgtcgatagatggcagtatggagactcggccgtgggacgtcatcggaaagtttcccccaattgccggtttatcaacggattctacctagagaactcagccacccagtctaccaactcaggcatccaaaacggccagtacaaagttgagaattacctcggctccagggaccatttcgcgctcgacagaccaagtgaaacgcacgccgactacctcctcaggacagggcaggtggtggacatttccgacacgatctatcctcggaacccggcgatgtacagcgaggaggctcggcttaaatcctttcagaactggcctgattatgctcatttgacccctcgagagctggcctctgctggcctgtattatactgggataggcgaccaggtgcaatgcttctgctgtggtggtaagctcaagaattgggaaccatgtgaccgcgcgtggagtgagcaccgccgacattttcccaattgctttttcgtccttggtcgcaatcttaacatcagatctgagtccgacgcagtttcctcagaccgcaatttcccgaatagcaccaacttgccgcggaatcctagcatggcggactacgaggcacgcatcttcacattcggaacttggatttactcagtgaataaggagcagctggcaagagcaggcttctacgcactgggcgaaggcgacaaagtgaagtgcttccactgcggcggcggtctcactgactggaaaccttcagaagatccatgggaacagcacgctaaatggtaccccgggtgtaaatacctgttggaacaaaagggacaggagtatataaataatatccatctgacgcactccctagaagaatgcctcgtgcgaaccactgagaagaccccctcactcacacgacgcatcgatgacaccatctttcagaaccccatggtgcaggaggccattaggatggggttctcattcaaggacataaaaaaaatcatggaggaaaagatccagatctctgggtccaattacaagtctttggaggtgctggtggccgatctggtgaacgcacagaaggacagtatgcaggacgaatctagccaaaccagcctgcagaaggaaatctctacagaggaacaactgaggcggctgcaggaggagaagctctgtaagatttgcatggacagaaacatcgctatagtgtttgtgccgtgcggacatctggtcacttgtaagcagtgcgctgaggccgttgataaatgccctatgtgttacactgtcatcacttttaagcagaaaatctttatgtcc

SEQ ID NO: 325207 - DNA, 1491 bp, Artificial Sequence
  derived and/or modified sequence
atgaccttcaactcgttcgaaggctcaaagacctgcgtgccagcagatatcaataaggaagaagagttcgtggaagaattcaacagacttaagacttttgctaactttccttccggatcaccagtgtcggcgagcactctggctcgggcaggattcctgtacaccggggaaggagatactgtccggtgcttctcatgccatgcagcagtggacaggtggcaatacggggatagcgcagtcggacgccaccgcaaggtgagccccaattgtcgctttatcaacggattctacctcgagaactcagccacccaaagcaccaactcaggtattcagaacggacaatacaaagtggagaactacctcggctcacgcgaccactttgcgctcgaccggccctcggaaacccacgcggattacctgctccgcactggacaagtggtggacatctcagacaccatctacccgcggaacccagccatgtacagcgaagaagcccggctgaagtcctttcagaattggccagactatgcccacctgacgcctcgcgagctggcatcggccgggctgtactacactggcatcggggaccaagtgcaatgcttttgctgcggcggcaagctcaagaactgggaaccatgtgatagagcgtggtcggaacaccgccggcacttcccaaactgcttcttcgtcttgggacgcaatctcaatatccggagcgaaagcgacgctgtctcgtcggacagaaacttcccgaatagcactaacctcccgagaaacccgtcaatggccgactatgaggcacgcatcttcacctttggtacttggatttacagcgtgaacaaagaacaactggcccgcgctggtttttacgcattgggtgaaggagataaggtgaaatgttttcactgcggtggaggccttaccgactggaagccttccgaagatccgtgggagcaacacgccaagtggtacccgggttgtaagtaccttctggaacagaagggccaagagtacatcaacaacatacatctgacccactctctcgaagaatgcctcgtgaggaccaccgagaaaacgccgtcactgactcgacggattgatgatactatcttccagaatccaatggtccaggaggccatccgcatgggattctcattcaaagacattaagaagattatggaggaaaagatccagatttcgggaagcaactacaaatccttggaagtcctcgtcgcagacctcgtgaacgcacagaaggattccatgcaggatgagtccagccagacttcgctgcagaaagaaatctcaactgaggagcagttgcggagactgcaggaagaaaaactgtgcaagatctgtatggaccggaacatcgccatcgttttcgttccgtgtggacatctggttacttgcaaacagtgcgctgaagcggtggacaagtgcccaatgtgttacaccgtgattacctttaaacagaagatcttcatgtcg

SEQ ID NO: 325208 - DNA, 1491 bp, Artificial Sequence
  derived and/or modified sequence
atgaccttcaattccttcgaggggtccaaaacatgcgttccagccgacatcaataaagaggaggaatttgtagaggaatttaaccggctgaaaacgttcgctaattttccatctggctcacccgtgtcggcatcaacactcgcacgggctggcttcttgtacaccggagagggtgacactgtgaggtgcttctcttgccacgccgccgtggatcggtggcagtatggcgattccgcagttggtcgccaccgcaaggtcagcccaaactgtagattcatcaacgggttttatttggagaacagtgccacccagtccaccaattctggaatccagaatggtcagtataaagtggagaattacctgggatccagagatcattttgctttggatcgaccctctgaaacgcatgccgactatttgctgcggactggtcaggtggtggacatttccgatactatttatccccgaaacccagctatgtatagcgaggaagcacgcctgaagtcctttcagaattggcctgattacgctcatctgactccccgagaactggcttctgctggactgtattacaccgggatcggtgaccaggtgcagtgtttttgttgtggcggcaaactcaaaaattgggagccctgtgacagagcttggagtgagcatcgccgccacttccccaattgcttctttgtacttggccgcaacttaaacattcggtccgagtccgatgcagtgtcctccgataggaactttccaaactccactaatctacctcgtaatcctagcatggccgactatgaagcgagaattttcacttttggcacctggatttattccgtgaacaaggaacagcttgcccgcgcggggttttatgcactcggcgagggcgacaaggtaaagtgtttccattgcggaggtggactgactgattggaaaccctctgaagacccttgggagcagcatgcaaagtggtaccccgggtgtaaatacttactggaacagaagggccaggaatatatcaataatatccatttaacccacagtttggaggagtgcctcgtaagaactacagaaaagacaccttccttaactcgcaggattgatgataccatcttccagaatcctatggtgcaagaagcaatccgcatgggcttctcctttaaagatattaaaaaaatcatggaggagaagatacaaatttcaggtagtaattacaagtcactggaagtgctggtcgcagacctagtgaacgcccagaaggattcaatgcaggacgagtcttcccagacatcgctccagaaggaaatttccactgaggagcagctgcgaagactgcaggaagaaaaactgtgcaaaatatgtatggatcgtaatatagccattgttttcgttccttgcggccatctggtaacctgcaaacagtgcgccgaggccgtagataagtgtcccatgtgttacacagttattacatttaagcagaagatttttatgtct

SEQ ID NO: 325209 - DNA, 1491 bp, Artificial Sequence
  derived and/or modified sequence
atgaccttcaactcgttcgaaggatccaagacctgcgtgcccgccgatatcaacaaggaagaagagtttgtcgaagaattcaaccgcctgaaaacgttcgcaaacttcccgtcaggatcgcctgtctccgcgagcacccttgctcgtgcaggatttctgtacactggagaaggagacaccgtgcggtgttttagctgccatgccgcggtggaccggtggcaatacggggacagcgccgttggccgccatcgcaaggtgagcccgaattgcagatttatcaatggattctacttggagaacagcgcaacccagagcactaattccggtattcagaacggacagtacaaggttgagaactacctcggatcgcgggaccacttcgccctggaccggccttccgaaactcacgcggactacctcctcagaactggccaggtggtggacatcagcgatactatctacccgagaaatcctgccatgtacagcgaggaggcccgcctgaagtcattccagaactggcctgactacgcccaccttactccgagagaactcgcaagcgccggcctctactacactggaatcggtgaccaagtgcagtgtttttgctgtggaggaaagctgaagaactgggagccgtgtgacagagcgtggtccgaacaccgccgccactttccaaattgcttctttgtgctgggtcgcaacctgaacatccggtcggagtcagacgcggtgtcgtccgaccggaacttcccgaactcaaccaatctccccaggaatccatcaatggcggactacgaggcgcggatcttcactttcggcacctggatctactcagtgaataaggagcaactggcgagagcaggattttacgccctgggggagggcgacaaagtgaaatgtttccactgcgggggcggattgactgactggaaaccgtccgaggacccctgggaacagcacgccaaatggtaccccggatgtaagtacctgctggaacaaaaaggacaggaatacatcaacaatatccacctgactcatagcctggaggaatgtcttgtgaggaccactgagaaaactccctcactgactcggagaatcgatgacaccattttccaaaatccgatggtgcaggaagcgatccgcatgggcttttcctttaaggatatcaagaaaatcatggaagagaaaatccaaatctccggatctaactacaagtccctggaagtgctcgtcgcagatctggttaatgcacagaaggatagcatgcaagacgaatcgtcgcaaacctccctccaaaaggagatctcaaccgaggaacagctgagaaggctgcaagaagagaagctctgcaagatctgcatggaccgcaatatcgctatcgtgttcgtgccctgcggacatctggtcacctgtaagcagtgtgccgaagctgtggacaagtgcccaatgtgctacaccgtgatcactttcaagcagaagatcttcatgtcg

SEQ ID NO: 325210 - DNA, 1491 bp, Artificial Sequence
  derived and/or modified sequence
atgacctttaactccttcgaaggcagcaagacttgcgtgcctgcagatatcaataaggaagaggaatttgtggaagaattcaacagactcaagaccttcgccaacttcccttcgggttccccagtttcggcatcgactcttgccagggcggggttcctgtatactggagagggcgacaccgtcaggtgtttctcgtgtcatgcagctgtggataggtggcagtacggagacagcgcagtcggacgtcataggaaagtgtcccctaattgtagatttatcaacggattctacttggaaaacagcgcaactcagtccaccaattctggaatccagaacggccagtacaaagtggaaaactacctgggatcgagggatcacttcgcgctcgatagaccttcggaaacgcacgcagactacctgcttcgcacgggacaagtggtggatatctccgatactatctatccgcgaaatcctgccatgtacagcgaggaggcccgactcaagtcctttcaaaactggcccgactacgcacatcttacccctcgcgaactcgcgagcgctggtctgtactatactggaatcggagatcaggttcaatgcttttgctgtggggggaaactgaagaactgggaaccctgcgaccgggcatggtcggaacatagacggcactttcctaattgtttctttgtgctggggaggaacctcaacataagatcggaatcagacgcggtgtcaagcgacagaaacttccccaacagcacgaacttgcctcgcaatccaagcatggcagactacgaggcccgcatctttactttcggaacttggatttactctgtcaataaagaacagctcgcacgcgcagggttctatgctctgggagaaggggacaaggtgaaatgctttcattgtggaggtggcctgactgattggaagccaagcgaggatccgtgggaacaacacgcaaagtggtacccagggtgtaagtatctgctggagcaaaaaggtcaagagtacattaacaacatccatcttacccattcattggaggaatgccttgtccgcaccaccgaaaaaaccccgtcgctgaccagacgaatcgatgataccattttccaaaacccaatggtgcaagaagctattcgtatgggattctcatttaaggacatcaagaagattatggaagaaaagattcaaatcagcggctctaattacaagtccttggaagtgctggttgcagacctggtgaacgctcagaaggatagcatgcaagatgaatcgtcccagacgtcccttcaaaaggagatttccaccgaagaacagctgcggcgactccaagaggaaaagctgtgcaagatttgcatggacagaaacatagcgatcgtattcgtcccctgtgggcatctggtgacctgtaaacaatgtgccgaggccgtggataaatgtcccatgtgttacactgtgatcaccttcaagcaaaagatctttatgtca

SEQ ID NO: 325211 - DNA, 1491 bp, Artificial Sequence
  derived and/or modified sequence
atgacttttaactcgtttgaagggagcaaaacttgcgtgcccgctgacattaacaaagaggaagaatttgtggaagaattcaatcggcttaagacgtttgccaactttccaagcggatccccagtgagcgcatcgaccctggctcgggcgggattcctctacactggggaaggtgatactgtgcgctgtttctcgtgtcatgcagcagttgatcgatggcagtacggagactcagccgtcggacgacatcgcaaggtttcgcctaattgtcgatttatcaacggtttctacctggagaattcagcaactcaaagcaccaactcaggcatacagaatggccagtacaaggtggaaaactacctgggttcaagagatcatttcgcgctcgaccgaccgtccgaaacccatgcagattaccttcttcgcaccggccaagtcgtggacatttccgataccatctaccctcgaaacccagcaatgtactctgaggaagctcgactgaaatcctttcagaactggcctgactacgcacacctgaccccccgggaactcgcaagcgcaggactctactacacgggcattggagatcaggtgcaatgcttctgttgcggtggtaagttgaagaattgggaaccttgtgaccgtgcatggtcagaacatcgtcggcacttccctaactgttttttcgtccttggtagaaacttgaatattcggtccgagtcggacgccgtctcttcggaccgtaactttccgaacagcactaatcttccccgtaatccaagcatggctgattacgaggcacgcattttcaccttcggcacctggatttactccgtcaataaggagcagctggcacgtgccggtttttacgcacttggggaaggcgataaagtgaaatgcttccattgcgggggaggactgacggattggaaacccagcgaggatccttgggagcaacacgccaagtggtatcctgggtgtaagtatctgcttgaacaaaagggccaggagtatatcaacaatatccacctcacccactcgcttgaagagtgtcttgtgagaaccactgagaaaactccttccctgactcgaagaatagatgacaccatttttcagaatcccatggtgcaagaagcgatccgtatgggcttttcgtttaaggatatcaagaagattatggaagaaaagatccaaatcagcggaagcaattacaagagcctcgaagtgcttgtcgcagacctcgtcaacgcccaaaaagatagtatgcaagatgaatcgtcacaaacgtcactgcagaaggaaatttccaccgaggaacagcttagacgcctccaagaggaaaagctgtgtaagatttgtatggatcgtaacatcgcgatcgtctttgtgccatgtggccatctcgtcacctgtaaacaatgcgctgaggcagtagataagtgcccgatgtgttacactgtgataacttttaagcaaaagatctttatgtcg

SEQ ID NO: 325212 - DNA, 1491 bp, Artificial Sequence
  derived and/or modified sequence
atgaccttcaactcgttcgaaggctcaaaaacttgcgtcccggccgacatcaataaggaagaggaattcgtggaagagttcaatcggctgaaaacctttgcaaacttcccaagcggatccccggtatcagcctcaacccttgcacgggcgggcttcctctacactggtgaaggcgataccgtgcgctgcttcagctgccatgcggccgtcgatagatggcagtacggggactcagctgtggggcgccaccgaaaggtgtcaccgaattgtagattcatcaacggattctacctggagaatagcgccactcagtcgactaactcggggatccagaacggccagtacaaggtggaaaactatctgggctctagggatcacttcgcccttgatcggccgtccgaaacccatgcggactacctccttcgcaccggacaagtggtggacatctcagatacgatctacccccggaatccggcaatgtacagcgaagaagctagactgaagtcattccagaattggccggactacgcccacctgacgccacgcgaactcgcgtcggctggactgtattacaccggaatcggtgaccaagtgcagtgcttttgctgcggcggaaagctgaagaactgggaaccttgcgaccgcgcgtggtcggaacatcggaggcactttccaaactgcttttttgtgcttggacggaacctcaatatcagaagcgaaagcgatgccgtgtcctccgacagaaacttcccaaactccactaatctcccgcgaaatccatcgatggctgactacgaggctcgcatcttcactttcgggacctggatctattccgtcaacaaggaacagctggctagagcgggattctacgcgctgggcgaaggcgataaagtgaaatgctttcactgcggaggaggtctgactgactggaagccgtccgaagatccgtgggagcagcacgcaaagtggtatccgggctgtaagtacctgcttgaacaaaagggacaggagtacattaacaatatacatctcactcactctctggaggaatgcctcgtccggaccactgaaaagactccgagccttactcggagaatcgatgacactatcttccaaaaccctatggtgcaagaagcaattagaatgggattctcatttaaggatatcaagaaaatcatggaagagaaaattcaaatcagcgggtcgaactacaagagcctcgaagtgctggtggccgacttggtgaatgctcagaaggactcaatgcaggacgagtcatcccaaactagcctccagaaggagatctcgactgaagagcagctcagacggctgcaggaagagaagctgtgcaaaatctgcatggatcgcaacatcgccatcgtctttgtgccttgcggccacctcgtgacttgcaaacagtgcgccgaagcagtggataaatgccccatgtgttataccgtgatcacctttaaacagaaaatcttcatgtcg

SEQ ID NO: 325213 - DNA, 1491 bp, Artificial Sequence
  derived and/or modified sequence
atgacgttcaatagctttgaagggagcaagacctgtgtgccagctgatatcaacaaggaggaagagtttgtggaagagtttaatcgccttaagacttttgcgaattttcctagcggatccccggtgagcgcatcgactcttgcgagagcaggatttctgtacaccggcgaaggtgacactgtgcgctgcttctcgtgtcatgccgcagttgatcgttggcaatacggcgactcagcagtgggacgccataggaaggtgtccccaaattgtcgcttcattaacggtttctacctggagaactcagccactcaatccactaactcaggaatccagaacggtcagtacaaagtggagaactacctcggatcgagagatcactttgcgcttgatcgcccatccgaaacccatgccgattacctcctccggactggacaagtggtcgatatctccgatacgatatacccacggaatcccgccatgtactccgaggaagcccgactgaagtccttccaaaattggcccgactacgcacatcttactcctagagaacttgctagcgcagggctttactacaccggtatcggcgatcaggtccaatgtttttgttgtggaggtaagctgaagaactgggaaccttgtgatcgcgcatggtccgagcatcggagacattttcctaattgtttctttgtcctggggcgtaatctgaacattcgctcggaatcggatgcagtgtcaagcgatcggaactttcctaactcgacgaacctcccaagaaacccctcgatggcagactacgaagcacgaattttcacttttggaacttggatttactcggtcaacaaggaacaactcgcacgtgcaggtttttacgccctgggtgaaggtgacaaggtgaagtgtttccattgtgggggtggtttgaccgattggaagccttcggaagatccttgggaacaacatgcgaagtggtaccctggttgtaagtacctgttggaacagaagggtcaagaatacattaacaacatccatcttactcattcccttgaggaatgtttggtgagaactaccgaaaagactccctcgcttaccagacggatcgacgataccatttttcaaaaccctatggtccaggaagccattagaatgggtttctcctttaaggatatcaaaaagatcatggaggagaagatacaaatctcaggatccaattacaagtcccttgaagtgcttgtggccgatctcgtgaatgcacaaaaggactccatgcaggatgaaagctcccagacctcacttcaaaaagaaatctcaaccgaagaacagcttaggagactgcaggaagagaaactgtgcaagatttgtatggatagaaacatcgcaattgtgtttgtgccatgtggacacctcgtgacctgtaaacagtgtgcagaagcggtcgataagtgtcctatgtgctacacggtgataacctttaagcagaagatctttatgtca

SEQ ID NO: 325214 - DNA, 1491 bp, Artificial Sequence
  derived and/or modified sequence
atgacattcaactctttcgaaggctcaaaaacctgtgtccctgctgacatcaataaggaagaagaattcgtcgaagagtttaatcggctgaagacgtttgccaattttccttcaggttctccggtctctgctagcacattagccagggctggtttcttgtacacaggggagggggacacagtacggtgcttttcctgccacgcagccgtcgacaggtggcagtatggcgattctgccgttggcagacataggaaggtctcacccaactgcagatttatcaacggtttttaccttgagaacagtgccacgcagtccactaatagtggaattcagaatgggcagtataaggtcgaaaactacctgggctcgagggaccactttgcgctggaccgaccatccgaaactcatgcagactatctgcttagaactggccaggttgtcgatattagtgacacaatatatcctaggaaccctgccatgtattctgaagaggccaggctgaaatctttccagaattggccagactatgcccacttaacgcctagagagctggctagcgcgggactttattataccggaatcggggaccaggtccagtgcttctgctgcggggggaaacttaaaaactgggaaccttgtgatcgagcttggtcggagcataggaggcacttcccaaactgcttttttgtgctcggtagaaacctcaatattcgctccgaaagcgacgctgtatcaagcgataggaatttccccaactctaccaaccttccgcgcaacccctctatggcagattatgaagcgaggattttcacatttgggacttggatttattcagtcaacaaggagcagctggccagggccggcttctacgctctgggagaaggtgataaggtgaaatgcttccattgtgggggagggttgaccgactggaagcctagtgaagacccttgggagcaacacgccaaatggtaccccgggtgcaaatatttgttggagcagaagggacaggaatatattaacaatatccacttgacccacagcctcgaagagtgtctagtcagaactactgagaaaactccctccctcactaggaggatagacgataccatttttcagaacccaatggtgcaagaagccatccgcatgggctttagctttaaggatatcaagaagattatggaagaaaaaatccagatctctggaagcaactacaaatcccttgaagtgctagttgctgatctcgtgaacgcgcagaaagactccatgcaggacgagtcaagtcaaacctccttgcagaaagagatctcaacagaggaacaactgcgaaggctgcaggaagagaaactttgtaagatctgtatggacaggaacattgctattgttttcgtgccttgtggtcatctcgttacgtgtaaacaatgtgccgaagcagtggacaagtgccccatgtgttatacggtcattacctttaaacaaaagatatttatgtcc

SEQ ID NO: 325215 - DNA, 1491 bp, Artificial Sequence
  derived and/or modified sequence
atgacgtttaattcttttgaggggagcaagacctgtgtaccagctgacatcaataaagaggaagaatttgtggaggagtttaatagattgaaaaccttcgctaattttccatctggctcacccgtgtctgcgagcacactggcgcgggcaggcttcctgtatacgggtgagggtgatactgtgagatgtttcagctgtcacgctgccgtggatcggtggcaatacggcgacagtgctgttgggcggcatcgcaaggtgtcccctaactgtcggttcatcaatggtttctacttagagaatagtgcgacacaaagcactaacagcgggattcagaatgggcaatataaagtagaaaactacctcgggagccgcgatcatttcgctttggaccggccaagtgagactcacgcagactatctccttaggactggacaggtggtggatattagcgataccatttaccctagaaaccccgccatgtattccgaggaagccaggttgaagtcctttcaaaattggcctgactacgctcatttaaccccacgggaattagcctcagctggcctctattacactggaattggggaccaagtccagtgtttctgttgtggtggaaaattgaagaattgggaaccttgtgatcgcgcgtggtccgaacatcggaggcattttcccaactgtttcttcgtcttaggacggaacctgaatatcaggagcgagagcgatgccgtgtcctcagaccggaatttccccaatagtacaaacctgccacggaaccctagcatggccgactatgaggcacgcatattcacttttggtacttggatctacagtgttaacaaagagcagcttgcgcgcgcagggttctacgccttgggtgagggtgacaaagtcaagtgcttccactgcggaggaggcctgacagactggaagccctccgaagacccatgggaacagcatgctaagtggtatccaggctgtaaatatctccttgagcagaagggacaggagtacattaacaacatccatttgacgcactcgttggaggagtgtctagttcggacaacagagaaaacgccatcgctgacaagaagaattgacgacaccatatttcagaatccgatggtgcaggaggcaatccgaatgggtttctcatttaaagatataaagaaaattatggaggaaaagatccagatctccgggagcaactataaaagtctggaagtgctagtggccgacctcgtgaatgctcaaaaggactcgatgcaagatgagtcctctcagaccagtctgcagaaggagatttcaactgaagaacagctcaggagactgcaagaggagaagctatgtaagatctgcatggatcgcaacatcgcgatagtcttcgttccgtgcggccacctggtgacctgtaagcagtgcgccgaggccgtcgataagtgccctatgtgctacacggtaatcacatttaagcagaaaattttcatgtca

SEQ ID NO: 325216 - DNA, 1491 bp, Artificial Sequence
  derived and/or modified sequence
atgacctttaactcttttgagggttccaagacctgtgtccccgcagacataaacaaagaagaggagttcgtggaagagttcaaccggctgaagacattcgctaactttccatcagggagcccagtctctgcctctaccctggcaagggcaggattcttgtataccggcgaaggcgacacagttcgatgcttttcatgtcatgcagcagtggaccggtggcagtatggcgattcggcggtcgggcggcacaggaaggtctcacccaactgcaggttcattaatggtttctatttggaaaactcagctactcagagtaccaattccggcattcagaatggccagtataaagtggaaaattacctcggatcccgggatcatttcgcactagaccgtccgtccgagacacacgcagactatcttctgcgtaccggccaggtcgttgacatatctgatacaatatatccccgaaacccggctatgtactcagaggaagcgcggctcaaaagctttcaaaactggccagattacgctcatctcactccccgtgaactcgcctccgctggcctgtactacacggggattggggaccaggtccagtgtttttgttgcggtggcaagctgaagaactgggagccctgcgaccgcgcgtggagtgaacaccggagacattttccaaactgtttctttgtacttgggcgtaacctgaatattagaagtgagagcgacgcagttagtagcgaccggaattttcccaacagtaccaatctgcctaggaatccctctatggctgattacgaggctagaatttttaccttcgggacgtggatatactcggtgaataaagagcagttggcccgggccggcttttatgccctgggcgaaggcgacaaagtgaagtgttttcactgtgggggagggctgaccgactggaaaccatcagaagacccttgggagcagcatgctaagtggtatcctggctgcaaatatctgctcgagcaaaaaggtcaggaatacattaataacattcacctgacccattccctagaagagtgcctggttcgcactaccgagaaaacgcccagccttacacggcggattgatgataccatcttccaaaaccccatggtccaggaggctattcggatggggttttcattcaaggacattaagaagattatggaggaaaaaattcaaatatccggaagcaattacaaaagtctggaagtcctggtcgcagatctggtcaacgcccagaaggattccatgcaggatgagagctctcagacctctttacagaaagaaatttccaccgaagagcagcttagacgcctgcaggaggaaaagctttgcaagatttgcatggacagaaatatcgctatcgtgtttgtcccatgtggtcacctggtcacctgcaaacaatgcgctgaagccgtcgataagtgccctatgtgttacacagtcatcaccttcaagcagaagatattcatgtca

SEQ ID NO: 325217 - DNA, 1491 bp, Artificial Sequence
  derived and/or modified sequence
atgacttttaattcattcgaggggagcaaaacctgtgtgcccgcagatattaataaagaagaagagtttgtagaggagtttaacagattaaaaacttttgccaacttcccctcgggttctcccgtgagcgcaagcacactcgccagagcaggatttttatacaccggagagggtgatactgtcaggtgtttctcttgccacgcagccgttgaccgatggcagtacggagacagcgctgtcggacgccaccgcaaggtttcaccgaactgcagatttatcaatggattctatctcgagaattctgctactcagtccacaaactccggtatccagaatggccagtacaaggtggaaaattatctcgggtcccgggaccattttgccctcgatcggccttccgagacccacgcagattacctgttgcgaaccggccaggttgttgatattagtgacaccatttaccctcgaaaccccgctatgtacagcgaggaagctagactgaagagctttcagaattggcccgactacgcccatctgaccccgagagagttggcatccgctggcctgtattacaccgggataggagatcaggtacagtgcttttgctgcggagggaagctcaaaaactgggagccctgtgaccgagcctggtccgagcataggaggcacttcccaaattgtttcttcgtactggggaggaacctaaacatcaggtctgagtccgacgcagttagttcggaccggaactttcccaactcaacgaatctgccgagaaacccttctatggccgactatgaggctaggatttttacgttcggcacctggatttatagcgtgaacaaggagcagctagcaagagctgggttttacgccttgggggaaggggacaaagtgaagtgttttcactgcggtgggggtctcacagactggaaaccgtcagaggatccttgggaacagcatgccaagtggtaccctggctgcaaatacctgttggagcagaagggccaggagtacatcaacaatatacacctcacacacagtctggaagaatgcctggttcgtaccacggaaaagaccccttcactcacgcggaggatagatgataccatctttcagaacccaatggtgcaggaggccattcggatgggattctccttcaaagacattaagaaaatcatggaggagaagatccagatttcaggttctaactataagagcctcgaagtgcttgttgcagacctagtgaacgcacaaaaagatagcatgcaggacgaatcctcacaaacaagcctgcagaaggaaatctccaccgaggaacagctgcggcgcctacaagaggaaaaactctgcaaaatttgcatggatcgtaacattgccattgtgtttgtgccgtgcggacacctggttacttgtaaacaatgtgccgaagccgtcgacaagtgccctatgtgctacaccgtaatcaccttcaagcagaagatattcatgtcg

SEQ ID NO: 325218 - DNA, 1491 bp, Artificial Sequence
  derived and/or modified sequence
atgaccttcaattcttttgaaggatctaaaacctgcgttcctgctgacattaataaggaagaggaattcgtggaggaatttaacaggctgaagaccttcgcaaactttccttccgggtcccccgtgtccgcctctaccctggctcgcgccgggttcctctataccggggaaggcgacaccgtcaggtgtttctcttgccatgccgccgtggacagatggcagtacggggatagtgctgtcgggcggcaccgaaaggtgtcgccaaactgcaggtttattaacgggttctatctggagaacagcgccacgcagtcaacaaactctggtattcagaacggacagtacaaggtggaaaattacctggggtcacgcgatcatttcgcactcgatcgaccgtccgagacccacgctgactacctgttgagaacgggacaggtggttgatatctcagatactatctatcccaggaaccctgccatgtacagtgaggaggctcggctgaagagtttccagaattggcccgattacgcccacctgacaccacgcgaacttgcaagcgctggactctattacacgggaataggcgaccaggtccagtgcttttgctgcggtgggaagctcaagaactgggagccatgcgatcgagcctggtcagaacaccggaggcacttccctaactgcttcttcgtgctaggacgtaaccttaatattcggagcgaaagcgacgcggtgtcctccgacagaaacttccctaattcaactaacctgccacggaaccctagtatggcagactatgaagctcgaatctttacattcggcacgtggatctacagtgtcaacaaagagcagctggcacgggctggtttctacgccttgggcgagggtgacaaggtgaagtgtttccattgcggaggcggacttacagactggaaacctagtgaggacccctgggagcagcatgctaagtggtatcctggatgtaaatacttgctggagcaaaagggtcaggagtatataaacaatatccacctgacacacagcctggaagagtgcctggttaggaccactgaaaagactcccagcctgactcgccggatcgacgataccatttttcagaaccccatggtacaggaggccatccggatgggtttcagcttcaaggacatcaagaagataatggaagaaaaaattcagattagcggaagtaattacaagtctttagaggtccttgtagcagacctcgttaacgcccagaaggactccatgcaggacgaatcttcacagacctcattgcagaaggagatctccaccgaggaacagctgcggaggctccaagaagaaaaactgtgcaagatctgcatggaccggaacattgccatagtattcgtcccctgcggccacctagtgacctgcaagcagtgtgccgaagccgtcgacaagtgtccaatgtgctatactgttatcactttcaaacagaagatctttatgagt

SEQ ID NO: 325219 - DNA, 1491 bp, Artificial Sequence
  derived and/or modified sequence
atgacttttaactcttttgaaggaagtaaaacatgcgtgccggccgacattaacaaggaggaggaatttgtggaagaattcaaccgtctgaagaccttcgcgaactttccctcgggttccccagtatcagccagtactttggcccgagcgggttttctgtacactggagaaggagatactgtcagatgcttctcctgccatgctgcggtagacaggtggcaatacggagatagtgcagttgggaggcacagaaaggtgtcccccaattgtcgcttcataaacggattctatctcgaaaatagcgctacccagtccactaactctggtatccagaatggtcaatataaagttgaaaactacctaggtagccgtgatcactttgccttggacagaccttcagaaactcatgccgattaccttcttcgaaccgggcaagttgttgatattagcgatactatctatcctcgtaatcctgccatgtatagcgaagaggccaggctgaagtcttttcaaaattggcctgattacgcccacttgacaccaagggagttggcatcagcaggtttatactatacaggcattggtgatcaagtccaatgcttttgctgcggaggtaaattgaaaaattgggaaccttgcgatagagcctggtctgaacacaggcggcactttcccaactgctttttcgtcttgggcaggaacttgaacataaggtctgaatccgatgccgtaagctctgaccgtaatttcccaaatagtactaatttgccccggaacccatcgatggcagattatgaagcacgcatctttacctttggtacttggatctattcagtgaataaggagcaattagctagagccggcttctacgctcttggtgagggagataaggttaagtgtttccattgcgggggtggacttactgattggaagccaagtgaggatccttgggaacaacatgccaagtggtaccctggatgcaagtaccttctcgagcaaaaaggacaagagtatatcaataatatacatctcactcactcattggaggaatgtctcgtcaggactactgaaaaaacgccttccttgacaaggaggattgatgacactattttccagaacccaatggttcaagaagctattagaatgggatttagctttaaggatataaagaagatcatggaggaaaagatccaaatatctggtagcaactataaatccctcgaggttcttgttgcggatcttgttaatgcccaaaaggatagcatgcaagatgaaagcagtcaaacgagcttgcaaaaggaaattagtactgaggaacagctcagacgtttgcaagaggagaagctctgtaaaatttgcatggacaggaacattgctatagtgttcgttccatgtggtcatttggttacttgtaaacaatgtgctgaagccgtggataagtgtcccatgtgttatacagttatcacgtttaaacagaagatttttatgtcc

SEQ ID NO: 325220 - DNA, 1491 bp, Artificial Sequence
  derived and/or modified sequence
atgacatttaattcgtttgaaggcagtaagacctgcgtccctgccgatattaacaaggaggaggagttcgtagaggaattcaaccggctgaagaccttcgccaacttcccaagcgggtcccctgtttcagcatctacactggctcgtgcaggattcctttacacaggcgagggcgataccgtgagatgcttctcctgtcatgccgccgtcgaccggtggcaatacggggactccgctgtgggacggcacaggaaagtatccccaaactgcagatttataaacggcttctacctagagaatagcgcaacccagtctactaacagcggtatacagaacggtcagtataaggtggaaaattatctgggctccagagatcacttcgctctggaccgtccatcagagacccacgctgattatcttctgaggactggccaggtcgtagatatctctgacacgatctatcctcgaaaccctgctatgtattctgaggaagcacgcttgaagagcttccaaaattggcccgattatgcacacttaactccccgagagctggcatctgccggtctctattatacaggcataggagatcaggttcagtgtttctgctgcggaggtaaacttaaaaattgggaaccttgcgaccgagcatggagcgaacacagaaggcattttcccaattgctttttcgtcttgggacgtaacctgaacatccggagcgaatctgatgccgtgtcaagtgacaggaattttccgaattccaccaatctcccccgtaatccatccatggcagattacgaggcaagaatttttacgtttgggacatggatttacagcgtaaacaaggaacagctggctcgggcgggcttctatgctctgggggaaggcgacaaagttaaatgtttccactgcggaggggggctgacagattggaagccctctgaggacccttgggaacagcacgccaagtggtaccccggatgtaaatatctgctggaacagaaagggcaggaatacataaacaatattcaccttacacacagcctggaggagtgcttggttcgcaccactgaaaagaccccctcactcacacgtcgcattgacgataccattttccaaaatcctatggtccaggaagcaatcagaatggggtttagtttcaaagacattaagaaaattatggaggagaaaatccagatctcgggctccaattataaatccctggaagtattggtcgccgaccttgtgaacgcgcagaaggatagtatgcaggacgagtccagtcaaaccagcctccaaaaagagatctctacagaggaacagctgcgtcgcctacaagaagaaaagctgtgtaaaatctgtatggatcggaacattgctatcgtttttgtaccttgtgggcacttagtgacttgtaaacaatgcgccgaggcagttgataagtgtcctatgtgctataccgtaatcacctttaaacaaaagatatttatgagc

SEQ ID NO: 325221 - DNA, 1491 bp, Artificial Sequence
  derived and/or modified sequence
atgactttcaactcgtttgaaggatccaaaacctgtgtcccagcagatatcaacaaggaagaagaatttgtggaagagtttaatcgcctcaagactttcgccaacttcccgtccggatcgcccgtgagcgcaagcactctcgcaagggctggcttcctgtacaccggagaaggcgataccgttagatgtttttcctgtcacgcagcagtggatagatggcaatacggtgactctgcggtgggcagacaccggaaagtctcgcctaattgcaggttcataaatgggttttatctcgaaaattctgcaacccaaagcaccaacagcggcatccaaaatggccaatacaaagtcgagaattaccttggctcgagagatcacttcgcgttggacaggccctcggaaacccatgccgattacctcctccgtactggtcaggtcgtggatatctcggacacgatttaccctcgcaaccccgcgatgtactccgaggaggcaagactgaagagctttcagaattggccggactacgcccatcttacccctagggaactcgcatcggcaggcctttactataccggaattggggaccaagtgcaatgcttctgttgtgggggaaaacttaagaactgggagccctgtgacagagcatggtcggagcatcgtagacatttcccaaactgtttcttcgtgctcggacggaacctcaacatccgctccgaatccgacgcagtgtcatcagatagaaactttccaaattccactaatctccctagaaaccctagcatggccgactacgaagcccggattttcacttttggaacctggatctactccgtgaataaagagcagcttgcgcgcgcaggcttttacgcactgggtgaaggagacaaggttaaatgctttcattgtggaggaggcctgactgactggaaaccttcggaggacccatgggagcagcacgccaagtggtatcccggctgtaagtacctgctggagcaaaaaggacaagaatacatcaacaatattcatctgacccattcgcttgaagaatgcctcgtgagaactaccgaaaagaccccatcgcttacgcgacggatcgatgacactattttccagaacccgatggtccaggaagcaattcgcatgggtttctcgtttaaggacattaagaaaatcatggaggaaaagatacagatcagcggttcaaactacaagtctctggaggtcctcgtggcagacctggtgaacgctcagaaagatagcatgcaggatgagagctcacaaacttcactgcaaaaggagatttcgaccgaagagcaacttcggagactgcaggaagagaagctgtgcaaaatctgcatggatcgaaacatcgccatagtctttgtgccttgcggtcatctggtgacctgtaagcaatgtgcagaagcagtggataagtgtcctatgtgctacacggtcattacgtttaagcagaaaatcttcatgtcg

SEQ ID NO: 325222 - DNA, 1491 bp, Artificial Sequence
  derived and/or modified sequence
atgactttcaacagcttcgagggatcgaaaacgtgtgtccctgccgatatcaataaggaagaagagtttgtcgaagaattcaatcgcctcaagacctttgctaatttcccatcgggaagcccggtgagcgcctccaccctcgcgcgcgctgggttcctctacaccggtgaaggagacacggtgcgatgcttcagctgccatgcggccgtggataggtggcagtacggagattccgcagtcgggcggcatcggaaggtgagcccgaactgcaggttcatcaatggtttttacctggagaactcagctacccagagtactaactcgggaatccagaatggacagtacaaggtggagaactaccttggaagtcgggaccacttcgccctcgatcgcccctcggaaacccacgccgattaccttctgcggacgggacaagtggttgatatctcagacacgatctacccacgcaacccggcgatgtactcagaagaagcacggctgaagtctttccaaaattggccagactacgcgcacctgaccccccgcgaactcgcgtctgccggactgtactataccggtatcggagatcaggtgcagtgcttctgctgcggaggtaagctgaagaactgggaaccatgcgaccgcgcctggtccgagcacaggcggcatttccccaattgcttcttcgtcctgggtagaaacctcaatattcggagcgagtcagatgcggtgtccagcgacaggaacttcccaaactcaactaacctcccgcggaatccttccatggccgactacgaagccagaatcttcaccttcggcacgtggatctattcagtgaacaaagagcaactcgctagggcaggcttttatgccctgggagaaggagacaaggtgaaatgcttccactgcggcgggggcctcaccgactggaaaccttcggaagatccgtgggaacaacacgcaaagtggtaccctggatgcaaatacctgctggagcaaaagggacaggaatacatcaataacatacacctcactcattctcttgaagagtgtctcgttcgcaccacggaaaaaaccccatccttgactcgcaggattgacgacactattttccaaaatccgatggtgcaggaagccatccgaatgggattctccttcaaggacatcaaaaagatcatggaagagaaaatccaaatctcaggatcgaactacaagtcgctcgaggtgctggtggccgatctggtcaatgcgcaaaaggactcaatgcaggacgaatcgtcgcaaacctccctccagaaagagatcagtactgaagagcaattgcggagactccaggaagagaagctctgcaagatttgcatggatcgcaacatcgccatcgtgtttgtgccttgtggccatctcgtgacttgcaagcagtgtgccgaggcggtggacaagtgccctatgtgctacactgtgatcacctttaaacagaagattttcatgtct

SEQ ID NO: 325223 - DNA, 1491 bp, Artificial Sequence
  derived and/or modified sequence
atgactttcaattctttcgaagggtctaaaacttgcgtaccagcagacatcaacaaggaggaagagttcgttgaggagtttaaccggctcaaaactttcgcaaacttcccgagcggatctccagtgtcggcatcaacgcttgcgcgggccggattcttgtatactggcgagggagatactgttagatgtttttcctgtcacgccgcggttgatcggtggcagtacggcgacagtgcagtcggcaggcacaggaaagtctcgcctaattgccgattcattaatggattctacctggagaactcagcaacacagtctactaattcagggatccagaatggacagtataaggttgagaattacctgggtagtagagatcattttgcgctggatcggcccagcgagactcatgccgattacctgttgcgtactggccaagtcgtggacatcagtgacaccatctatccaaggaatccggctatgtactcggaagaagcccgccttaaatcgttccaaaattggcccgactacgctcatctgacaccaagggaacttgcttccgctggcttgtactatacgggtattggagatcaagtgcagtgcttctgctgcggcggcaagcttaaaaactgggaaccatgtgatcgagcctggtccgaacacagacgccacttccctaactgtttttttgtattaggcagaaatcttaacattaggtcagagagcgacgccgtctcatccgataggaactttcccaacagcaccaacctgccacgcaacccaagtatggccgattatgaggctcgaatcttcacgttcgggacttggatatacagcgtgaataaagagcaactcgctcgggccgggttttacgcccttggagagggggataaggtcaagtgctttcactgtggaggaggcctcactgattggaaaccctcggaggatccatgggagcaacacgcaaagtggtatccaggatgtaagtacttgctcgagcagaaaggtcaggagtacattaacaacatacacctgacccattcccttgaagagtgcctggtcagaactactgaaaaaacaccgtctctgacccgacgaattgatgataccatttttcagaacccgatggtccaggaagctatccgaatggggttctcattcaaagacatcaagaagattatggaagagaaaatccagatctccgggagcaactataaaagcctggaagtgctggtcgctgacctcgtcaacgcacaaaaagattcaatgcaggacgaatcctcgcagacaagtttgcagaaagaaatctcgaccgaagagcagctgagacgactgcaggaggaaaagttatgcaagatttgtatggaccggaacatcgctattgtgttcgtgccttgtggccacttggtgacttgcaagcagtgtgccgaggcagttgataaatgtccaatgtgctacaccgtcattacgttcaagcagaaaattttcatgtcc

SEQ ID NO: 325224 - DNA, 1491 bp, Artificial Sequence
  derived and/or modified sequence
atgaccttcaatagcttcgagggttcaaagacttgcgttccagccgatatcaacaaggaagaagagttcgtggaagagttcaaccggctcaagacgttcgccaatttcccttccggatccccggtgtcagcttcaaccctggctcgggccgggttcctttatacgggcgaaggcgataccgtgaggtgcttctcctgccatgcggcagtcgatcggtggcagtacggagattcagcagtggggaggcatcgcaaggtgtcgccgaattgcaggtttatcaacggattctacttggaaaacagcgcaactcaatcgaccaactcggggattcagaacggccagtacaaggtggaaaactacttgggctcccgggaccatttcgccctggacaggccttccgaaacgcacgccgattatcttctgcgcaccggccaagtggtggacatttcagacactatctatccgagaaatcctgctatgtactcagaggaggctagactcaaatcatttcagaactggcctgactacgcgcatctcaccccgagagagctggcgtcagccgggctctactacactgggattggagatcaagtgcagtgtttctgctgtgggggaaagctgaagaattgggagccttgcgacagggcatggtcagagcaccgcagacattttccaaactgtttcttcgtgctcggccgaaatctgaacatcaggagcgaatcggacgctgtgtcgagcgatagaaatttcccaaactcgactaatctgccacggaacccatcaatggcggattacgaagcccggattttcaccttcggaacctggatttactcggtgaacaaagaacagctggcccgggccggcttctacgctctgggagagggagacaaggtcaagtgctttcactgcgggggaggtctgaccgattggaagccgtccgaagatccgtgggaacaacacgccaaatggtacccaggctgcaagtacctcctggaacagaagggccaagagtacatcaacaacatccacctgacccactccctggaagagtgccttgtcagaaccaccgagaaaaccccctccctgacccgccgcattgatgacaccatcttccagaacccgatggtgcaggaggccatccgcatgggattctccttcaaagacatcaagaagatcatggaagagaagattcagatatccggttccaactacaaatccctggaggtcctggtggcagacctcgtcaacgcgcaaaaggatagcatgcaggacgagtcgtcccagacctctctccagaaagagatttccaccgaagagcagctgcggcgcctgcaagaggaaaagctgtgcaagatctgcatggaccgcaatatcgcaatcgtctttgtgccttgcgggcatttggtgacttgcaagcagtgcgccgaagcggtggacaaatgcccgatgtgttataccgtgatcacctttaagcaaaagatattcatgagc

SEQ ID NO: 325225 - DNA, 1491 bp, Artificial Sequence
  derived and/or modified sequence
atgactttcaatagtttcgaaggatcaaagacctgcgtcccagccgatatcaataaggaagaggaattcgttgaggagttcaaccgcctcaagactttcgcaaacttcccttccggatcccctgtctcggcttcgaccctggctagagccggcttcctgtataccggagagggcgacactgtgagatgcttctcgtgccatgccgcagtggaccggtggcagtatggtgattcagctgtcggtagacacagaaaagtgtcaccgaactgccgcttcatcaacggcttctacctcgagaattcggctactcagtcgactaattccgggatccaaaacggacagtacaaagtggagaattacttggggtccagggaccacttcgcgctggaccggccaagcgagactcacgcagactacctgctgcgcaccggacaggtggtggatatcagcgacaccatctaccctcgaaacccggcgatgtacagcgaagaggcccgcctgaagtccttccagaactggccggactacgcgcaccttactccgcgcgagctggcttccgcgggactgtactacactgggatcggggatcaagtgcagtgcttctgctgtggcggaaagctgaaaaactgggaaccatgcgaccgggcctggtcggagcatcgccgccacttccccaattgttttttcgtgctcggacgcaatttgaacatcagaagcgaatcggacgcagtgtccagcgataggaacttccctaacagcaccaacctccctcgcaaccccagcatggcagactacgaagcccgcatctttactttcggaacctggatctactcggtcaataaggagcagctcgcgagggccggattctacgctctgggagaaggcgacaaggtcaagtgctttcattgcggtggcgggctcacggattggaaaccgtcagaggacccgtgggagcagcacgccaagtggtacccgggctgcaaatacctcctggaacagaagggccaggaatacattaacaatatccacctgactcactcactcgaagaatgtctcgtgcggacgaccgagaaaacccccagcttgactcgccgcattgacgacactatctttcagaacccaatggtccaagaggcgatccgcatgggattctcctttaaagacatcaagaagattatggaagaaaagatccagatctcgggatcgaactacaagagcttggaggtgctcgtggcagatcttgtcaatgcacagaaggactctatgcaagatgagtcatcgcagacgtcgctccagaaggaaatttccactgaagaacaactccggagacttcaagaggaaaaactgtgcaagatctgtatggacagaaatatcgcgatcgttttcgtgccgtgtggacatttggtgacttgtaagcaatgcgccgaggccgtcgataagtgtccgatgtgctacacggtcatcacttttaagcaaaagatctttatgtcc

SEQ ID NO: 325226 - DNA, 1491 bp, Artificial Sequence
  derived and/or modified sequence
atgaccttcaactcatttgaaggatccaagacctgcgtgccggcggatattaataaagaggaggagtttgtcgaagaatttaaccgcctgaaaacgttcgcaaatttcccgtcagggtcgccagtgtcagccagcaccctcgccagggccgggtttctgtacacgggcgagggagatactgtgcgctgcttttcctgtcatgccgccgtggaccgctggcagtacggcgactcggccgtcgggcgccaccgcaaggtgtcgccgaactgcagatttatcaatggtttctacctcgagaacagcgctacccagtcaaccaactctggaatccagaacggccagtacaaggtggaaaattacctcggttcgcgcgaccacttcgctctggaccgccctagtgaaactcatgctgactaccttctgcgcactggccaggtggtcgatatctccgacactatctacccacgcaacccggctatgtacagcgaagaggcaaggctgaaatctttccagaactggccggactacgctcatctcaccccacgggaactcgcgtccgccgggctgtactacaccggaatcggcgaccaggtgcaatgcttctgttgtggtggcaagttgaagaattgggaaccgtgcgacagagcgtggtcggaacaccggcggcatttcccgaattgcttcttcgtgctgggaagaaacttgaatatccggagcgagtcagacgccgtctcgtcggaccgcaacttcccgaactcaactaacctgccccggaacccctcgatggccgattacgaggcacgtatcttcactttcggaacgtggatctactcggtgaataaggagcagctggcgcgagcgggattctacgccctgggtgaaggagacaaagtcaagtgtttccattgcggaggagggcttaccgactggaagcctagcgaggatccctgggagcaacacgcaaagtggtacccaggctgcaagtatctcctggaacagaagggacaggaatatatcaataacatccacctgactcactccttggaggagtgcttggttcggaccaccgaaaagaccccatccctcactcggagaattgatgataccatttttcagaaccctatggtgcaagaagcgatccggatgggattctcattcaaagacatcaagaagatcatggaagaaaaaattcaaatctccggatccaactacaagtccctggaagtgctggtggcagatctcgtcaatgcccaaaaggactcgatgcaggatgaaagctcgcagacttcccttcaaaaagaaatcagcaccgaagagcaactgaggagactgcaagaggagaaactttgtaaaatatgcatggatagaaacatcgccatcgtgttcgttccttgcggacacctcgtcacttgcaagcagtgcgcggaggcagtcgacaagtgtccgatgtgctacactgtgatcacctttaagcagaagattttcatgagc

SEQ ID NO: 325227 - DNA, 1491 bp, Artificial Sequence
  derived and/or modified sequence
atgactttcaactcgtttgaggggtctaagacctgtgtgccggccgacatcaacaaggaggaggaattcgtggaggaattcaataggctcaaaacttttgccaacttcccatcgggatcaccagtctccgcctcaaccctggcccgggccggtttcttgtacaccggcgagggagataccgtccggtgcttcagctgccacgctgccgtggatcgctggcagtacggagattcggctgtgggacgccatcgaaaggtgtcaccgaattgccgcttcataaatggattttaccttgagaactccgcgacccaatcaactaattcaggcatccagaacggacaatacaaagtggagaattatctgggatcaagggaccacttcgcgctcgaccgcccctccgagactcatgcagattacttgctgagaaccggccaggtcgtggacatctcagacaccatttacccacggaacccggcaatgtacagcgaggaggccaggctcaagtcattccaaaattggcctgattatgcccacctcacccctcgcgaactggccagcgctggactctactacaccggaattggggaccaggtgcaatgcttctgctgtggagggaaactgaaaaactgggaaccttgcgatcgcgcatggtcggaacaccggcggcatttccctaactgcttcttcgttttgggacgcaacctgaacatacggagcgagtccgatgcagtctcctccgaccggaatttcccgaacagcactaaccttccaagaaaccccagcatggccgactacgaagctcgcattttcaccttcggaacttggatctacagcgtcaataaggagcagctggcccgagcaggattctacgcgctgggggagggagacaaagtcaaatgttttcattgcggaggggggctgaccgattggaagccgtcggaagatccttgggaacaacacgcgaaatggtacccgggttgcaagtacctgctggaacaaaaaggacaggagtacatcaacaatatccaccttacccatagcctggaggaatgcctcgtgaggaccactgaaaaaactccaagccttactcggcgtattgatgatactatctttcagaacccgatggtccaagaagcgatccggatggggttcagctttaaagacatcaaaaagatcatggaagagaagattcagatttcgggatcaaactacaagtccctggaggtgctcgtggctgatttggtgaacgcccagaaggacagcatgcaggacgaatcatcgcagacctccctgcagaaggagatcagcaccgaagaacagctgcggcggctgcaagaggagaagctgtgcaaaatctgtatggaccggaacatcgcgatcgtgtttgtgccgtgcggacacctcgttacttgcaagcagtgtgcggaagccgtggataagtgtccaatgtgctacaccgtgatcacctttaagcagaagatctttatgagc

SEQ ID NO: 325228 - DNA, 1491 bp, Artificial Sequence
  derived and/or modified sequence
atgactttcaactccttcgagggttcaaagacttgcgtgccggcggatatcaacaaggaggaggagttcgttgaggagtttaaccgtctcaagaccttcgcgaactttcctagtggttcacctgtctccgcctctaccctagctcgtgctgggttcctgtatacgggagagggtgacaccgtgagatgcttcagctgccacgcggcggtagaccgttggcaatacggagactcagctgtcggccgtcacaggaaggtttcccctaattgccgtttcattaacggtttctatttggaaaacagtgcgacccagtccacaaattcaggcatccagaacggtcagtataaggtagagaattatctggggtcccgcgatcatttcgctctggaccggcctagcgagacccacgccgactacttgctccgcaccggtcaagttgttgacatcagcgatacgatctacccacgtaaccccgctatgtattcggaggaggcacgtttgaagtccttccagaactggcccgattacgctcaccttactccccgcgagctggcttcggcgggattatattacaccggcatcggtgatcaggtacagtgcttctgctgcgggggcaagctgaaaaattgggaaccctgcgatcgagcgtggtcagaacaccggagacacttccccaactgtttcttcgtcctgggcagaaatttgaacatccgcagtgagtccgacgccgtctcctccgaccgtaacttcccgaactctaccaacctccctcgaaatccgtccatggctgactacgaggccaggattttcaccttcggaacctggatctactccgtcaacaaggagcagctggccagggctggtttttatgccctgggagaaggggacaaggtgaagtgctttcactgcggcggcggactgaccgactggaagcctagcgaggatccttgggagcaacacgcgaaatggtacccgggttgcaagtatctcttggagcaaaagggacaggagtatatcaataatatccacctgacccacagcctggaggagtgcctggtccgcactaccgagaagaccccgtctttgactcgccggatcgatgacaccattttccagaaccctatggtccaggaggccatccggatgggcttcagtttcaaggacattaagaagatcatggaggagaagattcagatctccggctcgaactacaagtcccttgaggtgctggtagccgacctcgtgaacgcacagaaagactcgatgcaggacgagtcctcccaaacgtctttgcagaaggagatcagcaccgaggagcagctccgccgtctgcaggaggagaagctctgcaagatctgcatggacagaaatattgccatcgttttcgtcccctgtgggcatctggtgacctgtaaacagtgcgcggaggccgtggataagtgtcccatgtgctacacggtcatcaccttcaagcagaagatcttcatgagc

SEQ ID NO: 325229 - DNA, 1491 bp, Artificial Sequence
  derived and/or modified sequence
atgacctttaacagttttgaaggtagcaagacttgcgtgcccgcagacattaacaaagaggaagaatttgtggaggaattcaatcgcctcaagactttcgcaaacttcccctcgggtagcccagtgtccgcgtcaaccctggctcgggccgggttcctttacaccggtgagggcgacactgtgagatgctttagctgccatgctgctgtcgataggtggcagtacggagatagcgcagtggggagacacagaaaagtctcacccaattgtcggttcattaacgggttttatctggaaaactccgcaacccagtcaaccaactcgggcatccagaatggccagtacaaggtcgagaactacctgggctcccgcgatcatttcgcactcgatcgtccatcggaaacccatgcagattacctgcttagaactggacaagtggtggatatttcggataccatatacccaaggaatccggcgatgtattccgaagaggcgaggttgaaaagtttccaaaactggccagactacgcccatctgacccctcgcgaactggcctcagccgggctttactacaccggaatcggagatcaggtgcagtgcttttgctgtggaggtaaactgaaaaactgggagccttgtgatagggcatggtccgaacatagacgccatttcccaaattgttttttcgtccttggacgtaaccttaacattcgctccgaatccgatgccgtgtcatcagacaggaattttcccaactccaccaacctgccaagaaacccctcgatggcagattacgaagcccggatcttcactttcggaacctggatttactcggtgaacaaggaacaactggcacgagccggcttctacgcattgggagaaggtgacaaagtgaagtgttttcattgtgggggaggtctgactgactggaagccctcagaggacccatgggaacagcatgctaagtggtacccggggtgcaaatacctgctcgaacaaaagggacaagaatacattaacaacatccaccttacccactctctcgaagagtgtctggtccgcactacggaaaaaacgcctagcctcactcgtagaatcgatgacaccatttttcaaaatccgatggtccaggaagcgattcgcatgggtttttcgtttaaagacattaagaaaatcatggaggaaaagattcaaatttccggatcgaactacaagtcgctggaggtcctggtcgcagacctggtgaatgcacaaaaggattccatgcaagatgaaagctcgcaaacctcgctgcaaaaggaaatttcgaccgaggagcaactgcgccggctccaggaagaaaagttgtgtaagatctgcatggatcgcaacatcgcaattgtgttcgtgccatgtggtcacctggtgacctgtaagcagtgtgcagaagccgtcgacaaatgtcctatgtgttacaccgtgataacttttaagcagaagatattcatgtca

SEQ ID NO: 325230 - DNA, 1491 bp, Artificial Sequence
  derived and/or modified sequence
atgacatttaactctttcgagggctctaagacctgtgttccagctgatatcaacaaggaagaggaatttgtggaggagtttaaccgactgaaaactttcgctaatttccccagtggctcccctgtctcagcgtcaacactcgctcgagcagggttcctctatactggcgagggggacacagtgcgatgtttcagctgccacgctgctgtggatcgctggcagtacggtgactctgccgttggccgtcatcggaaggtgtcgcctaactgccggttcatcaacggattttacctagagaattctgctactcagagcactaattccggtatccagaatggacagtacaaagtggaaaattacctgggctccagggatcactttgccctggaccgtccatccgagacccacgcagattatctgcttaggacaggtcaagtcgttgatatttcagatacaatctatccccgcaaccctgcgatgtactctgaggaagcgcgcctcaaaagtttccaaaattggcctgattacgcacatcttacccctagggaacttgcgtccgcaggcctgtattatacaggcatcggtgaccaggtccagtgtttctgttgtggcgggaagctaaaaaattgggagccctgtgacagggcctggagcgaacatcgcagacatttcccgaattgtttcttcgtactcggcagaaatcttaacatcagatccgagtctgatgccgtgtcaagtgacagaaatttcccgaatagtaccaatttgccccgcaatccatctatggccgattacgaagctaggatttttacttttggcacctggatatattcagtgaataaggaacagctcgctagggcagggttttacgcacttggggagggcgacaaagtcaaatgttttcactgcggaggaggactcaccgactggaagccatccgaggatccatgggaacagcatgctaaatggtatcccggctgtaaatatttactagaacaaaaaggacaagaatatattaacaatattcacctaacacactctctcgaagaatgcctggtccgcactactgagaaaacccccagcctcacacgtcgcattgacgatactatcttccagaatcctatggtccaagaagccattcgcatgggattttcctttaaggatatcaaaaagatcatggaggaaaaaatccaaatcagtgggagcaactataagtccctggaagttttggttgccgacctagtcaatgcacagaaagattccatgcaagatgagtcttcccagacctcactccagaaggagattagcactgaggaacagttgcgtcggcttcaagaagaaaagctttgtaaaatatgcatggaccgtaacatagctattgtgttcgtcccttgcggacacctggttacttgtaagcaatgcgcggaggctgtcgacaagtgtcctatgtgttacacggtgattactttcaagcaaaagatcttcatgtct

SEQ ID NO: 325231 - DNA, 1491 bp, Artificial Sequence
  derived and/or modified sequence
atgacctttaacagcttcgagggcagcaagacgtgtgtgccagcggacataaacaaagaggaagagtttgtggaagaattcaatagacttaagacctttgcaaatttcccatccggatcgccggtgtcagcatccacccttgccagggcaggattcctctacacgggggaaggagataccgtgagatgtttttcctgccacgccgcagtggacagatggcagtacggtgattccgccgtcggaaggcatagaaaggtgtcccccaactgtcgcttcataaatggattctatcttgaaaattccgccacgcaatcaactaactcgggaatacaaaacgggcagtacaaggtggaaaactacctcggatcacgcgatcacttcgcgcttgatagaccatccgaaacgcatgccgactacttgcttcgaaccggccaagtggtggacatttcagacacgatttacccccgcaaccctgcaatgtactccgaagaagcgagactcaaatcctttcagaattggccagattacgcacatctcactccccgagaactcgcgtcggcaggtctgtattacactggaatcggtgatcaggtgcaatgcttctgttgtggggggaagctcaagaattgggagccatgcgatcgtgcatggtcagagcatcggagacacttccccaactgcttttttgtcctgggtagaaacctgaacattagatcagagtcggacgcagtctcctcagacaggaattttccgaactctaccaacctccctcggaatccttcgatggcagattacgaagcgcggatctttacctttggcacgtggatttactcagttaacaaggaacaactcgcccgcgcaggcttctatgcccttggagaaggtgataaagtgaaatgcttccattgtggcggcggcctgaccgattggaagccttcggaggacccttgggagcaacacgctaagtggtaccctggatgtaagtacctcctcgagcagaagggtcaggaatacatcaataacatccatctgacccatagccttgaagagtgtcttgtgagaaccactgaaaagactccttcacttactagaaggattgatgataccatctttcaaaacccgatggtccaagaggcgatcagaatgggattctccttcaaggacattaagaaaatcatggaagagaaaatccaaatatccggctcgaattacaagtcgcttgaagtgttggtcgcagatctggtcaacgctcagaaagatagcatgcaggacgaatcaagccaaacttctctgcaaaaagagatctcaaccgaggaacaactgcgcaggctgcaagaagaaaagttgtgcaagatttgtatggatcggaacattgcaattgtgtttgtgccttgtggacatctggtcacttgcaagcaatgtgcggaagcagtggacaagtgtcctatgtgttacaccgtgattaccttcaaacagaagattttcatgtcc

SEQ ID NO: 325232 - DNA, 1491 bp, Artificial Sequence
  derived and/or modified sequence
atgacattcaactcctttgagggctccaagacatgtgtcccagctgatattaacaaagaggaagaattcgtcgaagaattcaaccgcttgaagactttcgcaaattttccgtctggatctcctgtgagtgcaagtacactggcacgagcaggcttcctctatactggagagggcgacacagtgcgttgtttctcttgtcacgccgctgtggatagatggcagtatggcgattcggcagtgggccgccacaggaaggtttctcccaactgcaggttcataaatggtttttacttagaaaattcagccacccaatcaactaacagcggaatccagaatggtcagtataaggtggaaaattacctcgggtctagagatcacttcgcactggacagaccctctgaaacccacgctgactacctgctgcgcacaggccaggttgtcgacatcagtgataccatttatccacgaaatcccgccatgtacagcgaggaggctaggttgaagtccttccagaactggcctgattacgcccacttaactcccagagagctggcgagcgctggcctctactacacagggatcggagaccaggtgcaatgtttctgttgtggcggaaagttgaaaaattgggagccatgtgaccgggcctggagtgagcaccggagacatttcccgaactgtttctttgtactgggtcgaaacctgaacattcgctctgaaagcgacgcggtttcatcagatagaaacttccctaattccactaatttgcctagaaacccttcaatggccgactacgaagcaagaatctttacctttggcacatggatctattcagtgaataaagagcagctggcccgcgccggcttttatgctctgggcgaaggggacaaggtaaagtgttttcattgtggtgggggcctgactgattggaagccatcagaagacccctgggaacaacatgcgaaatggtaccctggctgcaaatacttattggaacaaaagggccaagagtatattaacaacatccacctgacccacagtctggaagaatgtctggtgcgcacgacagagaaaactccatctctcacacgacggatagatgatacgatcttccaaaatcctatggtccaggaggccatcaggatgggtttttcctttaaggatataaaaaaaataatggaagagaagatccagatctcaggtagtaattataaatcacttgaggtgcttgttgctgacttagtgaacgcacagaaggactcaatgcaggatgagagctcccagacaagtcttcagaaggagatatctactgaggagcagcttcgccgtctacaggaagaaaaactgtgcaagatctgtatggaccgcaatatagctatcgtgttcgtgccgtgtggccacctggtcacctgtaagcagtgtgccgaggcggtcgataagtgccccatgtgttacactgtcattacttttaagcagaagatcttcatgtcc

SEQ ID NO: 325233 - DNA, 1491 bp, Artificial Sequence
  derived and/or modified sequence
atgacgttcaattctttcgaaggaagtaaaacctgcgtgcccgcagacattaacaaagaggaagaatttgtagaggaatttaatcggttaaagacatttgcaaattttccttccgggtcccctgtatccgcaagtactttggcgcgagccggcttcctgtacaccggggagggggacactgtgcggtgcttctcttgccacgctgcagtggacaggtggcagtatggcgatagcgcggttggccgacaccgaaaagtgagccctaattgccgcttcattaatgggttttatttggaaaatagcgccacccagtcaaccaatagcggtatccaaaacggccagtacaaggtggagaactacctgggatctagggaccattttgccctggaccgacccagcgagacacatgctgattatttactgaggactggccaggttgtggatattagtgatacaatctaccctcggaaccccgcgatgtacagcgaggaggcacggctgaagagttttcagaactggccggactacgcccatctaacaccccgcgaactggcgagcgccgggttatactacacaggtataggcgatcaagtccagtgcttctgctgtgggggaaaactgaagaattgggaaccttgtgaccgagcatggtctgagcacaggagacatttccctaattgcttttttgtgctgggacggaatctcaatatcagatctgagagtgatgccgtgtccagcgaccgtaacttcccaaactctacgaacttacctcgtaatccgtcgatggctgactatgaggctcgaatttttactttcggtacctggatatacagtgtgaacaaggagcaattagctcgggctggattttacgcactgggagaaggcgacaaagtgaagtgcttccattgtggcgggggcttgaccgattggaagccgagtgaggacccatgggaacagcatgcaaaatggtacccaggctgtaagtacctgctcgagcaaaagggccaggagtacattaataatatccacctgacacattcactggaagagtgtttagtgcgtacgaccgaaaagacaccgtctctgactcgacgaattgacgataccatattccagaaccccatggtacaggaggcaattcgtatgggcttctcctttaaggatattaaaaagattatggaagagaaaatacagatatccggatccaactacaagtcgctggaggtcttggtcgcagatttagtgaacgcccaaaaggatagtatgcaggatgagagttcacagacttcactgcagaaagagatatccaccgaggagcagctgagaaggctgcaggaggagaaactgtgcaaaatctgtatggatcgcaacatcgctatcgtgtttgtgccctgcggacacctggttacctgcaaacagtgcgcagaggcagtagacaagtgccccatgtgttacactgttatcacctttaaacagaagattttcatgagc

SEQ ID NO: 325234 - DNA, 1491 bp, Artificial Sequence
  derived and/or modified sequence
atgacattcaacagttttgagggttcaaagacttgtgttcccgccgacatcaacaaggaggaggaatttgtggaagaatttaatcgcctaaaaacatttgcaaattttccatctgggtcgccagtgtctgcttccacccttgccagagcaggttttctgtacacgggggagggtgacactgtacggtgcttttcgtgccacgcggccgtggatcggtggcagtatggtgatagcgccgttgggcggcaccgaaaggtgtcgcctaattgcagatttataaacggcttctatcttgagaacagtgcaactcagtccactaattccgggatccagaatggccagtataaggtggagaactacctcggtagtcgggatcatttcgcactggaccgtccgagtgagacccatgccgactacttgctgcgaaccggccaagttgtggacatctctgacactatctacccacgcaatccggccatgtatagtgaggaagccagacttaaaagctttcagaattggccggactacgctcatctgactcccagggaactcgcctccgctggattgtattacacgggcatcggtgaccaggttcaatgcttctgctgtggcgggaaattaaagaattgggaaccttgcgacagagcgtggtctgagcatcgacgtcacttcccgaactgtttttttgtgctgggaaggaatttgaacatacgctccgaatcagacgctgtgtcgtcagatagaaatttcccaaacagtaccaatctgccgaggaacccgtctatggctgactacgaagcccggatctttacattcgggacctggatctacagcgtgaataaagagcagctggcgcgggccggcttttacgcacttggagagggtgataaggtaaagtgctttcattgtgggggagggctgaccgactggaaacctagtgaagatccatgggagcagcacgccaagtggtacccaggatgcaagtatctgctcgaacaaaaggggcaggagtacattaacaacatacacctgacacacagcttagaggagtgtctggtgcggaccactgagaaaacaccaagcttaacacggcgcattgatgacactatctttcaaaaccccatggtgcaggaggctatccgaatgggcttttcattcaaggacataaagaagataatggaggagaagatacagattagtggctctaactataagagccttgaggtcctggtggcagatctcgtgaatgcccagaaggacagtatgcaagacgaaagctcccagacgagcctccagaaggagatatccacagaggagcagctgcggcgccttcaggaggaaaagctctgcaaaatatgtatggatcgaaatattgctatcgtgtttgtgccttgtggacacctagtgacctgcaagcagtgcgctgaagccgtcgataaatgccctatgtgctacaccgtgataacttttaagcagaagatcttcatgagt

SEQ ID NO: 325235 - DNA, 1491 bp, Artificial Sequence
  derived and/or modified sequence
atgaccttcaacagctttgaagggtctaagacatgcgtgcctgccgatatcaataaggaggaggaatttgtggaggagttcaacaggctgaagaccttcgcgaacttccccagcggatctccggtctctgcatccaccttggcccgagccggttttctgtatacaggagaaggcgacactgtccggtgcttcagctgccatgcggccgtggacaggtggcagtacggcgacagcgctgtaggccggcacagaaaggtttctcccaactgtcgattcattaatggattttatctggagaactctgcaacgcagagcacaaactctggcatccaaaacggccagtataaagtggaaaattatctcggcagtagggatcacttcgccctcgatagaccgtccgagacacacgccgactacctgctgaggactggtcaggttgtcgatatctcagataccatttatcctcgcaatcccgccatgtactccgaagaggcccgcctcaaaagctttcagaattggcccgattatgcccatcttactcctcgggagctcgcatcagcagggctgtattacaccggaatcggcgaccaggttcagtgtttttgctgtggcgggaaattgaagaattgggagccttgtgacagagcttggtccgaacatagacgccattttccaaattgtttcttcgtgctgggccggaatctgaacattcggtcagagtcagacgcagtgagctccgaccgcaacttccctaacagtaccaatctgcccaggaacccctccatggccgattacgaggcacgaatatttacctttgggacctggatctactccgtgaataaagagcaactcgctagagccggattctacgcccttggggagggcgacaaggttaagtgcttccactgcggcggagggttgacagattggaaaccctcagaagacccgtgggaacaacacgcgaagtggtacccgggatgtaaatatctcctggagcagaaaggacaagaatacataaacaatatccatctgacccatagcctggaggagtgtttggttagaaccactgaaaaaactccttccctgactcggcgcatagatgataccatcttccagaatcctatggtgcaggaggccatacggatgggcttctcttttaaagatatcaagaagatcatggaagaaaagattcagattagcgggtccaactacaaatctctggaagtgctcgtggccgacctggtcaatgcccaaaaggactcaatgcaagacgagtcttcacagacttccctccaaaaggaaattagcaccgaggagcagctgagaagacttcaggaggagaaactttgcaagatctgcatggaccgcaacattgcgatcgtgttcgtcccttgcggacacctggtgacctgcaagcagtgtgccgaggcagtagataagtgcccaatgtgttacaccgtgatcacgttcaagcagaaaatctttatgagt

SEQ ID NO: 325236 - DNA, 1491 bp, Artificial Sequence
  derived and/or modified sequence
atgaccttcaactcctttgaagggagtaagacttgcgtcccggcagatattaacaaagaagaagaatttgtagaggaatttaaccggctgaaaactttcgccaatttcccatctggaagtcccgtctctgcctcaaccttggcccgagccggctttctctatacaggagaaggtgatacggtgcgttgctttagctgccatgccgctgtcgatcggtggcaatatggcgatagcgcggtcggacgtcacaggaaagtttcaccgaattgtcggtttattaatggtttttatctcgagaattcagcgacacagtcaacaaattcgggaatccagaacgggcaatacaaagtcgaaaattatcttggaagccgcgatcactttgctcttgatagaccaagcgaaacccacgctgattaccttttacgtacgggtcaagtggtagatatctcagacacaatttatcctcgcaatcctgcaatgtattctgaggaagcaagattaaaatcctttcaaaattggcctgattatgcccaccttacaccgcgagagctggcgtctgcggggctctattacacgggaattggggatcaggttcagtgtttttgttgtggcgggaaattgaaaaactgggagccatgcgatagagcatggagtgaacaccgtagacatttccctaactgtttttttgtattaggacgtaacttgaacatccgcagtgaaagcgacgctgtctcatcagaccgtaactttcctaattcaactaatctcccgcggaatcccagcatggctgattacgaggcacgcattttcactttcgggacatggatatattctgtaaataaagaacagttagctagggccggattttatgctttgggagaaggagacaaagtgaagtgttttcactgcggcggggggctgacagattggaaaccatcagaagacccttgggaacaacacgctaaatggtatcccggctgtaagtacctgttagagcagaaaggacaagagtatattaataatattcatttaactcactctctggaagagtgcctggtacggacaaccgaaaaaactccttccctcacgaggaggattgatgatacgatcttccagaacccgatggtgcaggaagcgatccgtatgggattctcgttcaaagatatcaaaaaaattatggaggagaaaattcaaattagtgggtccaattacaagtctctagaggtattggtggccgatctagttaatgcccaaaaagatagtatgcaagatgaaagcagccaaactagcttacagaaagaaatttccacagaagaacagcttagaagactacaagaagaaaagttgtgcaaaatatgcatggatcggaatatcgctattgtatttgtcccgtgtgggcatctggttacatgcaaacaatgcgcagaggccgtcgataagtgccctatgtgctatacggtgattacttttaaacaaaaaatctttatgtcc

SEQ ID NO: 325237 - DNA, 1491 bp, Artificial Sequence
  derived and/or modified sequence
atgacctttaattcctttgagggttctaagacatgcgtgcccgcagacattaacaaggaagaggaattcgtagaggaattcaataggctgaaaacgtttgcaaatttcccctcagggtcgcccgtgtctgcatccaccctcgcacgcgccggcttcttgtacactggcgagggggatactgtaagatgtttctcatgtcacgctgccgtcgaccgctggcagtacggtgactccgctgtaggtcggcaccggaaggtaagccctaattgtcggttcatcaatggcttttacctggagaatagcgctacacagtcaaccaattcaggtattcaaaatgggcaatataaggttgaaaattacctggggtccagagaccactttgccttagatagaccaagcgaaacacacgctgattacctactgcgtaccggccaggttgtggatatctctgatacaatatacccaaggaatccggctatgtattccgaggaagcaaggctgaagtcattccaaaactggcctgattacgcccacctcacacctcgcgaacttgcttccgcaggactatactatacaggcatcggagatcaggtccagtgcttctgttgtggcggaaaactaaaaaattgggagccatgtgatcgagcctggtcagaacatcggcgtcactttcctaattgctttttcgtgttgggcaggaatctcaatataagatcagaaagcgatgctgtttcttccgatagaaatttcccaaactctacgaacctgccgaggaatccttctatggcagactacgaggcccggatttttacatttggaacttggatttacagtgtaaataaagagcagttggcccgggcgggattttatgccctgggtgaaggagacaaggtaaaatgtttccattgcggaggtggtctgactgactggaaacctagcgaggatccgtgggagcagcatgcgaagtggtatccggggtgcaagtacctgctcgagcagaaaggccaggaatatattaacaacatccatctaactcactcattagaagaatgtctggtgaggaccacagaaaagacaccatcattgacacgtcggatagatgacacaatcttccagaatccaatggttcaggaggctatcaggatgggcttttcctttaaagatatcaagaaaatcatggaagagaagatacaaatttcgggaagcaactataaatctcttgaggtcctagtggcagatctagtcaacgctcagaaggattccatgcaggacgagtcttctcagacatctctccagaaggagataagcactgaggagcagttgcggaggttgcaggaggagaagctgtgcaagatctgcatggatagaaacattgccatcgttttcgtgccatgcggtcatctagttacttgtaaacagtgcgctgaggccgtcgacaaatgccccatgtgctacaccgttattacctttaaacaaaagatcttcatgagc

SEQ ID NO: 325238 - DNA, 1491 bp, Artificial Sequence
  derived and/or modified sequence
atgaccttcaacagctttgaggggtctaaaacatgtgtccctgcagacatcaataaggaggaggaatttgtggaagaatttaacaggcttaagacattcgctaattttcctagcggttctccagtatccgcctccactctggcgagggccggcttcctgtacacgggagagggtgacaccgtgaggtgtttttcatgccatgcggcagttgaccgatggcagtacggagattctgctgttggtcgccataggaaggtgtcccctaactgccgcttcataaatgggttttatttggagaattccgcgacacagtccaccaacagcggtattcagaacggccagtataaagtggagaactatctggggtcccgcgatcactttgccctcgaccgaccgtccgagactcatgctgattacctcctacggaccgggcaggtagtggacatcagcgatacaatttatcctcggaatccagccatgtacagcgaggaagcacgactgaagagtttccagaattggcctgattacgcccacctaacccccagagaattggcctccgctggtctttactatacaggtatcggtgaccaggtgcagtgcttttgttgtggtggaaaactcaagaattgggagccatgcgaccgggcatggagtgagcatcgaaggcattttccaaactgtttcttcgtgctgggccgcaaccttaacatacggtccgagtcagacgccgtaagctctgaccgaaatttccccaactctaccaacttaccccggaaccctagtatggctgactacgaggcacgcatttttacgtttgggacatggatctattccgtgaacaaagagcagctagcaagggccggattctacgctttgggggagggggacaaggtgaagtgcttccactgtggtggggggttaacagattggaagccatcggaagatccctgggagcagcatgctaagtggtaccccggctgcaaatacttactggaacagaaagggcaggaatacatcaataatatccatctgacgcatagcctggaggaatgcctggtcagaactacagagaagaccccctccctaacccggcgcatcgacgataccattttccagaatcccatggtccaagaggccataaggatgggttttagcttcaaggacatcaaaaaaatcatggaagaaaagatacagataagcggaagcaactacaaaagtctcgaggtgctggtggccgacctagtcaacgcacagaaagattccatgcaggacgagtccagtcagacatcactccagaaggaaatctctaccgaagaacagctgaggaggcttcaggaagaaaaactctgtaagatctgcatggacaggaatatcgctatcgtcttcgttccgtgtgggcatcttgtgacttgcaaacaatgcgccgaggccgtcgataaatgcccaatgtgttacaccgtgatcaccttcaaacagaagatcttcatgtct

SEQ ID NO: 325239 - DNA, 1491 bp, Artificial Sequence
  derived and/or modified sequence
atgacattcaactcgttcgagggaagcaagacttgcgtccctgccgacatcaataaagaagaggaattcgttgaagagttcaacaggctgaagacattcgcaaactttccatccgggtcccccgtgtccgcttcaacacttgctagggccggattcctgtatacaggagaaggagacactgttcgctgtttctcatgtcacgcagccgtcgatcggtggcagtacggggatagcgctgtcggcaggcaccgcaaagtgtccccaaattgtcggttcattaacgggttttatctcgagaactcagccactcaaagcacgaatagcggcatccaaaacgggcagtacaaggtggaaaattacctgggttcccgcgatcactttgccctggaccggcccagcgagacccatgccgactacctcctaaggacaggccaggtagttgacatttccgacactatctatccgcgcaatcctgccatgtactcagaggaagcacggctgaagtcttttcaaaattggcccgactacgcgcacctgacaccgcgtgaactcgcctccgccggactgtattacaccggaatcggcgaccaggtgcagtgtttttgctgcggaggtaaactgaaaaactgggagccttgcgatagggcatggtctgagcaccggaggcatttcccaaattgtttttttgttcttgggcgcaacttgaacatcaggtctgagtctgacgctgtcagctcggacaggaatttcccaaattccactaatcttccgcgcaatccctccatggctgattacgaagcccggatatttaccttcggcacctggatctactccgtgaataaggagcagctggctcgtgcagggttttatgctctaggtgaaggtgacaaagttaagtgctttcactgcggcggaggcttaactgactggaaaccgagtgaagatccttgggagcaacacgctaaatggtatcctggttgtaagtacctgcttgaacagaaaggtcaggaatacattaataacatccatttgacacactcactcgaagagtgtttagttagaactactgaaaaaactccctcactgacccggcggattgatgacaccatatttcagaatcctatggtgcaggaggccattcgcatggggtttagtttcaaggacataaagaagatcatggaagagaagatccagataagcggttctaactataagtccttggaggtgctggttgctgacctggtgaatgcccagaaagattcaatgcaagacgaaagctctcaaaccagcctgcagaaggaaatcagcaccgaggaacaactgcgaaggctgcaggaagagaagttatgcaaaatttgtatggatcgaaatatcgccatagtattcgttccgtgcgggcacctcgtgacttgcaaacaatgtgccgaggccgtagataaatgtcctatgtgctatactgtgattacgtttaaacagaagatcttcatgagc

SEQ ID NO: 325240 - DNA, 1491 bp, Artificial Sequence
  derived and/or modified sequence
atgacattcaatagctttgagggaagcaaaacttgcgtgcctgctgatattaacaaggaggaagaatttgttgaagaattcaatagactgaaaaccttcgcaaacttcccatcgggttcacctgtgtcagcgtcaactctcgcgcgagccggcttcctgtacacaggcgaaggtgataccgttaggtgtttttcttgccacgccgctgttgatagatggcagtacggggacagtgccgttggccggcaccgtaaagtttctcctaactgtcggtttattaatgggttctacctagagaatagtgcaactcagtcaactaactcgggtattcagaacggtcaatacaaggttgagaattaccttggttccagagatcacttcgccctggaccggccgagtgagacacacgctgactacttgttaaggacaggccaggtggtggacatctccgacacaatctaccctcggaaccccgctatgtactcagaagaggcccgcctgaagtctttccagaattggccagactatgcccatttaacacctagagagctcgcctcagcgggcctgtactatactggcattggcgaccaggttcagtgtttctgttgcggtggtaaactaaagaactgggagccatgcgaccgggcctggagtgagcatcgcaggcacttccccaactgtttttttgtcctgggcaggaaccttaatatcaggtcagaaagtgatgctgtgtcaagtgacagaaactttcctaatagcacaaacctgccccgcaatcccagtatggcagactacgaagctcgcatatttactttcggcacctggatctattccgtaaataaggagcagctggctagagccggattctatgcgctgggggaaggcgataaggttaaatgcttccactgtggcggtggcctaacggattggaaaccatccgaagacccttgggagcagcacgccaagtggtacccaggatgcaaatacctcctggagcaaaagggccaggagtacataaacaacattcatctcacgcattccctggaggagtgtcttgtgaggaccaccgagaaaaccccctctctaaccaggcgaatcgacgacaccatttttcagaacccgatggtgcaggaggctatcaggatggggttctcctttaaagacatcaagaagatcatggaagaaaaaatccagatctccggctcaaactataagagcttggaagtcctagtggctgacctcgtaaacgcccagaaggactcaatgcaagacgagtcatcccagacttccctgcagaaggagatctcaacagaagagcaactgaggaggttacaggaggaaaaactctgcaaaatctgtatggacaggaacattgctatcgtgtttgtgccatgcggtcatctcgttacctgtaagcaatgcgctgaggcagtggacaaatgtcctatgtgttacactgttatcacatttaaacaaaagatttttatgagc

SEQ ID NO: 325241 - DNA, 1491 bp, Artificial Sequence
  derived and/or modified sequence
atgacttttaatagttttgagggatccaagacatgtgtgcccgctgatataaacaaagaggaagaattcgtcgaggaatttaacaggctgaagacctttgctaacttcccatccggatctcctgtgagtgcatccactttggcaagggcggggttcctctacacaggagaaggtgatacagtgcgatgtttcagctgtcacgctgccgtggaccggtggcagtatggtgattctgcagtaggccgacaccgcaaagtgtcccccaactgccgctttatcaatggattctatttggaaaactccgctacccagtcgacgaacagcggtatacagaacggtcaatacaaggtggaaaattatctggggagtcgggaccattttgcattggatcgtccttcagaaactcatgccgattacctgctgagaacaggtcaggttgtcgacatctcagatactatatatcctcgcaatcctgccatgtattcagaagaggcacgactgaagagctttcagaactggcccgactatgctcacctgacaccaagagaattagcatcggccggtctttactacacaggaatcggtgaccaggttcagtgtttttgctgcgggggcaagttaaaaaactgggaaccatgcgacagagcctggagcgagcataggaggcatttccctaactgctttttcgtgctggggcgcaacctgaacatcagatctgaatccgacgccgttagttcagatcgtaatttcccaaacagcaccaatcttccgcgaaatccatccatggcggattacgaagcccggatcttcacctttggcacttggatctacagcgtgaataaagaacagctggcgagggcgggcttctacgccttgggagagggagacaaagtgaagtgtttccattgtgggggcggactgaccgactggaagcccagtgaggatccttgggagcagcacgctaagtggtacccaggttgcaaatacttgctggagcagaagggccaggaatatatcaacaacattcacctgacacactccctggaagagtgcctggtgcgaacaaccgaaaagactccctccctgaccagacgaatcgacgacacgattttccaaaacccaatggttcaggaggcaatccgaatgggtttttctttcaaagacatcaagaagatcatggaggagaaaatccaaatcagcggtagcaattataaatccttagaggtgctggtggccgacctggtcaacgctcagaaggactcaatgcaagatgagtccagccaaacttcactgcaaaaggagatttctactgaagagcaactgagacgcctgcaggaagaaaaactctgcaagatctgtatggatcgaaatatcgccattgtttttgttccttgtggccaccttgtgacttgtaagcagtgtgcagaagcggttgacaagtgcccaatgtgttatacggtgattacatttaaacagaagatcttcatgagc

SEQ ID NO: 325242 - DNA, 1491 bp, Artificial Sequence
  derived and/or modified sequence
atgacctttaactcatttgagggctccaagacctgcgtgcccgcggacattaacaaggaagaggaattcgtcgaggaattcaacagactcaagactttcgccaatttcccaagcgggtcccccgtgtccgcgtcgactctggctcgcgcaggttttctttacacgggtgagggtgatactgtgaggtgtttttcgtgtcacgccgcggtggaccgctggcaatacggagattccgccgtgggtcggcacaggaaggtttcgcccaactgccgctttatcaacggtttttacctggagaactccgcaactcagagcactaactcgggtattcaaaacggacagtacaaagtggagaattatctggggagcagagatcactttgcacttgataggccatcggaaacccatgcagactaccttctcagaactggacaggtggtggacatatcggataccatttacccaaggaacccagccatgtactcggaggaagcaagacttaagtcatttcagaactggccggattacgcccacctcacgcctcgcgaactggcctcggcaggactgtactatactggaattggggaccaggtccagtgtttctgttgtggagggaagctgaaaaactgggaaccgtgcgatagagcctggtctgagcacaggcgtcatttcccaaattgctttttcgtccttggtcgcaatctcaatattcggtccgagtccgatgcagtgtcctctgataggaattttcctaactcaaccaatctccctcgcaacccttcgatggcagactacgaagcacggatattcacttttggaacttggatttactcagtgaataaggagcaactggccagagccggattctacgcactgggagaaggagataaggtgaagtgctttcattgtggagggggtctgactgattggaagccttccgaagatccttgggaacagcatgcaaaatggtacccaggctgtaaatacctcctggaacaaaaaggacaggaatacatcaataacatacatctgactcattcactcgaagagtgcctcgtccgaactaccgaaaagactccgtccctgactcgacggatcgatgataccatttttcagaatcccatggtgcaagaggcaattcgaatgggttttagctttaaggatatcaaaaagataatggaagagaagattcagatttcaggatccaactacaagagcctggaagttcttgtggcagatctcgtgaatgcacagaaagactcaatgcaggacgaaagcagccaaacctcactccaaaaggagatatcgaccgaagaacagctgagacgcctccaggaagagaaactctgtaaaatctgtatggatagaaacattgcaattgtgtttgtcccttgcggacacctggtcacttgcaagcaatgcgcagaagccgtcgataagtgcccaatgtgttacactgtgatcaccttcaagcaaaagattttcatgagc

SEQ ID NO: 325243 - DNA, 1491 bp, Artificial Sequence
  derived and/or modified sequence
atgacattcaactcttttgaagggtccaagacctgtgtgcctgctgacattaacaaggaagaggagttcgttgaggagttcaatcggctgaagacctttgcaaattttcctagcggctcacctgtgtccgccagcactttagctcgggccggctttctgtacacaggagagggagacactgtgcggtgtttctcttgccacgctgccgtggaccgttggcagtacggcgattcagcagtggggcggcaccgcaaagtttcccccaactgccgctttatcaatgggttctatctcgagaactctgccacccaaagcaccaatagcggcatacaaaacggccagtacaaagttgagaactacctcggatctcgggatcacttcgccctcgataggccctctgagacccacgccgattatctgttacgcaccgggcaggtggtggacatctctgataccatctatccaagaaacccagcaatgtactccgaggaggctagactaaagtcattccagaattggcctgactatgcacacctaactccacgagagctcgcaagcgcaggcctgtactacacaggcattggggatcaggttcagtgcttctgttgcggcggcaaattaaagaattgggaaccctgcgatagggcttggtctgagcatagaaggcactttcctaactgcttttttgtgctgggacgcaatctgaacatacgctccgagtctgatgctgtttcttccgatcggaacttccccaactccactaacctgcccagaaacccaagtatggctgactacgaagcccggatcttcacatttggcacatggatttattccgtgaataaggagcaactagcaagggctggcttttacgccttaggtgaaggggacaaggtgaaatgttttcactgtggaggcggtttaacagactggaagcccagtgaagacccctgggaacagcacgccaagtggtaccctggctgtaaatacctactcgagcaaaagggtcaggaatacatcaacaatattcacttaactcacagtcttgaggaatgtctggtgcgcacaaccgaaaagacaccctccctgaccaggcgaatagatgatacaatattccagaatccaatggtgcaagaggccataagaatgggatttagcttcaaggacatcaaaaaaataatggaggagaaaatacagatctccggcagtaactacaaaagcttggaagtgcttgtagctgaccttgttaacgcacagaaggactcaatgcaagacgagtccagccaaacaagcctgcaaaaggagatttctaccgaagaacagcttagacggctacaggaagagaaactgtgcaaaatctgcatggaccggaacatcgcaatagtgttcgtgccatgcggtcatttagtgacctgtaagcagtgtgcagaggctgttgacaaatgccccatgtgttatactgttattacctttaagcagaagattttcatgagt

SEQ ID NO: 325244 - DNA, 1491 bp, Artificial Sequence
  derived and/or modified sequence
atgaccttcaactcattcgaaggttccaagacctgcgtgccggccgacatcaataaggaggaggaattcgttgaggaattcaatcggctgaaaaccttcgccaattttccgtccggatcgccggtcagtgccagcactctggcacgcgctgggtttctttacacgggggagggcgataccgtccggtgcttttcatgccatgccgccgtggataggtggcagtacggagattccgctgtcggaaggcaccggaaagtgtccccaaactgccgcttcatcaatggattttacctcgagaattcagccactcagtcaaccaactcaggcatccagaacggtcaatacaaagtggagaattacctgggatcgcgggaccacttcgcgttggaccggccatccgaaactcacgcagactacctgcttcgtaccggacaggtggtggatatctcggacaccatctacccgcgcaaccctgcaatgtactcagaagaagctcggctcaagtctttccagaactggccggactacgcccacctcaccccacgcgagctggcgtcagcgggcctttactacaccgggatcggggaccaggtccagtgcttctgttgcggcggaaagctcaagaactgggagccgtgcgaccgggcatggtccgagcataggcggcactttccaaactgttttttcgtgctgggtagaaacctgaacatccggtcggaatcggacgccgtcagctccgacaggaacttcccgaactcgaccaatctgccacggaacccatcgatggctgactacgaagctaggatcttcacctttgggacctggatctactccgtgaacaaggaacaactcgcccgagccggattctatgccttgggggaaggcgacaaggttaaatgcttccattgtggaggaggacttacggattggaagccgtcagaggatccttgggaacagcacgctaagtggtacccgggatgtaagtacctgctggaacagaaggggcaggaatacattaacaacatccacctcactcatagcctcgaggagtgcctggtcagaaccaccgaaaagaccccttcgttgacccggcgcattgacgatacgatctttcaaaacccgatggtgcaggaggcgattcgtatgggcttctccttcaaggacattaagaagatcatggaggagaagatccagatttcaggaagcaattacaagtcgctggaggtcttggtggcggatctggtgaatgcacagaaggactcgatgcaggatgaatccagccagacttccctgcaaaaggaaatctccactgaggagcaactgcgccggttgcaagaagaaaagctgtgtaagatctgcatggaccgcaacatcgcaatcgtgttcgtcccatgcggccacttggtcacgtgcaagcagtgtgcagaagcggtggacaagtgcccgatgtgctacaccgtgatcacgttcaaacagaagatcttcatgtct

SEQ ID NO: 325245 - DNA, 1491 bp, Artificial Sequence
  derived and/or modified sequence
atgacgtttaattctttcgaggggtccaaaacttgcgtgccagccgacattaacaaggaagaagaattcgtggaagagttcaaccgtctgaagacatttgccaacttcccaagtggtagtccagtgagcgctagcaccctggctcgtgctgggttcctgtacaccggcgagggcgacaccgtgcgctgcttctcctgccacgccgcggtggataggtggcagtacggagattctgcagtaggtaggcaccgcaaggttagcccgaattgtcgctttattaacggtttttacctcgagaatagcgcaactcagagcacaaattctggcatccagaacggtcagtataaggtcgaaaattacctcggcagcagagatcattttgctctggacagaccaagcgaaacccacgctgactacctgctgcgtaccggccaggttgtggacatttcggatacgatttacccgcgaaacccggcaatgtattcagaagaggcacgactgaagtcgttccagaattggccggattatgcgcatctgaccccccgtgagctcgcctcagcgggactctactataccggtatcggggatcaggtgcagtgcttctgctgcggcggtaaactcaaaaattgggaaccatgcgaccgggcctggtcggagcatcggcggcactttccaaattgctttttcgtgctgggtcgaaaccttaatatccgtagcgagagcgacgccgtgtctagcgacagaaatttccctaactctactaatctgccgcggaacccaagcatggcggactatgaggcgcgtatatttacttttggtacctggatctattcagtcaataaggagcagctggcccgcgccggattttatgcgctgggtgagggcgacaaagtcaagtgctttcactgcggcggcggtctaaccgattggaagccgtccgaagatccgtgggagcagcatgcgaagtggtatccaggttgcaaatacctgttggagcagaaaggacaagagtacattaataacattcatctgacgcatagcctggaagagtgcctggtgcgaactaccgaaaaaacgccgtctctgacccgtcgaatcgacgatactatctttcagaatcctatggtccaggaggctatccgcatgggcttttcctttaaggatatcaagaaaattatggaggaaaagattcagatcagcggcagtaattataagagcttggaggtgctggttgctgacttggtaaacgctcagaaagactcaatgcaggacgagtcgagccagacatccctgcaaaaagaaatcagcaccgaggagcaactccgccgtttgcaagaggagaaattgtgtaagatttgtatggaccgcaatattgctatcgtgtttgtgccatgtgggcacctggtgacgtgtaaacaatgtgcggaggccgttgataagtgcccaatgtgctatacagtgattactttcaaacagaagatctttatgtcg

SEQ ID NO: 325246 - DNA, 1491 bp, Artificial Sequence
  derived and/or modified sequence
atgacctttaactcgtttgaaggctctaaaacgtgtgtcccagcagatatcaacaaggaagaagaattcgtggaagagtttaatcgcctcaagaccttcgcaaactttccttcggggtcgcccgtcagcgcaagcacgcttgctagagcaggctttctttacaccggagaaggagataccgtgcgttgtttctcctgccacgcagcagtggatcgttggcagtacggtgacagcgcagtgggtcgccatagaaaggtgagcccaaactgtcgctttatcaatggattctacctcgagaattccgcgacccaatcaaccaacagcggtatccagaatggacaatacaaggtcgaaaactacctgggatcgcgtgatcactttgctctcgaccggccatctgaaactcatgcagattacctcctccgcacgggtcaagtggtggatatctcggataccatctaccctagaaatcctgcaatgtactccgaagaagcaagactgaagtctttccaaaactggccagactacgcacaccttactcctcgggaacttgcctccgcaggactctattacaccggaattggcgaccaagtgcagtgtttttgctgtggcggcaaacttaagaattgggagccatgcgacagagcctggtccgagcaccggaggcacttccctaactgttttttcgtgttgggacggaatctcaatatccggtccgagtccgacgcggtttcatcagacaggaattttcccaattccactaatttgccaagaaatccttccatggcagactacgaagcaagaatcttcactttcggtacttggatttactccgtgaacaaggagcaacttgctcgcgcaggattttacgcactgggtgaaggggataaggtcaagtgttttcattgcggtggtggtcttaccgattggaaaccttcggaagatccttgggagcaacatgccaagtggtaccctggctgtaaatacctgctggagcaaaagggacaggaatacattaacaacattcaccttactcactccctggaggagtgtttggtgcgcactaccgaaaagactccctccctgaccaggaggatagacgataccatttttcaaaacccgatggttcaagaggcaattaggatgggattctctttcaaggatatcaagaagattatggaagaaaagatccagatctcgggatcgaactacaagtcgctggaagtgcttgtggctgatctggtgaatgcacaaaaagattcgatgcaagatgaatcgtcacaaaccagcctccaaaaagaaatttcaacggaggagcagctcagaagattgcaagaagagaaactttgcaagatctgcatggaccggaacatcgcaattgtctttgtgccttgtggtcatctggtgacctgtaagcagtgtgcagaggcagtggacaagtgccccatgtgttacacggtgataactttcaagcaaaagatcttcatgtcc

SEQ ID NO: 325247 - DNA, 1491 bp, Artificial Sequence
  derived and/or modified sequence
atgactttcaattctttcgaggggtcaaagacttgcgtgccggccgacattaataaagaagaagagttcgtcgaggagttcaatcggctgaagacgttcgctaactttcccagtgggagccctgtgtccgcctccacccttgctcgggctggcttcctgtataccggggagggagataccgttcgctgcttttcatgtcacgctgccgtagatcggtggcaatacggcgactcagccgtgggacgccataggaaggtgagtccaaactgtcgctttattaatggattctacctggagaactcagccacccagtccactaactccggaattcagaatggacaatacaaggtggagaattaccttgggtctagagatcactttgcgctagaccgcccatccgagacccatgccgactatctcttacgcacagggcaggtggttgacatttctgatacaatctatcctcgcaaccccgccatgtatagcgaggaagcaagactgaagtcttttcagaattggccagactatgcacatttgacgcccagagagctggccagtgctggcctttactatactgggatcggtgatcaggttcagtgtttctgttgcggtggcaagctgaaaaactgggaaccctgcgacagagcatggagtgagcacagacgccattttcccaactgctttttcgtgcttggccgcaatctgaatatccggtctgagtcagatgccgtttcttctgacagaaattttcccaactcaacaaacttgccgaggaacccttccatggcagactacgaggccaggatttttacttttggtacatggatttatagtgttaataaggaacagctggcccgagcaggcttctacgctctcggggagggggataaggtgaagtgttttcactgcgggggcggcctgactgactggaagccctctgaagacccttgggagcagcacgccaagtggtacccaggatgcaagtacttgctcgagcagaaggggcaggaatacatcaataatattcacctgactcactccctggaggagtgcctcgttcggactaccgagaagactcctagtttgaccagaaggatcgatgacacaatttttcagaaccctatggtgcaggaagccattcgcatgggtttcagcttcaaggacataaagaagatcatggaagagaagatacagatctctggatcgaattataagagccttgaagtccttgtggccgacctggtcaatgctcagaaggatagtatgcaggatgaatcctcacagacatcgttgcagaaggagatctctaccgaggaacagctccgacggctgcaagaagaaaaattatgcaagatctgtatggacagaaatatagcaattgtattcgtcccatgtgggcaccttgtgacttgcaaacagtgcgcggaggcggtggataaatgtccaatgtgttataccgtcatcacttttaagcaaaagattttcatgagt

SEQ ID NO: 325248 - DNA, 1491 bp, Artificial Sequence
  derived and/or modified sequence
atgaccttcaacagcttcgaagggtccaaaacctgtgtgcccgctgatataaataaagaggaggaattcgtcgaggagtttaacaggctcaaaacctttgcaaacttcccatccggatctcctgtttcggcgtctactttagcccgtgcaggattcttgtacactggtgagggcgacactgtgcgttgcttttcttgccatgccgccgtcgacagatggcaatacggagacagcgccgtgggacggcatagaaaagtatctcctaactgcagattcatcaatggcttttatctggaaaattccgccactcagtcaactaactctggaattcagaatggccaatacaaggttgagaactatctgggctctcgtgatcattttgcgctggatcgaccctccgagacacacgccgattacctccttcgcactgggcaggtggtggatatctctgacacaatttacccccgaaaccctgctatgtacagtgaggaggcaagattgaagagcttccagaattggcccgattacgcacacttaaccccgcgcgaactggcatcagccggcctctattacaccggcattggcgatcaggtgcagtgtttctgctgtggaggcaagctgaagaattgggagccttgcgatcgtgcctggagcgaacatcgccggcatttcccaaattgttttttcgtcctcggaaggaacctgaacattagaagtgaatccgatgctgtgtcatctgatcgcaacttcccgaattctacgaacttgcctcgcaacccctcaatggccgattatgaagcccgaatatttacttttggtacgtggatctacagtgtgaataaggagcagttggcacgcgcaggcttctacgcattaggagaaggcgacaaagttaaatgctttcactgcgggggtggccttactgattggaagccatcagaggatccatgggagcagcacgccaagtggtacccagggtgcaagtatcttctggagcagaaaggtcaggagtacataaataacatacacttgacacacagcctggaggagtgcttggtgcggacgacagaaaagactccgtccctgacaaggcgaatagacgatactattttccagaaccccatggttcaggaggcgatccgaatgggcttttcctttaaggacatcaaaaagatcatggaagaaaagattcagattagcggtagtaattataaatccttggaggtgctagttgcagatttggtcaacgcccagaaggattcaatgcaggacgagtcctcacaaacaagcttgcaaaaagaaatatcaacagaggagcagctgagacggctccaggaggaaaagctttgcaagatctgtatggatcgcaacattgcgatcgtgtttgtgccctgtggccacttggtaacttgtaagcagtgcgctgaagctgtggataagtgcccaatgtgctatacagtcattacctttaagcagaaaattttcatgtct

SEQ ID NO: 325249 - DNA, 1491 bp, Artificial Sequence
  derived and/or modified sequence
atgacctttaactcctttgagggtagcaagacttgcgtgccagccgatatcaataaagaggaggaattcgtggaggaattcaaccgcctgaaaactttcgcgaattttccatccggaagccccgtgtctgcatcaactcttgcaagggcaggcttcctttacactggtgagggtgacacggtgcgctgcttttcgtgtcatgcggcggtcgacaggtggcagtacggagatagcgcagtcggccgccatcggaaagtgtccccaaattgtcggttcataaacggattttacctggagaactccgcaactcagtcgaccaattcggggatacagaatggtcagtataaggttgaaaactacctgggatccagggaccattttgcactcgatcggccttccgaaactcacgcagattacctgctgcggaccggtcaagtggtggacatcagcgacactatttacccacgcaacccagcgatgtactcggaagaggcccgcctcaagagctttcaaaactggccggactacgcacatctcacccctcgagagcttgcgagcgccggactttactacacgggcattggtgaccaagtccagtgtttctgttgcgggggaaagctcaagaactgggaaccctgcgatagagcatggagcgaacacagacgtcatttcccaaactgcttttttgtgcttggacggaacctcaacatccgttccgaaagcgatgcggtgagctcggaccgcaattttcctaactccactaacctcccccggaacccgtcaatggccgactacgaggccagaatctttacctttggtacgtggatttactcggtgaacaaagagcagctcgcccgggcagggttctacgcactcggggaaggagataaggtgaagtgctttcattgcggtggtggacttaccgactggaagccgagcgaagatccttgggagcaacatgccaagtggtacccaggctgtaaatacctgcttgaacaaaagggacaagagtacattaacaatatacatcttacccattcactggaggaatgtctcgtccgcaccaccgaaaagaccccaagccttacgagacgcattgatgataccatcttccaaaacccaatggtgcaagaggcgataaggatggggttcagctttaaagacatcaaaaagataatggaagagaagattcagatctcagggtcaaactacaagtcattggaagtgctggtggcagacctggtcaatgcccagaaggattcgatgcaggacgaatcgagccaaacgtcactccaaaaggaaatctcgaccgaggagcaactgcgcagactgcaggaggaaaagctctgtaagatttgcatggataggaatattgcgattgtctttgtgccttgtggtcaccttgtgacttgtaagcaatgtgcagaagctgtggataagtgtccgatgtgctacaccgtgattacgtttaaacaaaagatcttcatgtcg

SEQ ID NO: 325250 - DNA, 1491 bp, Artificial Sequence
  derived and/or modified sequence
atgacgttcaattcttttgaggggtcaaaaacttgtgttccagcagacataaacaaagaggaagagttcgtggaagaattcaacagattgaaaacttttgcaaattttccgtcaggatcccctgtgagcgcttcaacattggcaagagctggctttctgtatacaggagaaggagatacagttcgttgtttctcctgtcacgccgccgttgatagatggcagtatggagattcagctgtaggacgacatcggaaggtgtccccaaattgtcgtttcattaacggattttatctagaaaattctgccacacaatctactaacagcgggatacagaatggtcaatataaggtcgaaaattatttgggaagtagagatcattttgctcttgaccgaccaagtgaaacacatgccgattatttgctacgaactggacaagtggtagatatttcggatacaatttatccaaggaatccggctatgtactccgaggaagcacgacttaagagttttcaaaactggccagattatgctcacctcactccgagagagcttgcatcggcaggattgtattacactggaattggtgaccaagtccaatgtttctgttgtgggggtaaactcaaaaattgggagccatgtgatcgcgcgtggagtgaacatcgtcggcactttccaaattgctttttcgttctcggtaggaatttgaacattcgatctgagagcgatgcagtttcatccgaccggaacttcccgaacagcacaaatctcccacgaaatcccagtatggcggattatgaagcccgtatctttacatttggtacatggatttattcagttaacaaggaacagttagcacgagcaggtttttacgcactgggagaaggagataaggtgaagtgctttcattgcggtggtggattgactgattggaaaccatcagaggatccatgggaacagcatgctaaatggtatccaggctgtaaatatttgctcgaacaaaagggccaagaatacatcaacaatattcaccttacccactctttggaggaatgtcttgtccgaactaccgaaaagactccaagccttacaagaaggattgatgatactatctttcaaaatccaatggtacaagaagcaattcgaatgggtttttctttcaaggatattaagaaaatcatggaagagaaaatccaaatttccggatctaattataaaagcctcgaagttttggtggccgatttggttaatgctcaaaaggacagtatgcaagatgagtcatcgcagacttctttacaaaaggaaattagtacggaagagcagcttcgtcgacttcaggaagagaagctatgcaaaatatgtatggatcgaaatatcgctatcgtttttgtgccatgtggacatcttgtcacctgtaaacaatgcgctgaagctgttgataagtgccctatgtgctatacggttattacttttaagcaaaaaatctttatgtcc

SEQ ID NO: 325251 - DNA, 1491 bp, Artificial Sequence
  derived and/or modified sequence
atgacatttaactcgtttgaaggctctaagacgtgcgtccccgctgacatcaacaaggaagaggaatttgtagaggaattcaatcgcctaaaaaccttcgcaaacttccccagcggatcacccgtgtcagccagcacactagctagagcagggtttttgtatactggcgaaggcgacacggtcaggtgtttttcctgtcatgccgctgttgatcgatggcaatacggcgactcagccgtgggccgccacaggaaggtttcacctaactgccgttttataaacggattttacttagaaaacagtgcaacacaatctacaaactcaggaatacaaaacggtcaatacaaggtcgagaactatctggggtctagggaccactttgccttggataggcctagcgagacacacgcagactatctgctacgaactggccaggtcgtggatatatccgacactatttatccccgcaacccggctatgtacagcgaagaagctcggctgaagagcttccagaactggcctgactacgctcatctcacgcccagagaactggcatccgctggtttgtactatacaggaatcggcgaccaggtgcaatgtttctgctgcgggggtaagcttaaaaattgggagccgtgcgatagggcttggagtgagcatagacgtcatttcccaaattgtttttttgtcctggggaggaacctcaacattcgcagcgagtcagacgccgtgtcttctgaccgtaattttccaaacagtacaaacctaccgcgcaaccccagcatggccgattacgaagcccggatttttacttttggcacgtggatctactcggtcaacaaagagcaattagcacgggcaggattctatgctctgggagagggcgacaaagtcaagtgctttcattgcgggggcggacttaccgattggaagccctccgaagatccgtgggaacagcatgcgaagtggtatcccggctgcaagtatctactagaacaaaaggggcaagaatatattaacaatatccacctgacacactcccttgaggaatgcctggttagaacaactgagaagacgccgtcccttacacggcggatagacgacaccatctttcagaacccaatggtacaagaggccatcagaatggggtttagttttaaagacattaaaaagatcatggaggagaagatacaaatatctgggtccaactacaagtcactggaagtcctggtggccgatctcgtcaacgctcagaaagatagcatgcaggacgaaagctcacagacgagcctccagaaagagatcagcacggaggaacaactgagacggctgcaggaagagaagctgtgtaaaatttgtatggaccgaaacatagctatagtgttcgtaccatgcggccacctggtgacctgtaagcagtgcgccgaagctgtggataagtgccccatgtgttatacagttatcaccttcaaacaaaaaatctttatgagc

SEQ ID NO: 325252 - DNA, 1491 bp, Artificial Sequence
  derived and/or modified sequence
atgactttcaactcctttgagggatcaaagacgtgcgtgccggctgacattaacaaagaggaagagttcgtcgaggagttcaacaggctcaagacatttgctaacttcccgtctgggtcgccagtgtcagcgagtactctagcaagagcggggttcctatacacaggagagggcgacaccgttagatgcttctcatgccatgctgcagtcgatagatggcaatatggtgactccgccgtggggcggcaccggaaagtgtcacctaactgtagattcattaatggtttctatctggagaactctgcaacgcagtcaactaactcggggatacaaaacgggcagtataaggtggagaattatctcggttcaagagatcacttcgccctggacaggcccagcgaaacccacgccgactacctgttgagaacaggacaggtggtggatattagcgatacaatctatccgaggaatcctgccatgtactcagaagaggcaaggctgaaatcttttcagaactggcccgattatgctcacctgacccctagggagctggcctccgcaggtttgtattatacaggcattggcgatcaggtccagtgtttttgttgcggaggcaagttaaagaactgggagccttgtgaccgcgcctggtcagagcacagaaggcacttccctaactgcttctttgtgctggggcggaatctgaatatccgatccgagagtgatgccgtcagcagcgataggaatttccctaactctactaacctgcctcggaatccaagtatggcagattatgaggccaggatcttcacattcggaacttggatttactccgtgaataaagaacagttagcccgcgccggattctatgctctcggtgaaggggacaaagtgaaatgttttcactgtggtggaggcctcactgactggaaaccttcggaagacccctgggagcagcatgcgaagtggtaccctgggtgtaagtacttgctagagcagaaaggccaggaatatatcaataacattcatctcacacattcactggaagagtgcctcgttcgtaccaccgagaagacacctagcctgacgagacgaattgatgatacaatcttccagaaccccatggtgcaggaagcaattagaatgggcttctcattcaaggatatcaagaagattatggaggagaagattcagatctcgggctctaattataagtcgctggaggtactggtggccgatttggtgaacgctcagaaggattctatgcaagacgaaagttctcagacctccctgcagaaagaaatctccactgaggagcagctgaggagacttcaggaggagaagctgtgtaagatttgtatggacagaaacattgcaatcgttttcgttccttgtggacatttggtcacctgcaagcagtgcgccgaagcggtggacaaatgccctatgtgctacacagtgattactttcaagcaaaaaatatttatgtca

SEQ ID NO: 325253 - DNA, 1491 bp, Artificial Sequence
  derived and/or modified sequence
atgactttcaactcgttcgagggctctaagacatgtgtgccggctgacattaacaaggaggaggaatttgtcgaagagttcaatcgcctgaagaccttcgcaaatttcccctcaggctcgccggtgtccgcctccacgctcgcccgagcggggtttctgtacacaggggagggggacactgtccggtgcttctcatgtcatgccgccgtggaccggtggcagtacggtgacagcgctgtcggacgacatcgcaaggtctcccccaactgccgtttcattaacggtttctatttagagaattccgcgacacagagcacgaactccggtatacagaacggccaatataaggttgagaattacctggggagccgtgatcacttcgctttggaccgcccatcggagacgcacgccgattacctgctgaggactggccaggtggtggatatctccgacaccatttacccgcgcaacccggctatgtactcagaagaggcacgcctgaagtcctttcagaattggccagactatgcacatctgacgcccagagaactggcctcagccggtctgtactatactggaataggcgatcaagtacagtgcttttgctgtggcggcaagctaaagaactgggaaccgtgcgaccgcgcgtggtcggagcaccgacgacacttccctaattgttttttcgtgctgggcagaaacttaaacatacgtagtgagagtgatgccgtctcttcggatcggaatttcccaaacagcaccaacttacctcgcaatccatcgatggccgactatgaagcgcggatcttcactttcggaacatggatatactccgtaaacaaggagcaactggctcgagccggtttttacgccctgggcgagggtgataaggtcaagtgcttccactgcggcggaggtctgactgactggaaaccatctgaggatccctgggagcagcatgccaaatggtatcccggctgcaagtacttactggagcagaagggccaggagtacatcaataacattcatctgacccacagcctagaggagtgcctcgttcgcacgactgaaaaaaccccctccctgacgcgtcggatcgatgatacgatcttccagaatccgatggtccaggaggcgatcaggatgggcttcagctttaaggacatcaaaaagatcatggaggagaaaatccaaatttccggcagcaactacaagagcctggaggtccttgtagcggacttggtgaacgcgcagaaggattcgatgcaggacgagagcagccaaaccagcctgcagaaggagatttcgactgaggagcaactgagaaggctgcaagaggagaaattgtgcaaaatctgcatggatcgtaacattgccattgttttcgtcccttgtgggcatctggtgacatgcaagcagtgcgccgaggctgttgataagtgtccgatgtgctataccgtgatcaccttcaagcaaaagattttcatgtca

SEQ ID NO: 325254 - DNA, 1491 bp, Artificial Sequence
  derived and/or modified sequence
atgacctttaactcgttcgaaggttctaagacgtgcgtgccagcagatatcaacaaagaggaagagtttgttgaagaattcaacaggcttaagacgttcgccaattttccctcgggctccccagtgagcgcaagcaccctcgctagagccggatttctgtacactggcgaaggagataccgtccggtgcttcagctgccatgccgccgtcgacagatggcaatacggggattccgcagtgggtcggcatagaaaggtgagccccaattgtcgtttcattaacggattttacttggagaattcggccactcagtcgacgaactcaggcatccaaaatggacagtacaaggtggagaactacttgggatcgagagatcactttgccttggaccgaccttccgaaactcatgcggattacctgctgaggaccggtcaagttgtcgatatttccgatacgatttaccctcggaatcctgcaatgtacagcgaggaagcgagacttaagtcgtttcaaaactggccagattacgcccatcttaccccacgtgaattggcctcagctggcctgtactacactggaattggcgatcaggtgcagtgtttctgctgtggtggaaaactgaaaaactgggaaccttgcgacagggcatggtcagagcaccggcgacactttccgaattgctttttcgtgcttggacggaaccttaacattcgatcggagtcagatgccgtgagctcagaccggaactttcctaactcgaccaaccttccacgcaatccttcaatggcagattacgaggcacggattttcacctttggtacctggatttactcggtgaacaaggagcagctcgcaagggctggattctacgcgctcggagaaggagataaggtgaaatgctttcactgtggcggggggcttaccgattggaaaccgagcgaggacccctgggagcaacatgcaaagtggtacccgggttgcaagtacctgctggaacagaagggtcaagaatacattaacaacatccatcttactcattccctcgaagaatgtctggtgcgtacgaccgaaaagacgccctccctcactcgcagaattgacgataccatcttccagaaccccatggtgcaagaagccattaggatgggattctcctttaaagatatcaagaaaatcatggaagagaaaattcagatttcaggttcgaattacaagtcactggaagtgctggtggcagaccttgtcaacgcccaaaaggattctatgcaggacgaatcgagccagacttcactgcaaaaggaaatcagcactgaagagcaactccgtcggctgcaggaagagaagctgtgtaagatatgtatggatagaaacatcgccatcgtgtttgtgccctgtggacatctggtcacttgcaaacagtgcgctgaagcagtggataagtgtccaatgtgttatactgtgattacctttaagcaaaagatctttatgtca

SEQ ID NO: 325255 - DNA, 1491 bp, Artificial Sequence
  derived and/or modified sequence
atgacctttaacagctttgaaggatctaagacgtgtgtcccagctgacataaacaaggaagaagaatttgtggaggaattcaacaggcttaagacttttgcaaatttcccttccggatcacctgtgtcggcttcgactcttgcacgagcaggcttcctttacactggagagggggataccgtgagatgtttcagctgccatgcagccgtggacagatggcagtacggagattcggcagtgggacggcatcgcaaggtcagccctaactgtaggtttatcaacggattttaccttgaaaactccgccacccaatccactaacagcggaattcagaatggacagtacaaagtggaaaactacctggggagccgcgaccacttcgcccttgatcgaccatcagaaactcatgcagattacctccttcggactggccaggtcgttgatatttcggataccatttacccccgtaatccagcaatgtattcagaagaggcacggctgaagtcctttcagaattggccagattacgcgcacctgaccccccgggagctggcttcagcaggactgtactacactgggatcggtgatcaggtccaatgtttttgttgcggagggaaacttaagaactgggagccatgtgatagagcatggtccgagcataggagacattttccgaactgcttttttgtgctgggacggaacctcaatattcggtcagaatctgacgcagtgtcctcggatagaaactttcctaattccactaaccttcctcgtaatcccagcatggcggactacgaagccaggatctttactttcgggacctggatatactcggtcaacaaggagcaacttgcacgcgccggattctacgcactgggtgagggtgataaagtgaagtgttttcactgtggtggaggccttaccgattggaagcctagcgaagatccatgggaacagcatgcaaaatggtacccaggttgcaaatacttgctggaacaaaagggtcaagaatacattaacaatatccaccttactcactcccttgaagagtgtctggtgcgtaccactgagaaaactcctagcctcaccagaaggattgatgacacgatttttcagaaccctatggtccaagaagccatccgaatgggattctcgtttaaggatatcaaaaagattatggaggaaaagatacaaatttcgggctcaaattacaaatcccttgaagttctggtggcagatcttgtgaatgcacaaaaggattccatgcaagatgaatcgtcgcagacctctcttcaaaaggaaatctcaacggaagaacaacttagacgactccaggaagaaaaactctgtaagatatgtatggatcgcaatatcgcaatagtttttgtcccatgtggtcacctcgtgacttgtaagcagtgtgcagaagccgtggataaatgcccgatgtgctacacggtgattacctttaagcagaagatctttatgtca

SEQ ID NO: 325256 - DNA, 1491 bp, Artificial Sequence
  derived and/or modified sequence
atgacattcaactcatttgagggcagtaagacatgcgtgcctgcggatattaacaaggaggaagaattcgttgaggaatttaatagactgaaaacatttgcgaactttccgagcggctcacccgtcagtgcgtcaaccctggcccgagctggctttctatacactggcgagggcgacacggtacggtgtttttcctgccacgccgccgttgatcgctggcagtacggcgactctgcagttggccgacacaggaaggtgtcccctaattgtcgattcatcaacggcttctacctggaaaacagtgccacacaaagcaccaactctggaattcagaatggacaatacaaagtcgaaaactatcttggatcaagagaccactttgccctcgacaggccttcggaaacccacgctgattacttgttgcgaacgggacaggtggtggatatatccgacaccatttacccacgaaacccagctatgtatagtgaagaggcgcgtcttaaaagctttcagaattggcccgattacgctcatctgacaccccgagagctggcctccgcagggctgtattacacaggcatcggtgatcaagtgcaatgcttctgctgcggcggaaagctcaagaattgggaaccctgtgacagagcctggagcgagcatagacgacactttcctaactgtttttttgtgctcggtagaaatctgaatataaggagcgaatcagacgcagtctcgtctgacagaaactttcccaattcaacgaaccttcctaggaatccctctatggctgactacgaggccaggattttcacattcggcacgtggatctattctgtgaacaaggagcagctggctagggcagggttttacgccctcggcgagggagacaaggtcaagtgtttccactgtggtggcggactcacggattggaagccgtccgaggacccatgggaacagcacgccaaatggtatcctgggtgcaaatatttgctggaacaaaaagggcaggagtatatcaataatatacacctgacccatagcctcgaggaatgcctggtaagaacgactgagaagaccccatccctgactaggcgcatagacgatacaatcttccagaaccctatggtgcaggaagctattagaatgggtttcagctttaaagacataaaaaaaatcatggaggaaaagatccagatatcgggatccaattataaaagcctggaggtgctagtagcagatctcgtgaatgctcagaaggacagcatgcaggatgaatcaagtcagacttctctgcagaaagaaatctccaccgaggaacagctgaggcgcctccaggaagagaagctctgtaagatttgcatggatcgaaacatagccatcgtgttcgtgccatgcggacatttagtgacgtgcaagcagtgcgcggaagccgtcgacaagtgtcccatgtgctataccgtcatcacctttaaacagaagatcttcatgtct

SEQ ID NO: 325257 - DNA, 1491 bp, Artificial Sequence
  derived and/or modified sequence
atgacctttaactcattcgagggcagcaagacttgcgtcccggcggacataaacaaagaggaggagtttgtggaggagttcaataggctgaaaactttcgccaatttcccgtccggttcaccggtgagcgcctcgaccctggcgagagcaggattcttgtacaccggggaaggagacaccgtccgctgcttttcgtgccacgccgccgtggacagatggcagtacggtgacagcgccgtgggacgtcatcgaaaagtgtcgcccaactgccgcttcatcaatgggttctatctggaaaattccgcgactcagtctaccaactcaggaattcaaaacgggcaatacaaagtcgagaactacctcggatcacgcgatcacttcgcgctggaccgcccatcggagactcatgctgactacctgcttcgcactggccaggtggtggatatttctgataccatctaccctaggaatccggccatgtactcagaagaagcccggctgaagtccttccagaattggccagattacgcgcatctcaccccgcgggaactggcgtcagccggactctactacactgggatcggggaccaagtgcagtgcttctgctgcggcggtaaactgaaaaactgggagccatgcgatcgcgcatggtccgagcatcggagacacttcccgaactgctttttcgtgcttggaaggaacttgaatatccggtccgaatcggacgcagtgtccagcgacaggaatttcccgaattcgactaatctcccgcgcaacccgtctatggccgattacgaagcgagaatcttcactttcggaacctggatttactcggtgaacaaagaacaactcgcacgcgcgggcttctatgccctcggagaaggagacaaggttaagtgttttcactgcggtggaggactgaccgactggaagcccagcgaggacccgtgggaacaacatgcgaaatggtacccgggctgcaagtacctcctcgaacagaaaggccaggagtacattaacaacatccatctcactcattcccttgaggagtgcctggtgcggactactgaaaagaccccgtcgctgactcggcggatcgatgacaccatcttccagaatccaatggtgcaggaggcaatcagaatgggtttctcgtttaaagatatcaagaagatcatggaggagaagatccagatttcaggatccaactacaaatcccttgaggtgctggtcgccgacctggtgaatgcacagaaggattccatgcaggacgaatcctcccaaacctcactgcagaaggaaatctccactgaggaacaactgcggcggctccaagaagaaaagctgtgcaagatttgtatggatagaaatatcgctatcgtgttcgtcccatgtggacatctggtgacgtgcaagcagtgcgccgaagccgtggacaagtgtccaatgtgctacaccgtcatcacctttaagcagaagatcttcatgagc

SEQ ID NO: 325258 - DNA, 1491 bp, Artificial Sequence
  derived and/or modified sequence
atgacttttaacagttttgaggggtctaaaacttgcgtgcctgctgacattaataaagaagaagaattcgtggaagagttcaatcgtctaaagacctttgcaaatttcccttcggggagccctgtcagcgccagcacacttgctagagccggattcctctataccggcgagggagataccgtccggtgcttctcgtgccacgctgcagtggacagatggcagtatggggattcagcagtcgggagacaccggaaagtgtctcccaactgccgcttcataaacggtttctaccttgaaaactctgctacacaatctacgaattccggcattcagaatggacaatacaaggttgaaaactatctcggatctcgggaccactttgcactggaccgccctagtgagacccacgcagactatctacttcgcacgggacaagttgtggatataagcgataccatctacccaaggaaccctgccatgtacagtgaagaagcccgcctcaaatccttccaaaattggcctgattacgcccaccttaccccaagggagctggcatcagcaggcttgtactatacaggcatcggagaccaggtacaatgcttttgttgcggaggaaaactaaagaactgggagccttgtgacagggcttggagcgagcataggcggcacttcccaaactgcttcttcgtgttgggaagaaacctaaatatcaggagcgaatctgacgccgtgagcagcgatcgcaacttcccaaactcaaccaacctgccgcgtaatccttcgatggctgattacgaagcacgtatcttcacatttggcacctggatctactccgtgaacaaggaacagctcgctcgggccggcttctatgctctgggggagggcgataaagtcaaatgtttccactgtggaggtggcctgaccgactggaagccctctgaggacccctgggaacaacatgctaagtggtaccccggctgcaaatacctcctggagcaaaagggccaagagtatatcaacaatatacacctcacgcatagcctcgaggagtgcctggtgcgtaccaccgagaagactcctagcctgacaaggaggattgatgacactatctttcaaaaccctatggttcaagaagccatccgtatgggcttcagtttcaaggacatcaagaaaattatggaggagaaaattcagatctctggatccaactataagtctctggaggtcctcgtggccgacctcgtgaacgcacagaaggattctatgcaggacgaaagtagtcagacaagcctgcaaaaggaaatctccactgaagaacagctgaggagacttcaggaggaaaagctgtgtaagatctgtatggatagaaacatcgctatcgtcttcgtgccctgcgggcatctcgtcacctgcaagcagtgcgctgaagccgtggacaagtgtcccatgtgttacactgtaatcaccttcaagcaaaaaatcttcatgtca

SEQ ID NO: 325259 - DNA, 1491 bp, Artificial Sequence
  derived and/or modified sequence
atgaccttcaactcctttgagggcagcaagacctgcgtacccgccgacatcaacaaagaagaggaatttgtggaggaattcaataggctgaagacatttgctaacttcccctccggttctcccgtgtccgccagcaccctggccagagccggtttcctttataccggcgaaggcgacaccgtgaggtgcttctcatgccatgcggcagtagacagatggcaatacggtgactctgctgtcggcagacataggaaggtgtctcctaactgcaggttcatcaatggattttacctcgagaattctgccacacagtctactaactccggtatccagaacggacaatataaggtggaaaattacttgggaagccgagatcacttcgccctggataggccatcagaaacgcacgcagactacctgctccgcaccggccaggtcgtggacatttccgacacaatttaccctaggaacccagccatgtattctgaggaggctcgcctgaagtcattccaaaattggccagattatgcgcacttgacccctagggagcttgcaagtgcaggattgtattacacggggataggcgatcaggtgcagtgcttctgttgcggggggaagctcaagaactgggagccctgtgatcgggcttggagtgaacacaggaggcattttcccaactgtttcttcgtgctcgggcgcaacctgaatattagatctgagtcagatgctgtgagttccgaccggaacttccccaattccaccaatctgcctaggaatcccagtatggcggattacgaggcaaggattttcacgtttggcacatggatatacagtgttaataaggagcagctggctcgcgctgggttctacgctctgggcgaaggtgacaaagtgaagtgtttccattgcggcggcggcttgaccgattggaagcccagcgaggatccatgggagcagcacgcaaaatggtaccctggatgcaaatatctgttggagcagaaaggccaggaatatatcaacaacattcatctgactcattcccttgaggaatgcctcgtgcggactactgagaagacaccttccctgacccggaggatagacgacaccattttccagaatcccatggtgcaggaagctatccgaatggggttctcattcaaggacataaagaaaattatggaagagaagattcagatatccggtagcaactacaaatcacttgaggtgttggtggccgacctcgtgaatgcccagaaggactctatgcaggatgaatcatcacagacaagcctgcagaaagaaataagcacagaggagcagctgcggcgcttgcaagaggaaaaactgtgcaagatatgcatggatcgcaacatagctatcgtattcgtgccttgcggacacctcgtcacctgtaaacaatgcgcagaagcagtggacaaatgtccaatgtgctatactgtgattacatttaaacaaaaaattttcatgagc

SEQ ID NO: 325260 - DNA, 1491 bp, Artificial Sequence
  derived and/or modified sequence
atgaccttcaactcttttgaagggtcgaagacttgtgtgcctgcagacatcaacaaggaagaggagttcgtcgaggagttcaatagacttaaaaccttcgcaaatttcccttctggatcacctgtgtcggcaagtactctcgctagggctgggttcctttacaccggagaaggcgacactgtgagatgtttttcatgccacgccgcggtggaccgctggcagtatggcgactccgccgtaggccgccaccgcaaggtgtctcccaactgccgttttataaatggattctatttagagaacagtgccacgcagagcaccaactcagggatccagaatggccaatataaggtggaaaattatttggggtctcgcgaccatttcgcgcttgatcgtccatcagagacccatgccgactatctgctgcgtacagggcaggttgtcgatataagcgacaccatatacccccgaaatccggctatgtactcagaagaggccagattgaagagtttccagaattggcctgattatgcacacctgacaccccgagagcttgcgtccgccgggttgtactacacaggcataggagaccaggtccagtgcttttgctgcggcgggaaactcaaaaactgggaaccctgtgacagagcctggagcgaacacaggaggcacttccccaattgctttttcgtgctcggccgcaacttgaacattcgttccgagtctgacgccgttagctccgatagaaactttcctaacagcaccaatctgccgcgcaacccctcaatggctgactacgaggcaaggatcttcactttcggaacttggatttatagtgtgaacaaggaacagctggcgcgggctggattctatgccctgggagagggggataaggtgaagtgtttccattgcgggggcgggctcacagactggaagccgagtgaggatccctgggagcagcacgccaaatggtacccagggtgtaagtatctcctggaacagaaaggccaggaatacataaacaacattcacctgacccactcacttgaagaatgcttggtgagaactacagagaagacaccttcactgacaaggagaatagatgacactatttttcagaatcccatggtgcaagaggctattagaatgggctttagctttaaagacatcaaaaagatcatggaggaaaaaatccagatttccggtagtaattataaatccctagaggtgctcgtagcagatctggtgaatgctcagaaggattctatgcaagatgaaagtagccagaccagcctccagaaggagatctctacagaagagcagttgaggaggctgcaggaagaaaagctttgcaagatttgtatggacaggaacatcgccatagtctttgtgccttgtggccatttggttacctgcaagcagtgtgccgaagctgtggataaatgccctatgtgttacaccgtgatcaccttcaaacagaagatcttcatgtcc

SEQ ID NO: 325261 - DNA, 1491 bp, Artificial Sequence
  derived and/or modified sequence
atgacattcaactcattcgaagggagtaaaacttgcgtgcccgccgatatcaataaagaagaagaatttgtagaggaatttaacaggctgaaaacattcgccaattttccctctggatccccagtgtccgcatctacacttgccagagctgggtttctgtatacaggggaaggagatacagtcaggtgtttttcttgccacgcagccgtggaccgctggcagtatggagattctgccgtgggacggcatagaaaagtaagtcctaattgccgattcataaatgggttctacctcgagaattctgccactcagtccacaaactcagggatccagaacggacagtataaagttgaaaattatcttggatctagggatcattttgcccttgacagaccttcagaaactcacgcggattatctgctcagaacagggcaggtggtcgatatctcagatacaatatatcctagaaaccctgcaatgtatagtgaggaagctcggctgaagtcatttcagaattggcccgattatgcccacctgacaccccgggaactcgcttctgctggactctattatactgggatcggagatcaggtgcagtgcttctgttgcggagggaaactgaaaaattgggaaccctgcgatagggcatggagtgagcacagacggcatttccctaactgcttttttgttctcgggaggaatctaaatatacggtctgaatctgatgcagtctcaagtgataggaatttccctaattctactaatttgccacgaaatccttcgatggcagattatgaggctcgaatatttacttttggaacatggatatactcagtcaacaaagaacagctcgcaagggcgggattctatgccttgggggaaggggataaagttaaatgttttcactgcggaggggggctcacagactggaaaccctcagaagacccatgggagcaacatgccaaatggtatcccggatgcaaatatttgctggaacagaaaggacaggagtatataaataacattcacttgacacacagtctggaagaatgtttggttcggacaacagagaagactccatcactaactaggaggatcgatgatacaatctttcagaatccaatggtgcaggaggcaatacggatgggattctcatttaaagacataaaaaaaataatggaagaaaagatccagatttctgggagtaactacaaatccctagaagtactcgtagctgatctcgttaacgctcagaaagattctatgcaggatgagtcgtcacagacttcactccagaaagaaatatctacagaagaacaattaaggcggttacaggaagaaaaactgtgtaagatctgcatggacagaaatatagcaatcgtgtttgttccttgcgggcatctcgtaacttgcaaacagtgtgcagaagccgttgataaatgtccaatgtgctacacagttattactttcaaacagaaaatttttatgtcc

SEQ ID NO: 325262 - DNA, 1491 bp, Artificial Sequence
  derived and/or modified sequence
atgacatttaattcttttgaggggtctaaaacatgcgtaccagcggatatcaacaaagaagaggaatttgtggaagaatttaatagattaaaaacatttgcaaatttcccctcaggatccccagtgagtgccagtacattagctcgggctgggtttctctatactggggaaggagatacagtcaggtgtttttcttgccatgccgcagttgataggtggcagtatggagattccgccgtggggagacataggaaagtctctcccaactgccgtttcataaatgggttttacctagaaaactctgctacacagagtactaactctggaatacagaatggacagtataaggtggagaattacctggggtctcgggatcactttgctcttgatcgaccatccgaaacacatgccgactatttactcagaacgggacaagttgtggatatctccgatactatataccctcggaaccccgctatgtattccgaagaagcgagacttaaatccttccagaattggcctgactatgcccaccttactcccagagaactcgcctctgccggactatattatacagggatcggagatcaagttcagtgtttttgctgtgggggaaaacttaaaaactgggaaccctgcgatagggcctggtctgagcaccggcgccattttccaaattgttttttcgttctcggaagaaatctgaatataaggtccgaatctgatgccgtgtcctcagatcggaactttcccaactctactaatcttcctcgaaacccatccatggccgattatgaggcacgaatatttacatttgggacatggatatacagtgtcaataaagagcagctggcacgagccggattttatgctttgggggaaggagacaaagtgaaatgtttccattgcggaggaggattgacagattggaaaccttcagaggatccctgggaacagcacgcaaaatggtatcccgggtgtaaatatctgctcgagcagaaaggacaagaatatattaataacattcacttaactcattctctcgaagaatgcctcgtgcgcacgacagagaaaactccatctttaactcgccggattgatgatacaattttccagaatccaatggtgcaggaggcaatacgcatggggttctctttcaaagatattaaaaagatcatggaggagaagatacagatctctggatcaaattacaaatctctcgaagtgcttgtggctgatctagtgaatgcccagaaagattcgatgcaggatgaaagttcacagacatctcttcaaaaagaaatctctacagaagagcagctcaggagactgcaggaagaaaaactctgcaaaatatgcatggatcgaaacatcgccatagtgtttgtaccatgcgggcatctcgtcacatgtaagcagtgtgccgaagctgtcgataagtgtcccatgtgttatactgtgataacattcaaacagaaaatatttatgtct

SEQ ID NO: 325263 - DNA, 1491 bp, Artificial Sequence
  derived and/or modified sequence
atgactttcaactccttcgagggaagcaagacttgtgtccccgccgacattaacaaggaagaagaattcgtggaagaattcaaccgccttaagacgttcgccaatttcccgtcggggagcccagtctccgcatcgaccctcgcccgcgcaggatttctgtatactggagagggtgatactgtccggtgcttttcatgtcatgccgccgtggaccgctggcagtacggggatagcgctgtgggccgccacagaaaagtgtcaccgaattgcagattcattaatggcttttacctggaaaactcagccacccagtccaccaattctggaatccaaaacggccagtataaggtggagaactacctgggctcaagggaccacttcgcacttgatcgcccatccgaaacccatgctgattacctgctccgcactggacaggtagtggatatctctgacactatctatccgaggaacccggccatgtactcggaggaggcacgactcaagtcatttcagaactggccagattacgcacatctcactccacgggaactggcgagcgctgggctgtactacactggaatcggagatcaagtccagtgcttctgctgcggtggaaagctgaaaaactgggagccttgtgaccgggcctggtcagaacaccggcgccatttcccgaactgcttcttcgtcttgggccgcaacttgaatatcagatcggaaagcgacgccgtctcttccgaccgcaacttccccaattccaccaacctccctagaaacccgtccatggcggattacgaggcacgcatctttactttcggtacctggatttactcggttaacaaagagcaacttgcaagagctggattctacgcgctcggcgaaggagacaaagtgaagtgtttccactgcggtggtggtctgaccgactggaagccgtcggaagatccgtgggaacaacatgctaagtggtaccccggctgtaagtacctcctcgaacagaaaggccaagaatacatcaacaatatccatttgacccactcattggaagagtgtcttgtccgcacgactgaaaagaccccctcactcacgcggcgcatcgacgatactatcttccaaaacccaatggtccaggaagccattcgcatgggattctctttcaaagacattaagaagatcatggaggagaagatccaaatctctggatccaactacaagtcgctggaagtgctggtggcggacctggtcaacgctcagaaggattccatgcaagacgaatcctcgcagacctcacttcagaaggagatctcgacggaggagcagctgcgccgcttgcaggaggagaaattgtgcaagatttgcatggatagaaacatcgcaatcgtgttcgtcccttgcggacacctggtgacctgtaaacaatgcgcagaagctgttgacaagtgcccaatgtgctacactgtgatcaccttcaagcagaaaatcttcatgagc

SEQ ID NO: 325264 - DNA, 1491 bp, Artificial Sequence
  derived and/or modified sequence
atgacttttaattcttttgaaggttcaaaaacttgtgttccagcagatattaataaagaagaagaatttgttgaagaattcaatagattaaaaactttcgctaactttccttctggaagtccagtatctgcttcaacattagctagagctggatttctttacactggagagggagataccgtaagatgtttttcatgtcacgctgctgtagatagatggcaatatggtgactcagcagttgggagacatcgaaaagtatcaccaaattgtagattcattaacggtttttaccttgaaaattctgcaactcaatctactaattcaggaatccaaaatggtcaatataaggtagaaaattacttgggaagtagagatcattttgctttagatagaccatcagaaacacatgctgattatttattaagaactggacaagttgttgatatttcagatactatttatcctagaaatccagctatgtattcagaagaagctagacttaagtcatttcaaaattggccagattatgcacatttaactccaagagaacttgcaagtgctggattgtattatactggaattggagatcaagttcaatgtttttgttgtggaggaaaattaaaaaattgggaaccatgtgatcgagcatggtcagaacatagaagacatttcccaaattgttttttcgtacttggaagaaatttaaatattagatctgaatcagatgcagtatcaagtgatcgtaatttcccaaacagtaccaatttacctagaaatccttcaatggctgactatgaggctagaatttttacatttggaacttggatatattctgttaataaagaacaacttgcaagggctggattttatgcattgggtgagggtgataaagttaagtgttttcattgtggtggagggttaactgactggaaaccaagtgaagatccatgggaacaacatgcaaaatggtatccaggatgcaaatatttattagagcaaaagggtcaagaatatattaataatattcatttaacacattcacttgaagaatgtttagttcgaactactgagaagacaccatcactaactagaagaattgatgatacgatttttcaaaatccaatggttcaagaagccattagaatgggatttagttttaaggatataaaaaagattatggaagaaaaaattcaaatttcaggatcaaattataaatcacttgaagttctagtagctgatttagtaaatgctcagaaagactcgatgcaagatgaatcaagtcaaactagtcttcaaaaagaaatttcaactgaagaacagctaaggagattacaagaagagaaactttgtaaaatttgtatggatagaaatatagcaatagtctttgttccatgtggacatttagttacttgtaaacaatgtgcagaagctgttgataaatgtcctatgtgttatacagttattacattcaagcaaaaaatttttatgtca

SEQ ID NO: 325265 - DNA, 1491 bp, Artificial Sequence
  derived and/or modified sequence
atgacgttcaatagttttgaaggctccaaaacctgcgttccggcagatatcaacaaggaggaagagttcgtggaggagtttaatcgactcaaaactttcgcaaattttccctccgggagcccagtgtctgccagtaccctcgcccgagcaggattcctgtataccggagagggtgacaccgtgcgatgtttctcatgccatgcggcggtagacaggtggcagtatggtgacagcgctgtgggaaggcataggaaagtcagtcctaactgtaggtttattaatgggttttatttagagaactcagccacccaatctacaaatagcggaattcaaaatggacagtacaaagttgagaactaccttggcagtcgagaccactttgcacttgatcgccccagtgagactcacgcagattacctgctgagaactgggcaagtcgtggacatcagtgacaccatctaccctcgtaaccccgctatgtattccgaagaggctcgtttgaaatctttccagaactggcctgattacgcccatttaacaccgagagagcttgctagcgctggtctctactacacaggcattggagatcaggtacagtgtttctgctgtggtggcaaactgaagaactgggagccatgcgaccgagcctggagcgagcatcgtcgccacttccctaactgttttttcgtccttggtcgcaacctgaatatccggagcgaatcagacgccgtcagttcagacaggaatttccccaattccactaacttgcctagaaatccctcgatggcggattatgaagcaaggatctttaccttcggcacgtggatttattctgtcaataaagagcagctggccagagctgggttttacgccctgggcgagggagataaggtgaagtgctttcactgcgggggagggttaactgattggaaaccttcagaggatccatgggaacagcacgccaagtggtaccccggatgtaagtatttgctggaacaaaaggggcaagaatacattaataatatccacttgacccattcactcgaagagtgcctggttcgaacaaccgagaaaacacccagcttgactcggcgaatcgacgacaccatttttcagaaccctatggtgcaggaggccatacgaatgggctttagctttaaggacataaagaagattatggaggagaaaatccagatctcaggaagcaactacaagtcactggaggtattagtggccgacctcgttaacgcccagaaagattcaatgcaagacgaaagctcccagaccagtctgcagaaggaaatctctacggaggagcaactgcgaagactgcaggaagaaaagctctgtaagatatgtatggacaggaatatagctatagtattcgtaccatgcggtcacttagtgacttgcaagcagtgtgccgaagccgtcgacaaatgccccatgtgttacactgtgatcacttttaagcaaaaaatctttatgtcg

SEQ ID NO: 325266 - DNA, 1491 bp, Artificial Sequence
  derived and/or modified sequence
atgactttcaactcctttgaagggtctaagacctgtgtgcctgccgacataaacaaggaagaagagtttgtggaagagttcaaccggcttaagacgtttgcgaattttccgtccggctcccctgtatccgcatccaccttggcgcgagccggatttctctacaccggggaaggcgacaccgtgaggtgcttctcctgccatgctgcagtcgaccggtggcagtacggggatagcgcggtggggcggcacagaaaggtgagcccaaattgtagattcatcaacggcttctacctcgagaattcggctactcagtccacgaactcgggcattcagaacgggcaatacaaggtcgagaactatctcgggtcgcgagatcatttcgcgctcgaccgcccgtctgagactcacgctgattacctgcttcggactggccaggtggttgacatctcagacaccatttacccacggaatccggccatgtactcggaggaagccagactcaaatccttccaaaactggccagactacgctcacctgacgccgcgggaactggcctcggccgggctgtactataccggaatcggagatcaggtccaatgcttctgctgtggcgggaaactgaagaactgggaaccatgcgaccgcgcctggagcgaacataggaggcatttccccaactgcttcttcgtccttggacgcaatttgaatatcagatcggagtcagacgctgtgtcgtcggacaggaacttcccaaacagcaccaacctgccccgcaaccccagcatggccgactacgaagcgcgcattttcactttcggaacttggatctactccgtgaataaggaacagttggccagagcaggcttctacgctctcggcgagggggataaggtcaagtgctttcactgcggaggaggactgaccgattggaagccatccgaagatccgtgggaacaacacgccaagtggtacccaggttgtaagtatctgttggagcagaaaggtcaggaatacatcaacaacatccatctgacgcactcgctcgaggaatgtctggtccgcaccactgagaaaactcccagcctgactcggcggatcgatgacactattttccagaatccgatggtgcaggaggccattagaatgggatttagcttcaaagacatcaagaagataatggaggaaaagatccagatctccggttccaactacaaatcactcgaagtgctcgtggccgacttggttaatgcccaaaaggattccatgcaagacgagtcaagccagacctctctccagaaagagatctccaccgaggaacaacttcgccggctgcaggaagagaagctgtgcaagatctgtatggatcgtaatatcgctatcgtctttgtgccgtgcgggcacctggtgacttgtaagcaatgtgcagaagcagtggacaaatgccctatgtgctacaccgtgatcactttcaaacagaagatattcatgagc

SEQ ID NO: 325267 - DNA, 1491 bp, Artificial Sequence
  derived and/or modified sequence
atgacgtttaattcgtttgaaggttcgaaaacgtgtgttccggcggatataaataaagaagaagaatttgttgaagaatttaatcgtttaaaaacgtttgcgaattttccgtcgggttcgccggtatcggcgtcgacgttagcgcgtgcgggttttttatatacgggtgaaggtgatacggttcgttgtttttcgtgtcatgcggcggtagatcgatggcaatatggtgattcggcggttggtcgacatcgtaaagtatcgccgaattgtcgatttataaatggtttttatttagaaaattcggcgacgcaatcgacgaattcgggtatacaaaatggtcaatataaagtagaaaattatctaggttcgcgtgatcattttgcgttagatcgtccgtcggaaacgcatgcggattatttattacgaacgggtcaagttgtagatatatcggatacgatatatccgcgaaatccggcgatgtattcggaagaagcgcgattaaaatcgtttcaaaattggccggattatgcgcatctaacgccgcgtgaactagcgtcggcgggtttatattatacgggtataggtgatcaagtacaatgtttttgttgtggtggtaaactaaaaaattgggaaccgtgtgatcgagcgtggtcggaacatcgtcgtcattttccgaattgtttttttgttttaggtcgtaatttaaatatacgttcggaatcggatgcggtttcgtcggatcgaaattttccgaattcgacgaatttaccgcgaaatccgtcgatggcggattatgaagcgcgaatatttacgtttggtacgtggatatattcggtaaataaagaacaattagcgcgtgcgggtttttatgcgttaggtgaaggtgataaagtaaaatgttttcattgtggtggtggtttaacggattggaaaccgtcggaagatccgtgggaacaacatgcgaaatggtatccgggttgtaaatatctattagaacaaaaaggtcaagaatatataaataatatacatttaacgcattcgttagaagaatgtctagttcgtacgacggaaaaaacgccgtcgctaacgcgtcgaatagatgatacgatatttcaaaatccgatggttcaagaagcgatacgtatgggtttttcgtttaaagatataaaaaaaataatggaagaaaaaatacaaatatcgggttcgaattataaatcgctagaagtattagttgcggatctagttaatgcgcaaaaagattcgatgcaagatgaatcgtcgcaaacgtcgctacaaaaagaaatatcgacggaagaacaactacgtcgtttacaagaagaaaaattatgtaaaatatgtatggatcgaaatatagcgatagtatttgtaccgtgtggtcatttagtaacgtgtaaacaatgtgcggaagcggtagataaatgtccgatgtgttatacggtaataacgtttaaacaaaaaatatttatgtcg

SEQ ID NO: 325268 - DNA, 1491 bp, Artificial Sequence
  derived and/or modified sequence
atgaccttcaactcctttgagggttcaaagacctgcgtgcctgcggacatcaacaaagaagaggaattcgtggaggagttcaataggctgaaaaccttcgccaactttccgtctggatcaccggtgtcggctagcactctggcgcgggcaggattcctgtacaccggagagggggatactgtgcggtgcttctcgtgccacgcggcagtggatcgatggcaatacggagatagcgctgtcggccgccatcggaaggtgtcacccaactgcagattcatcaacggattctacctggaaaacagcgccacccaatccacgaattcggggatccaaaacggacagtacaaggtcgaaaactacctcgggtcccgggatcattttgcgctggatagaccgtcggaaacccatgccgactacctgctgaggactggacaggtcgtcgacatctcggacactatttacccgcgcaatccggccatgtactcagaggaagcccgcctcaagagctttcagaattggccagattacgcccacctcactccacgggagctcgcctcggccggactctactacaccggaattggcgaccaggtccagtgtttctgttgcggtggaaagctcaagaattgggaaccttgcgaccgcgcctggagcgaacaccggcgccatttcccgaactgtttcttcgtgctcggccggaacctgaacatccgcagcgaatcggatgccgtatcttcagaccgcaattttccgaactccactaacctgccgcgcaacccatcgatggccgattacgaagctaggatcttcaccttcgggacgtggatatactccgttaacaaagagcagctcgcaagggccggtttttacgcacttggagagggagacaaggtgaagtgtttccactgcggaggaggactgaccgactggaagccttcagaggacccgtgggagcagcacgctaagtggtacccgggatgcaagtacctccttgaacaaaagggacaagaatacatcaataacatacatctcactcactctctggaggaatgtttggtgcggactactgaaaagactccgtcgttgactcgcaggattgacgatactatctttcaaaacccgatggtgcaggaggctatccgcatgggattctccttcaaagatatcaaaaagatcatggaggagaagatccaaatcagcgggagcaattacaaatctctggaggtgctggtggccgacctggtgaacgcgcagaaagattcgatgcaggacgaatccagccagacttccttgcagaaagagatctccactgaagaacaactccggcgcctccaggaagaaaagctgtgtaagatctgcatggatcgcaacatcgctatcgtgtttgtgccttgcggacacctggtcacttgcaagcagtgcgcggaagctgtggacaagtgccccatgtgctacactgtcatcactttcaagcagaagatcttcatgtcg

SEQ ID NO: 325269 - DNA, 1491 bp, Artificial Sequence
  derived and/or modified sequence
atgacattcaactcgttcgagggaagtaagacctgtgtacccgccgacattaataaggaggaggaatttgtggaggagttcaacagattaaaaacctttgcaaacttccctagcggtagccctgtgtccgccagcaccctcgcgagggcaggtttcctctacactggtgagggggacacggtgcggtgcttttcttgtcacgcagccgtggatagatggcagtatggcgactcagccgttggccgacacagaaaagttagtcctaactgccggttcatcaacggcttctacctggagaatagtgccacccagtccacaaactccgggatccagaatggacaatacaaagtcgaaaactaccttggctcccgggaccacttcgccctggatagaccatccgagacccatgctgactatctcctgagaactggtcaagtcgttgacatctcggacacaatatatccccggaatcctgccatgtatagcgaagaggctcgactgaagagctttcagaactggcccgactacgcacacctcacgcctcgggaattagcctcagcgggactgtactatactggaatcggagatcaggttcagtgtttttgttgtggcggtaaattaaagaattgggagccatgtgatcgggcctggtcagagcaccgccgacattttcccaactgcttcttcgtcctgggacggaatctcaacattaggagcgagtcagacgccgtgagtagcgatcggaactttccgaatagcaccaatctgccccgcaacccttctatggccgactacgaggcccgaatctttacattcgggacctggatttacagcgtaaacaaagagcaattggcgagggccggattttacgcgctgggtgagggtgataaggtaaaatgcttccattgtggaggcgggcttactgattggaagcctagcgaggatccctgggagcagcacgcaaagtggtatccgggttgtaagtatctgctcgaacagaagggccaggagtacataaacaacatccatctcactcatagtctggaagagtgccttgtcagaacgaccgagaagaccccttcattgacccgtaggatcgatgacactatctttcagaatccaatggtgcaggaggccattcgaatggggttctccttcaaggatatcaagaagatcatggaagaaaaaatacagatatcgggaagcaattacaagtcattggaggtgctagtcgccgatcttgtgaacgcccagaaagactccatgcaggatgagtctagtcagacatccctacagaaagagatcagtactgaagagcagcttagaaggctgcaggaagaaaagctgtgtaaaatctgcatggacagaaacatcgctatagtattcgtcccttgtgggcacttggtcacatgcaagcagtgcgctgaagccgtggacaagtgccctatgtgctatacagtaataaccttcaagcagaaaatttttatgtcc

SEQ ID NO: 325270 - DNA, 1491 bp, Artificial Sequence
  derived and/or modified sequence
atgacctttaactcgttcgaagggtcaaagacctgcgtccccgccgatatcaacaaggaagaagagttcgtggaagagtttaaccggttgaaaactttcgcgaactttccgtccgggtcgccagtctccgcctccactctggcccgggccggcttcctctacaccggggaaggagatacggtgagatgcttctcatgccatgcagccgtggacagatggcaatatggagactcagcggtgggccggcacagaaaggtgtcacctaactgccgctttatcaacgggttttaccttgaaaactcggcgactcagtccactaattcgggaatccaaaatggccagtataaggtggagaattacctcggatcccgggaccatttcgcgctggacagaccgtccgagactcacgcagactatctgctccggactggacaggtggttgacatcagcgacactatctacccgcgcaatccagccatgtactcagaagaagctaggctcaagtcatttcaaaactggcctgattacgctcacctgactcccagggagctggcctcagccggcctgtactacaccggcattggcgatcaggtgcaatgcttttgttgcggaggaaagctcaagaactgggaaccatgcgacagagcctggtcagaacatagacgccatttcccgaattgcttcttcgtcctgggacgcaatttgaacatcagatccgagtccgatgctgtgagctcggaccggaacttccctaatagcacgaatctgcccagaaacccatcgatggcggattacgaagcgaggatcttcactttcgggacttggatctactcggtgaacaaggaacagctcgcccgggcagggttctacgcattgggcgaaggtgacaaggtgaaatgcttccactgcggcggaggccttactgactggaaaccgtccgaggacccttgggagcaacatgccaagtggtacccaggatgtaagtatttgctggagcagaagggacaggaatacatcaacaatatccatctgacccactctctggaggaatgcctggtgcgaacgaccgaaaagaccccgtcgctgacccgccggatcgatgataccatctttcaaaatccgatggtccaggaagcgattcgcatgggcttctcgttcaaggacatcaagaagataatggaggagaagatccaaatctcaggctccaattacaaatcgctggaagtgctcgtggctgatcttgtgaatgcccaaaaggactcaatgcaagacgagagctcgcaaacttcactgcaaaaggagatctcgaccgaagagcagctgagacgcctgcaagaggagaagctctgcaaaatctgcatggaccgcaatatcgctatcgtgtttgtgccttgcggacacctggtgacctgcaaacagtgcgctgaagccgtcgacaagtgcccgatgtgctacaccgtcatcactttcaagcaaaagatcttcatgtcg

SEQ ID NO: 325271 - DNA, 8584 bp, Artificial Sequence
  derived and/or modified sequence
tcgggccggctgtcctggcgcggtgggtacagcttgtgtaggctttcccctcccccgctttccctccttcccctctcctccctcccctcttcttttcccctccacttccctcgggccggcgctgctggggagggcgggaaggccgcgccagcccatcaggggtggcccggccccggctgcttgcccgggttcctcggactgccgacggcaggcgtgggtgggtgggtgacttcaggcctgcaggattgccttcctaaaccctgtgacacctaagaaaaggtggacaagtcctattttcaagagaagatgacttttaacagttttgaaggatctaaaacttgtgtacctgcagacatcaataaggaagaagaatttgtagaagagtttaatagattaaaaacttttgctaattttccaagtggtagtcctgtttcagcatcaacactggcacgagcagggtttctttatactggtgaaggagataccgtgcggtgctttagttgtcatgcagctgtagatagatggcaatatggagactcagcagttggaagacacaggaaagtatccccaaattgcagatttatcaacggcttttatcttgaaaatagtgccacgcagtctacaaattctggtatccagaatggtcagtacaaagttgaaaactatctgggaagcagagatcattttgccttagacaggccatctgagacacatgcagactatcttttgagaactgggcaggttgtagatatatcagacaccatatacccgaggaaccctgccatgtatagtgaagaagctagattaaagtcctttcagaactggccagactatgctcacctaaccccaagagagttagcaagtgctggactctactacacaggtattggtgaccaagtgcagtgcttttgttgtggtggaaaactgaaaaattgggaaccttgtgatcgtgcctggtcagaacacaggcgacactttcctaattgcttctttgttttgggccggaatcttaatattcgaagtgaatctgatgctgtgagttctgataggaatttcccaaattcaacaaatcttccaagaaatccatccatggcagattatgaagcacggatctttacttttgggacatggatatactcagttaacaaggagcagcttgcaagagctggattttatgctttaggtgaaggtgataaagtaaagtgctttcactgtggaggagggctaactgattggaagcccagtgaagacccttgggaacaacatgctaaatggtatccagggtgcaaatatctgttagaacagaagggacaagaatatataaacaatattcatttaactcattcacttgaggagtgtctggtaagaactactgagaaaacaccatcactaactagaagaattgatgataccatcttccaaaatcctatggtacaagaagctatacgaatggggttcagtttcaaggacattaagaaaataatggaggaaaaaattcagatatctgggagcaactataaatcacttgaggttctggttgcagatctagtgaatgctcagaaagacagtatgcaagatgagtcaagtcagacttcattacagaaagagattagtactgaagagcagctaaggcgcctgcaagaggagaagctttgcaaaatctgtatggatagaaatattgctatcgtttttgttccttgtggacatctagtcacttgtaaacaatgtgctgaagcagttgacaagtgtcccatgtgctacacagtcattactttcaagcaaaaaatttttatgtcttaatctaactctatagtaggcatgttatgttgttcttattaccctgattgaatgtgtgatgtgaactgactttaagtaatcaggattgaattccattagcatttgctaccaagtaggaaaaaaaatgtacatggcagtgttttagttggcaatataatctttgaatttcttgatttttcagggtattagctgtattatccattttttttactgttatttaattgaaaccatagactaagaataagaagcatcatactataactgaacacaatgtgtattcatagtatactgatttaatttctaagtgtaagtgaattaatcatctggattttttattcttttcagataggcttaacaaatggagctttctgtatataaatgtggagattagagttaatctccccaatcacataatttgttttgtgtgaaaaaggaataaattgttccatgctggtggaaagatagagattgtttttagaggttggttgttgtgttttaggattctgtccattttcttttaaagttataaacacgtacttgtgcgaattatttttttaaagtgatttgccatttttgaaagcgtatttaatgatagaatactatcgagccaacatgtactgacatggaaagatgtcaaagatatgttaagtgtaaaatgcaagtggcaaaacactatgtatagtctgagccagatcaaagtatgtatgtttttaatatgcatagaacaaaagatttggaaagatatacaccaaactgttaaatgtggtttctcttcggggagggggggattgggggaggggccccagaggggttttataggggccttttcactttctacttttttcattttgttctgttcgaattttttataagtatgtattacttttgtaatcagaatttttagaaagtattttgctgatttaaaggcttaggcatgttcaaacgcctgcaaaactacttatcactcagctttagtttttctaatccaagaaggcagggcagttaacctttttggtgccaatgtgaaatgtaaatgattttatgtttttcctgctttgtggatgaaaaatatttctgagtggtagttttttgacaggtagaccatgtcttatcttgtttcaaaataagtatttctgattttgtaaaatgaaatataaaatatgtctcagatcttccaattaattagtaaggattcatccttaatccttgctagtttaagcctgcctaagtcactttactaaaagatctttgttaactcagtattttaaacatctgtcagcttatgtaggtaaaagtagaagcatgtttgtacactgcttgtagttatagtgacagctttccatgttgagattctcatatcatcttgtatcttaaagtttcatgtgagtttttaccgttaggatgattaagatgtatataggacaaaatgttaagtctttcctctacctacatttgttttcttggctagtaatagtagtagatacttctgaaataaatgttctctcaagatccttaaaacctcttggaaattataaaaatattggcaagaaaagaagaatagttgtttaaatattttttaaaaaacacttgaataagaatcagtagggtataaactagaagtttaaaaatgcttcatagaacgtccagggtttacattacaagattctcacaacaaacctattgtagaggtgagtaaggcatgttactacagaggaaagtttgagagtaaaactgtaaaaaattatatttttgttgtactttctaagagaaagagtattgttatgttctcctaacttctgttgattactactttaagtgatattcatttaaaacattgcaaatttattttatttatttaattttctttttgagatggagtcttgcttgtcacccaggctggagtgcagtggagtgatctctgctcactgcaacctccgccttctgggttcaagcgattctcgtgcctcagcttcctgagtagctggaattacaggcaggtgccaccatgcccgactaatttttttttatttttagtagagacggggtttcaccatgttggccaggctggtatcaaactcctgacctcaagagatccactcgccttgccctcccaaagtgctgggattacaggcttgagccaccacgcccggctaaaacattgcaaatttaaatgagagttttaaaaattaaataatgactgccctgtttctgttttagtatgtaaatcctcagttcttcacctttgcactgtctgccacttagtttggttatatagtcattaacttgaatttggtctgtatagtctagactttaaatttaaagttttctacaaggggagaaaagtgttaaaatttttaaaatatgttttccaggacacttcacttccaagtcaggtaggtagttcaatctagttgttagccaaggactcaaggactgaattgttttaacataaggcttttcctgttctgggagccgcacttcattaaaattcttctaaaacttgtatgtttagagttaagcaagactttttttcttcctctccatgagttgtgaaatttaatgcacaacgctgatgtggctaacaagtttattttaagaattgtttagaaatgctgttgcttcaggttcttaaaatcactcagcactccaacttctaatcaaatttttggagacttaacagcatttgtctgtgtttgaactataaaaagcaccggatcttttccatctaattccgcaaaaattgatcatttgcaaagtcaaaactatagccatatccaaatcttttccccctcccaagagttctcagtgtctacatgtagactattccttttctgtataaagttcactctaggatttcaagtcaccacttattttacattttagtcatgcaaagattcaagtagttttgcaataagtacttatctttatttgtaataatttagtctgctgatcaaaagcattgtcttaatttttgagaactggttttagcatttacaaactaaattccagttaattaattaatagctttatattgcctttcctgctacatttggttttttcccctgtccctttgattacgggctaaggtagggtagagtgggtgtagtgagtgtatataatgtgatttggccctgtgtattatgatattttgttatttttgttgttatattatttacatttcagtagttgttttttgtgtttccattttagtggataaaatttgtattttgaactatgaatggagactaccgccccagcattagtttcacatgatataccctttaaacccgaatcattgttttatttcctgattacacaggtgttgaatggggaaaggggctagtatatcagtaggatatactatgggatgtatatatatcattgctgttagagaaatgaaataaaatggggctgggctcagtggctcacgcctgtaatcccagcactttgggaggctgaggcaggtggatcacgaggtcaggagatcgagaccatcctggctaacacggtgaaaccccgtctctactaaaaaacagaaaattagccgggcgtggtggcgggcgcctgtagtcccagctactcgggaggctgaggcaggagaatggtgtgaacccgggaggcagagcttgcagtgagccgagatctcgccactgcactccagcctgggcaacagagcaagactctgtctcaaaaaaaaaaaaaaaagaaataagaaaatgggaagcaatatttgacatagttctttttagtcaaatctacttgttaaaaaaagggtagcagtttattcatctgtgaaaggaaaataatacttatcttacaaggttgcaagagctcaaggagaccatgtatgtaaagttcctgctgtaaatatgaactcccatcctaatacccttttacctctctgtgggtttgtcttgacctggaaatttgggctaaaacttagaaaaaattcttacatgataactcagtgatgcttactcatagtttttggtgtttctcatagataagatataaatcagctgggcgcggtggctcatgcctgtaatcccagcactttgggaggccgaggcgggcagatcacctgaggtcgggaggtcgagaccagcctgaccaacatggagaaaccccgtctctactaaaaatacaaaattagctgggcgtggtggctcatgcctgtaatcccagctacttgggaggctgaggcaggagaatcgcttgaacccaggaggcggaggttgtggtgagcgaagatcgtgccattgcactccagcctgggcaacaagagcaaaactctgtctcaaaaaaaaaaaaagatataaatcacaataaataaataggtcaatacaaatgttagccaggcgtggtggcacatgcccatagtcgcagctactctggaggcagaggcaggaggatcacttgagcccatgaatttgaggcagcagtgagctatgattgtgccactgtactccagtctgggtgacagagtgagaccccatctctaaataaataggtcaaacccttaaaaatatttaaattcttaaaaaattgaaaagattattcttctcaaatttagttgagctttctaagagaagcaattggctttttcccacttcaataatcattttcagtttgactcatacagttaacacaatgtgaatttcttcctcagcataacagagttatagaatgacagggctggaagtgaccttagagagtatccagttctttcattttacaggtgaggcaactgagactcaaaggtgatgtaatttgtgcaaagattatagctaattagtagcagagccctgactgggacatagtttgaaggtgaaaaacttcaccaagctacctttcttgaaaggtccaaatgtttatgttttcaactactctttccactgtaccataactttcactacatattaaatgacactttataactaatataataggacaatcatcaatgcatatatagccagcccttcatatctgtgggttttgcatccatggattcaaccaaggaggaattgaaaacactgagaaaaaaaaaaaagaccacacaataaaaaaaaaaaatacaaaataatacaaagaaaaagccaaaattgtcatactgttgttaagcaacagtataacaactatttacatagcattaaggttggtgcaaaaatgcaaaaaaaaaaaaagcaattatttttaaaccaacctaatatattgtattaggtattaaagtcatctggacatgaattaaagtatatgatgccagcctggacaaaaggcaaaaccctgtctctacaaaaaatacaaaaattagctgggcatggtggtgtgtgcctgtagtcctggctactccggagcctgaggtgggaggatcgcttgagtctgggaggcagaggctgcattgagctatgatcatggcactgcattccagcctgggtgacagtgcaagaccttgtctcagaataaataaagtatgtgatgaagatgtgcatacattatatgcaaatactgttttttttttttttaatttaaacagtctcactgtgttgcccaggatggagtgcaatggcacaatcttggctcatggcaaactctgcctcgcaagcagctgggactacaggcatgctccacggtgcccagttaattttttttgtattcttagtagagacagggtttcaccatgttggccaggctagtcttgaatttctgacctcaagtgattcatctcccaaagtgctgggattacaggcgtgagccaccacggccggctaatttttgtattttttagtagtgactggtttcgcggtgttgaccaggctggtctcgaactcctgatctcaggtgatctgcctgcctcggcctcacaaagtgctgggattacaggtgtgaaccactgctcccggccttgtgtgattttatctaagggacttaagcgtcctcaggtcctagggggtcgtgaaaccaaaaccccagggatagcaagggacaattgtatcttcaaagtagacaaatggcgccgggcacggtggctcacgcctgtaatcccagcagtttccgaggctgaggcaggcggctcacctgaggtcaggagttggagaccagcctggccaacatgctgaaaccctgtctgtacaaaaatacaaaaatagctgggcatggtggcgcatgcctgtagtcccagctactagagcgactgaggcaggagaattgcttgaacctgggaggcggaggttgcagggagccaagatggcgccaccgcactccagcctaggtgatagagtgagactccctctcaaaaacaaaacaaaacaaaaaaattagacaaatgctacattaatgtttgggtggtcagattctactttgaatctgaagtttgcagatatgcctatagatttttggagtttaccactttcttattctgtatcattaatgtaatattttaaattactatatatgttaccatttttctggatttagtaagaaatttgcagttttggtttgatgtaacaagggttttaatgtaatttatgttagattttgcatttttttcattactgttatattttaacctgactgactgatctaattgtattagtattgtgaataatcatgtgaaatgttttgagacagagtactatatttgtgaatataattttatggtttttttcacttagaacctttctgtgtggaaaactaagaaaattgctttctgctgtataatctggcattcattgtagattaaagcttatttttctgtgaataaaacgtattcaataaaatactattcttt

SEQ ID NO: 325272 - DNA, 8591 bp, Artificial Sequence
  derived and/or modified sequence
tgacggaccgcgcccggtgtctctttgaggccctgacgtggacacacttcgggtttcacgactccgggtttctccaggggatgggccggccggtagaggcgcgtgagggagacgaagggacttccgtttccttcacctaggctggggccaagccgcagagcggagttggcatttccagattggggctcgggccgcgcctcctccgggaccctccccttggaccgagccgatcgccgcggggcagttcgggccggctgtcctggcgcgaaaaggtggacaagtcctattttcaagagaagatgacttttaacagttttgaaggatctaaaacttgtgtacctgcagacatcaataaggaagaagaatttgtagaagagtttaatagattaaaaacttttgctaattttccaagtggtagtcctgtttcagcatcaacactggcacgagcagggtttctttatactggtgaaggagataccgtgcggtgctttagttgtcatgcagctgtagatagatggcaatatggagactcagcagttggaagacacaggaaagtatccccaaattgcagatttatcaacggcttttatcttgaaaatagtgccacgcagtctacaaattctggtatccagaatggtcagtacaaagttgaaaactatctgggaagcagagatcattttgccttagacaggccatctgagacacatgcagactatcttttgagaactgggcaggttgtagatatatcagacaccatatacccgaggaaccctgccatgtatagtgaagaagctagattaaagtcctttcagaactggccagactatgctcacctaaccccaagagagttagcaagtgctggactctactacacaggtattggtgaccaagtgcagtgcttttgttgtggtggaaaactgaaaaattgggaaccttgtgatcgtgcctggtcagaacacaggcgacactttcctaattgcttctttgttttgggccggaatcttaatattcgaagtgaatctgatgctgtgagttctgataggaatttcccaaattcaacaaatcttccaagaaatccatccatggcagattatgaagcacggatctttacttttgggacatggatatactcagttaacaaggagcagcttgcaagagctggattttatgctttaggtgaaggtgataaagtaaagtgctttcactgtggaggagggctaactgattggaagcccagtgaagacccttgggaacaacatgctaaatggtatccagggtgcaaatatctgttagaacagaagggacaagaatatataaacaatattcatttaactcattcacttgaggagtgtctggtaagaactactgagaaaacaccatcactaactagaagaattgatgataccatcttccaaaatcctatggtacaagaagctatacgaatggggttcagtttcaaggacattaagaaaataatggaggaaaaaattcagatatctgggagcaactataaatcacttgaggttctggttgcagatctagtgaatgctcagaaagacagtatgcaagatgagtcaagtcagacttcattacagaaagagattagtactgaagagcagctaaggcgcctgcaagaggagaagctttgcaaaatctgtatggatagaaatattgctatcgtttttgttccttgtggacatctagtcacttgtaaacaatgtgctgaagcagttgacaagtgtcccatgtgctacacagtcattactttcaagcaaaaaatttttatgtcttaatctaactctatagtaggcatgttatgttgttcttattaccctgattgaatgtgtgatgtgaactgactttaagtaatcaggattgaattccattagcatttgctaccaagtaggaaaaaaaatgtacatggcagtgttttagttggcaatataatctttgaatttcttgatttttcagggtattagctgtattatccattttttttactgttatttaattgaaaccatagactaagaataagaagcatcatactataactgaacacaatgtgtattcatagtatactgatttaatttctaagtgtaagtgaattaatcatctggattttttattcttttcagataggcttaacaaatggagctttctgtatataaatgtggagattagagttaatctccccaatcacataatttgttttgtgtgaaaaaggaataaattgttccatgctggtggaaagatagagattgtttttagaggttggttgttgtgttttaggattctgtccattttcttttaaagttataaacacgtacttgtgcgaattatttttttaaagtgatttgccatttttgaaagcgtatttaatgatagaatactatcgagccaacatgtactgacatggaaagatgtcaaagatatgttaagtgtaaaatgcaagtggcaaaacactatgtatagtctgagccagatcaaagtatgtatgtttttaatatgcatagaacaaaagatttggaaagatatacaccaaactgttaaatgtggtttctcttcggggagggggggattgggggaggggccccagaggggttttataggggccttttcactttctacttttttcattttgttctgttcgaattttttataagtatgtattacttttgtaatcagaatttttagaaagtattttgctgatttaaaggcttaggcatgttcaaacgcctgcaaaactacttatcactcagctttagtttttctaatccaagaaggcagggcagttaacctttttggtgccaatgtgaaatgtaaatgattttatgtttttcctgctttgtggatgaaaaatatttctgagtggtagttttttgacaggtagaccatgtcttatcttgtttcaaaataagtatttctgattttgtaaaatgaaatataaaatatgtctcagatcttccaattaattagtaaggattcatccttaatccttgctagtttaagcctgcctaagtcactttactaaaagatctttgttaactcagtattttaaacatctgtcagcttatgtaggtaaaagtagaagcatgtttgtacactgcttgtagttatagtgacagctttccatgttgagattctcatatcatcttgtatcttaaagtttcatgtgagtttttaccgttaggatgattaagatgtatataggacaaaatgttaagtctttcctctacctacatttgttttcttggctagtaatagtagtagatacttctgaaataaatgttctctcaagatccttaaaacctcttggaaattataaaaatattggcaagaaaagaagaatagttgtttaaatattttttaaaaaacacttgaataagaatcagtagggtataaactagaagtttaaaaatgcttcatagaacgtccagggtttacattacaagattctcacaacaaacctattgtagaggtgagtaaggcatgttactacagaggaaagtttgagagtaaaactgtaaaaaattatatttttgttgtactttctaagagaaagagtattgttatgttctcctaacttctgttgattactactttaagtgatattcatttaaaacattgcaaatttattttatttatttaattttctttttgagatggagtcttgcttgtcacccaggctggagtgcagtggagtgatctctgctcactgcaacctccgccttctgggttcaagcgattctcgtgcctcagcttcctgagtagctggaattacaggcaggtgccaccatgcccgactaatttttttttatttttagtagagacggggtttcaccatgttggccaggctggtatcaaactcctgacctcaagagatccactcgccttgccctcccaaagtgctgggattacaggcttgagccaccacgcccggctaaaacattgcaaatttaaatgagagttttaaaaattaaataatgactgccctgtttctgttttagtatgtaaatcctcagttcttcacctttgcactgtctgccacttagtttggttatatagtcattaacttgaatttggtctgtatagtctagactttaaatttaaagttttctacaaggggagaaaagtgttaaaatttttaaaatatgttttccaggacacttcacttccaagtcaggtaggtagttcaatctagttgttagccaaggactcaaggactgaattgttttaacataaggcttttcctgttctgggagccgcacttcattaaaattcttctaaaacttgtatgtttagagttaagcaagactttttttcttcctctccatgagttgtgaaatttaatgcacaacgctgatgtggctaacaagtttattttaagaattgtttagaaatgctgttgcttcaggttcttaaaatcactcagcactccaacttctaatcaaatttttggagacttaacagcatttgtctgtgtttgaactataaaaagcaccggatcttttccatctaattccgcaaaaattgatcatttgcaaagtcaaaactatagccatatccaaatcttttccccctcccaagagttctcagtgtctacatgtagactattccttttctgtataaagttcactctaggatttcaagtcaccacttattttacattttagtcatgcaaagattcaagtagttttgcaataagtacttatctttatttgtaataatttagtctgctgatcaaaagcattgtcttaatttttgagaactggttttagcatttacaaactaaattccagttaattaattaatagctttatattgcctttcctgctacatttggttttttcccctgtccctttgattacgggctaaggtagggtagagtgggtgtagtgagtgtatataatgtgatttggccctgtgtattatgatattttgttatttttgttgttatattatttacatttcagtagttgttttttgtgtttccattttagtggataaaatttgtattttgaactatgaatggagactaccgccccagcattagtttcacatgatataccctttaaacccgaatcattgttttatttcctgattacacaggtgttgaatggggaaaggggctagtatatcagtaggatatactatgggatgtatatatatcattgctgttagagaaatgaaataaaatggggctgggctcagtggctcacgcctgtaatcccagcactttgggaggctgaggcaggtggatcacgaggtcaggagatcgagaccatcctggctaacacggtgaaaccccgtctctactaaaaaacagaaaattagccgggcgtggtggcgggcgcctgtagtcccagctactcgggaggctgaggcaggagaatggtgtgaacccgggaggcagagcttgcagtgagccgagatctcgccactgcactccagcctgggcaacagagcaagactctgtctcaaaaaaaaaaaaaaaagaaataagaaaatgggaagcaatatttgacatagttctttttagtcaaatctacttgttaaaaaaagggtagcagtttattcatctgtgaaaggaaaataatacttatcttacaaggttgcaagagctcaaggagaccatgtatgtaaagttcctgctgtaaatatgaactcccatcctaatacccttttacctctctgtgggtttgtcttgacctggaaatttgggctaaaacttagaaaaaattcttacatgataactcagtgatgcttactcatagtttttggtgtttctcatagataagatataaatcagctgggcgcggtggctcatgcctgtaatcccagcactttgggaggccgaggcgggcagatcacctgaggtcgggaggtcgagaccagcctgaccaacatggagaaaccccgtctctactaaaaatacaaaattagctgggcgtggtggctcatgcctgtaatcccagctacttgggaggctgaggcaggagaatcgcttgaacccaggaggcggaggttgtggtgagcgaagatcgtgccattgcactccagcctgggcaacaagagcaaaactctgtctcaaaaaaaaaaaaagatataaatcacaataaataaataggtcaatacaaatgttagccaggcgtggtggcacatgcccatagtcgcagctactctggaggcagaggcaggaggatcacttgagcccatgaatttgaggcagcagtgagctatgattgtgccactgtactccagtctgggtgacagagtgagaccccatctctaaataaataggtcaaacccttaaaaatatttaaattcttaaaaaattgaaaagattattcttctcaaatttagttgagctttctaagagaagcaattggctttttcccacttcaataatcattttcagtttgactcatacagttaacacaatgtgaatttcttcctcagcataacagagttatagaatgacagggctggaagtgaccttagagagtatccagttctttcattttacaggtgaggcaactgagactcaaaggtgatgtaatttgtgcaaagattatagctaattagtagcagagccctgactgggacatagtttgaaggtgaaaaacttcaccaagctacctttcttgaaaggtccaaatgtttatgttttcaactactctttccactgtaccataactttcactacatattaaatgacactttataactaatataataggacaatcatcaatgcatatatagccagcccttcatatctgtgggttttgcatccatggattcaaccaaggaggaattgaaaacactgagaaaaaaaaaaaagaccacacaataaaaaaaaaaaatacaaaataatacaaagaaaaagccaaaattgtcatactgttgttaagcaacagtataacaactatttacatagcattaaggttggtgcaaaaatgcaaaaaaaaaaaaagcaattatttttaaaccaacctaatatattgtattaggtattaaagtcatctggacatgaattaaagtatatgatgccagcctggacaaaaggcaaaaccctgtctctacaaaaaatacaaaaattagctgggcatggtggtgtgtgcctgtagtcctggctactccggagcctgaggtgggaggatcgcttgagtctgggaggcagaggctgcattgagctatgatcatggcactgcattccagcctgggtgacagtgcaagaccttgtctcagaataaataaagtatgtgatgaagatgtgcatacattatatgcaaatactgttttttttttttttaatttaaacagtctcactgtgttgcccaggatggagtgcaatggcacaatcttggctcatggcaaactctgcctcgcaagcagctgggactacaggcatgctccacggtgcccagttaattttttttgtattcttagtagagacagggtttcaccatgttggccaggctagtcttgaatttctgacctcaagtgattcatctcccaaagtgctgggattacaggcgtgagccaccacggccggctaatttttgtattttttagtagtgactggtttcgcggtgttgaccaggctggtctcgaactcctgatctcaggtgatctgcctgcctcggcctcacaaagtgctgggattacaggtgtgaaccactgctcccggccttgtgtgattttatctaagggacttaagcgtcctcaggtcctagggggtcgtgaaaccaaaaccccagggatagcaagggacaattgtatcttcaaagtagacaaatggcgccgggcacggtggctcacgcctgtaatcccagcagtttccgaggctgaggcaggcggctcacctgaggtcaggagttggagaccagcctggccaacatgctgaaaccctgtctgtacaaaaatacaaaaatagctgggcatggtggcgcatgcctgtagtcccagctactagagcgactgaggcaggagaattgcttgaacctgggaggcggaggttgcagggagccaagatggcgccaccgcactccagcctaggtgatagagtgagactccctctcaaaaacaaaacaaaacaaaaaaattagacaaatgctacattaatgtttgggtggtcagattctactttgaatctgaagtttgcagatatgcctatagatttttggagtttaccactttcttattctgtatcattaatgtaatattttaaattactatatatgttaccatttttctggatttagtaagaaatttgcagttttggtttgatgtaacaagggttttaatgtaatttatgttagattttgcatttttttcattactgttatattttaacctgactgactgatctaattgtattagtattgtgaataatcatgtgaaatgttttgagacagagtactatatttgtgaatataattttatggtttttttcacttagaacctttctgtgtggaaaactaagaaaattgctttctgctgtataatctggcattcattgtagattaaagcttatttttctgtgaataaaacgtattcaataaaatactattctttaaaattatatcata

SEQ ID NO: 325273 - DNA, 390 bp, Artificial Sequence
  derived and/or modified sequence
atgtgcgcgcgctaggtcagcttctcggttccagccgggcgggggggtcgggtgggggtgggggtaggggttgcaagggcctcattttttcttactgcccccatccggttcggggaggtggcgggaccttggcggcgcccggagccggcgtggcgctcatcgagggacgcccggcccaagtggctggggccaagccgcagagcggagttggcatttccagattggggctcgggccgcgcctcctccgggaccctccccttggaccgagccgatcgccgcggggcagttcgggccggctgtcctggcgcgaaaaggtggacaagtcctattttcaagagaagatgacttttaacagttttgaaggatctaaaacttgtgtacctgcagaca

SEQ ID NO: 325274 - DNA, 528 bp, Artificial Sequence
  derived and/or modified sequence
gctcatcgagggacgcccggcccaagtgaaaaggtggacaagtcctattttcaagagaagatgacttttaacagttttgaaggatctaaaacttgtgtacctgcagacatcaataaggaagaagaatttgtagaagagtttaatagattaaaaacttttgctaattttccaagtggtagtcctgtttcagcatcaacactggcacgagcagggtttctttatactggtgaaggagataccgtgcggtgctttagttgtcatgcagctgtagatagatggcaatatggagactcagcagttggaagacacaggaaagtatccccaaattgcagatttatcaacggcttttatcttgaaaatagtgccacgcagtctacaaattctggtatccagaatggtcagtacaaagttgaaaactatctgggaagcagagatcattttgccttagacaggccatctgagacacatgcagactatcttttgagaactgggcaggttgtagatatatcagacaccatatacccgagg

SEQ ID NO: 325275 - DNA, 1620 bp, Artificial Sequence
  derived and/or modified sequence
ttcttactgcccccatccggttcggggaggtggcgggaccttggcggcgcccggagccggcgtggcgctcatcgagggacgcccggcccaagtgaaaaggtggacaagtcctattttcaagagaagatgacttttaacagttttgaaggatctaaaacttgtgtacctgcagacatcaataaggaagaagaatttgtagaagagtttaatagattaaaaacttttgctaattttccaagtggtagtcctgtttcagcatcaacactggcacgagcagggtttctttatactggtgaaggagataccgtgcggtgctttagttgtcatgcagctgtagatagatggcaatatggagactcagcagttggaagacacaggaaagtatccccaaattgcagatttatcaacggcttttatcttgaaaatagtgccacgcagtctacaaattctggtatccagaatggtcagtacaaagttgaaaactatctgggaagcagagatcattttgccttagacaggccatctgagacacatgcagactatcttttgagaactgggcaggttgtagatatatcagacaccatatacccgaggaaccctgccatgtatagtgaagaagctagattaaagtcctttcagaactggccagactatgctcacctaaccccaagagagttagcaagtgctggactctactacacaggtattggtgaccaagtgcagtgcttttgttgtggtggaaaactgaaaaattgggaaccttgtgatcgtgcctggtcagaacacaggcgacactttcctaattgcttctttgttttgggccggaatcttaatattcgaagtgaatctgatgctgtgagttctgataggaatttcccaaattcaacaaatcttccaagaaatccatccatggcagattatgaagcacggatctttacttttgggacatggatatactcagttaacaaggagcagcttgcaagagctggattttatgctttaggtgaaggtgataaagtaaagtgctttcactgtggaggagggctaactgattggaagcccagtgaagacccttgggaacaacatgctaaatggtatccagggtgcaaatatctgttagaacagaagggacaagaatatataaacaatattcatttaactcattcacttgaggagtgtctggtaagaactactgagaaaacaccatcactaactagaagaattgatgataccatcttccaaaatcctatggtacaagaagctatacgaatggggttcagtttcaaggacattaagaaaataatggaggaaaaaattcagatatctgggagcaactataaatcacttgaggttctggttgcagatctagtgaatgctcagaaagacagtatgcaagatgagtcaagtcagacttcattacagaaagagattagtactgaagagcagctaaggcgcctgcaagaggagaagctttgcaaaatctgtatggatagaaatattgctatcgtttttgttccttgtggacatctagtcacttgtaaacaatgtgctgaagcagttgacaagtgtcccatgtgctacacagtcattactttcaagcaaaaaatttttatgtcttaa

SEQ ID NO: 325276 - DNA, 1491 bp, Artificial Sequence
  derived and/or modified sequence
atgaccttcaacagcttcgagggcagcaagacctgcgtgcccgccgacatcaacaaggaggaggagttcgtggaggagttcaaccgcctgaagaccttcgccaacttccccagcggcagccccgtgagcgccagcaccctggcccgcgccggcttcctgtacaccggcgagggcgacaccgtgcgctgcttcagctgccacgccgccgtggaccgctggcagtacggcgacagcgccgtgggccgccaccgcaaggtgagccccaactgccgcttcatcaacggcttctacctggagaacagcgccacccagagcaccaacagcggcatccagaacggccagtacaaggtggagaactacctgggcagccgcgaccacttcgccctggaccgccccagcgagacccacgccgactacctgctgcgcaccggccaggtggtggacatcagcgacaccatctacccccgcaaccccgccatgtacagcgaggaggcccgcctgaagagcttccagaactggcccgactacgcccacctgaccccccgcgagctggccagcgccggcctgtactacaccggcatcggcgaccaggtgcagtgcttctgctgcggcggcaagctgaagaactgggagccctgcgaccgcgcctggagcgagcaccgccgccacttccccaactgcttcttcgtgctgggccgcaacctgaacatccgcagcgagagcgacgccgtgagcagcgaccgcaacttccccaacagcaccaacctgccccgcaaccccagcatggccgactacgaggcccgcatcttcaccttcggcacctggatctacagcgtgaacaaggagcagctggcccgcgccggcttctacgccctgggcgagggcgacaaggtgaagtgcttccactgcggcggcggcctgaccgactggaagcccagcgaggacccctgggagcagcacgccaagtggtaccccggctgcaagtacctgctggagcagaagggccaggagtacatcaacaacatccacctgacccacagcctggaggagtgcctggtgcgcaccaccgagaagacccccagcctgacccgccgcatcgacgacaccatcttccagaaccccatggtgcaggaggccatccgcatgggcttcagcttcaaggacatcaagaagatcatggaggagaagatccagatcagcggcagcaactacaagagcctggaggtgctggtggccgacctggtgaacgcccagaaggacagcatgcaggacgagagcagccagaccagcctgcagaaggagatcagcaccgaggagcagctgcgccgcctgcaggaggagaagctgtgcaagatctgcatggaccgcaacatcgccatcgtgttcgtgccctgcggccacctggtgacctgcaagcagtgcgccgaggccgtggacaagtgccccatgtgctacaccgtgatcaccttcaagcagaagatcttcatgagc

SEQ ID NO: 325277 - DNA, 48 bp, Artificial Sequence
  derived and/or modified sequence
atgaccttcaacagcttcgagggcagcaagacctgcgtgcccgccgac

SEQ ID NO: 325278 - DNA, 468 bp, Artificial Sequence
  derived and/or modified sequence
atgaccttcaacagcttcgagggcagcaagacctgcgtgcccgccgacatcaacaaggaggaggagttcgtggaggagttcaaccgcctgaagaccttcgccaacttccccagcggcagccccgtgagcgccagcaccctggcccgcgccggcttcctgtacaccggcgagggcgacaccgtgcgctgcttcagctgccacgccgccgtggaccgctggcagtacggcgacagcgccgtgggccgccaccgcaaggtgagccccaactgccgcttcatcaacggcttctacctggagaacagcgccacccagagcaccaacagcggcatccagaacggccagtacaaggtggagaactacctgggcagccgcgaccacttcgccctggaccgccccagcgagacccacgccgactacctgctgcgcaccggccaggtggtggacatcagcgacaccatctacccccgc

SEQ ID NO: 325279 - DNA, 1657 bp, Artificial Sequence
  derived and/or modified sequence
gggaaataagagagaaaagaagagtaagaagaaatataagagccaccatgacttttaacagttttgaaggatctaaaacttgtgtacctgcagacatcaataaggaagaagaatttgtagaagagtttaatagattaaaaacttttgctaattttccaagtggtagtcctgtttcagcatcaacactggcacgagcagggtttctttatactggtgaaggagataccgtgcggtgctttagttgtcatgcagctgtagatagatggcaatatggagactcagcagttggaagacacaggaaagtatccccaaattgcagatttatcaacggcttttatcttgaaaatagtgccacgcagtctacaaattctggtatccagaatggtcagtacaaagttgaaaactatctgggaagcagagatcattttgccttagacaggccatctgagacacatgcagactatcttttgagaactgggcaggttgtagatatatcagacaccatatacccgaggaaccctgccatgtatagtgaagaagctagattaaagtcctttcagaactggccagactatgctcacctaaccccaagagagttagcaagtgctggactctactacacaggtattggtgaccaagtgcagtgcttttgttgtggtggaaaactgaaaaattgggaaccttgtgatcgtgcctggtcagaacacaggcgacactttcctaattgcttctttgttttgggccggaatcttaatattcgaagtgaatctgatgctgtgagttctgataggaatttcccaaattcaacaaatcttccaagaaatccatccatggcagattatgaagcacggatctttacttttgggacatggatatactcagttaacaaggagcagcttgcaagagctggattttatgctttaggtgaaggtgataaagtaaagtgctttcactgtggaggagggctaactgattggaagcccagtgaagacccttgggaacaacatgctaaatggtatccagggtgcaaatatctgttagaacagaagggacaagaatatataaacaatattcatttaactcattcacttgaggagtgtctggtaagaactactgagaaaacaccatcactaactagaagaattgatgataccatcttccaaaatcctatggtacaagaagctatacgaatggggttcagtttcaaggacattaagaaaataatggaggaaaaaattcagatatctgggagcaactataaatcacttgaggttctggttgcagatctagtgaatgctcagaaagacagtatgcaagatgagtcaagtcagacttcattacagaaagagattagtactgaagagcagctaaggcgcctgcaagaggagaagctttgcaaaatctgtatggatagaaatattgctatcgtttttgttccttgtggacatctagtcacttgtaaacaatgtgctgaagcagttgacaagtgtcccatgtgctacacagtcattactttcaagcaaaaaatttttatgtcttgataataggctggagcctcggtggccatgcttcttgccccttgggcctccccccagcccctcctccccttcctgcacccgtacccccgtggtctttgaataaagtctgagtgggcggc

SEQ ID NO: 325280 - DNA, 2020 bp, Artificial Sequence
  derived and/or modified sequence
ctacacacgtgtgtgtgcgcgtgtgtataaaacacagtgcactaatactcagcctttaaaaaaaatgccacttgcaacaacgtagatggagctggacgatatcatgctaaaattatgcaaagtgaaacaagcacaaaaaagaacgagacacgggcgtggggcacgaggtgctcactgcgcaagcgcccactccaccgcgtggtttccagctggaggctgggagcgttcgtggcttcctcttttcttgctgacccttcggagctctgggaagtggctgcaccttggcggctccccagagcgcgcggtgctaatcgtgggtcgtcagcctgggtggctgggcccggcttagggcagggtttggcatttccaatggtagggggctcggaccgtccctccgcgggaccctcccgttgggacaaggccgatcgcctgggcggttggagccgctatcctggcgcgagacggtggacaagtcctatattcaagagaagataactttgaacagtttcgaaggatctaaaacgtatgtgtctgcagacatcaatgaggatgaagaattagtagaagagattaatagatcaaaaacgtttgctggctttgcaggtggtgggcctgcctgggcatcggcgcgttggaggagacgccctggggggccttagctgccctgaagcggtagacaggtggcaacgtgggggctcaggagttgacaaacacaagaaagcagcgccgaattgcaggtttatccgcagcttttattttgaagacagtgccacgaaacctgcaaatcctggtgtcccaaatagtcaataccaagttgaaaaccatctgggagaggaaaagcgttgtgctttagacaggccgtctgagactcgtgcagaccggcttttgagagctggacaggtggtggatagatcagactccatacacccgaggagccccgccatgcatagtgaagaagctagataacagtcgtttcacaactggccagcctctgcccacttgaccccgagagagctggccagtgctgggctgtactacacaggcactgatgaccaagtgcagtgcttctgttgtggcggaaaactgaaaaactgggaacctggtgatcgtgcctggtcagaacacaggagacattttcctaattgcttctttattttgggccacaacgttaatattcgaggtgaatctgatgttgcgagttctgataggaatttctcaaattcaacaagttctccaaggaatccatccatgacgggttatgaagcccggctcattacttttgggacatggatgtactccgttaacaaagagcagcttgcaagagctggattttatgctataggtcaagaggataaagtacagtgctttcactgtggaggagggctagccaactggaagcccaaggaagatccttgggaacagcatgctaaatggtatccaggttgcaaatatctgctagaagagaagggacatgaatatataaacaacattcatttaacccgttcacttgagggagctctggtacaaactaccaagaaaacaccatcactaactaaaagaatcagtgataccatcttccctaatcctatgctacaagaagctatacgaatgggatttgatttcaaggacgttaagaaaataatggaggaaagaattcaaacatctgggagcaactataaaacgcttgaggttcttgttgcagatctagtgagcgctcagaaagacactacagaaaatgaattgaatcagacttcattgcagagagaaatcagccctgaagagccgctaaggcgtctgcaagaggagaagctttgtaaaatctgcatggacagacatatcgctgttgtttttattccttgtggacatctggtcacttgtaaacaatgtgctgaagcagttgacagatgtcccatgtgcagcgcggttattgatttcaagcaaagagtttttatgtcttaatgtaactctacagtgggtgtgctatgttcttattaccctgattaaatgtgtgatgtgactc

SEQ ID NO: 325281 - DNA, 1652 bp, Artificial Sequence
  derived and/or modified sequence
gggaaataagagagaaaagaagagtaagaagaaatataagagccaccatgacttttaacagttttgaaggatctaaaacttgtgtacctgcagacatcaataaggaagaagaatttgtagaagagtttaatagattaaaaacttttgctaattttccaagtggtagtcctgtttcagcatcaacactggcacgagcagggtttctttatactggtgaaggagataccgtgcggtgctttagttgtcatgcagctgtagatagatggcaatatggagactcagcagttggaagacacaggaaagtatccccaaattgcagatttatcaacggcttttatcttgaaaatagtgccacgcagtctacaaattctggtatccagaatggtcagtacaaagttgaaaactatctgggaagcagagatcattttgccttagacaggccatctgagacacatgcagactatcttttgagaactgggcaggttgtagatatatcagacaccatatacccgaggaaccctgccatgtatagtgaagaagctagattaaagtcctttcagaactggccagactatgctcacctaaccccaagagagttagcaagtgctggactctactacacaggtattggtgaccaagtgcagtgcttttgttgtggtggaaaactgaaaaattgggaaccttgtgatcgtgcctggtcagaacacaggcgacactttcctaattgcttctttgttttgggccggaatcttaatattcgaagtgaatctgatgctgtgagttctgataggaatttcccaaattcaacaaatcttccaagaaatccatccatggcagattatgaagcacggatctttacttttgggacatggatatactcagttaacaaggagcagcttgcaagagctggattttatgctttaggtgaaggtgataaagtaaagtgctttcactgtggaggagggctaactgattggaagcccagtgaagacccttgggaacaacatgctaaatggtatccagggtgcaaatatctgttagaacagaagggacaagaatatataaacaatattcatttaactcattcacttgaggagtgtctggtaagaactactgagaaaacaccatcactaactagaagaattgatgataccatcttccaaaatcctatggtacaagaagctatacgaatggggttcagtttcaaggacattaagaaaataatggaggaaaaaattcagatatctgggagcaactataaatcacttgaggttctggttgcagatctagtgaatgctcagaaagacagtatgcaagatgagtcaagtcagacttcattacagaaagagattagtactgaagagcagctaaggcgcctgcaagaggagaagctttgcaaaatctgtatggatagaaatattgctatcgtttttgttccttgtggacatctagtcacttgtaaacaatgtgctgaagcagttgacaagtgtcccatgtgctacacagtcattactttcaagcaaaaaatttttatgtcttgataataggctggagcctcggtggccatgcttcttgccccttgggcctccccccagcccctcctccccttcctgcacccgtacccccgtggtctttgaataaagtctgagtgg

SEQ ID NO: 325282 - DNA, 1680 bp, Artificial Sequence
  derived and/or modified sequence
taatacgactcactatagggaaataagagagaaaagaagagtaagaagaaatataagagccaccatgacttttaacagttttgaaggatctaaaacttgtgtacctgcagacatcaataaggaagaagaatttgtagaagagtttaatagattaaaaacttttgctaattttccaagtggtagtcctgtttcagcatcaacactggcacgagcagggtttctttatactggtgaaggagataccgtgcggtgctttagttgtcatgcagctgtagatagatggcaatatggagactcagcagttggaagacacaggaaagtatccccaaattgcagatttatcaacggcttttatcttgaaaatagtgccacgcagtctacaaattctggtatccagaatggtcagtacaaagttgaaaactatctgggaagcagagatcattttgccttagacaggccatctgagacacatgcagactatcttttgagaactgggcaggttgtagatatatcagacaccatatacccgaggaaccctgccatgtatagtgaagaagctagattaaagtcctttcagaactggccagactatgctcacctaaccccaagagagttagcaagtgctggactctactacacaggtattggtgaccaagtgcagtgcttttgttgtggtggaaaactgaaaaattgggaaccttgtgatcgtgcctggtcagaacacaggcgacactttcctaattgcttctttgttttgggccggaatcttaatattcgaagtgaatctgatgctgtgagttctgataggaatttcccaaattcaacaaatcttccaagaaatccatccatggcagattatgaagcacggatctttacttttgggacatggatatactcagttaacaaggagcagcttgcaagagctggattttatgctttaggtgaaggtgataaagtaaagtgctttcactgtggaggagggctaactgattggaagcccagtgaagacccttgggaacaacatgctaaatggtatccagggtgcaaatatctgttagaacagaagggacaagaatatataaacaatattcatttaactcattcacttgaggagtgtctggtaagaactactgagaaaacaccatcactaactagaagaattgatgataccatcttccaaaatcctatggtacaagaagctatacgaatggggttcagtttcaaggacattaagaaaataatggaggaaaaaattcagatatctgggagcaactataaatcacttgaggttctggttgcagatctagtgaatgctcagaaagacagtatgcaagatgagtcaagtcagacttcattacagaaagagattagtactgaagagcagctaaggcgcctgcaagaggagaagctttgcaaaatctgtatggatagaaatattgctatcgtttttgttccttgtggacatctagtcacttgtaaacaatgtgctgaagcagttgacaagtgtcccatgtgctacacagtcattactttcaagcaaaaaatttttatgtcttgataataggctggagcctcggtggccatgcttcttgccccttgggcctccccccagcccctcctccccttcctgcacccgtacccccgtggtctttgaataaagtctgagtgggcggctctaga

SEQ ID NO: 325283 - RNA, 1657 nt, Artificial Sequence
  derived and/or modified sequence
gggaaauaagagagaaaagaagaguaagaagaaauauaagagccaccaugacuuuuaacaguuuugaaggaucuaaaacuuguguaccugcagacaucaauaaggaagaagaauuuguagaagaguuuaauagauuaaaaacuuuugcuaauuuuccaagugguaguccuguuucagcaucaacacuggcacgagcaggguuucuuuauacuggugaaggagauaccgugcggugcuuuaguugucaugcagcuguagauagauggcaauauggagacucagcaguuggaagacacaggaaaguauccccaaauugcagauuuaucaacggcuuuuaucuugaaaauagugccacgcagucuacaaauucugguauccagaauggucaguacaaaguugaaaacuaucugggaagcagagaucauuuugccuuagacaggccaucugagacacaugcagacuaucuuuugagaacugggcagguuguagauauaucagacaccauauacccgaggaacccugccauguauagugaagaagcuagauuaaaguccuuucagaacuggccagacuaugcucaccuaaccccaagagaguuagcaagugcuggacucuacuacacagguauuggugaccaagugcagugcuuuuguugugguggaaaacugaaaaauugggaaccuugugaucgugccuggucagaacacaggcgacacuuuccuaauugcuucuuuguuuugggccggaaucuuaauauucgaagugaaucugaugcugugaguucugauaggaauuucccaaauucaacaaaucuuccaagaaauccauccauggcagauuaugaagcacggaucuuuacuuuugggacauggauauacucaguuaacaaggagcagcuugcaagagcuggauuuuaugcuuuaggugaaggugauaaaguaaagugcuuucacuguggaggagggcuaacugauuggaagcccagugaagacccuugggaacaacaugcuaaaugguauccagggugcaaauaucuguuagaacagaagggacaagaauauauaaacaauauucauuuaacucauucacuugaggagugucugguaagaacuacugagaaaacaccaucacuaacuagaagaauugaugauaccaucuuccaaaauccuaugguacaagaagcuauacgaaugggguucaguuucaaggacauuaagaaaauaauggaggaaaaaauucagauaucugggagcaacuauaaaucacuugagguucugguugcagaucuagugaaugcucagaaagacaguaugcaagaugagucaagucagacuucauuacagaaagagauuaguacugaagagcagcuaaggcgccugcaagaggagaagcuuugcaaaaucuguauggauagaaauauugcuaucguuuuuguuccuuguggacaucuagucacuuguaaacaaugugcugaagcaguugacaagugucccaugugcuacacagucauuacuuucaagcaaaaaauuuuuaugucuugauaauaggcuggagccucgguggccaugcuucuugccccuugggccuccccccagccccuccuccccuuccugcacccguacccccguggucuuugaauaaagucugagugggcggc

SEQ ID NO: 325284 - RNA, 1652 nt, Artificial Sequence
  derived and/or modified sequence
gggaaauaagagagaaaagaagaguaagaagaaauauaagagccaccaugacuuuuaacaguuuugaaggaucuaaaacuuguguaccugcagacaucaauaaggaagaagaauuuguagaagaguuuaauagauuaaaaacuuuugcuaauuuuccaagugguaguccuguuucagcaucaacacuggcacgagcaggguuucuuuauacuggugaaggagauaccgugcggugcuuuaguugucaugcagcuguagauagauggcaauauggagacucagcaguuggaagacacaggaaaguauccccaaauugcagauuuaucaacggcuuuuaucuugaaaauagugccacgcagucuacaaauucugguauccagaauggucaguacaaaguugaaaacuaucugggaagcagagaucauuuugccuuagacaggccaucugagacacaugcagacuaucuuuugagaacugggcagguuguagauauaucagacaccauauacccgaggaacccugccauguauagugaagaagcuagauuaaaguccuuucagaacuggccagacuaugcucaccuaaccccaagagaguuagcaagugcuggacucuacuacacagguauuggugaccaagugcagugcuuuuguugugguggaaaacugaaaaauugggaaccuugugaucgugccuggucagaacacaggcgacacuuuccuaauugcuucuuuguuuugggccggaaucuuaauauucgaagugaaucugaugcugugaguucugauaggaauuucccaaauucaacaaaucuuccaagaaauccauccauggcagauuaugaagcacggaucuuuacuuuugggacauggauauacucaguuaacaaggagcagcuugcaagagcuggauuuuaugcuuuaggugaaggugauaaaguaaagugcuuucacuguggaggagggcuaacugauuggaagcccagugaagacccuugggaacaacaugcuaaaugguauccagggugcaaauaucuguuagaacagaagggacaagaauauauaaacaauauucauuuaacucauucacuugaggagugucugguaagaacuacugagaaaacaccaucacuaacuagaagaauugaugauaccaucuuccaaaauccuaugguacaagaagcuauacgaaugggguucaguuucaaggacauuaagaaaauaauggaggaaaaaauucagauaucugggagcaacuauaaaucacuugagguucugguugcagaucuagugaaugcucagaaagacaguaugcaagaugagucaagucagacuucauuacagaaagagauuaguacugaagagcagcuaaggcgccugcaagaggagaagcuuugcaaaaucuguauggauagaaauauugcuaucguuuuuguuccuuguggacaucuagucacuuguaaacaaugugcugaagcaguugacaagugucccaugugcuacacagucauuacuuucaagcaaaaaauuuuuaugucuugauaauaggcuggagccucgguggccaugcuucuugccccuugggccuccccccagccccuccuccccuuccugcacccguacccccguggucuuugaauaaagucugagugg

SEQ ID NO: 325285 - DNA, 372 bp, Artificial Sequence
  derived and/or modified sequence
atgcaatcagaaaaacctcagggactgtttctccagctgaaccccaacgccagttctactgagacacagctgcttgtgcctgctctggagtccagggatacacttcctcctacccactgttttatggctggtaccgaatcaccgcttggtaatccatggcctctatccctcccccctccctgctggacagggtgcttgctgcctgctcccaggggccagcgtaaacctggtcccctggggctatccatattcatttcactcggcaataagaggcatcggtctggtaaccatgtggtcagggagtcagagcagcccctgtcacagggaaacccgcaccaggggtggggtccagacaccaggaaagggcgatag

SEQ ID NO: 325286 - protein, 226 aa, Artificial Sequence
  derived and/or modified sequence
MSSPTASSTTPRCGTSAGPASPTWRCRATALHLHHPVDQLPHQVLQPTTGQRQPGTGLPWHSTPAQLALAGLRQAQPHPQQQRLHQPGLRGVDAHGSAAHVPQAVPQAVRAHPPGQLLSWAAAVCLLCQHHLQLPGKKRNSTLYITMLLIVPVIVAGAIIVLLLYLKRLKIIIFPPIPDPGKIFKEMFGDQNDDTLHWKKYDIYEKQTKEETDSVVLIENLKKASQ

SEQ ID NO: 325287 - DNA, 681 bp, Artificial Sequence
  derived and/or modified sequence
atgtcttctccaaccgcatcgagtacaactccaagatgtggcacatccgctggcccggccagcccaacttggcgatgtagagctaccgcattgcaccttcatcacccagtcgatcagctcccacaccaggtgttacaacccacaacgggtcagcgccaaccgggaacaggcctgccctggcacagtacacccgcacaactcgccctagctggcctgaggcaggctcagccccacccacagcagcaaaggctgcaccaacctggactgagaggagtggacgcccatggtagtgccgcacatgtgccacaggctgtgccccaggctgtgcgagcccatccgcccggccagctattatcctgggcagccgccgtgtgtctgctatgccaacaccacttacagctgcccggaaagaagcgtaatagcaccctgtatattaccatgctgttgatcgtgccagtgattgtggcaggcgccatcattgtcttgctcttgtacctgaaaagattaaagatcataatttttcccccaattccagatcccggcaaaatctttaaagaaatgttcggagatcagaatgacgacaccctgcattggaagaagtacgatatctatgagaagcaaaccaaagaggagactgactccgtagttttaatagaaaatctcaaaaaagcatcacaatag

SEQ ID NO: 325288 - DNA, 1797 bp, Artificial Sequence
  derived and/or modified sequence
gtatttaaaactagttaagatcttctgatttacctgagcgggtggggaaacccaccccatgagcatcccctgggctcacccagtgcacagagggaggcctcccgtggctgggcccctctcagtcagcccatgtggctgccatgacctggagcaccacagccgggggcgcccaccagctcaacaccaccacattcacgtggcagcacctccctgcctggcaaccgctgctgttggccagcattaggctgcagctcttcttctacgtgggcctggccttcatcagcctggacctctattactcctccaccagcatcaaggagctggagtacaactacaccggcgacccgggcaccagcaactgctcggtgtgtgctgtggctggccagggctgtgtgccactgcccatctgctcatgcgcctggtacttctcactgcctgagctcttccagggccctgtgtacccctactacgtgctgaccaacttctaccaaaacaaccggcggtatggagtgtccgcgacaacgcgcagctgagcgggctgcccagcacgctgcaccatccagtcaatgagtgcacccactgcgccgcctgcccatcgtgcaccctgcaatgtcatcaccaacagcctcttcaacgactcctcgctgtggcaccagtgctggcccggcgagccctacgtggaggtgccgcgctaccgcactgcacctgcatcacccggtagaccaactaccccatcaagttctgcaacccaccactggtcaacggcagcctggcactggccttccatggcacagcacccctgcccaactggcgctggctggtctacgacaagctcagccccatccccaacaacaacggcttcatcaaccaggacttcgtggtgtggatgcgcatggcagcgctgcccacgttccgcaagctgttccgcaagctgtacgggcacatccgccagggcaactactcagctgggctgccgcggtgtgtctactgtgtcaacatcacctacaactacctggtaagaagcgcaattccacactctacataaccatgttactcattgttccagtcatcgtcgcaggtgcaatcatagtactcctgctttacctaaaaaggctcaagattattatattccctccaattcctgatcctggcaagatttttaaagaaatgtttggagaccagaatgatgatactctgcactggaagaagtacgacatctatgagaagcaaaccaaggaggaaaccgactctgtagtgctgatagaaaacctgaagaaagcctctcagtgatggagataatttatttttaccttcactgtgaccttgagaagattcttcccattctccatttgttatctgggaacttattaaatggaaactgaaactactgcaccatttaaaaacaggcagctcataagagccacaggtctttatgttgagtcgcgcaccgaaaaactaaaaataatgggcgctttggagaagagtgtggagtcattctcattgaattataaaagccagcaggcttcaaactaggggacaaagcaaaaagtgatgatagtggtggagttaatcttatcaagagttgtgacaacttcctgagggatctatacttgctttgtgttctttgtgtcaacatgaacaaattttatttgtaggggaactcatttggggtgcaaatgctaatgtcaaacttgagtcacaaagaacatgtagaaaacaaaatggataaaatctgatatgtattgtttgggatcctattgaaccatgtttgtggctattaaaactcttttaacagtc

SEQ ID NO: 325289 - DNA, 681 bp, Artificial Sequence
  derived and/or modified sequence
atgagcagccccacagccagcagcaccaccccccgctgtggcaccagcgctggccctgccagccccacctggcgctgccgggccacagccctgcacctgcaccaccctgtggaccagctgccccaccaggtgctgcagcccaccaccggccagaggcagcccggcaccggcctgccctggcacagcaccccagcccagctggccctggccggcctgcggcaggcccagccccacccccagcagcagaggctgcaccagcccggcctgcggggcgtggatgcccacggcagcgctgcccacgtgccccaggccgtgccccaggccgtgcgggcccaccccccaggccagctgctgtcctgggccgctgctgtgtgcctgctgtgccagcaccacctgcagctgcccgggaagaagaggaacagcaccctgtacatcaccatgctgctgattgtgcctgtgattgtggccggggccatcatcgtgctgctgctgtacctgaagaggctgaagatcatcatcttcccccccatcccagaccccgggaagatcttcaaggagatgtttggagaccagaatgatgacaccctgcactggaagaagtatgacatctatgagaagcagaccaaggaggagacagacagcgtggtgctgattgagaacctgaagaaggccagccagtag

SEQ ID NO: 325290 - DNA, 681 bp, Artificial Sequence
  derived and/or modified sequence
atgagcagccccaccgccagcagcaccaccccccggtgcggcacctctgcgggccctgcatcccctacctggagatgcagagctaccgccctgcatctgcatcacccggtggaccagctaccccatcaggtgctccagcctactacaggacagcgacagcccggcacaggactgccttggcacagcaccccagctcaactggctctggccggattgagacaggcccaaccccatccccagcaacagcgcttgcatcagcccgggctccggggggtggatgctcatggttcagccgcccacgtgccacaggcagtccctcaggccgtgagggcccacccccccggacagcttctgtcatgggccgctgctgtctgcctgctgtgccaacatcatcttcagctgcccggcaaaaagaggaattctacactctacataaccatgctcctgattgtgccggtgattgtcgccggggccatcatcgttttgttattatacctaaagcggctcaaaatcatcattttcccgcccattcctgacccgggtaagattttcaaggaaatgttcggagaccagaacgatgacactctgcactggaaaaagtacgacatatatgagaagcagacgaaagaagaaaccgactcggtcgtgttgatcgaaaaccttaaaaaggcctcccagtag

SEQ ID NO: 325291 - DNA, 681 bp, Artificial Sequence
  derived and/or modified sequence
atgagcagcccaaccgcctcaagcacgacaccacgctgtggaacgagcgcagggcctgccagtccaacctggcgatgccgggctactgctttgcatctgcaccaccctgtggaccagcttccgcaccaggtcctgcagccaaccacaggtcagcggcagccgggaacagggctgccctggcattcgacccccgctcagctcgctttggcagggctcagacaagcccagccgcacccacagcagcagcgcctgcaccagccaggccttaggggagtggacgctcatggctctgccgctcatgtccctcaagcagttccgcaggccgtgagggcacacccacctggacagctattatcctgggctgccgctgtctgcctcctttgccagcaccatttacaactccctggaaagaagagaaacagtaccctgtacatcacgatgttactgattgtcccagtaatcgtggctggtgctatcatagttctacttctctacctgaagcggctgaagattatcatttttcctcctatcccagacccaggtaaaatctttaaggagatgttcggcgatcagaatgatgacacgctccactggaaaaagtatgacatatatgaaaaacagacaaaggaagaaacagactcagtcgtgctcattgaaaatttaaagaaagctagccagtag

SEQ ID NO: 325292 - DNA, 681 bp, Artificial Sequence
  derived and/or modified sequence
atgagcagccccaccgccagcagcaccacccccagatgcggcaccagcgccggccccgccagccccacctggagatgcagagccaccgccctgcacctgcaccaccccgtggaccagctgccccaccaggtgctgcagcccaccaccggccagagacagcccggcaccggcctgccctggcacagcacccccgcccagctggccctggccggcctgagacaggcccagccccacccccagcagcagagactgcaccagcccggcctgagaggcgtggacgcccacggcagcgccgcccacgtgccccaggccgtgccccaggccgtgagagcccacccccccggccagctgctgagctgggccgccgccgtgtgcctgctgtgccagcaccacctgcagctgcccggcaagaagagaaacagcaccctgtacatcaccatgctgctgatcgtgcccgtgatcgtggccggcgccatcatcgtgctgctgctgtacctgaagagactgaagatcatcatcttcccccccatccccgaccccggcaagatcttcaaggagatgttcggcgaccagaacgacgacaccctgcactggaagaagtacgacatctacgagaagcagaccaaggaggagaccgacagcgtggtgctgatcgagaacctgaagaaggccagccagtag

SEQ ID NO: 325293 - DNA, 3006 bp, Artificial Sequence
  derived and/or modified sequence
atgcaggatattgcctttcttagcggagggcgcggaaaggacaatgcgtggattattaccttccccgaaaactgtaacttcaggtgcatccctgaagaggtgattgctaaggtgctgacctacttaaccagcatcgcgagacagaatgggtccgattcaaggttcacgatcatattggatcgtagactagacacgtggtcctctctaaagatatcgctgcagaagatcagcgcctcgttcccgggtaacctgcatctggtgctggtgctccgtccaacgtcctttctccagagaaccttcacagacatcggcttttggttcagtcaggaagattttatgcttaaacttcccgttgtcatgttatcatctgtgtctgatctgttgacttacatagatgacaaacagctcacccccgaactgggtggcaccctgcagtattgccatagtgaatggattatttttagaaacgccattgagaacttcgcacttacagtcaaagaaatggcccagatgcttcagtctttcggcacagagctagcagaaacagagctacccgatgacattccaagcattgaagagattcttgcgatcagagccgaaaggtaccacctgctaaagaatgatataactgcggtaactaaggaaggtaagatcctgctgactaatttagaggttcctgatacagagggcgcggtgagttctcgccttgaatgtcataggcaaatcagcggggattggcagaccatcaacaaactgttgacacaagtacacgacatggagacagcttttgatgggttttgggagaagcaccagctcaaaatggagcagtacctccagctatggaagttcgaacaggattttcagcagctggtgacagaagtggagtttctcctgaatcaacaggccgagctggcggacgtaacgggaactatcgctcaggtcaagcagaagatcaagaaactggaaaaccttgacgagaatagccaggagttactgagcaaggcacagtttgtgattctgcacgggcacaaactggcggctaaccatcattacgccctcgacctgatttgccagcgctgtaacgaattacgttacctgagcgacattctggttaatgagatcaaagccaagagaatccagcttagcagaaccttcaagatgcacaagctcctgcagcaggcgaggcaatgctgtgatgagggggagtgtttgcttgccaaccaagagatcgacaagtttcagtccaaggaggacgcgcaaaaagctttgcaggacattgagaattttcttgagatggccctaccctttatcaattatgagcccgagaccctgcagtacgaattcgatgtgatcttgtctccagagctgaaggtgcagatgaaaacaatccagctgaaattagagaatatcagaagcatttttgagaatcaacaggccgggttccgtaaccttgccgacaaacacgtgaggcccattcaatttgtagtacctacacccgagaatcttgtgacttctggtaccccattcttcagttccaaacaggtgggcgttggatactctttcttccaggcatgcaagttgttctcaaaaggcaaaaagacatggcgccaaaatcagtctaacctgaagatagaggtcgtccctgattgtcaggagaagaggtccagcggcccatctagctccctggacaacggcaattctctggacgtgctcaaaaaccatgttttaaacgagctaattcagactgaaagggtttacgttcgggaactgtataccgttttactcggttaccgtgcagagatggataacccagaaatgttcgatttgatgccgcctctgctgaggaacaagaaggacatcctctttgggaatatggccgaaatctatgagttccataatgacatttttctgtcatctctggagaactgcgcccatgcaccagaacgagtgggaccatgttttttagagcggaaggatgattttcaaatgtatgccaagtattgtcagaacaaaccccgtagcgagaccatttggagaaaatactcagaatgcgccttttttcaggagtgccagaggaaactcaagcaccgcctcagactggatagttacctcctcaaacctgtgcagcggatcaccaagtaccagctgctgctgaaagaattactgaaatactctaaggattgcgaggggagtgcccttctcaagaaagctctggacgcgatgctggacttgttgaagtctgttaacgactccatgcatcagatagcaatcaacggatatatcggaaacctaaacgagttgggcaagatgatcatgcagggcggcttctcagtgtggattggacataagaaaggcgctactaaaatgaaagacctcgctaggtttaagcctatgcagcggcacctattcctgtatgagaaagccatagtgttttgtaagaggcgagtggagtctggagaaggttcagaccgctacccaagctactcctttaagcactgctggaagatggatgaagtgggcatcactgagtacgttaagggcgacaataggaaatttgagatttggtatggcgaaaaagaagaagtgtatatcgtgcaggcaagcaacgttgatgtgaagatgacgtggcttaaggagatccggaacatactgttgaaacagcaggaactgctgaccgtgaaaaagcggaagcagcaggatcagctgacggaacgcgataaatttcaaatctcactgcaacaaaatgacgagaagcaacagggggcattcataagcaccgaagagacggagctggagcacactagcacagtggtggaggtttgcgaggctatcgcatctgtgcaggcagaggcaaatacagtctggacagaggcctcccagtctgctgagattagcgaagagccagcggaatggtcgagcaattatttctaccctacatatgatgaaaacgaagaagagaatcgaccactcatgaggcctgtcagtgagatggccttactctactag

SEQ ID NO: 325294 - DNA, 3006 bp, Artificial Sequence
  derived and/or modified sequence
atgcaggacatcgccttcctgagcggcggccggggcaaggacaatgcctggatcatcaccttccctgagaactgcaacttccgctgcatccctgaggaggtgattgccaaggtgctgacctacctgaccagcatcgcccggcagaatggaagtgacagccgcttcaccatcatcctggaccggcggctggacacctggagcagcctgaagatcagcctgcagaagatcagcgccagcttccctggcaacctgcacctggtgctggtgctgcggcccaccagcttcctgcagaggaccttcacagacatcggcttctggttcagccaggaggacttcatgctgaagctgcctgtggtgatgctgagctctgtgtctgacctgctgacctacattgatgacaagcagctgaccccagagctgggcggcaccctgcagtactgccacagcgagtggatcatcttcagaaatgccattgaaaattttgccctgactgtgaaggagatggcccagatgctgcagagctttggaacagagctggccgagacagagctgcctgatgacatccccagcattgaggagatcctggccatccgggcagagcgctaccacctgctgaagaatgacatcacagctgtgaccaaggagggcaagatcctgctgaccaacctggaggtgcctgacacagagggcgctgtgagcagccggctggagtgccaccggcagatcagcggggactggcagaccatcaacaagctgctgacccaggtgcatgacatggagacagcctttgatggcttctgggagaagcaccagctgaagatggagcagtacctgcagctgtggaagtttgagcaggacttccagcagctggtgacagaggtggagttcctgctgaaccagcaggccgagctggctgatgtgacaggcaccatcgcccaggtgaagcagaagatcaagaagctggagaacctggatgagaacagccaggagctgctgagcaaggcccagtttgtgatcctgcacggccacaagctggccgccaaccaccactacgccctggacctgatctgccagcgctgcaatgagctgcgctacctgagtgacatcctggtgaatgagatcaaggccaagaggatccagctgagcaggaccttcaagatgcacaagctgctgcagcaggcccggcagtgctgtgatgaaggagagtgcctgctggccaaccaggagattgacaagttccagagcaaagaagatgcccagaaggccctgcaggacatcgagaacttcctggagatggccctgcccttcatcaactatgagcctgagaccctgcagtatgaatttgatgtgatcctgagccctgagctgaaggtgcagatgaagaccatccagctgaagctggagaacatccgcagcatctttgagaaccagcaggccggcttcaggaacctggccgacaagcacgtgcggcccatccagtttgtggtgcccaccccagagaacctggtgaccagcggcacccccttcttcagcagcaagcaggtgggcgtgggctacagcttcttccaggcctgcaagctgttcagcaagggcaagaagacctggaggcagaaccagagcaacctgaagattgaggtggtgcctgactgccaggagaagaggagcagcggccccagcagcagcctggacaatggaaacagcctggatgtgctgaagaaccacgtgctgaatgaactcatccagacagagcgggtgtatgtgcgggagctgtacacagtgctgctgggctacagagctgagatggacaaccctgagatgtttgacctgatgccacccctgctgaggaacaagaaggacatcctgtttggaaacatggccgagatctatgagttccacaatgacatcttcctgagcagcctggagaactgtgcccacgcccctgagcgggtgggcccctgcttcctggagaggaaggatgacttccagatgtatgccaagtactgccagaacaagcccaggtctgagaccatctggaggaagtacagtgaatgtgccttcttccaggagtgccagaggaagctgaagcaccggctgcggctggacagctacctgctgaagcctgtgcagaggatcaccaagtaccagctgctgctgaaggagctgctgaagtacagcaaggactgtgagggcagcgccctgctgaagaaggccctggatgccatgctggacctgctgaagtctgtgaatgacagcatgcaccagatcgccatcaatggctacatcggcaacctgaatgagctgggcaagatgatcatgcagggcggcttctctgtgtggattggccacaagaagggggccaccaagatgaaggacctggcccgcttcaagcccatgcagaggcacctgttcctgtatgagaaggccatcgtgttctgcaagagaagagtggagagcggggagggcagtgaccgctaccccagctacagcttcaagcactgctggaagatggatgaggtgggcatcacagaatatgtgaagggggacaacaggaagtttgagatctggtacggggagaaggaggaggtgtacatcgtgcaggccagcaatgtggatgtgaagatgacctggctgaaggagatccggaacatcctgctgaagcagcaggagctgctgactgtgaagaagaggaagcagcaggaccagctgacagagcgggacaagttccagatcagcctgcagcagaatgatgagaagcagcagggcgccttcatcagcacagaggagacagagctggagcacaccagcacagtggtggaggtgtgtgaggccatcgcctctgtgcaggccgaggccaacacagtgtggacagaggccagccagagcgctgagatcagcgaggagcctgctgagtggagcagcaactacttctaccccacctatgatgaaaatgaggaggagaaccggcccctgatgaggcctgtgtctgagatggccctgctgtactag

SEQ ID NO: 325295 - DNA, 3006 bp, Artificial Sequence
  derived and/or modified sequence
atgcaggacatcgccttcctgagcggcggccggggcaaggacaacgcctggatcattacttttccagaaaattgcaatttcagatgcatacctgaagaggtaatcgccaaggtgttgacataccttactagcatcgccaggcagaatggatctgacagccgcttcaccattattctggataggcgattggacacttggagttcgctcaagatatctttacagaagatttccgcctcttttcctgggaatctgcacctggtgctcgtgctccgccccacctcttttctgcaacggacctttacggacatcggattttggttttcacaggaagattttatgctgaagttgcccgtggtcatgctctccagcgtgtcagatctcttgacctatatcgacgataaacagttaacccctgagctggggggcactctgcaatattgccactcagaatggattatttttcggaacgccatcgagaatttcgccctcaccgtgaaagagatggcgcaaatgcttcagtcgtttgggacagaattggctgagaccgaactgcccgacgatatccccagcatcgaggagatactggccatccgagccgagaggtatcacttgctgaagaatgatattactgccgtgacaaaggaggggaaaattttgctgaccaatctcgaagtgccagataccgaaggggctgttagttctcgacttgagtgccatcggcagatcagcggggactggcagacaataaacaaattgctgactcaggttcatgacatggaaaccgcctttgacggcttttgggagaaacatcagctgaagatggaacagtatctgcaactttggaaatttgaacaggattttcagcagctcgtcacggaagtggaattcctcctaaaccagcaggcagagctggcggatgtgactggcaccattgcccaggttaagcagaaaataaagaaactggagaacctggatgagaacagccaggaactgctctccaaggcccagtttgtgatccttcacggacataagttggctgcgaaccaccactatgccctcgacctaatctgccagcggtgcaacgagctcaggtacctgtcagacattttggtgaacgaaattaaggctaagaggatccagctgtccagaacttttaagatgcacaaactgctccaacaggcacgtcaatgttgtgacgagggtgaatgtctactcgctaatcaggaaatagacaaattccagtctaaggaggatgcacagaaggccctccaggacatcgaaaattttctggaaatggccttgcctttcatcaactacgagcctgagaccctgcagtatgaattcgatgtgatcctgagccctgagctcaaagtccagatgaagaccatccagctgaagctcgaaaacatccgctctatttttgagaatcagcaggccggcttccgtaacttagctgacaaacatgtccgacccattcagtttgtcgtgccgacccctgagaatctggtcacgagcggcactccattcttttccagtaagcaggtcggagtgggctattctttttttcaggcctgtaaattgttcagtaagggtaagaagacatggagacagaaccagtctaatctgaaaatagaggtcgtgcctgactgtcaggaaaaaagatcctcaggcccgagcagttccctggataatgggaacagtctagatgtgcttaagaaccatgtcctcaacgaattgatccaaacagagcgggtctatgtccgcgagctctataccgtactactaggctatcgtgctgaaatggacaacccagagatgtttgacctcatgccgccactgctccgcaacaagaaggacattctgtttggaaatatggccgagatatatgagttccataatgacatcttcttgagcagtttggagaattgtgcccacgctccggaaagagttgggccatgcttccttgagcggaaagatgactttcagatgtatgctaagtattgccaaaacaagccacgctcagagactatctggcggaaatattctgaatgcgctttctttcaagaatgccagaggaagctcaagcacagactgaggctagactcatacctgctgaaacccgtgcagcgcatcaccaagtatcaattattgcttaaggaactactcaagtactcaaaggactgtgaaggctctgcactcctcaagaaggcgctggatgctatgctggacctgctgaagtcagtgaatgactcgatgcatcagatcgccattaacggatacatcggcaatttaaatgaactggggaaaatgattatgcagggtggatttagcgtctggataggccacaaaaagggcgcaaccaagatgaaggatcttgctcgctttaagccaatgcaacgccatttgttcctgtatgaaaaagcaatcgtcttctgcaaacgcagggtcgaatctggcgaagggtccgaccgctacccatcatactctttcaaacactgttggaaaatggatgaggtaggaattaccgagtacgtcaagggcgacaaccggaaattcgaaatatggtatggcgagaaagaggaagtgtacatcgtccaggccagcaacgtggatgttaaaatgacctggctgaaggagattaggaatatcttgttgaagcagcaagagttgctcacagtgaaaaagcgtaagcagcaggaccagctgactgagcgtgacaagtttcagatatccctgcagcagaatgacgagaagcaacaaggtgccttcatctctactgaggagactgaactggagcatacttctactgtcgtcgaggtttgtgaggccatagctagcgtacaggctgaagcaaacactgtgtggactgaggcaagtcagagcgccgaaatctcggaagagccagctgagtggtcatccaactatttctatcccacttacgacgagaatgaagaagaaaaccggcctctgatgagaccagttagcgaaatggccctgttgtattag

SEQ ID NO: 325296 - DNA, 3006 bp, Artificial Sequence
  derived and/or modified sequence
atgcaggacatcgcttttctgtccggaggcagaggcaaagacaacgcctggattattacattccctgagaattgcaacttcaggtgtatcccagaagaagtaatcgcaaaagtgcttacatatctcacatccatagctagacagaacggctctgacagcagattcaccatcatccttgaccggagactggacacctggtcatcgctgaaaatatctctgcagaaaatttcagcttccttcccgggaaacctccatctggtgctggtcctgcggccaacaagctttctgcagaggacattcacagacataggcttctggttcagtcaggaggacttcatgctgaaactccccgttgttatgctttccagtgtctctgacttgctgacgtatatcgacgacaaacaattgacaccagaattaggaggaacacttcagtactgtcattctgaatggattatatttcgtaacgctattgagaatttcgccctaaccgttaaggagatggcccaaatgctacagtctttcggcacagagctagcagagactgaactgcccgacgacatcccatctatcgaagagattctggcaattagagccgaaagatatcatctattaaaaaatgatataaccgcggtgaccaaggagggcaagatcctcttaaccaacctggaggttcccgatacagagggggctgttagcagccggcttgaatgccacagacagatttccggcgattggcagactattaataaactgttgacacaggtgcacgatatggagacagcgttcgatggattttgggagaaacaccagctgaaaatggaacagtacttacagctgtggaagttcgaacaagattttcagcagcttgtgacagaggttgaattcttactgaaccagcaggcggagcttgccgatgtcacaggaacaatcgctcaagtgaagcaaaagattaagaagcttgagaacttggacgaaaattcccaggaactgcttagtaaggcacagtttgtgatattacacgggcacaagctggcagccaaccaccattacgcacttgatttgatatgtcaaagatgcaacgaactgcgctacctgtctgacatcctcgtgaatgaaattaaagcgaagaggatccagctctcccggacgttcaagatgcataagcttctgcagcaggccagacagtgctgcgacgagggcgaatgcctcctcgcaaaccaggaaattgacaaatttcagtcgaaggaggatgcgcagaaagctcttcaagacatcgagaatttccttgagatggccctgccttttatcaactatgagccggagacgttgcagtatgaattcgacgtgatcctgagtcccgagctaaaggtacagatgaaaacaattcagctgaaactagaaaacatcaggtctatttttgaaaaccagcaagcgggttttaggaacctcgcagataagcacgtaaggcctatccagtttgttgtacccacccctgaaaaccttgtcacaagcggtacacctttttttagctctaagcaggtgggagtggggtactccttcttccaggcctgcaaattattctccaagggcaagaagacttggcgacagaaccaaagtaacctgaagattgaggtggtccctgactgccaggaaaagcggtcttctgggccatcctcatcactggacaacggaaactcactggacgtcctcaaaaatcacgtgctcaatgaactgattcagacggaaagagtatacgtcagggaactgtacaccgtgctcctgggctatcgggcagaaatggataacccagagatgttcgacttgatgcctcccttgctgcgcaacaaaaaggatatcctgttcggcaacatggctgagatctacgagtttcataacgacattttcctgtcttcactggagaactgtgcacatgctcccgagagagtgggaccatgcttcttggaacgcaaagacgactttcagatgtatgcgaagtactgccagaataaacctcggagcgaaactatttggcgaaagtacagcgagtgcgctttttttcaggagtgccagagaaagctgaagcaccgacttcgactagactcgtacctgctgaaaccagtccaaagaatcaccaagtatcagctcctgttgaaggagttgctcaagtactccaaggattgtgaaggcagcgccttacttaagaaagccctcgacgccatgttggatttactgaagtccgtgaatgattctatgcaccagatagccattaatggttatatcggaaacctgaacgaactggggaagatgatcatgcagggaggtttttctgtttggataggtcataaaaaaggggcaacaaagatgaaggatttggctaggttcaaacctatgcagcgccatctgttcttgtatgagaaggccattgtgttttgcaaaagaagagtcgagtcaggtgagggaagtgatagatatccgtcatatagcttcaagcactgctggaaaatggatgaggtcggaattaccgaatacgtgaaaggcgataatcgaaaattcgaaatctggtatggagagaaagaggaagtgtatattgttcaggcgtcgaatgtcgacgtcaagatgacgtggctcaaggagatcagaaacattctcctcaaacagcaggagttattgaccgtcaaaaagagaaaacagcaagaccaacttactgaacgagataaatttcagatttctctgcagcagaacgacgagaagcagcagggcgcattcatcagcaccgaagaaaccgaactagagcatacctccacagtggtagaagtctgcgaggctatcgccagtgtgcaagctgaagccaacactgtgtggaccgaagccagccaaagcgccgaaatctctgaggaacctgcggagtggagtagcaactacttttatccaacttacgacgaaaacgaggaagaaaatcggcctctgatgagaccggtttctgaaatggcattactgtactag

SEQ ID NO: 325297 - DNA, 3006 bp, Artificial Sequence
  derived and/or modified sequence
atgcaggacatcgccttcctgagcggcggcagaggcaaggacaacgcctggatcatcaccttccccgagaactgcaacttcagatgcatccccgaggaggtgatcgccaaggtgctgacctacctgaccagcatcgccagacagaacggcagcgacagcagattcaccatcatcctggacagaagactggacacctggagcagcctgaagatcagcctgcagaagatcagcgccagcttccccggcaacctgcacctggtgctggtgctgagacccaccagcttcctgcagagaaccttcaccgacatcggcttctggttcagccaggaggacttcatgctgaagctgcccgtggtgatgctgagcagcgtgagcgacctgctgacctacatcgacgacaagcagctgacccccgagctgggcggcaccctgcagtactgccacagcgagtggatcatcttcagaaacgccatcgagaacttcgccctgaccgtgaaggagatggcccagatgctgcagagcttcggcaccgagctggccgagaccgagctgcccgacgacatccccagcatcgaggagatcctggccatcagagccgagagataccacctgctgaagaacgacatcaccgccgtgaccaaggagggcaagatcctgctgaccaacctggaggtgcccgacaccgagggcgccgtgagcagcagactggagtgccacagacagatcagcggcgactggcagaccatcaacaagctgctgacccaggtgcacgacatggagaccgccttcgacggcttctgggagaagcaccagctgaagatggagcagtacctgcagctgtggaagttcgagcaggacttccagcagctggtgaccgaggtggagttcctgctgaaccagcaggccgagctggccgacgtgaccggcaccatcgcccaggtgaagcagaagatcaagaagctggagaacctggacgagaacagccaggagctgctgagcaaggcccagttcgtgatcctgcacggccacaagctggccgccaaccaccactacgccctggacctgatctgccagagatgcaacgagctgagatacctgagcgacatcctggtgaacgagatcaaggccaagagaatccagctgagcagaaccttcaagatgcacaagctgctgcagcaggccagacagtgctgcgacgagggcgagtgcctgctggccaaccaggagatcgacaagttccagagcaaggaggacgcccagaaggccctgcaggacatcgagaacttcctggagatggccctgcccttcatcaactacgagcccgagaccctgcagtacgagttcgacgtgatcctgagccccgagctgaaggtgcagatgaagaccatccagctgaagctggagaacatcagaagcatcttcgagaaccagcaggccggcttcagaaacctggccgacaagcacgtgagacccatccagttcgtggtgcccacccccgagaacctggtgaccagcggcacccccttcttcagcagcaagcaggtgggcgtgggctacagcttcttccaggcctgcaagctgttcagcaagggcaagaagacctggagacagaaccagagcaacctgaagatcgaggtggtgcccgactgccaggagaagagaagcagcggccccagcagcagcctggacaacggcaacagcctggacgtgctgaagaaccacgtgctgaacgagctgatccagaccgagagagtgtacgtgagagagctgtacaccgtgctgctgggctacagagccgagatggacaaccccgagatgttcgacctgatgccccccctgctgagaaacaagaaggacatcctgttcggcaacatggccgagatctacgagttccacaacgacatcttcctgagcagcctggagaactgcgcccacgcccccgagagagtgggcccctgcttcctggagagaaaggacgacttccagatgtacgccaagtactgccagaacaagcccagaagcgagaccatctggagaaagtacagcgagtgcgccttcttccaggagtgccagagaaagctgaagcacagactgagactggacagctacctgctgaagcccgtgcagagaatcaccaagtaccagctgctgctgaaggagctgctgaagtacagcaaggactgcgagggcagcgccctgctgaagaaggccctggacgccatgctggacctgctgaagagcgtgaacgacagcatgcaccagatcgccatcaacggctacatcggcaacctgaacgagctgggcaagatgatcatgcagggcggcttcagcgtgtggatcggccacaagaagggcgccaccaagatgaaggacctggccagattcaagcccatgcagagacacctgttcctgtacgagaaggccatcgtgttctgcaagagaagagtggagagcggcgagggcagcgacagataccccagctacagcttcaagcactgctggaagatggacgaggtgggcatcaccgagtacgtgaagggcgacaacagaaagttcgagatctggtacggcgagaaggaggaggtgtacatcgtgcaggccagcaacgtggacgtgaagatgacctggctgaaggagatcagaaacatcctgctgaagcagcaggagctgctgaccgtgaagaagagaaagcagcaggaccagctgaccgagagagacaagttccagatcagcctgcagcagaacgacgagaagcagcagggcgccttcatcagcaccgaggagaccgagctggagcacaccagcaccgtggtggaggtgtgcgaggccatcgccagcgtgcaggccgaggccaacaccgtgtggaccgaggccagccagagcgccgagatcagcgaggagcccgccgagtggagcagcaactacttctaccccacctacgacgagaacgaggaggagaacagacccctgatgagacccgtgagcgagatggccctgctgtactag

SEQ ID NO: 325298 - DNA, 513 bp, Artificial Sequence
  derived and/or modified sequence
atgagcgtgatggtggtgagaaagaaggtgaccagaaagtgggagaagctgcccggcagaaacaccttctgctgcgacggcagagtgatgatggccagacagaagggcatcttctacctgaccctgttcctgatcctgggcacctgcaccctgttcttcgccttcgagtgcagatacctggccgtgcagctgagccccgccatccccgtgttcgccgccatgctgttcctgttcagcatggccaccctgctgagaaccagcttcagcgaccccggcgtgatccccagagccctgcccgacgaggccgccttcatcgagatggagatcgaggccaccaacggcgccgtgccccagggccagagacccccccccagaatcaagaacttccagatcaacaaccagatcgtgaagctgaagtactgctacacctgcaagatcttcagaccccccagagccagccactgcagcatctgcgacaactgcgtggagagattcgaccaccactgcccctag

SEQ ID NO: 325299 - DNA, 513 bp, Artificial Sequence
  derived and/or modified sequence
atgagcgtaatggtggtccggaagaaggtgacgcgtaagtgggagaagcttccgggaaggaacacattctgttgcgatggacgggttatgatggctcggcaaaaagggatattttacctcacattgttccttattttaggcacctgtactctattttttgcgttcgagtgccgatacttggccgtccagctgagccccgccatcccagtttttgccgctatgttgttcctgttctctatggccacactcttacgcacatccttcagcgacccaggcgtgattcctagggccttaccagatgaagcggctttcatagaaatggaaattgaagccactaacggagctgtgccccaagggcagaggccacccccccgtatcaagaactttcagattaataatcagatcgtcaagttgaagtattgctatacctgtaagatcttcagaccaccgagggcaagccactgtagtatctgtgacaattgtgttgaacgcttcgaccatcactgtccttag

SEQ ID NO: 325300 - DNA, 513 bp, Artificial Sequence
  derived and/or modified sequence
atgtctgtgatggtggtgaggaagaaggtgaccaggaagtgggagaagctgcccggcaggaacaccttctgctgtgatggccgggtgatgatggcccggcagaagggcatcttctacctgaccctcttcctgatcctgggcacctgcaccctcttctttgcctttgagtgccgctacctggccgtgcagctgagccctgccatccctgtgtttgctgccatgctgttcctgttctccatggccaccctgctgcggaccagcttcagtgaccccggggtcatcccccgggccctgcctgatgaggccgccttcatcgagatggagattgaggccaccaatggagctgtgccccagggccagaggcccccaccccgcatcaagaacttccagatcaacaaccagatcgtgaagctgaagtactgctacacctgcaagatcttccggcccccccgggccagccactgcagcatctgtgacaactgtgtggagagatttgaccaccactgcccctag

SEQ ID NO: 325301 - DNA, 513 bp, Artificial Sequence
  derived and/or modified sequence
atgagcgtgatggtggtgcggaagaaggtgacccggaagtgggagaagttgccagggagaaataccttctgctgtgacggacgagtgatgatggcaaggcaaaaaggtattttttatctgaccctgtttctcattctgggaacttgcacactattttttgccttcgagtgtaggtacctggccgtccaattgtctcccgctatccctgtgttcgccgccatgctttttttgttttctatggctactttattgcggacctcattctccgaccccggtgtcatccctagagctctgccagatgaggctgcgttcatcgaaatggaaatcgaagctacaaacggagcagtcccacagggccagcgcccacccccccggatcaagaatttccagattaacaatcagattgtcaaactgaaatactgctatacgtgcaagatcttccgacctcctagggctagtcactgttccatttgcgataattgtgttgagcggttcgaccaccattgtccgtag

SEQ ID NO: 325302 - DNA, 513 bp, Artificial Sequence
  derived and/or modified sequence
atgtctgtgatggttgtgagaaaaaaggttacaaggaaatgggaaaaactccctggtcgtaataccttttgttgcgacggtagagtgatgatggctcgccagaagggcattttttatcttactctatttcttatcctcggaacatgtactctcttcttcgccttcgagtgcaggtacctagctgtgcagctctctcccgctatccctgtctttgccgctatgttatttctttttagcatggccactcttctccgtaccagcttttctgatcctggtgtgataccccgagccctgcccgacgaagctgccttcatcgagatggaaattgaagccaccaatggtgccgtcccacaggggcagagaccccctcctcggattaaaaacttccagattaacaatcagatagtgaaactgaagtattgctacacctgcaaaatctttagaccaccgagggcttcccactgcagcatctgcgataattgtgtggagcgattcgaccaccactgcccttag

SEQ ID NO: 325303 - DNA, 737 bp, Artificial Sequence
  derived and/or modified sequence
gacctggtgacgtgaggagcgttccatttggccagtggtgggcggttgccacagctggtttagggccccgaccactggggccccttgtcaggaggagacagcctcccggcccggggaggacaagtcgctgccacctttggctgccgacgtgattccctgggacggtccgtttcctgccgtcagctgccggccgagttgggtctccgtggttcaggaattccaatcatgtctgtgatggtggtgagaaagaaggtgacacggaaatgggagaaactcccaggcaggaacaccttttgctgtgatggccgcgtcatgatggcccggcaaaagggcattttctacctgacccttttcctcatcctggggacatgtacactcttcttcgcctttgagtgccgctacctggctgttcagctgtctcctgccatccctgtatttgctgccatgctcttccttttctccatggctacactgttgaggaccagcttcagtgaccctggagtgattcctcgggcgctaccagatgaagcagctttcatagaaatggagatagaagctaccaatggtgcggtgccccagggccagcgaccaccgcctcgtatcaagaatttccagataaacaaccagattgtgaaactgaaatactgttacacatgcaagatcttccggcctccccgggcctcccattgcagcatctgtgacaactgtgtggagcgcttcgaccatcactgcccctg

SEQ ID NO: 325304 - protein, 528 aa, Artificial Sequence
  derived and/or modified sequence
MQASPLQTSQPTPPEELHAAAYVFTNDGQQMRSDEVNLVATGHQSKKKHSRKSKRHSSSKRRKSMSSWLDKQEDAAVTHSICEERINNGQPVADNVLSTAPPWPDATIAHNIREERMENGQSRTDKVLSTAPPQLVHMAAAGIPSMSTRDLHATVTQNVHEERMENNQPQPSYDLSTVLPGLTYLTVAGIPAMSTRDQYATVTHNVHEEKIKNGQAASDNVFSTVPPAFINMAATGVSSMSTRDQYAAVTHNIREEKINNSQPAPGNILSTAPPWLRHMAAAGISSTITRDLYVTATHSVHEEKMTNGQQAPDNSLSTVPPGCINLSGAGISCRSTRDLYATVIHDIQEEEMENDQTPPDGFLSNSDSPELINMTGHCMPPNALDSFSHDFTSLSKDELLYKPDSNEFAVGTKNYSVSAGDPPVTVMSLVETVPNTPQISPAMAKKINDDIKYQLMKEVRRFGQNYERIFILLEEVQGSMKVKRQFVEFTIKEAARFKKVVLIQQLEKALKEIDSHCHLRKVKHMRKR

SEQ ID NO: 325305 - protein, 690 aa, Artificial Sequence
  derived and/or modified sequence
MEKILQMAEGIDIGEMPSYDLVLSKPSKGQKRHLSTCDGQNPPKKQAGSKFHARPRFEPVHFVASSSKDERQEDPYGPQTKEVNEQTHFASMPRDIYQDYTQDSFSIQDGNSQYCDSSGFILTKDQPVTANMYFDSGNPAPSTTSQQANSQSTPEPSPSQTFPESVVAEKQYFIEKLTATIWKNLSNPEMTSGSDKINYTYMLTRCIQACKTNPEYIYAPLKEIPPADIPKNKKLLTDGYACEVRCQNIYLTTGYAGSKNGSRDRATELAVKLLQKRIEVRVVRRKFKHTFGEDLVVCQIGMSSYEFPPALKPPEDLVVLGKDASGQPIFNASAKHWTNFVITENANDAIGILNNSASFNKMSIEYKYEMMPNRTWRCRVFLQDHCLAEGYGTKKTSKHAAADEALKILQKTQPTYPSVKSSQCHTGSSPRGSGKKKDIKDLVVYENSSNPVCTLNDTAQFNRMTVEYVYERMTGLRWKCKVILESEVIAEAVGVKKTVKYEAAGEAVKTLKKTQPTVINNLKKGAVEDVISRNEIQGRSAEEAYKQQIKEDNIGNQLLRKMGWTGGGLGKSGEGIREPISVKEQHKREGLGLDVERVNKIAKRDIEQIIRNYARSESHTDLTFSRELTNDERKQIHQIAQKYGLKSKSHGVGHDRYLVVGRKRRKEDLLDQLKQEGQVGHYELVMPQAN

SEQ ID NO: 325306 - DNA, 2073 bp, Artificial Sequence
  derived and/or modified sequence
atggagaagattctgcagatggccgagggcatcgatataggcgagatgccctcttatgacctggtactgtcaaagccttccaagggccagaaacgccacttgtccacgtgtgatggtcagaatcccccaaagaagcaggctggctctaagttccacgcccgacctaggtttgaacccgtacacttcgtagcgagtagctcaaaggatgagcggcaagaggacccatatggtccccaaactaaagaggtaaacgagcagactcacttcgcatccatgcctcgagacatctaccaggattatacccaggactccttctccatacaagacggcaactcacagtactgtgacagcagcggcttcatcttaacaaaagatcagccagtcacagccaacatgtatttcgacagcggaaatccagccccgagcaccacctcccagcaggccaactcccaaagtacaccagagccctcccccagccagacttttccagaatcagtggtcgccgaaaagcagtactttatcgagaagcttacagctactatatggaagaaccttagcaaccccgaaatgactagcggctcggacaagatcaattacacatatatgctgacccgatgcatacaggcctgcaagaccaatcccgaatacatttatgctcccctgaaggagatacctcctgctgatatcccaaagaacaagaagttactgactgacggttatgcctgtgaagtccgctgccagaacatctacctgaccacagggtatgctgggtcaaaaaacggctctcgagaccgagcaaccgagctggcagtcaagctcttacaaaaacggatcgaggtacgcgtggtgagaaggaaatttaaacacaccttcggggaggatctcgtggtttgccaaataggcatgagctcatacgaatttccacctgctctcaagccccccgaggatcttgtggtacttggtaaggacgccagcggccagcccatttttaatgcttcggccaagcactggaccaacttcgtaataaccgagaacgctaatgatgcaatcggaatactcaataattccgcaagcttcaataaaatgtcaatcgaatataagtacgaaatgatgcccaaccggacatggaggtgccgtgtgtttctgcaggatcattgtctcgctgaaggatacggcaccaaaaagacctccaagcatgcagccgcggacgaagccctgaagatcttgcaaaaaacccaaccaacgtatccaagtgtgaagagcagtcagtgtcacaccggtagtagcccccgagggagtggtaagaaaaaggatattaaagacctagtcgtctacgagaactccagtaatcccgtttgcacactcaatgacacagctcaatttaatcgcatgacagtagaatacgtgtatgaacggatgacaggacttcggtggaagtgtaaagttatcctcgagagcgaggtcatcgccgaagccgtgggagtcaaaaagaccgtaaaatatgaggctgctggagaggccgtcaagaccctgaaaaagactcagcctaccgtgattaacaatttgaaaaagggcgcagtggaggatgtaataagtcggaacgagatccagggacgctccgcagaagaggcctacaaacagcagataaaagaagataatattggcaatcaactgctccgaaagatggggtggacgggaggtggactgggcaagagtggagaagggataagggaacccatctctgtgaaagaacaacataagcgcgaaggcctcggcctggatgtcgaaagagtcaacaaaatcgctaaaagagacatcgagcaaataataaggaactacgcacggtcagaaagccatacagacctgacattttctcgtgaattaacaaacgatgaacgcaaacaaatacatcaaattgctcagaagtacggcctcaagtcaaaatcccacggcgtagggcatgaccggtacctggtcgtgggcagaaaacgtaggaaggaggatcttttggaccagctcaagcaggaaggacaagttggtcactatgaactggtgatgcctcaggccaattag

SEQ ID NO: 325307 - DNA, 2073 bp, Artificial Sequence
  derived and/or modified sequence
atggaaaagattttgcagatggccgaaggcattgacatcggcgagatgccaagctatgatctcgtcctgtctaagccatctaaaggtcagaaacggcatttgtcaacttgtgacggacagaaccccccaaagaaacaggccggaagcaagttccacgccaggccacgctttgagccagttcacttcgtggcctcttctagtaaggacgagcgccaggaagatccctatggcccccagaccaaagaagtgaacgagcagacacattttgctagtatgccgcgagatatttaccaggattacacccaggatagtttctctatacaggacggtaacagccaatattgtgactcctccggcttcattttgacgaaagatcaaccagttaccgctaacatgtacttcgactccggcaatcctgccccttctaccacaagccagcaggccaatagccaaagcactccagaacctagcccttcccagacttttccagaaagtgtcgtagccgagaagcaatacttcatcgagaagctgacagcaacaatttggaaaaatctgtctaacccagagatgacctctgggtctgataagattaattatacctacatgcttactcgatgcattcaagcatgcaaaaccaatcccgagtacatttacgccccccttaaggaaattcccccggcagacattcctaagaacaagaagctactgacagacggttacgcgtgcgaggtgagatgccagaatatctacctgacaaccggctatgccggctcaaagaacgggtcaagagatagggcgaccgagttggcggtcaagcttctgcaaaaacgcatagaagtgcgggtcgtgcggcggaagtttaagcatacattcggagaggatctagtggtctgtcagatcggcatgtctagttatgagtttccaccagcactgaagcccccagaagatttggtggtactcggaaaggacgcctcaggacaacccatttttaacgccagcgccaaacactggaccaacttcgtgatcactgagaatgctaacgacgccattggtattctgaacaatagcgcctcgttcaataagatgagtattgaatataaatatgagatgatgccaaataggacctggcgatgccgcgtgttcctccaggaccattgcctggccgagggctatggaacgaagaaaacatcaaagcatgcagccgccgacgaagccttaaaaattttgcaaaaaactcagcccacctaccctagtgtgaagtcttctcagtgccacaccgggtcttctccgcgagggtccggaaaaaaaaaggacattaaggacctcgtggtgtatgagaacagctccaacccagtgtgcaccttgaatgataccgcgcagttcaacagaatgaccgtcgagtatgtctacgagcggatgacgggcctaagatggaagtgtaaagtgatccttgagtctgaggttattgccgaagcagtcggcgttaagaaaaccgtgaaatatgaagccgcaggggaagcggttaaaaccctcaaaaaaacacaacctactgtcataaataacctgaagaaaggggctgtggaggatgtgatctcccgcaatgaaatacagggccggtctgccgaagaagcatacaagcagcagataaaagaggataacatcggtaaccaactcctccggaaaatggggtggactggaggtggcctgggaaagagcggcgaaggtattagagaaccaataagcgttaaggagcaacacaaaagggaggggttgggactcgacgtggaacgggtgaacaaaattgccaaacgtgatattgagcagattatccgcaattatgccaggtcggaatcccacaccgacttgactttctcaagggagctaaccaacgacgaacgcaaacagattcaccaaatcgcccaaaaatatggcctgaaatctaagagccacggggtgggccatgacagatatctggtggtgggtcggaagcggagaaaggaggatctcctggatcagctcaaacaggagggccaggtcggacactacgagctggtgatgccgcaagccaattag

SEQ ID NO: 325308 - DNA, 2073 bp, Artificial Sequence
  derived and/or modified sequence
atggagaagatcctgcagatggccgagggcattgatattggagagatgcccagctatgacctggtgctgagcaagcccagcaagggccagaagaggcacctgagcacctgtgatggccagaacccccccaagaagcaggccggcagcaagttccacgcccggcccaggtttgagcctgtgcactttgtggccagcagcagcaaggatgagcggcaggaggacccctacggcccccagaccaaggaggtgaatgagcagacccactttgcctccatgccccgggacatctaccaggactacacccaggacagcttcagcatccaggacggcaacagccagtactgtgacagcagcggcttcatcctgaccaaggaccagcctgtgacagccaacatgtactttgacagcggcaacccagcccccagcaccaccagccagcaggccaacagccagagcaccccagagcccagccccagccagaccttccctgagagcgtggtggccgagaagcagtacttcatcgagaagctgacagccaccatctggaagaacctgagcaaccctgagatgaccagcggcagtgacaagatcaactacacctacatgctgacccgctgcatccaggcctgcaagaccaaccctgagtacatctatgcccccctgaaggagatccccccagctgacatccccaagaacaagaagctgctgacagatggctacgcctgtgaggtgcgctgccagaacatctacctgaccaccggctacgccggcagcaagaatggcagccgggaccgggccacagagctggccgtgaagctgctgcagaagagaattgaggtgcgggtggtgcggaggaagttcaagcacacctttggagaggacctggtggtgtgccagatcggcatgagcagctatgagttccccccagccctgaagcccccagaggacctggtggtgctgggcaaggatgccagcggccagcccatcttcaatgccagcgccaagcactggaccaacttcgtcatcacagaaaatgccaatgatgccatcggcatcctgaacaacagcgccagcttcaacaagatgagcattgagtacaagtatgagatgatgcccaacagaacctggcgctgcagggtcttcctgcaggaccactgcctggccgagggctacggcaccaagaagaccagcaagcacgccgctgctgatgaggccctgaagatcctgcagaagacccagcccacctaccccagcgtgaagagcagccagtgccacacaggcagcagcccccggggcagcggcaagaagaaggacatcaaggacctggtggtgtatgagaacagcagcaaccctgtgtgcaccctgaatgacacagcccagttcaacaggatgacagtggagtatgtgtatgaaagaatgacaggcctgcgctggaagtgcaaggtgatcctggagagcgaggtgattgctgaggccgtgggcgtgaagaagacagtgaagtatgaagctgctggggaggccgtgaagaccctgaagaagacccagcccaccgtcatcaacaacctgaagaagggagctgtggaggatgtgatcagcagaaatgagatccagggccgctctgctgaggaggcctacaagcagcagatcaaggaggacaacatcggcaaccagctgctgaggaagatgggctggacaggaggcggcctgggcaagagcggggagggcatccgggagcccatctctgtgaaggagcagcacaagcgggagggcctgggcctggatgtggagcgggtgaacaagatcgccaagagggacatcgagcagatcatcagaaattatgcccggtctgagagccacacagacctgaccttcagccgggagctgaccaatgatgagaggaagcagatccaccagatcgcccagaagtatggcctgaagagcaagagccacggcgtgggccatgaccgctacctggtggtgggcaggaagaggaggaaagaagacctgctggaccagctgaagcaggagggccaggtgggccactatgagctggtgatgccccaggccaactag

SEQ ID NO: 325309 - DNA, 2073 bp, Artificial Sequence
  derived and/or modified sequence
atggagaagatcctgcagatggccgagggcatcgacatcggcgagatgccttcctatgatcttgttctatccaagccttctaagggacaaaagaggcatcttagtacttgtgacggtcagaaccctcccaaaaaacaagccgggtcaaaattccacgctcggccccgcttcgaacccgttcacttcgtggcctcttcctctaaggacgagcgacaagaggatccctacggaccccaaacgaaggaggtgaatgaacagacgcattttgcaagcatgcccagggatatttaccaggattacacccaagatagcttctccattcaagacgggaactctcagtattgcgacagttccggtttcatcttaacgaaagaccagcccgtgaccgccaacatgtatttcgactcaggaaatcctgctccttccactaccagccaacaggctaattctcagtccacccccgagccatcaccatctcagaccttccccgaatccgtcgttgcagaaaagcagtattttattgagaagctcacagccaccatctggaagaatttgtctaatccagagatgactagtggtagtgataaaattaactacacctacatgctcacgaggtgtatacaggcctgtaaaaccaaccccgagtacatctacgcccctctcaaggagattccgccagctgacattcctaagaacaaaaaactgttaacagacggatacgcttgtgaggtccgctgccaaaacatataccttacaacaggctacgccgggtctaaaaacggcagccgggatagagccacagagctggccgtgaaactgctacagaagcggatcgaagtgagagtggttagaagaaagtttaagcacacattcggggaggatctcgtggtctgtcaaatcgggatgagctcctatgagtttcctcccgccctgaagccccctgaagatctggtggtgcttgggaaagacgcatccgggcagccaatcttcaacgcctctgctaagcattggacgaacttcgtgatcactgagaatgcgaacgacgccataggtattctgaacaattccgcaagttttaacaagatgtccattgagtacaagtacgaaatgatgcccaacagaacctggagatgtcgggtttttttacaggatcactgcctggcagaggggtatgggacaaagaaaacttcgaagcacgctgcagctgatgaggcccttaaaattctacaaaaaacccagccgacctacccgtcagtgaaatcatcacagtgtcacactgggtcttccccccgcggttcaggcaaaaagaaagacatcaaggacttggttgtgtacgagaattcctccaacccggtttgcaccctgaacgacaccgctcagtttaatcgtatgacggtggaatatgtctatgagcggatgacagggctccgttggaaatgtaaggtgattctggaaagtgaagtcatcgcagaggcagtgggtgtaaagaaaactgtgaagtatgaagcggcaggcgaagcagtgaagaccctgaaaaaaacccagcccacagtgatcaataacctcaagaaaggagcagtggaagacgtgatcagccgcaacgaaatccagggccgttcagccgaggaagcctataaacagcagatcaaggaggacaatatcggtaaccagttgctacggaagatgggatggacaggaggtggcctcggcaagtccggcgaaggcattcgagagcctatttcagtcaaggagcagcacaagcgggaaggcctgggactggacgtagagagagtgaataagatcgctaaaagggatattgagcagatcataagaaattacgcccgatctgaatctcataccgacttgacttttagcagggagctgacaaacgatgaacgcaagcagatccaccagatagctcagaagtatggactgaagagcaaaagtcatggggtgggccatgaccgctaccttgtggtcggtcgcaaacggagaaaagaggacctgctagaccagctcaagcaggagggccaagtcggtcactacgaactggttatgccccaggcaaactag

SEQ ID NO: 325310 - DNA, 2073 bp, Artificial Sequence
  derived and/or modified sequence
atggagaagatcctgcagatggccgagggcatcgacatcggcgagatgcccagctacgacctagtactgtccaaacccagtaagggtcagaaaaggcatttgtcaacttgcgacggccagaaccctccaaaaaagcaagctgggagtaagttccacgcccgtcccagatttgagccagttcacttcgtggcatcatcttccaaggacgaaaggcaggaggacccttacggaccacagactaaagaggtgaatgaacagacccacttcgcctctatgcccagagatatttatcaggactacacccaggattcgttctcgatacaggacgggaactcacagtactgtgactcatctgggttcattctgactaaagatcagcctgtgaccgccaacatgtattttgatagcggaaatccagctccttctactacatctcagcaggcaaatagtcagtcaacaccggagccatctccctcccaaacgttcccggagtccgtggtcgcagaaaagcagtactttattgagaaactgacagctactatctggaagaacctgtctaatccagagatgacttcaggtagcgataaaattaactacacttacatgctaactcgttgtatccaagcctgtaaaactaacccggagtatatatacgcacccctaaaagagatcccacctgcagatatcccgaagaacaagaaattgctgaccgacggatatgcttgtgaagttcgctgccagaatatctatttaactacaggatacgcaggctctaaaaacgggtctcgagatcgcgccacagagcttgctgtgaagctcttgcagaaacgcattgaagtaagggtagtgagacggaagttcaagcacacatttggcgaagatttggttgtgtgtcaaattggcatgagttcttacgagttccctccggctctgaaaccgccggaggacctggtggtgctgggaaaagacgcttccggtcagcctatctttaacgcaagtgcgaaacactggactaattttgtgatcaccgaaaacgccaatgacgccataggaatcttaaataactcagcaagctttaataagatgtctatcgagtacaaatatgagatgatgcccaataggacctggcgatgcagagtctttctgcaggaccactgcctggccgagggctacggcacgaagaagacaagcaagcacgccgcggccgacgaagcccttaagattttgcagaagacccaacccacgtaccccagcgttaagagttcacagtgccacacaggctcatccccacgcgggtctggcaagaagaaggacattaaggacctcgtggtgtacgagaacagtagtaatcccgtttgcacacttaacgacacggctcagtttaataggatgaccgtggagtacgtgtatgaaaggatgactggtctcagatggaagtgtaaggttatcttggaatccgaggtgatcgctgaggccgtgggggtcaaaaaaacggtgaaatacgaagcagccggagaagctgtcaagacactgaaaaaaactcagcctactgtcattaacaatttgaagaagggggcagtggaagacgtgatctcaagaaacgagatacagggaaggagcgccgaggaggcctataagcagcagattaaggaggacaatatcggtaatcagctactgcgtaagatgggttggactggagggggcttgggtaagtctggcgaagggataagagagcccatctccgtcaaggaacagcacaaacgggagggattgggtctggacgtggaacgcgtgaataaaattgcaaagcgcgacatagagcagatcatccggaattacgccaggtctgagtctcacactgacctgacctttagtcgcgagcttactaatgacgagaggaagcagatacaccagatcgcccagaagtacggccttaagagcaagagtcacggagttggtcatgatagatacctcgtggtggggaggaaacggaggaaagaagacctgctggaccagctgaagcaggaagggcaggttggccattatgagctcgtaatgcctcaggctaattag

SEQ ID NO: 325311 - DNA, 2073 bp, Artificial Sequence
  derived and/or modified sequence
atggagaagatattacaaatggcggagggtatagatataggggagatgccctcttacgatcttgtgttgtctaaaccatctaagggtcagaagagacacctttctacatgcgatggccagaacccacccaaaaaacaagccggaagcaagtttcatgcgcgtccccgattcgaacccgtccactttgtagcaagttcctccaaagacgagaggcaagaagacccttacgggcctcaaactaaagaagtaaacgagcagacacacttcgcttccatgcctcgcgatatctaccaagattacacacaggacagtttctctattcaggatgggaacagccaatattgcgatagctcaggatttatactgaccaaagaccaacctgtgactgccaatatgtatttcgattcgggtaatccagcccctagtacgacctcccagcaggccaactctcagtctactcctgagccaagccctagtcagacctttccggagagtgttgtggcagagaaacaatatttcatagaaaagctaacagctaccatatggaaaaatctatcaaatccagaaatgacctccgggtccgacaagattaactacacttatatgctcacgcgatgtattcaggcttgtaagacgaacccagaatacatctacgcccctctaaaggaaatacctcccgcagatattcccaagaacaagaagctactcacggatggatatgcttgtgaagtgagatgccaaaacatttacctgacaacagggtacgcgggtagtaagaatggctcgagggatcgcgcaacagaactcgctgtgaagttattgcagaaacgcatcgaggtcagggttgtgaggagaaagtttaaacatacattcggggaagatctagtggtctgtcagataggcatgagcagctatgagtttcctcccgcactgaaaccaccggaggatctcgttgtgcttgggaaggatgcttccggccagcccattttcaatgcgtctgcaaagcattggactaacttcgtgatcactgagaacgccaatgacgctattggaattctgaataatagcgcctccttcaataagatgtccatcgaatataagtatgaaatgatgcctaatcgcacatggagatgccgcgtgtttctccaggaccattgtctggccgaaggctatggcactaagaagacaagcaagcatgccgcagccgatgaagccctcaagatactgcagaaaacccagcccacttatccttctgttaaatcatctcagtgccatactggctcatcccctcgcggaagtggaaaaaagaaagatatcaaggacctcgttgtgtacgagaattcctcaaatcccgtctgtacactgaatgacactgcccaatttaaccgtatgaccgtggaatacgtctatgagagaatgacaggcctgaggtggaaatgtaaggttatcttggagagcgaggtcatcgccgaggccgtgggagtgaaaaaaacagtgaagtacgaagctgccggagaagctgtcaagactctgaagaagacacaacccactgtgattaataatctgaaaaaaggcgctgtggaagacgtgatctctcgaaacgaaatccaaggtcgctcagcagaggaggcttacaaacaacagattaaggaagataatatcggtaatcagcttcttcgcaaaatggggtggacgggagggggtctgggcaagtctggggaaggcatccgcgaaccgatatccgtcaaagagcagcataagcgtgagggcctcggacttgacgttgaacgcgtcaataagatcgcaaagcgcgatattgagcagattatcagaaattatgcgagatcagaaagtcacacggatcttactttttccagggaactgacgaatgacgagcgcaagcagattcaccagatagctcagaaatacggcctgaaatccaaaagccacggcgtaggtcatgacaggtatctggttgtagggagaaagcgtcggaaagaagacctgttggatcagctgaagcaggaggggcaggtgggccactatgagttagtgatgcctcaggctaattag

SEQ ID NO: 325312 - DNA, 2073 bp, Artificial Sequence
  derived and/or modified sequence
atggagaagattctccagatggctgaaggaatcgacattggtgagatgccatcatatgacttagtcctttctaagcccagcaaaggacagaaaaggcatctgagtacttgcgacggccagaacccccctaagaagcaagcaggctcgaagttccacgcaagaccccgattcgagccggttcatttcgtggcgtctagctccaaagatgagcggcaagaggatccatacggaccccagacaaaagaagtcaatgagcagactcatttcgccagcatgcctagagacatctatcaggattacacccaggacagcttctctattcaggacggtaacagtcagtattgtgacagctccggatttatcctcactaaagaccagcccgtaaccgcaaacatgtacttcgatagcggcaaccccgctccaagcaccacgtctcagcaagctaattcccagtccactcccgagcctagtccttcccagactttccccgaatccgtcgtcgccgaaaaacaatacttcattgaaaagctgacagctacaatctggaaaaacctctccaaccctgaaatgacatcgggttcagacaagattaattacacgtatatgctcacaaggtgcatccaggcttgcaagacgaacccggaatacatctacgcccctctgaaagaaatcccaccagccgatattccaaaaaacaagaaattactcacggatggctacgcctgcgaggtgaggtgtcagaacatttaccttacgacaggctacgcaggatcaaagaacggttccagagacagggccaccgagcttgctgtgaagctgctacagaagcgcattgaagttagagtcgtgaggcggaaatttaaacatacctttggggaggatctggtcgtgtgccagatcggcatgagtagctacgagtttccccctgcccttaagcccccagaggacctggtggtgctgggcaaggacgcgtcaggacagcccattttcaatgcctctgctaaacattggaccaatttcgtaatcacagaaaacgcgaacgatgccatcggaatcctgaataacagcgcatctttcaacaagatgtcaatagaatacaaatacgagatgatgcccaacaggacatggcgttgtagggtgttcctccaggaccactgtctggccgagggatacgggacaaagaagactagcaagcatgctgcggctgacgaggcgctcaagattctccagaaaacccagcctacttatccttcagtcaaatctagtcagtgccacaccggctcctcgcctcggggtagtgggaagaagaaggacatcaaggatttggtggtttacgaaaacagtagcaatccagtgtgcaccttaaatgacaccgcccagttcaaccgcatgacagtcgagtacgtgtacgagcgaatgactgggctgcgttggaaatgcaaggtgatcctggagagcgaggtgatagccgaggctgtcggggttaaaaaaacagtgaaatacgaggctgccggtgaggccgtcaaaacgctgaagaagacgcagcctaccgtgattaacaacctcaaaaagggcgcagttgaagacgtgatcagcaggaatgaaattcagggccgttctgccgaagaagcatataaacagcagataaaggaagataacataggcaatcagctgctaagaaaaatgggatggaccggcggaggactcggtaagtcaggcgaggggatccgtgagcccattagtgtcaaagaacaacataagcgcgaaggcttgggcctcgatgtcgaaagagtgaataaaatcgccaaacgcgacattgagcaaataatacgcaattacgcacggtcagagtctcatacagatctcaccttcagtagagagctgacaaacgacgagcggaagcagatccaccagatcgcccagaagtacggtctcaagagcaaaagccatggcgtgggccatgaccggtatctggtggtcggtcgaaaaagacggaaggaggacctgctggaccagctgaagcaggagggccaggtcggacactacgaactcgtgatgccgcaggcaaattag

SEQ ID NO: 325313 - DNA, 2073 bp, Artificial Sequence
  derived and/or modified sequence
atggagaagatcctgcagatggccgagggcatcgacatcggcgagatgcccagctacgacctggtgctgagcaagcccagcaagggccagaagagacacctgagcacctgcgacggccagaacccccccaagaagcaggccggcagcaagttccacgccagacccagattcgagcccgtgcacttcgtggccagcagcagcaaggacgagagacaggaggacccctacggcccccagaccaaggaggtgaacgagcagacccacttcgccagcatgcccagagacatctaccaggactacacccaggacagcttcagcatccaggacggcaacagccagtactgcgacagcagcggcttcatcctgaccaaggaccagcccgtgaccgccaacatgtacttcgacagcggcaaccccgcccccagcaccaccagccagcaggccaacagccagagcacccccgagcccagccccagccagaccttccccgagagcgtggtggccgagaagcagtacttcatcgagaagctgaccgccaccatctggaagaacctgagcaaccccgagatgaccagcggcagcgacaagatcaactacacctacatgctgaccagatgcatccaggcctgcaagaccaaccccgagtacatctacgcccccctgaaggagatcccccccgccgacatccccaagaacaagaagctgctgaccgacggctacgcctgcgaggtgagatgccagaacatctacctgaccaccggctacgccggcagcaagaacggcagcagagacagagccaccgagctggccgtgaagctgctgcagaagagaatcgaggtgagagtggtgagaagaaagttcaagcacaccttcggcgaggacctggtggtgtgccagatcggcatgagcagctacgagttcccccccgccctgaagccccccgaggacctggtggtgctgggcaaggacgccagcggccagcccatcttcaacgccagcgccaagcactggaccaacttcgtgatcaccgagaacgccaacgacgccatcggcatcctgaacaacagcgccagcttcaacaagatgagcatcgagtacaagtacgagatgatgcccaacagaacctggagatgcagagtgttcctgcaggaccactgcctggccgagggctacggcaccaagaagaccagcaagcacgccgccgccgacgaggccctgaagatcctgcagaagacccagcccacctaccccagcgtgaagagcagccagtgccacaccggcagcagccccagaggcagcggcaagaagaaggacatcaaggacctggtggtgtacgagaacagcagcaaccccgtgtgcaccctgaacgacaccgcccagttcaacagaatgaccgtggagtacgtgtacgagagaatgaccggcctgagatggaagtgcaaggtgatcctggagagcgaggtgatcgccgaggccgtgggcgtgaagaagaccgtgaagtacgaggccgccggcgaggccgtgaagaccctgaagaagacccagcccaccgtgatcaacaacctgaagaagggcgccgtggaggacgtgatcagcagaaacgagatccagggcagaagcgccgaggaggcctacaagcagcagatcaaggaggacaacatcggcaaccagctgctgagaaagatgggctggaccggcggcggcctgggcaagagcggcgagggcatcagagagcccatcagcgtgaaggagcagcacaagagagagggcctgggcctggacgtggagagagtgaacaagatcgccaagagagacatcgagcagatcatcagaaactacgccagaagcgagagccacaccgacctgaccttcagcagagagctgaccaacgacgagagaaagcagatccaccagatcgcccagaagtacggcctgaagagcaagagccacggcgtgggccacgacagatacctggtggtgggcagaaagagaagaaaggaggacctgctggaccagctgaagcaggagggccaggtgggccactacgagctggtgatgccccaggccaactag

SEQ ID NO: 325314 - protein, 848 aa, Artificial Sequence
  derived and/or modified sequence
MPSILADVFCILDIETNCLEEKSKRDYFTQLVLACLYLVSDTVLKERLDPETLESLGLIKQSQQFNQKSVKIKTKLFYKQQKFNLLREENEGYAKLIAELGQDLSGSITSDLILENIKSLIGCFNLDPNRVLDVILEVFECRPEHDDFFISLLESYMSMCEPQTLCHILGFKFKFYQEPNGETPSSLYRVAAVLLQFNLIDLDDLYVHLLPADNCIMDEHKREIAEAKQIVRKLTMVVLSSEKMDEREKEKEKEEEKVEKPPDNQKLGLLEALLKIGDWQHAQNIMDQMPPYYAASHKLIALAICKLIHITIEPLYRRVGVPKGAKGSPVNALQNKRAPKQAESFEDLRRDVFNMFCYLGPHLSHDPILFAKVVRIGKSFMKEFQSDGSKQEDKEKTEVILSCLLSITDQVLLPSLSLMDCNACMSEELWGMFKTFPYQHRYRLYGQWKNETYNSHPLLVKVKAQTIDRAKYIMKRLTKENVKPSGRQIGKLSHSNPTILFDYVCFEILSQIQKYDNLITPVVDSLKYLTSLNYDVLAYCIIEALANPEKERMKHDDTTISSWLQSLASFCGAVFRKYPIDLAGLLQYVANQLKAGKSFDLLILKEVVQKMAGIEITEEMTMEQLEAMTGGEQLKAEGGYFGQIRNTKKSSQRLKDALLDHDLALPLCLLMAQQRNGVIFQEGGEKHLKLVGKLYDQCHDTLVQFGGFLASNLSTEDYIKRVPSIDVLCNEFHTPHDAAFFLSRPMYAHHISSKYDELKKSEKGSKQQHKVHKYITSCEMVMAPVHEAVVSLHVSKVWDDISPQFYATFWSLTMYDLAVPHTSYEREVNKLKVQMKAIDDNQEMIPPQ

SEQ ID NO: 325315 - protein, 189 aa, Artificial Sequence
  derived and/or modified sequence
  misc_feature (1)..(1): Xaa can be any naturally occurring amino acid
XEQKRRKIDTHPSPSHSSTVKDSLIELKESSAKLYINHTPPPLSKSKEREMDKKDLDKSRERSREREKKDEKDRKERKRDHSNNDREVPPDLTKRRKEENGTMGVSKHKSESPCESPYPNEKDKEKNKSKSSGKEKGSDSFKSEKMDKISSGGKKESRHDKEKIEKKEKRDSSGGKEEKKHHKSSDKHR

SEQ ID NO: 325316 - DNA, 2547 bp, Artificial Sequence
  derived and/or modified sequence
atgcccagcatcctggccgacgtgttctgcatcctggacatcgagaccaactgcctggaggagaagagcaagagagactacttcacccagctggtgctggcctgcctgtacctggtgagcgacaccgtgctgaaggagagactggaccccgagaccctggagagcctgggcctgatcaagcagagccagcagttcaaccagaagagcgtgaagatcaagaccaagctgttctacaagcagcagaagttcaacctgctgagagaggagaacgagggctacgccaagctgatcgccgagctgggccaggacctgagcggcagcatcaccagcgacctgatcctggagaacatcaagagcctgatcggctgcttcaacctggaccccaacagagtgctggacgtgatcctggaggtgttcgagtgcagacccgagcacgacgacttcttcatcagcctgctggagagctacatgagcatgtgcgagccccagaccctgtgccacatcctgggcttcaagttcaagttctaccaggagcccaacggcgagacccccagcagcctgtacagagtggccgccgtgctgctgcagttcaacctgatcgacctggacgacctgtacgtgcacctgctgcccgccgacaactgcatcatggacgagcacaagagagagatcgccgaggccaagcagatcgtgagaaagctgaccatggtggtgctgagcagcgagaagatggacgagagagagaaggagaaggagaaggaggaggagaaggtggagaagccccccgacaaccagaagctgggcctgctggaggccctgctgaagatcggcgactggcagcacgcccagaacatcatggaccagatgcccccctactacgccgccagccacaagctgatcgccctggccatctgcaagctgatccacatcaccatcgagcccctgtacagaagagtgggcgtgcccaagggcgccaagggcagccccgtgaacgccctgcagaacaagagagcccccaagcaggccgagagcttcgaggacctgagaagagacgtgttcaacatgttctgctacctgggcccccacctgagccacgaccccatcctgttcgccaaggtggtgagaatcggcaagagcttcatgaaggagttccagagcgacggcagcaagcaggaggacaaggagaagaccgaggtgatcctgagctgcctgctgagcatcaccgaccaggtgctgctgcccagcctgagcctgatggactgcaacgcctgcatgagcgaggagctgtggggcatgttcaagaccttcccctaccagcacagatacagactgtacggccagtggaagaacgagacctacaacagccaccccctgctggtgaaggtgaaggcccagaccatcgacagagccaagtacatcatgaagagactgaccaaggagaacgtgaagcccagcggcagacagatcggcaagctgagccacagcaaccccaccatcctgttcgactacgtgtgcttcgagatcctgagccagatccagaagtacgacaacctgatcacccccgtggtggacagcctgaagtacctgaccagcctgaactacgacgtgctggcctactgcatcatcgaggccctggccaaccccgagaaggagagaatgaagcacgacgacaccaccatcagcagctggctgcagagcctggccagcttctgcggcgccgtgttcagaaagtaccccatcgacctggccggcctgctgcagtacgtggccaaccagctgaaggccggcaagagcttcgacctgctgatcctgaaggaggtggtgcagaagatggccggcatcgagatcaccgaggagatgaccatggagcagctggaggccatgaccggcggcgagcagctgaaggccgagggcggctacttcggccagatcagaaacaccaagaagagcagccagagactgaaggacgccctgctggaccacgacctggccctgcccctgtgcctgctgatggcccagcagagaaacggcgtgatcttccaggagggcggcgagaagcacctgaagctggtgggcaagctgtacgaccagtgccacgacaccctggtgcagttcggcggcttcctggccagcaacctgagcaccgaggactacatcaagagagtgcccagcatcgacgtgctgtgcaacgagttccacaccccccacgacgccgccttcttcctgagcagacccatgtacgcccaccacatcagcagcaagtacgacgagctgaagaagagcgagaagggcagcaagcagcagcacaaggtgcacaagtacatcaccagctgcgagatggtgatggcccccgtgcacgaggccgtggtgagcctgcacgtgagcaaggtgtgggacgacatcagcccccagttctacgccaccttctggagcctgaccatgtacgacctggccgtgccccacaccagctacgagagagaggtgaacaagctgaaggtgcagatgaaggccatcgacgacaaccaggagatgatccccccccagtag

SEQ ID NO: 325317 - DNA, 570 bp, Artificial Sequence
  derived and/or modified sequence
tgagagcagaagagaagaaagatcgacacccaccccagccccagccacagcagcaccgtgaaggacagcctgatcgagctgaaggagagcagcgccaagctgtacatcaaccacacccccccccccctgagcaagagcaaggagagagagatggacaagaaggacctggacaagagcagagagagaagcagagagagagagaagaaggacgagaaggacagaaaggagagaaagagagaccacagcaacaacgacagagaggtgccccccgacctgaccaagagaagaaaggaggagaacggcaccatgggcgtgagcaagcacaagagcgagagcccctgcgagagcccctaccccaacgagaaggacaaggagaagaacaagagcaagagcagcggcaaggagaagggcagcgacagcttcaagagcgagaagatggacaagatcagcagcggcggcaagaaggagagcagacacgacaaggagaagatcgagaagaaggagaagagagacagcagcggcggcaaggaggagaagaagcaccacaagagcagcgacaagcacagatag

SEQ ID NO: 325318 - DNA, 2547 bp, Artificial Sequence
  derived and/or modified sequence
atgccttccatcctggccgacgtgttctgtattctagatattgagaccaactgtcttgaggagaaatcaaagagagattactttacacagctggtgctggcctgcctgtacctagtgagcgatactgtgctcaaggagcgactggatcccgagacactcgagagtctgggtttgattaaacagagccagcaatttaaccaaaagagtgtaaaaataaaaaccaaactgttttataagcaacaaaaattcaacctacttagggaggagaatgaagggtacgcaaaactgatagccgagctgggacaggacttaagcggaagcatcacctccgatctaatcttagaaaatatcaaaagcctgatagggtgttttaaccttgatccgaatcgcgttctggatgtcatccttgaggtctttgagtgtcgacccgaacacgatgatttcttcataagcctgctcgaatcatatatgtcaatgtgtgagccacaaactctatgccacatcttgggtttcaaattcaagttttaccaagagcctaacggagaaacccccagtagtctgtaccgtgtggcggctgtcctgttgcagttcaatctcattgatctagatgacctgtatgtccacctgcttcctgccgataactgtatcatggatgagcacaagagggagattgctgaagctaagcagatagtccgcaaactaaccatggtggttctgtcctctgaaaaaatggatgagcgcgagaaagaaaaggagaaggaggaggaaaaagtagaaaaaccacctgacaaccagaagttgggcttgctggaagctctactaaaaatcggcgactggcagcatgcccagaacatcatggaccagatgccaccctactatgctgcctctcataaactcatcgccttagccatttgcaagctcattcacatcacgatcgaaccgctctatagaagagttggggttcccaaaggggccaaggggtcccctgttaatgccctgcagaataaaagagcaccaaagcaggctgagagttttgaagatttgcggagagacgtgtttaacatgttttgttatctcggtccgcatctctcccatgatccaatcctgtttgcaaaggtcgtgagaatcggtaagtcctttatgaaagaattccaatctgatgggtctaagcaggaagacaaggaaaagaccgaagttatactctcttgtctcctgtccataaccgaccaagtcctactgccttctttgagcctcatggactgtaatgcatgtatgagtgaggagctgtggggcatgtttaaaacttttccctaccagcaccgctatagactttacggccagtggaagaacgagacctacaattcgcacccgctgctcgtcaaggtgaaggcccagacaatcgaccgggctaagtacatcatgaaacggctaacaaaagaaaacgtgaaacccagcggacgccaaattggcaagctcagtcactccaatcctacgatcctctttgactacgtctgctttgagatcctgagtcaaatccagaaatacgataacttgatcacccccgtggtggatagccttaaatacttgaccagcctcaattacgacgtgctcgcttattgcatcattgaggccctggccaatccagagaaagagaggatgaagcacgacgacacgaccatttcaagttggctccaatccctggcttccttttgtggggctgtctttcgtaagtatccgattgacctggccggactgctgcagtacgtcgccaaccagttgaaggccgggaaatcattcgatctgttgatcctgaaggaggtggtgcaaaagatggccggaatcgagataacggaagaaatgacaatggaacaactcgaagccatgaccggtggggagcagctaaaggccgagggtggctatttcggccagatacggaatacaaaaaagagctcccaaaggctgaaggatgctctgctcgaccatgacttagcactcccgctgtgccttctgatggctcagcagaggaacggagtgattttccaggaaggcggagaaaagcacctgaagttagttggtaagctttacgaccagtgccacgacacgctggtacagtttggcgggtttcttgctagcaacctaagcactgaagactacatcaagcgagtgccatccattgacgtactctgcaacgagttccatacccctcacgacgctgccttttttcttagccggcccatgtatgcgcaccatatcagctcgaaatatgacgagctgaagaagtcagagaaaggttccaagcagcagcacaaggtgcataagtatatcacgagctgcgaaatggtcatggcccccgtccacgaggctgtggtgtcactccatgtcagcaaagtttgggacgatatctccccgcaattctacgcaaccttctggagcctcacgatgtacgatcttgccgtgccccacacatcctatgagcgggaagtgaacaagctcaaggtgcagatgaaagctattgacgataatcaggagatgatcccccctcaatag

SEQ ID NO: 325319 - DNA, 570 bp, Artificial Sequence
  derived and/or modified sequence
taagaacagaaacggcgaaagattgacacacatccttccccgtcccactcaagcaccgttaaagactctctgatcgaactcaaggaatcctccgcaaaactttatatcaaccacaccccgccaccactgagtaagtcaaaagaacgcgaaatggacaagaaggacctggacaagagcagggagaggtcaagggaacgggaaaaaaaggacgagaaggacagaaaagagagaaaacgggaccattctaataacgatcgtgaggtaccacccgatctgacaaagcggaggaaggaggaaaacggtaccatgggggtgtcgaaacataagagcgagagcccctgtgagtcgccctaccctaacgagaaggacaaggagaaaaacaaatccaaatcatctggcaaggagaaggggtctgactcctttaaaagtgaaaaaatggacaagatcagcagtggtgggaagaaagaaagcaggcacgataaggaaaaaatcgaaaagaaggagaaacgcgactcgtctggcggtaaagaagaaaagaagcaccataagagttctgataagcacaggtag

SEQ ID NO: 325320 - DNA, 2547 bp, Artificial Sequence
  derived and/or modified sequence
atgcccagcatcctggctgatgtgttctgcatcctggacatcgagaccaactgcctggaggagaagagcaagagggactacttcacccagctggtgctggcctgcctgtacctggtgtctgacacagtgctgaaggagcggctggaccctgagaccctggagagcctgggcctcatcaagcagagccagcagttcaaccagaagtctgtgaagatcaagaccaagctgttctacaagcagcagaagttcaacctgctgcgggaggagaatgaaggctacgccaagctgattgctgagctgggccaggacctgagcggcagcatcaccagtgacctgatcctggagaacatcaagagcctgattggctgcttcaacctggaccccaacagagtgctggatgtgatcctggaggtgtttgagtgcaggcctgagcatgatgacttcttcatcagcctgctggagagctacatgtccatgtgtgagccccagaccctgtgccacatcctgggcttcaagttcaagttctaccaggagcccaacggggagacccccagcagcctgtacagagtggccgctgtgctgctgcagttcaacctgattgacctggatgacctgtatgtgcacctgctgcctgctgacaactgcatcatggatgagcacaagcgggagattgctgaggccaagcagatcgtgaggaagctgaccatggtggtgctgagcagcgagaagatggatgagcgggagaaggagaaggagaaggaggaggagaaggtggagaagcccccagacaaccagaagctgggcctgctggaggccctgctgaagatcggggactggcagcacgcccagaacatcatggaccagatgccaccctactatgctgccagccacaagctgattgccctggccatctgcaagctgatccacatcaccatcgagcccctgtacagaagagtgggcgtgcccaagggggccaagggcagccctgtgaatgccctgcagaacaagagggcccccaagcaggccgagagctttgaggacctgcggagagatgtgttcaacatgttctgctacctgggcccccacctgagccatgaccccatcctgtttgccaaggtggtgcgcatcggcaagagcttcatgaaggagttccagagtgatggcagcaagcaggaggacaaggagaagacagaggtgatcctgagctgcctgctgagcatcacagaccaggtgctgctgcccagcctgagcctgatggactgcaatgcctgcatgtctgaggagctgtggggcatgttcaagaccttcccctaccagcaccgctaccgcctgtatggccagtggaagaatgagacctacaacagccaccccctgctggtgaaggtgaaggcccagaccatcgaccgggccaagtacatcatgaagaggctgaccaaggaaaatgtgaagcccagcggccggcagatcggcaagctgagccacagcaaccccaccatcctgtttgattatgtgtgctttgagatcctgagccagatccagaagtatgacaacctgatcacccctgtggtggacagcctgaagtacctgaccagcctgaactatgatgtgctggcctactgcatcatcgaggccctggccaaccctgagaaggagaggatgaagcatgatgacaccaccatcagctcctggctgcagagcctggccagcttctgtggggctgtgttcaggaagtaccccatcgacctggccggcctgctgcagtatgtggccaaccagctgaaggccggcaagagctttgacctgctgatcctgaaggaggtggtgcagaagatggccggcatcgagatcacagaggagatgaccatggagcagctggaggccatgactggaggagagcagctgaaggccgagggcggctacttcggccagatccggaacaccaagaagagcagccagaggctgaaggatgccctgctggaccatgacctggccctgcccctgtgcctgctgatggcccagcagagaaatggagtcatcttccaggagggcggggagaagcacctgaagctggtgggcaagctgtatgaccagtgccacgacaccctggtgcagtttggaggcttcctggccagcaacctgagcacagaggactacatcaagagggtgcccagcattgatgtgctgtgcaatgagttccacacccctcatgatgctgccttcttcctgagccggcccatgtatgcccaccacatcagcagcaaatatgatgagctgaagaagtctgagaagggcagcaagcagcagcacaaggtgcacaagtacatcaccagctgtgagatggtgatggcccctgtgcatgaggccgtggtgtccctgcacgtgtccaaggtgtgggatgacatcagcccccagttctacgccaccttctggagcctgaccatgtatgacctggccgtgccccacaccagctatgaaagagaggtgaacaagctgaaggtgcagatgaaggccattgatgacaaccaggagatgatccccccccagtag

SEQ ID NO: 325321 - DNA, 570 bp, Artificial Sequence
  derived and/or modified sequence
tgagagcagaagaggaggaagattgacacccaccccagccccagccacagcagcacagtgaaggacagcctgattgagctgaaggagagcagcgccaagctgtacatcaaccacaccccaccacccctgagcaagagcaaggagcgggagatggacaagaaggacctggacaagagccgggagaggagccgggagcgggagaagaaggatgagaaggacaggaaggagaggaagagggaccacagcaacaatgaccgggaggtgcccccagacctgaccaagaggaggaaggaggagaatggcaccatgggcgtgtccaagcacaagtctgagagcccctgtgagagcccctacccaaatgagaaggacaaggagaagaacaagagcaagagcagcggcaaggagaagggcagtgacagcttcaagtctgagaagatggacaagatcagcagcggcggcaagaaggagagcagacatgacaaggagaagattgagaagaaggagaagagggacagcagcggcggcaaggaggagaagaagcaccacaagagcagtgacaagcacaggtag

SEQ ID NO: 325322 - DNA, 2547 bp, Artificial Sequence
  derived and/or modified sequence
atgcccagcatcctggccgacgtgttctgcatcctggacatcgagaccaattgtctagaggagaagtctaaacgcgattattttacacagttagtactcgcctgtctgtatctcgtgagtgacaccgtgttgaaagagaggctggatccagaaacattagaaagccttggcttaattaagcaaagccagcagtttaatcagaagtcagtgaagattaagacgaagctgttttacaaacaacagaagttcaatttgttgcgtgaagagaacgagggatatgctaaactcattgctgagttaggacaggacttatctgggagtatcacatcagaccttatcctggagaacataaaatcattgattggctgctttaacctcgatcctaaccgggtgctagatgtgattctggaagtgtttgagtgtagaccagagcacgacgatttcttcatatccctgctggagtcttacatgagtatgtgtgagccccagaccttatgtcatatactggggtttaaattcaagttttatcaggagcctaacggtgagacgccctccagcctctaccgggtcgcggcagtgcttcttcagttcaatctgatcgatctggatgacttatacgttcatttactgccagctgacaattgcattatggacgagcataagcgggagattgcagaagccaagcagatcgtcagaaagctgactatggtggtgctgtcctcggagaaaatggatgaacgcgaaaaagagaaagagaaggaggaggagaaagtcgagaagccccctgataatcaaaagctagggcttttggaagcccttttaaaaatcggggattggcagcatgcccagaatattatggaccaaatgccaccctattatgccgcctcacataagctgattgcactcgcgatttgcaagctgatacacattacaatcgagccactgtataggcgcgtaggcgtaccgaagggagctaaggggtctcctgtgaatgctctccaaaataaaagggcaccgaagcaagccgagtcctttgaggatctccggcgcgacgtattcaacatgttttgctatctggggccccacctttcccacgaccctatattatttgccaaggttgttagaatcggtaaatctttcatgaaagagttccaatcagacggcagcaagcaggaagacaaagaaaagacagaagtgatactgtcatgcctactctctatcactgatcaagtgctgctgccttccctgtccctgatggactgtaacgcttgtatgtccgaggagctgtggggaatgttcaagaccttcccatatcagcatcgttataggctttacggccaatggaagaacgaaacgtataatagtcatcccttattggtgaaggtgaaggcccaaaccattgatcgcgccaaatatatcatgaagcgtctgacaaaggaaaatgtcaaacccagtggacgccaaattggaaaactgtcccactccaatcctacaattctgttcgactacgtctgtttcgagatcctgagccaaatccagaagtatgacaacctcatcacccccgttgtcgactcattgaaatacctgactagcctgaattacgacgtgctcgcttattgtattattgaagccttggccaatccagaaaaggaacgaatgaagcacgatgataccactatctctagctggctccagtctctggcatcattttgtggtgcagtgtttcgcaaatacccgatcgatctggccggcctactacaatatgtggccaaccagctgaaagccggtaagagcttcgatctgcttattctcaaagaagtcgttcagaaaatggcgggcattgagataacggaggaaatgaccatggaacagctggaagccatgactggcggggaacagttaaaagccgagggggggtattttggtcagatccgcaacaccaagaagtcctctcagcggttaaaagacgctcttctggaccatgatctggcgctcccgctttgtctcctgatggcgcagcagcgcaacggcgtcatatttcaggagggaggggagaagcatctcaagttggtgggaaagctttatgatcagtgccatgacactctggttcagttcgggggatttctagcttccaacttgtcaaccgaagactatattaagagagtcccatctatcgacgtactgtgcaatgagttccacacccctcacgacgccgctttctttctgtccaggccaatgtacgcccaccatatttcctcgaaatacgacgagctgaagaagtcagaaaaagggagtaagcagcagcataaggttcataaatatattacaagctgcgagatggtaatggcaccggtccacgaggctgtggttagcctgcacgtaagcaaagtatgggacgacatttcccctcagttctatgctactttctggtctttgaccatgtatgacctggccgtaccccatacatcttacgaacgggaggtcaacaagctcaaggtgcagatgaaagcaatcgatgacaaccaggaaatgatccccccgcagtag

SEQ ID NO: 325323 - DNA, 570 bp, Artificial Sequence
  derived and/or modified sequence
tgagagcagaagcggcggaagatcgacacccaccccagccccagccatagttccaccgtaaaggattctctgatcgagctgaaggagtcttcggccaagctgtatattaaccacacccccccacctttgagtaagtctaaggagagggaaatggacaaaaaagaccttgacaaaagcagggagcgaagtagggaaagagaaaaaaaagatgagaaagatcgaaaggagagaaagcgagatcactccaacaacgatcgggaggtgcctcccgaccttacaaaaaggaggaaggaagaaaacggaaccatgggcgtcagcaagcataaatctgagtcgccttgtgaaagtccatatccaaacgaaaaggataaggaaaagaacaaaagcaaatcgtcgggcaaagaaaagggttccgacagctttaagagtgagaagatggacaagatcagcagcggaggcaaaaaggagtctcgccacgataaggagaaaatcgagaagaaggagaaacgagattctagcggcggcaaggaggagaaaaaacaccacaaatcatccgacaaacatcggtag

SEQ ID NO: 325324 - DNA, 2547 bp, Artificial Sequence
  derived and/or modified sequence
atgccaagtatccttgccgatgtcttttgtatcctcgacatcgagaccaactgtttggaggagaagtctaaaagggattactttacccagctggtgcttgcttgcttgtacctcgtctcagataccgtcctaaaagaaagactggaccctgagaccctggaatccctgggcttgatcaaacagtcacagcagttcaatcagaagagtgtgaagatcaagactaaactattttacaaacagcagaagtttaatctccttagggaggagaacgagggatacgccaaactcattgcagagctgggccaagacctttctggaagtatcacttccgatctcattctcgaaaatatcaagtccttaattggctgttttaatctagatcccaaccgggtgcttgacgtgatcctcgaggtgttcgaatgcagacccgagcacgacgacttctttatcagcctgctggagtcgtacatgtctatgtgtgagcctcaaacactgtgtcatattctcgggttcaagtttaagttctaccaggagccgaatggggagacccctagtagcctgtatagagttgctgcagtactgctgcagttcaatcttatcgacctagacgatctctatgtgcatctgctccccgcagataactgcatcatggacgaacataagcgggagattgcagaggccaagcagatcgtgagaaaactgaccatggttgtcctctctagcgagaagatggacgagcgcgaaaaagagaaggagaaggaggaggagaaggtggagaagccaccggacaatcagaagctcggtctgcttgaggccttattaaagattggtgactggcagcatgcccagaacatcatggaccaaatgcccccatattatgccgcaagccataagctgattgcattggcaatttgtaaactgatccacatcactattgaacccttatatcgcagagtgggcgtacccaagggggctaagggctctcccgttaatgcattgcagaacaaaagagctcctaagcaagctgaatccttcgaagatctgagaagggacgtctttaatatgttttgttaccttgggccacacttgagccatgatcccattttgttcgccaaggtcgtgagaattggcaagagttttatgaaagaatttcagtcagacgggagtaaacaggaggataaagagaaaaccgaagtgattctttcttgtcttctgtccataacggaccaggtactcctgccctcactcagcctcatggattgcaatgcttgtatgagcgaagaattgtggggcatgttcaagaccttcccataccagcaccggtatagactatacggccagtggaaaaacgaaacctacaattctcaccctctgcttgttaaagtgaaggcccagacaattgaccgggctaaatatatcatgaagcggctgactaaggagaacgtgaagccatctgggagacagatcgggaagctgagccactctaacccgacaatactgtttgattatgtctgcttcgagatactgtcccagattcagaaatacgataaccttatcacccctgtcgtggattcccttaaatatctgacctctctgaattacgatgtgttagcgtactgtattatcgaggctctcgcaaaccctgagaaagagcggatgaaacacgacgataccacaatctcgtcctggctccagtccctggcaagcttctgcggagccgtgttccgcaagtatcctattgatctggcaggccttctgcaatatgttgctaatcagctcaaggccggtaagagttttgatctgctcatactgaaggaggtagttcaaaaaatggcgggaatcgaaatcaccgaggagatgaccatggaacaattagaggccatgacaggcggtgaacagctcaaagccgaaggtggctactttggacagatccggaacacgaaaaagagctcccagagactgaaagatgccttactggaccacgaccttgcgcttccgctttgtctgttgatggctcagcagcggaacggtgttatatttcaggaaggcggtgaaaagcatctgaaattagttggtaagctgtacgatcagtgtcatgatactttggtgcagtttgggggatttctggcctcaaacttatcaacggaagactatattaagcgcgttccgtccattgatgtactctgcaacgaatttcacaccccccatgacgctgcatttttcctgtctaggccgatgtatgcccaccacatctcctctaagtacgacgagcttaagaagagcgagaagggttctaaacagcagcacaaggtacataagtatattacttcctgcgaaatggtgatggcacccgtgcacgaggctgttgtttcccttcacgtgagcaaagtttgggacgacatcagtcctcagttctacgccacattctggagcctgactatgtacgacctagctgtgcctcacacgagctatgagcgagaagtaaataagctaaaggtccaaatgaaggccatcgacgacaatcaggaaatgatcccccctcagtag

SEQ ID NO: 325325 - DNA, 570 bp, Artificial Sequence
  derived and/or modified sequence
taagagcagaaacggcgtaagatcgatacacacccatctccaagccattcatcaacagtcaaagattcactaattgagctcaaagagtctagtgccaaactttacatcaatcacacgccacctcccctctccaaatccaaggagagagagatggataagaaggacttagataaaagtcgggagcggagcagagagagagagaagaaggacgagaaggaccggaaagaaaggaagagagaccactccaacaacgaccgggaggtccctccagatttaactaagcggaggaaagaggaaaacgggaccatgggtgtttctaaacataagtctgaatcaccctgtgaatccccttatcctaatgagaaggacaaagagaaaaataagagtaagtcctccggaaaggaaaaagggagtgattcatttaaatccgaaaagatggacaagatcagttctggtggtaagaaagaatctcgacacgataaggagaagatagagaagaaggagaaacgcgatagctcaggtggcaaggaagaaaagaagcaccacaaatccagcgacaaacacagatag

SEQ ID NO: 325326 - DNA, 2816 bp, Artificial Sequence
  derived and/or modified sequence
acatccgggcttctgctactagtgagaggaagatggcggccgcggctgtggtggttcccgcagagtggataaagaactgggagaaatcagggagaggcgaatttttgcatttatgtcggatcctcagtgaaaataaaagccatgatagttcaacatacagagatttccagcaagctctctatgagttgtcatatcatgtaattaaaggaaatctaaagcatgaacaggcatctaatgttcttagtgacattagtgaatttcgtgaggatatgccctccattcttgctgatgtattctgcatattagacattgagacaaattgtttagaagaaaaaagcaagagagactattttacacagttggtattagcatgtttgtatttagtttcagacacagttctaaaggaacgcctggatccagaaacactggaatcattagggcttatcaaacaatcacagcaattcaatcaaaagtcagttaaaatcaagacaaaactcttttataagcagcaaaaattcaatttgttaagagaagagaatgaaggttatgccaagctgattgctgaattggggcaagatttatctggaagtattactagtgatttaatcttagaaaatatcaaatctttaataggatgctttaatctggatcccaatagagttttggatgtcattttagaagtgtttgaatgcaggccagaacacgatgacttctttatatctttgttagaatcttacatgagtatgtgtgaaccgcaaacactgtgtcatattcttgggttcaaattcaagttttaccaggaaccaaatggcgagacaccatcatctttatacagagttgcagcagtacttctacaatttaatcttattgatttagatgatctttatgtacatcttcttccggctgataattgcattatggatgaacacaaacgagaaattgcggaagctaagcaaattgttagaaagcttacgatggttgtgttgtcttctgaaaaaatggatgagcgagagaaagaaaaggaaaaagaagaggagaaagtagagaaaccacctgataaccaaaaacttggcttgttggaagccttattaaagattggtgattggcaacatgcacagaacattatggatcagatgcctccatactatgcagcttcacacaagctaatagcccttgctatttgcaagctcattcatataactattgagcctctctaccgaagagttggagttcctaaaggtgctaaaggctcacctgttaatgctttgcaaaacaagagagcaccaaaacaagctgagagctttgaagatttgaggagagacgtgttcaatatgttctgttaccttggtcctcacctttctcacgatcccattttatttgcaaaagtggtgcgcataggcaagtcatttatgaaggagtttcagtctgatggaagcaaacaagaagataaagaaaaaacggaagttatccttagctgtttgcttagcattactgaccaggtactacttccatctctttctttgatggactgcaatgcttgtatgtctgaggaactatggggaatgtttaaaacatttccatatcagcatagatatcgtctgtatggccagtggaagaatgaaacttataacagtcacccacttttagtaaaagttaaagctcaaacaatagacagagccaaatatatcatgaagcgcctaaccaaggaaaatgtgaagccttctggaagacaaattgggaagttgagccacagcaatccaaccattttgtttgattatgtatgttttgagatcttgtcacaaatacagaagtatgataacttaataacacctgtagtagattcattgaaatacctcacttcactgaattatgatgtcttggcctattgtatcattgaagctttagctaatccagaaaaggaaagaatgaaacatgatgacacaaccatctcaagctggcttcagagtctggctagtttctgtggtgcagtttttcgtaaatatccaattgatcttgctggtcttcttcagtatgttgccaatcagctaaaggcgggcaaaagttttgacctgcttatattgaaagaagtggtacaaaaaatggcaggaatagaaattacagaggaaatgacaatggagcaactagaggctatgactggtggagagcagctaaaagctgagggtggttattttggtcagatcagaaacactaaaaaatcctctcagagattaaaggatgctctattggaccatgatcttgcccttcctctctgtctgcttatggctcagcagagaaatggggtaatctttcaggaaggtggagagaaacatttgaaacttgtgggaaagctctatgaccagtgtcatgataccctggtgcagtttggtgggtttttagcatctaatctgagcacagaagattatataaagcgagtgccttcaattgatgtactctgtaatgaatttcatacaccccatgatgcagcatttttcctgtctaggccaatgtatgcccatcatatttcgtcaaagtatgatgaacttaaaaaatcagaaaagggaagtaaacagcaacataaagttcataagtacattacatcatgtgagatggtgatggcgcctgtccatgaagcagtggtctccttacatgtttccaaagtctgggatgacatcagccctcaattctatgctacattctggtcattgacaatgtatgaccttgcagttccacacaccagctatgaacgagaagtcaataaacttaaagtccagatgaaagcaattgatgacaatcaggaaatgattcctccacagtaa

SEQ ID NO: 325327 - protein, 234 aa, Artificial Sequence
  derived and/or modified sequence
MIDPDFADKPKLPENYTDETWQKLKEAVEAIQNSTSIKYNLEELYQAVENLCSYKISANLYKQLRQICEDHIKAQIHQFREDSLDSVLFLKKIDRCWQNHCRQMIMIRSIFLFLDRTYVLQNSMLPSIWDMGLELFRAHIISDQKVQNKTIDGILLLIERERNGEAIDRSLLRSLLSMLSDLQIYQDSFEQRFLEETNRLYAAEGQKLMQEREVPEYLHHVNKRLEEEADRLIT

SEQ ID NO: 325328 - DNA, 705 bp, Artificial Sequence
  derived and/or modified sequence
atgattgatccagacttcgcggataagcccaaactgcccgagaactacaccgatgaaacctggcaaaagcttaaggaggctgttgaggctattcagaatagcacatcaattaagtataacctcgaggagttatatcaggctgttgagaatctgtgtagctacaagatctccgctaacctgtacaaacagctgaggcagatctgtgaagaccatataaaagctcaaatccatcagtttagagaggactcccttgactcagtgttgtttctcaagaagatcgataggtgctggcagaaccattgtaggcagatgatcatgattcgctccatttttctcttcttggatcgcacatacgtcctgcaaaactctatgctgccgagcatatgggatatgggtctcgagttgtttcgagctcacatcatctccgatcaaaaagtgcagaacaagacaatagacggtattctgctgctgatcgagagagaacgtaacggggaagcaattgacaggagtctgttacggtcactccttagtatgctgtcagacctgcaaatctaccaggattcgtttgagcagcgctttcttgaggagaccaaccgactgtacgctgccgagggtcagaagttaatgcaggagcgggaggtccccgagtatttacatcacgtgaataaaagactggaagaggaggcagataggctcataacatag

SEQ ID NO: 325329 - DNA, 705 bp, Artificial Sequence
  derived and/or modified sequence
atgattgatcctgactttgctgacaagcccaagctgcctgagaactacacagatgagacctggcagaagctgaaggaggccgtggaggccatccagaacagcaccagcatcaagtacaacctggaggagctgtaccaggccgtggagaacctgtgcagctacaagatcagcgccaacctgtacaagcagctgcggcagatctgtgaggaccacatcaaggcccagatccaccagttccgggaggacagcctggacagcgtgctcttcctgaagaagattgaccgctgctggcagaaccactgccggcagatgatcatgatccgcagcatcttcctgttcctggacaggacctacgtgctgcagaacagcatgctgcccagcatctgggacatgggcctggagctgttccgggcccacatcatcagtgaccagaaggtgcagaacaagaccattgatggcatcctgctgctgattgaaagagaaagaaatggagaggccatcgacaggagcctgctgcggagcctgctgtccatgctgagtgacctgcagatctaccaggacagctttgagcagcgcttcctggaggagaccaaccggctgtatgctgctgagggccagaagctgatgcaggagcgggaggtgcctgagtacctgcaccacgtgaacaagaggctggaggaggaggccgacaggctcatcacctag

SEQ ID NO: 325330 - DNA, 705 bp, Artificial Sequence
  derived and/or modified sequence
atgatcgaccccgacttcgccgacaagcccaagctgcccgagaactacaccgacgagacctggcaaaaactgaaagaagccgtcgaggcaatccagaattctacctccatcaagtacaatttagaagagctttaccaagccgtcgaaaacctttgctcttataaaatctcggcgaacctgtacaagcagttaagacagatatgcgaggaccacataaaagcccagatccaccaatttagagaggactcccttgattccgtgctcttcttaaagaagatagatcggtgctggcaaaatcactgtcggcagatgatcatgattaggtccattttcctgttcctagaccgcacctacgtattacagaattctatgctgccctctatatgggacatgggtctggaactgtttcgggcacacattatttccgatcagaaagtccaaaacaagacgatagatggcattctgttgctgatcgagagggaaagaaatggtgaggccatagatcgctccctactgcgttcattattgtctatgttgagtgacctgcaaatctaccaagattccttcgagcaacgattcttggaggaaacaaatcggctctatgctgcggaaggacagaagctgatgcaggagagagaggttcccgaatatcttcatcacgtgaacaaaagactggaagaagaggccgaccgtctgatcacatag

SEQ ID NO: 325331 - DNA, 705 bp, Artificial Sequence
  derived and/or modified sequence
atgatagacccagactttgctgacaaacctaaactccctgagaattacacggacgagacctggcagaagctcaaggaggccgtagaagctatccagaattctacatccatcaaatataaccttgaggagttataccaggcagtggagaacctgtgttcttataagatctccgccaacttatataagcagctgcgccagatatgcgaagatcatattaaggcccaaatccatcagttccgggaggacagtctcgacagcgtcttgttcctcaaaaagatcgatcgatgttggcagaaccattgcaggcagatgataatgatccgctccatctttctcttccttgaccgcacctatgtactacagaattcaatgttgcccagcatctgggatatgggacttgagcttttcagggctcacatcattagtgatcagaaggtgcaaaataagaccatcgacggcattctgctactgatcgaacgcgagaggaatggggaggcaatagacagatctctactgcgttcgctgctgtcgatgttgtccgatcttcaaatataccaggactcttttgagcagcgtttcctggaagagacaaatcgcctatacgcagccgaagggcagaaattgatgcaggagcgcgaggtgccagaatatctccaccacgttaacaagcgtctcgaagaagaggctgaccgtcttataacctag

SEQ ID NO: 325332 - DNA, 846 bp, Artificial Sequence
  derived and/or modified sequence
cttttttggtggagggttcattttccgggggtggttaggatccttgtgctgaagcatacaccgggtgtttctgtgcagtattttgaggtctttttcaacctattgtatttaatctgttattccttataacactgacaatcggtatgattgatccggattttgcagataagcctaaattaccagaaaactacacagatgaaacctggcaaaaactgaaagaagcagtggaagctattcagaatagtacttcaattaagtacaatttagaagaactctaccaggctgtagaaaatctctgttcttacaagatttctgcaaacttgtacaaacagctgagacagatctgcgaagatcacatcaaagcacagattcatcaattcagagaggattcattggatagcgttctttttttaaagaagattgatagatgctggcaaaaccattgcagacaaatgatcatgatcaggagcatttttttgtttctggatagaacttacgttcttcagaattcaatgctaccctccatttgggacatgggactggagttatttagggctcatattataagtgatcagaaagtgcagaataagacaattgatggcattcttctcttgattgagagggaaaggaatggtgaagcaattgatagaagtttacttcgaagccttttaagcatgctgtctgatttgcaaatttatcaagattcttttgaacaacgatttttggaagaaactaaccggctctatgcagctgaaggccaaaaattaatgcaagaaagagaggttcctgaatatctacatcatgttaacaaacgtctagaagaagaagcagacagacttattactt

SEQ ID NO: 325333 - DNA, 705 bp, Artificial Sequence
  derived and/or modified sequence
atgatcgaccccgacttcgccgacaagcccaagctgcccgagaactacaccgacgagacctggcagaagctgaaggaggccgtggaggccatccagaacagcaccagcatcaagtacaacctggaggagctgtaccaggccgtggagaacctgtgcagctacaagatcagcgccaacctgtacaagcagctgagacagatctgcgaggaccacatcaaggcccagatccaccagttcagagaggacagcctggacagcgtgctgttcctgaagaagatcgacagatgctggcagaaccactgcagacagatgatcatgatcagaagcatcttcctgttcctggacagaacctacgtgctgcagaacagcatgctgcccagcatctgggacatgggcctggagctgttcagagcccacatcatcagcgaccagaaggtgcagaacaagaccatcgacggcatcctgctgctgatcgagagagagagaaacggcgaggccatcgacagaagcctgctgagaagcctgctgagcatgctgagcgacctgcagatctaccaggacagcttcgagcagagattcctggaggagaccaacagactgtacgccgccgagggccagaagctgatgcaggagagagaggtgcccgagtacctgcaccacgtgaacaagagactggaggaggaggccgacagactgatcacctag

SEQ ID NO: 325334 - protein, 205 aa, Artificial Sequence
  derived and/or modified sequence
MSGLNWKPFVYGGLASIVAEFGTFPVDLTKTRLQVQGQSIDARFKEIKYRGMFHALFRICKEEGVLALYSGIAPALLRQASYGTIKIGIYQSLKRLFVERLEDETLLINMICGVVSGVISSTIANPTDVLKIRMQAQGSLFQGSMIGSFIDIYQQEGTRGLWRGVVPTAQRAAIVVGVELPVYDITKKHLILSGMMGDTILTHFV

SEQ ID NO: 325335 - protein, 276 aa, Artificial Sequence
  derived and/or modified sequence
MLFLFAVIVLQYVCPGTECQLLRLQAFSSPVPDPYRSEDESSARFVPRYNFTRGDLLRKVDFDIKGDDLIVFLHIQKTGGTTFGRHLVRNIQLEQPCECRVGQKKCTCHRPGKRETWLFSRFSTGWSCGLHADWTELTSCVPSVVDGKRDARLRPSRWRIFQILDAASKDKRGSPNTNAGANSPSSTKTRNTSKSGKNFHYITILRDPVSRYLSEWRHVQRGATWKASLHVCDGRPPTSEELPSCYTGDDWSGCPLKEFMDCPYNLANNRCACSPT

SEQ ID NO: 325336 - DNA, 831 bp, Artificial Sequence
  derived and/or modified sequence
atgctcttcctgtttgccgtgatcgtactacagtacgtgtgtcctggaactgagtgccaactactccggttgcaagccttctcgtccccagttcccgatccataccgaagcgaagacgagtcatcagcgcggtttgtgccaaggtacaatttcaccaggggcgacctgctccgaaaagtcgattttgacattaaaggcgatgatcttatagtgttcctgcatattcaaaagaccggagggacaaccttcggtagacacctggtgcgcaacattcagctcgagcagccatgcgaatgccgcgttggtcagaagaagtgcacctgtcaccgacctgggaagcgggagacctggctcttctctaggttctcgaccgggtggtcctgtggccttcacgcagactggactgagctgactagttgtgtgccatctgttgttgacggtaaaagggacgccaggcttcgcccgtcccgctggcgaatattccagattctggacgccgcgtctaaggataagaggggttcaccgaacactaacgctggagcgaattccccatcaagtaccaagactcgcaataccagtaaatcagggaaaaattttcattatataactattctgagagatcctgtatccagatatctgtctgaatggcggcatgtccagaggggcgctacctggaaggccagtctgcatgtgtgcgacggcagaccccctacatccgaagaactcccgtcctgctatacaggggatgactggagtggatgccctcttaaggagttcatggattgcccctataacctggctaacaaccggtgtgcctgcagccccacttag

SEQ ID NO: 325337 - DNA, 1389 bp, Artificial Sequence
  derived and/or modified sequence
atggacgagaagtcaaataagctactgctggctctggtcatgttgttcttgtttgcggtgattgtactacaatatgtgtgtccggggactgagtgccagcttctgcggctgcaagcatttagctctccggtgcctgatccgtacaggtcagaagacgagagctccgcaagattcgtgcccaggtataattttaccaggggggacctgttaaggaaagtagactttgacataaagggagatgacctgatcgtgttcctgcacatccagaagaccggcgggaccaccttcggtcgacacctcgtgcgtaatattcagttagaacagccttgcgagtgccgcgtgggacagaagaagtgcacttgtcacagaccaggcaagcgggaaacgtggctctttagccgattttcaacaggatggtcctgcggcttacatgcagattggaccgagctcaccagctgcgtcccttctgtggtggacggaaagagggacgcacgtcttcgcccttctcgctggaggattttccagatactagatgcggcatctaaggacaagcgtgggtctcctaataccaacgccggcgcgaactcgccctcctccaccaaaacaagaaacacaagcaagtcgggcaaaaacttccactacatcacaattctgagagaccccgtctctcgctacctcagcgagtggcgtcacgtgcagaggggggccacatggaaagcctcgctgcacgtctgtgacgggcggcctccgacatctgaagagcttccgtcgtgttatactggcgacgattggagcggatgcccgctgaaggagtttatggactgtccctataacctggcaaataacagacaagtgcgaatgttgtccgatttgactctcgtcggctgctataatctgtctgtgatgcccgaaaaacagcgaaataaggtgctacttgaatccgcaaaaagcaacctaaagcatatggctttcttcggtctcacggaattccagcggaagacccaatacctgtttgagaagacatttaatatgaattttatatccccgtttacccaatacaacacaacccgggcgtcgagtgtagagattaatgaagagattcagaaacgtattgaggggctcaacttccttgatatggaactttacagctacgctaaggatcttttccttcagcgctatcagtttatgcggcaaaaggaacatcaggaagcgagacgcaaaagacaagaacagcgtaaattcttaaagggacggctgctccaaacgcattttcagagtcagggacaagggcagtcccagaatcctaaccagaaccaaagcaaggagcagaatgacaacacgagcaacggtaccaatgactacatagggagtgtggaaaagtggcgctag

SEQ ID NO: 325338 - DNA, 831 bp, Artificial Sequence
  derived and/or modified sequence
atgctcttcctatttgccgtgatcgtcctccaatacgtgtgccccggcacagaatgccagctcctccgcctgcaggcgttcagctccccggtgccggacccgtaccgctcggaggatgagagctccgccaggttcgtgccccgctacaatttcacccgcggcgacctcctgcgcaaggtagacttcgacatcaagggcgatgacctgatcgtgttcctgcacatccagaagaccgggggcaccactttcggccgccacttggtgcgtaacatccagctggagcagccgtgcgagtgccgcgtgggtcagaagaaatgcacttgccaccggccgggtaagcgggaaacctggctcttctccaggttctccacgggctggagctgcgggttgcacgccgactggaccgagctcaccagctgtgtgccctccgtggtggacggcaagcgcgacgccaggctgagaccgtccaggtggaggatttttcagattctagatgcagcaagtaaggataaacggggttctccaaacactaacgcaggcgccaactctccgtcatccacaaagacccggaacacatctaagagtgggaagaacttccactacatcaccatcctccgagacccagtgtcccggtacttgagtgagtggaggcatgtccagagaggggcaacatggaaagcatccctgcatgtctgcgatggaaggcctccaacctccgaagagctgcccagctgctacactggcgatgactggtctggctgccccctcaaagagtttatggactgtccctacaatctagccaacaaccgctgcgcatgctctccgacctga

SEQ ID NO: 325339 - DNA, 1389 bp, Artificial Sequence
  derived and/or modified sequence
atggatgagaaatccaacaagctgctgctagctttggtgatgctcttcctatttgccgtgatcgtcctccaatacgtgtgccccggcacagaatgccagctcctccgcctgcaggcgttcagctccccggtgccggacccgtaccgctcggaggatgagagctccgccaggttcgtgccccgctacaatttcacccgcggcgacctcctgcgcaaggtagacttcgacatcaagggcgatgacctgatcgtgttcctgcacatccagaagaccgggggcaccactttcggccgccacttggtgcgtaacatccagctggagcagccgtgcgagtgccgcgtgggtcagaagaaatgcacttgccaccggccgggtaagcgggaaacctggctcttctccaggttctccacgggctggagctgcgggttgcacgccgactggaccgagctcaccagctgtgtgccctccgtggtggacggcaagcgcgacgccaggctgagaccgtccaggtggaggatttttcagattctagatgcagcaagtaaggataaacggggttctccaaacactaacgcaggcgccaactctccgtcatccacaaagacccggaacacatctaagagtgggaagaacttccactacatcaccatcctccgagacccagtgtcccggtacttgagtgagtggaggcatgtccagagaggggcaacatggaaagcatccctgcatgtctgcgatggaaggcctccaacctccgaagagctgcccagctgctacactggcgatgactggtctggctgccccctcaaagagtttatggactgtccctacaatctagccaacaaccgccaggtgcgcatgctctccgacctgaccctggtaggctgctacaacctctctgtcatgcctgaaaagcaaagaaacaaggtccttctggaaagtgccaagtcaaatctgaagcacatggcgttcttcggcctcactgagtttcagcggaagacccaatatctgtttgagaaaaccttcaacatgaactttatttcgccatttacccagtataataccactagggcctctagtgtagagatcaatgaggaaattcaaaagcgtattgagggactgaattttctggatatggagttgtacagctatgccaaagacctttttttgcagaggtatcagtttatgaggcagaaagagcatcaggaggccaggcgaaagcgtcaggaacaacgcaaatttctgaagggaaggctccttcagacccatttccagagccagggtcagggccagagccagaatccgaatcagaatcagagcaaggagcagaatgataacaccagcaatggcaccaacgactacataggcagtgtagagaaatggcgttaa

SEQ ID NO: 325340 - DNA, 831 bp, Artificial Sequence
  derived and/or modified sequence
atgctgttcctgtttgctgtgattgtgctgcagtatgtgtgccctggaacagagtgccagctgctgcggctgcaggccttcagcagccctgtgcctgacccctacagaagtgaagatgagagcagcgccaggtttgtgccccgctacaacttcaccaggggggacctgctgaggaaggtggactttgacatcaagggagatgacctgattgtgttcctgcacatccagaagacaggaggcaccaccttcggccgccacctggtgaggaacatccagctggagcagccctgtgagtgccgggtgggccagaagaagtgcacctgccacaggcctgggaagcgggagacctggctgttcagccgcttcagcacaggctggagctgtggcctgcacgccgactggacagagctgaccagctgtgtgcccagcgtggtggatggcaagagagatgcccggctgcggcccagccgctggaggatcttccagatcctggatgctgccagcaaggacaagaggggcagccccaacaccaatgctggggccaacagccccagcagcaccaagaccaggaacaccagcaagagcggcaagaacttccactacatcaccatcctgcgggaccctgtgagccgctacctgtctgagtggaggcatgtgcagagaggagccacctggaaggccagcctgcacgtgtgtgatggccggccccccaccagcgaggagctgcccagctgctacacaggagatgactggagcggctgccccctgaaggagttcatggactgcccctacaacctggccaacaacagatgtgcctgcagccccacctag

SEQ ID NO: 325341 - DNA, 1389 bp, Artificial Sequence
  derived and/or modified sequence
atggatgagaagagcaacaagctgctgctggccctggtgatgctgttcctgtttgctgtgattgtgctgcagtatgtgtgccccggcacagagtgccagctgctgcggctgcaggccttcagcagccctgtgcctgacccctacagaagtgaagatgagagcagcgccaggtttgtgccccgctacaacttcaccaggggggacctgctgaggaaggtggactttgacatcaagggagatgacctgattgtgttcctgcacatccagaagacaggaggcaccaccttcggccgccacctggtgaggaacatccagctggagcagccctgtgaatgtcgggtgggccagaagaagtgcacctgccacaggcctgggaagcgggagacctggctgttcagccgcttcagcacaggctggagctgtggcctgcatgctgactggacagagctgaccagctgtgtgcccagcgtggtggatggcaagagagatgcccggctgcggcccagccgctggaggatcttccagatcctggatgctgccagcaaggacaagaggggcagccccaacaccaatgctggggccaacagccccagcagcaccaagaccaggaacaccagcaagagcggcaagaacttccactacatcaccatcctgcgggaccctgtgagccgctacctgtctgagtggaggcatgtgcagagaggagccacctggaaggccagcctgcacgtgtgtgatggccggccccccaccagcgaggagctgcccagctgctacacaggagatgactggagcggctgccccctgaaggagttcatggactgcccctacaacctggccaacaaccggcaggtgaggatgctgagtgacctgaccctggtgggctgctacaacctgtctgtgatgcctgagaagcagaggaacaaggtgctgctggagagcgccaagagcaacctgaagcacatggccttcttcggcctgacagagttccagaggaagacccagtacctgtttgagaagaccttcaacatgaacttcatcagccccttcacccagtacaacaccacccgggccagctctgtggagatcaatgaggagatccagaagagaattgagggcctgaacttcctggacatggagctgtacagctatgccaaggacctcttcctgcagcgctaccagttcatgaggcagaaggagcaccaggaggcccggaggaagaggcaggagcagaggaagttcctgaagggccgcctgctgcagacccacttccagagccagggccagggccagagccagaaccccaaccagaaccagagcaaggagcagaatgacaacaccagcaatggcaccaatgactacatcggctctgtggagaagtggaggtag

SEQ ID NO: 325342 - DNA, 831 bp, Artificial Sequence
  derived and/or modified sequence
atgctgttcctgttcgccgtgatcgtgctgcagtacgtgtgccccggcactgaatgccagctactgagactccaagcgttttcttcaccagtccccgatccctaccgctcagaagatgagtcgagcgccagatttgtgccacgctacaacttcactagaggcgaccttctccgcaaggtggattttgacatcaagggtgatgacctgattgtgttcctgcacatccagaagaccgggggtaccacattcggccgacatctggtgaggaatattcagctagagcaaccttgcgaatgtagggtgggccagaagaaatgtacatgccacaggccgggaaaacgggaaacatggctgttttcaagattcagcaccggctggagctgcgggctccatgccgactggactgaactgacaagctgcgttccatcagtggtggatggtaaaagagacgcacggcttcggccctcccgctggcgtattttccagatcctggacgccgcctccaaagacaagcgcggctcacctaataccaacgccggtgcgaattccccaagcagcacgaaaacccggaacacatccaaatccggcaagaacttccactacattactatcctcagagacccggtaagcaggtacctcagtgagtggcgccatgtccagagaggagccacttggaaggcctcgcttcatgtttgtgatggtagaccccccacatccgaggaactgcccagctgctacactggggacgactggtccggttgcccactgaaggaattcatggactgtccatacaacctcgcaaacaatcgatgtgcatgcagccccacatag

SEQ ID NO: 325343 - DNA, 1389 bp, Artificial Sequence
  derived and/or modified sequence
atggacgagaagagcaacaagctgctgctggccctggtgatgctgttcctatttgcggtgatagtactccaatatgtgtgtccagggaccgagtgccagttattgcgcctccaggcattctcctccccggtgcctgatccttatcgctctgaagacgaatcctcggcgaggtttgttcccagatataactttacccgtggggacttactacgtaaggtcgattttgatatcaaaggagacgatctcatcgttttcctccatatccagaagacaggcggaactacctttggccggcacctcgtgcggaacatccaactggagcagccttgcgagtgccgtgttgggcaaaaaaagtgtacatgccataggcccgggaaaagagaaacctggttgttctcacgcttcagtactgggtggagctgtggtctccatgcagattggactgagctcacttcatgtgtcccttcagtcgtcgacggcaagagagacgctcgcctgagaccatccagatggaggatattccagatcttggacgcagcaagtaaagataagcgtggaagccccaacacaaacgccggcgcgaactctcccagctccactaagacaaggaacaccagtaaatccgggaaaaacttccattatatcaccattctccgtgaccctgtcagccgatacctgtcagagtggcggcacgttcagcggggagctacctggaaggccagtctccacgtgtgcgatggtagaccccccacatctgaggagctgccctcatgctacacaggcgatgattggtctggttgccccttaaaggagttcatggactgcccttacaacctggccaacaaccggcaggtccggatgctgtccgatctcactctggtcggttgttataacctgtctgtgatgcctgaaaagcagcggaacaaggtccttctggaaagcgcaaaatccaacctgaagcacatggccttcttcggactgactgagttccagcggaaaacacagtatctctttgagaaaaccttcaacatgaattttatcagccctttcacgcagtacaacacaacaagagcgtcgtccgtcgaaattaatgaagagatccagaagcgtattgaagggctgaattttctcgatatggagctctattcctacgccaaggatttattcttgcaaaggtatcagttcatgcgccagaaagagcaccaagaagcccgacggaaacggcaggagcagaggaaattcttaaagggaaggctcttgcaaacgcattttcagtcacagggccagggtcagtctcagaatcccaatcagaaccagtctaaagaacagaacgataacacgtccaatggcactaatgattacatcggaagcgtggaaaagtggcggtag

SEQ ID NO: 325344 - DNA, 831 bp, Artificial Sequence
  derived and/or modified sequence
atgcttttcttgtttgccgtaattgttttgcagtatgtctgtcctggtacggaatgccaactcctgcgcctacaagctttcagttcgcccgtgcctgacccctaccggagcgaggatgagtctagcgcaagatttgtcccacgatacaactttacccggggagacctcctccgaaaggttgacttcgatatcaagggagacgatttgattgtgttcttgcacattcagaagaccggcggtacaacttttggaagacacctcgtcagaaacattcagctggagcagccctgcgagtgccgagtgggacagaagaagtgcacctgccatagacccggaaagcgggagacgtggctgtttagtcgtttctcgacgggctggagctgtggtctgcatgcagattggacggaactcacatcttgtgtcccaagcgtagtagacggcaaacgagatgctcggctccgaccttccagatggcggatctttcagattctcgacgctgcttccaaagacaagcgtgggagcccgaatacgaacgcgggagccaactctcccagctccacaaagacacggaacaccagcaaatctggtaagaacttccactatattacgatcctgagagacccagtgtcccggtacctgtccgagtggaggcatgtccagagaggagccacgtggaaggcctcccttcacgtgtgcgatgggaggccccctacctcagaggaattgcctagttgctatacaggcgatgactggtctgggtgccctctcaaggaatttatggattgcccctataatcttgccaacaacaggtgcgcctgcagcccaacctag

SEQ ID NO: 325345 - DNA, 1389 bp, Artificial Sequence
  derived and/or modified sequence
atggacgagaagagtaataaattgctgttggctttggtgatgctatttctgttcgccgtcattgttctccaatatgtgtgccctgggaccgagtgccaattgctccgtttacaggccttttcctcacctgttcctgatccataccgatcagaggacgaaagctccgctagatttgtgccgagatataactttaccaggggagatctactgaggaaggtagattttgacatcaaaggcgatgatttgattgtctttctgcatattcaaaagactggagggactaccttcggacgccacttggtacgtaacatacagctcgagcagccctgcgaatgtcgggtagggcagaagaaatgcacatgtcaccggccagggaaacgcgaaacttggttgttctctagattttcaacaggctggtcttgtgggttacacgccgactggacagagttgacatcctgcgtgcccagtgtggtagatgggaagagagatgctcgacttcggccatcccgctggaggattttccagattctcgatgccgcaagcaaagacaagcgagggtcacccaacactaatgccggagccaatagtccctcctctaccaagacccggaacacatcaaagagcgggaaaaactttcactacatcaccatactaagggatccagttagccggtacctgtctgaatggagacacgtgcaaaggggggcaacctggaaggcaagcctacatgtttgcgacggcagaccaccaacttccgaggaactgccatcctgctataccggcgacgactggtctgggtgtccccttaaggaatttatggactgcccttataatctggccaataacaggcaggttaggatgctctccgatctgactcttgtgggatgctacaacttgtcagttatgccagaaaagcagcgtaataaagtcctgcttgagagtgccaaatctaatctgaaacatatggctttctttggcctgacagagtttcagcgcaagacccagtacctgtttgaaaagacctttaatatgaactttatttccccattcacccagtataataccactcgagcaagctctgtggagattaatgaagagattcagaagcgcatcgaagggctgaactttctggacatggaactgtacagttatgcgaaagatctgttcctgcagcgttatcaatttatgcgccagaaagagcatcaagaggcgcgtcgtaaacggcaagaacagcggaaatttctgaaagggaggctgctccaaacccactttcaatcacagggtcaaggtcagtcacagaaccccaaccaaaatcagagcaaagaacagaatgacaatactagtaacgggacgaacgactacatcgggagcgtagagaaatggaggtag

SEQ ID NO: 325346 - DNA, 831 bp, Artificial Sequence
  derived and/or modified sequence
atgctgttcctgttcgccgtgatcgtgctgcagtacgtgtgccccggcaccgagtgccagctgctgagactgcaggccttcagcagccccgtgcccgacccctacagaagcgaggacgagagcagcgccagattcgtgcccagatacaacttcaccagaggcgacctgctgagaaaggtggacttcgacatcaagggcgacgacctgatcgtgttcctgcacatccagaagaccggcggcaccaccttcggcagacacctggtgagaaacatccagctggagcagccctgcgagtgcagagtgggccagaagaagtgcacctgccacagacccggcaagagagagacctggctgttcagcagattcagcaccggctggagctgcggcctgcacgccgactggaccgagctgaccagctgcgtgcccagcgtggtggacggcaagagagacgccagactgagacccagcagatggagaatcttccagatcctggacgccgccagcaaggacaagagaggcagccccaacaccaacgccggcgccaacagccccagcagcaccaagaccagaaacaccagcaagagcggcaagaacttccactacatcaccatcctgagagaccccgtgagcagatacctgagcgagtggagacacgtgcagagaggcgccacctggaaggccagcctgcacgtgtgcgacggcagaccccccaccagcgaggagctgcccagctgctacaccggcgacgactggagcggctgccccctgaaggagttcatggactgcccctacaacctggccaacaacagatgcgcctgcagccccacctag

SEQ ID NO: 325347 - DNA, 1389 bp, Artificial Sequence
  derived and/or modified sequence
atggacgagaagagcaacaagctgctgctggccctggtgatgctgttcctgttcgccgtgatcgtgctgcagtacgtgtgccccggcaccgagtgccagctgctgagactgcaggccttcagcagccccgtgcccgacccctacagaagcgaggacgagagcagcgccagattcgtgcccagatacaacttcaccagaggcgacctgctgagaaaggtggacttcgacatcaagggcgacgacctgatcgtgttcctgcacatccagaagaccggcggcaccaccttcggcagacacctggtgagaaacatccagctggagcagccctgcgagtgcagagtgggccagaagaagtgcacctgccacagacccggcaagagagagacctggctgttcagcagattcagcaccggctggagctgcggcctgcacgccgactggaccgagctgaccagctgcgtgcccagcgtggtggacggcaagagagacgccagactgagacccagcagatggagaatcttccagatcctggacgccgccagcaaggacaagagaggcagccccaacaccaacgccggcgccaacagccccagcagcaccaagaccagaaacaccagcaagagcggcaagaacttccactacatcaccatcctgagagaccccgtgagcagatacctgagcgagtggagacacgtgcagagaggcgccacctggaaggccagcctgcacgtgtgcgacggcagaccccccaccagcgaggagctgcccagctgctacaccggcgacgactggagcggctgccccctgaaggagttcatggactgcccctacaacctggccaacaacagacaggtgagaatgctgagcgacctgaccctggtgggctgctacaacctgagcgtgatgcccgagaagcagagaaacaaggtgctgctggagagcgccaagagcaacctgaagcacatggccttcttcggcctgaccgagttccagagaaagacccagtacctgttcgagaagaccttcaacatgaacttcatcagccccttcacccagtacaacaccaccagagccagcagcgtggagatcaacgaggagatccagaagagaatcgagggcctgaacttcctggacatggagctgtacagctacgccaaggacctgttcctgcagagataccagttcatgagacagaaggagcaccaggaggccagaagaaagagacaggagcagagaaagttcctgaagggcagactgctgcagacccacttccagagccagggccagggccagagccagaaccccaaccagaaccagagcaaggagcagaacgacaacaccagcaacggcaccaacgactacatcggcagcgtggagaagtggagatag

SEQ ID NO: 325348 - protein, 649 aa, Artificial Sequence
  derived and/or modified sequence
MTENGSHQLIVKARFNFKQTNEDELSVCKGDIIYVTRVEEGGWWEGTLNGRTGWFPSNYVREIKSSDGVSLLLPGLECNGAISAHHNLCLPGSKRPLSPKAVKGFETAPLTKNYYTVVLQNILDTEKEYAKELQSLLVTYLRPLQSNNNLSTVEVTSLLGNFEEVCTFQQTLCQALEECSKFPENQHKVGGCLLSLMPHFKSMYLAYCANHPSAVNVLTQHSDELEQFMENQGASSPGILILTTNLSKPFMRLEKYVTLLQELERHMEDTHPDHQDILKAIVAFKTLMGQCQDLRKRKQLELQILSEPIQAWEGEDIKNLGNVIFMSQVMVQYGACEEKEERYLMLFSNVLIMLSASPRMSGFIYQGKIPIAGTVVTRLDEIEGNDCTFEITGNTVERIVVHCNNNQDFQEWLEQLNRLIRGPASCSSLSKTSSSSCSAHSSFSSTGQPRGPLEPPQIIKPWSLSCLRPAPPLRPSAALGYKERMSYILKESSKSPKTMKKFLHKRKTERKPSEEEYVIRKSTAALEEDAQILKVIEAYCTSANFQQGHGSSTRKDSIPQVLLPEEEKLIIEETRSNGQTIMEEKSLVDTVYALKDEVRELKQENKRMKQCLEEELKSRRDLEKLVRRLLKQTDECIRGESSSKTSILP

SEQ ID NO: 325349 - DNA, 2654 bp, Artificial Sequence
  derived and/or modified sequence
aaagttgcagccgcccctccccgctggggcgagcctagcccagctctccagtttcgccctggtggcggccgcgctcagggcagggtcccagctccggctgggttgatctgttcccgcagccttggcacaggcttgcccgcccgctcgccggccccgtgactcgggagggcgaacggcttccaggaggcggcggcggcgcggctggagtgagggagcagctggaggacaggcgggcagcggccgagccagatatttgatcctgatgacctttattcaggggtcaatttctccaaggtactgagtactcttttagctgtcaacaaagcaacagaagatcagctatcagaaagaccatgtggacgttcctcttctcttagtgctgctaatacttctcagacaaacccacagggagcagtttctagcacagtttcagggctgcaaaggcagtcaaagacagtggagatgacggaaaatggaagtcatcagttgatagtaaaagcaagattcaactttaagcagactaatgaggatgaactgtcagtttgtaagggggacatcatttacgtcacacgagttgaagaaggaggctggtgggaaggcacattaaatgggagaacaggctggttccccagtaattatgtccgtgaaattaaatccagtgatggagtttcgctcttgttgcccgggctggagtgcaatggcgcgatctcagctcaccacaacctctgcctcccaggttcaaagagacctctctccccaaaagccgtcaaaggatttgaaactgctccacttaccaagaattattatactgtggtgttacagaacatcctggacactgaaaaagaatatgctaaagaacttcagtctcttcttgttacttacttaagacccctgcagtccaataacaatctgagtactgtggaggttacatctttactgggaaacttcgaggaagtatgcacatttcaacagacactctgccaagccttggaagaatgttcaaagtttccagaaaaccagcacaaagtaggaggttgtctactgagtctcatgcctcattttaaatctatgtatctggcttactgtgcaaaccatccttcagctgtaaatgtgctcactcagcacagtgatgagttggaacaattcatggaaaatcaaggtgcatcgagcccaggtatcctcattttaacaacaaacctcagcaaaccattcatgcgactggagaaatatgttactctcttgcaagagttagaacggcatatggaggatactcatccagatcatcaggatattctgaaagcaatcgtagcattcaaaactctcatggggcaatgtcaagatctgaggaagagaaaacagctggagttacagatactgtccgaacctattcaggcatgggaaggagaagatattaaaaacttgggaaatgtgatttttatgtcacaagtaatggtgcagtatggagcatgtgaggaaaaagaggagcggtaccttatgttattttcaaatgtcctgataatgttatctgcaagtcctcggatgagtggctttatctatcagggaaaaataccaatagcaggaacggtggtgactagattagatgaaattgaagggaatgactgcacatttgaaatcactggtaacacagtggagagaattgtggtccattgtaacaacaaccaggacttccaggaatggttggagcagctgaacagactgatcagaggacctgcctcttgcagttcattatccaaaacctcatcgtcatcatgtagtgctcattcttcttttagctctaccggacagccccgaggacccttggagcctcctcaaattataaaaccgtggagtttaagttgtctacgacctgcacctccacttagaccatcagcagcactaggttataaagagaggatgtcttatatcttaaaggagtctagtaaaagccctaaaacgatgaagaaatttcttcataaaaggaagactgagagaaaaccatcggaggaggaatatgtgattaggaaaagtacagctgctctggaagaggatgctcaaatccttaaagtgatcgaagcctactgcaccagcgcaaattttcaacaaggccatggctcaagtactcgaaaagattccattccacaagtcctactccctgaggaagagaaactcatcattgaagaaaccagaagcaacggccagaccatcatggaagaaaagagccttgttgatactgtttacgccttgaaggacgaggtcagagaactgaagcaggaaaataaaagaatgaagcaatgcctggaagaagaactgaaatcaagaagggacctagaaaagctggtgcggaggcttttgaagcaaacagatgagtgtattcgaggcgagtccagtagcaagacctcaattcttccataaccatcactgtgccactgggtggagtgtgccttcagggcatcttgaaatgtcccgctgaatgatttgactcagtttgctcacttctttggcttttgttttgtgtttgagtctctctctctctctccctctctcttctctttctctccccgctgtgtgcatatgtgtgtgcgtgcacgtgcgcgcttgggcatttgctgttgtttggttattggttggttgttcattttttttttcaacaggtg

SEQ ID NO: 325350 - DNA, 1950 bp, Artificial Sequence
  derived and/or modified sequence
atgaccgagaacggtagtcaccagctgatcgtgaaggcacgatttaactttaaacagacgaatgaagatgagttgtctgtctgtaaaggtgacatcatctacgttacacgggtagaagaaggtgggtggtgggaaggcacattgaacggccgcactggctggttcccatcaaactatgtgcgcgagataaaatcgtccgacggagtgagtctccttcttccgggcctcgagtgcaatggggccatttcagcccatcataacctctgtttgccgggctctaagcgcccactgtcaccgaaagctgtgaaagggttcgagactgcacctttgacgaaaaactattatacagtagtcctgcaaaatattcttgacaccgaaaaggaatacgctaaagaactgcagagcctcttggtaacctatctgcggcctcttcagtctaataataatctgtcaacggtggaggtgacatccctgctgggcaactttgaggaggtgtgcactttccagcaaactctctgtcaggccttggaggagtgcagcaagtttcctgagaatcaacacaaagtcggggggtgtctgctttcactgatgccacacttcaagtctatgtatctggcctactgcgctaaccacccctcagctgtgaacgtgctaacgcagcactcagacgagctggagcagttcatggagaatcaaggagcaagcagtcccggaatcttgattctcaccaccaaccttagcaagccgttcatgaggctagagaagtacgtcaccttgctacaggagctggagcgccacatggaggacacccaccccgaccaccaggatattctgaaggcaatcgttgcctttaagaccctcatgggccagtgccaggacctgcggaaacgcaaacagctggagcttcaaatcctttctgagccgattcaggcatgggagggagaggacattaagaatctagggaatgtgatttttatgtctcaagtaatggtgcaatacggcgcatgcgaagaaaaagaggagcgctacttgatgctgttctccaacgtgctcatcatgctgtccgcctccccgcgcatgtctggatttatttatcagggcaaaattccgatcgccgggacggtggtgactcgcctggacgagatcgaagggaacgattgcacatttgagataaccggcaatacagtcgagcggattgtggtgcattgcaataacaaccaagatttccaggagtggctggagcagctgaaccgcctgatcaggggacccgcttcatgtagctctttgtccaaaaccagctcttctagctgttctgcacattcttcctttagtagtaccggacagcctaggggtcccctcgagcctccgcagattataaagccttggtctctctcttgcctgaggcccgcacctccactccggccatcggcagccctgggctacaaggaaaggatgagttatattctgaaggagagctccaagagtcccaaaaccatgaaaaagtttctccataaaagaaaaactgagaggaaacctagcgaagaagagtacgttatccgtaagtccaccgctgcgctggaggaggacgcacagatcctcaaggtcattgaagcttactgcacgtcggctaattttcagcaggggcatgggtcctctacacggaaggactcaattccccaggttctgctgccagaggaggagaagctgatcatagaagagacccgctcaaacggccagaccatcatggaagagaagagcctggtagatactgtctacgccttaaaggatgaagtgagggaactaaagcaagaaaacaagcgaatgaagcaatgccttgaagaggaactgaagtctcggcgggacctggagaaactggtcagaagactgttgaagcaaactgatgagtgcatccggggggagagctcaagcaaaacttccatcttgccttag

SEQ ID NO: 325351 - DNA, 1950 bp, Artificial Sequence
  derived and/or modified sequence
atgacagaaaatggcagccaccagctgattgtgaaggcccgcttcaacttcaagcagaccaatgaagatgagctgtctgtgtgcaagggggacatcatctacgtgaccagggtggaggagggcggctggtgggagggcaccctgaatggaagaacaggctggttccccagcaactacgtgcgggagatcaagagcagtgatggagtgtccctgctgctgcccggcctggagtgcaatggagccatcagcgcccaccacaacctgtgcctgcccggcagcaagaggcccctgagccccaaggctgtgaagggctttgaaacagcccccctgaccaagaactactacacagtggtgctgcagaacatcctggacacagagaaggagtatgccaaggagctgcagagcctgctggtgacctacctgcggcccctgcagagcaacaacaacctgagcacagtggaggtgaccagcctgctgggcaactttgaggaggtgtgcaccttccagcagaccctgtgccaggccctggaggagtgcagcaagtttcctgagaaccagcacaaggtgggcggctgcctgctgagcctgatgccccacttcaagtccatgtacctggcctactgtgccaaccaccccagcgctgtgaatgtgctgacccagcacagtgatgagctggagcagttcatggagaaccagggcgccagcagccctggcatcctgatcctgaccaccaacctgagcaagcccttcatgaggctggagaagtatgtgaccctgctgcaggagctggagcggcacatggaggacacccacccagaccaccaggacatcctgaaggccatcgtggccttcaagaccctgatgggccagtgccaggacctgaggaagaggaagcagctggagctgcagatcctgtctgagcccatccaggcctgggagggggaggacatcaagaacctgggcaatgtcatcttcatgagccaggtgatggtgcagtatggagcctgtgaggagaaggaggagcgctacctgatgctgttcagcaatgtgctgatcatgctgagcgccagccccaggatgagcggcttcatctaccagggcaagatccccatcgccggcaccgtggtgacccggctggatgaaattgagggcaatgactgcacctttgagatcaccggcaacacagtggagagaattgtggtgcactgcaacaacaaccaggacttccaggagtggctggagcagctgaacagactcatccggggccctgccagctgcagcagcctgagcaagaccagcagcagcagctgcagcgcccacagcagcttcagcagcacaggccagccccggggccccctggagcccccccagatcatcaagccctggagcctgagctgcctgcggcctgccccacccctgcggcccagcgctgccctgggctacaaggagaggatgagctacatcctgaaggagagcagcaagagccccaagaccatgaagaagttcctgcacaagaggaagacagagaggaagcccagcgaggaggagtatgtgatcaggaagagcacagctgccctggaggaggatgcccagatcctgaaggtgattgaggcctactgcaccagcgccaacttccagcagggccacggcagcagcaccaggaaggacagcatcccccaggtgctgctgcctgaggaggagaagctgatcatcgaggagaccaggagcaatggccagaccatcatggaggagaagagcctggtggacacagtgtatgccctgaaggatgaggtgcgggagctgaagcaggagaacaagaggatgaagcagtgcctggaggaggagctgaagagcagaagagacctggagaagctggtgcggcggctgctgaagcagacagatgagtgcatccggggggagagcagcagcaagaccagcatcctgccctag

SEQ ID NO: 325352 - DNA, 1950 bp, Artificial Sequence
  derived and/or modified sequence
atgaccgagaacggcagccaccagctgatcgtgaaggcccggttcaacttcaaacagaccaatgaagacgagttgagcgtctgtaaaggcgatattatttatgtgacacgggttgaggaaggaggctggtgggaagggaccctgaatggcagaacggggtggttcccgagtaattatgtgcgggagataaagtccagcgacggagtgtcgttgctccttcctgggctggaatgcaatggggcaatctcagctcaccataacttgtgtctccctgggagcaagcgcccgctctctccgaaggccgtaaaaggattcgaaacagccccactcacaaagaattattataccgtggttctgcagaatatcttagacaccgaaaaggaatatgcaaaggaactgcagtctctccttgtgacgtacctgcgccccctgcagtccaataataatctatccactgtagaagttacgtcactgttaggtaatttcgaagaggtgtgcacttttcaacaaactctgtgtcaggcactggaggaatgctcaaaattcccagagaaccagcacaaagtgggcggttgcttgctttccctgatgcctcattttaagagcatgtatctcgcctattgcgctaaccatccgtcagccgtcaacgtcttgactcagcacagcgacgaattagagcaattcatggagaatcaaggggcatccagtccaggcatactgatcctcacaactaacctttcaaaaccttttatgcgcctagaaaaatacgtgacgctacttcaggaattggaaagacacatggaagacacccacccagatcaccaggatatcctgaaagccatagtggcattcaaaacgttgatggggcagtgtcaggatttacgcaagcgaaagcagttagagctgcagatcctttcagagcctattcaggcctgggaaggcgaggacatcaaaaatcttgggaatgtgatatttatgtcgcaagtaatggttcagtacggcgcgtgcgaagagaaggaagaacgctacctgatgctcttctctaatgtccttattatgctgtccgcatctcctagaatgtctggatttatctatcagggcaagatcccgattgctggtactgtagtgacacgacttgacgaaatcgaaggtaatgactgtacctttgagataactggcaacacggtggagcgcatcgtagtgcattgcaacaataatcaggacttccaggagtggctggagcaattaaacagactgatcagaggccctgcgtcatgctcctcactgagcaaaactagctctagcagctgtagcgctcacagttcgttcagcagcacaggacagccacgcggtcctctggaacccccacagatcatcaaaccttggtcgttatcttgtctgaggcccgcacccccattgagaccgagcgcagccctaggatataaggaacggatgtcatatatcctgaaggagagttctaaaagcccgaaaactatgaaaaaatttttacacaaacggaaaactgaacgtaagccctccgaagaagagtatgtgataaggaaaagtacagctgcacttgaggaagatgcccaaatcctgaaggtgatcgaggcctactgtacgtccgctaactttcaacaggggcacggtagctccacgcggaaagattctattccgcaggtgctactgcccgaggaagagaaattgattatcgaggaaacccgctctaatgggcaaacaattatggaggagaaatcactagttgataccgtgtacgcccttaaagacgaggttcgtgagctcaaacaagaaaataaacgcatgaagcaatgcctggaggaagagctgaaaagcaggagagacctggaaaaactggttcggagactgctcaaacaaaccgatgagtgtatacggggtgagagttctagcaagacctccatccttccctag

SEQ ID NO: 325353 - DNA, 1950 bp, Artificial Sequence
  derived and/or modified sequence
atgactgagaacggatctcaccagttgatcgtgaaggcgaggttcaattttaaacagacgaacgaagatgagcttagtgtttgtaagggagacattatctatgtcacacgagtggaggaaggcggttggtgggaaggcacccttaacgggcgtacgggatggtttcctagtaattatgtgagggaaatcaagtcctcagatggcgtgtctctgctcctgcctggtttagagtgtaatggcgctatcagtgctcaccacaatctctgcctacctggctcaaagcgcccactctcacctaaggcagtgaagggctttgagacagcacccttaactaaaaactactacaccgtagtccttcagaacatcttggatacggagaaggaatatgccaaagagctgcagagtctgctggtcacttatttaagacccctgcagtctaacaataatttgagtactgtggaagtgacaagcctgttgggaaattttgaagaagtctgcaccttccagcaaaccctttgccaggcattggaggaatgttcaaaattcccagagaaccagcataaggttggcggttgtcttctatccctgatgccccactttaaaagcatgtacctggcctattgtgcaaatcaccccagtgctgtgaacgtgctaacgcagcactctgatgaactggagcagttcatggaaaatcagggagcatccagtccaggaatcttaatattaaccacaaacctcagtaagccatttatgcgcctagaaaagtatgtgactttgttacaggagctcgagagacacatggaagacacacacccagatcatcaggacatcttgaaagcaatcgtcgcgttcaagactcttatggggcagtgccaggatctgagaaagagaaaacagctggagctgcagatcctgtccgagcctatccaagcctgggaaggagaggatatcaaaaacttaggtaacgtcatcttcatgagtcaggtcatggtgcagtacggggcttgtgaggagaaggaggaacgctacctgatgctcttctctaatgtcctcattatgttatcagctagtccacgtatgtctggtttcatctatcaaggaaaaatacccatagcaggcaccgtggttacgagattggatgagatagaaggcaatgactgtaccttcgagattacaggcaacacagtcgaacgcatcgttgtccattgcaataacaaccaggatttccaggaatggttggaacaattaaaccggttgatcaggggtcccgcaagttgctcatctctgagcaagacctcttcatcttcatgtagtgctcactcttccttctcttcaactggccagccccgtgggcctttagagcctccccagatcatcaagccatggtccctctcttgcctgagacctgcccctccacttcgtccatcagctgcgctcggctataaggaacggatgagctacatcctcaaagagagcagcaagtctcccaagaccatgaagaaattcctgcacaaacgaaaaactgaacgaaaaccttctgaagaggagtacgtaattcgcaagagcaccgctgctctcgaggaggatgcccagattcttaaggtgatagaggcctactgtacatccgctaatttccagcagggccatgggtcatcgaccagaaaagactccataccccaggtgttactccccgaggaagaaaaactcattattgaggaaacccgatctaacggccaaaccatcatggaggagaagtcgctggtggatacagtgtacgctctgaaggacgaagttagagagcttaagcaggagaataaaaggatgaaacagtgcttggaggaagagttgaagagccgtcgggatctggagaagctagtaaggcgactgctcaaacaaaccgacgaatgtatccgaggcgaaagctcatctaaaacctctatcttaccttag

SEQ ID NO: 325354 - DNA, 1950 bp, Artificial Sequence
  derived and/or modified sequence
atgaccgagaacggcagccaccagctgatcgtgaaggccagattcaacttcaagcagaccaacgaggacgagctgagcgtgtgcaagggcgacatcatctacgtgaccagagtggaggagggcggctggtgggagggcaccctgaacggcagaaccggctggttccccagcaactacgtgagagagatcaagagcagcgacggcgtgagcctgctgctgcccggcctggagtgcaacggcgccatcagcgcccaccacaacctgtgcctgcccggcagcaagagacccctgagccccaaggccgtgaagggcttcgagaccgcccccctgaccaagaactactacaccgtggtgctgcagaacatcctggacaccgagaaggagtacgccaaggagctgcagagcctgctggtgacctacctgagacccctgcagagcaacaacaacctgagcaccgtggaggtgaccagcctgctgggcaacttcgaggaggtgtgcaccttccagcagaccctgtgccaggccctggaggagtgcagcaagttccccgagaaccagcacaaggtgggcggctgcctgctgagcctgatgccccacttcaagagcatgtacctggcctactgcgccaaccaccccagcgccgtgaacgtgctgacccagcacagcgacgagctggagcagttcatggagaaccagggcgccagcagccccggcatcctgatcctgaccaccaacctgagcaagcccttcatgagactggagaagtacgtgaccctgctgcaggagctggagagacacatggaggacacccaccccgaccaccaggacatcctgaaggccatcgtggccttcaagaccctgatgggccagtgccaggacctgagaaagagaaagcagctggagctgcagatcctgagcgagcccatccaggcctgggagggcgaggacatcaagaacctgggcaacgtgatcttcatgagccaggtgatggtgcagtacggcgcctgcgaggagaaggaggagagatacctgatgctgttcagcaacgtgctgatcatgctgagcgccagccccagaatgagcggcttcatctaccagggcaagatccccatcgccggcaccgtggtgaccagactggacgagatcgagggcaacgactgcaccttcgagatcaccggcaacaccgtggagagaatcgtggtgcactgcaacaacaaccaggacttccaggagtggctggagcagctgaacagactgatcagaggccccgccagctgcagcagcctgagcaagaccagcagcagcagctgcagcgcccacagcagcttcagcagcaccggccagcccagaggccccctggagcccccccagatcatcaagccctggagcctgagctgcctgagacccgccccccccctgagacccagcgccgccctgggctacaaggagagaatgagctacatcctgaaggagagcagcaagagccccaagaccatgaagaagttcctgcacaagagaaagaccgagagaaagcccagcgaggaggagtacgtgatcagaaagagcaccgccgccctggaggaggacgcccagatcctgaaggtgatcgaggcctactgcaccagcgccaacttccagcagggccacggcagcagcaccagaaaggacagcatcccccaggtgctgctgcccgaggaggagaagctgatcatcgaggagaccagaagcaacggccagaccatcatggaggagaagagcctggtggacaccgtgtacgccctgaaggacgaggtgagagagctgaagcaggagaacaagagaatgaagcagtgcctggaggaggagctgaagagcagaagagacctggagaagctggtgagaagactgctgaagcagaccgacgagtgcatcagaggcgagagcagcagcaagaccagcatcctgccctag

SEQ ID NO: 325355 - protein, 873 aa, Artificial Sequence
  derived and/or modified sequence
MLRPQGLLWLPLLFTSVCVMLNSNVLLWITALAIKFTLIDSQAQYPVVNTNYGKIQGLRTPLPSEILGPVEQYLGVPYASPPTGERRFQPPESPSSWTGIRNATQFSAVCPQHLDERFLLHDMLPIWFTTSLDTLMTYVQDQNEDCLYLNIYVPMEDGTNIKRNADDITSNDHGEDKDIHEQNSKKPVMVYIHGGSYMEGTGNMIDGSILASYGNVIVITINYRLGILAQNTLAHGNCKHRCQLHLQAPRDCKSAYPFRNEDEIRGFLSTGDQAAKGNYGLLDQIQALRWIEENVGAFGGDPKRVTIFGSGAGASCVSLLTLSHYSEGLFQKAIIQSGTALSSWAVNYQPAKYTRILADKVGCNMLDTTDMVECLKNKNYKELIQQTITPATYHIAFGPVIDGDVIPDDPQILMEQGEFLNYDIMLGVNQGEGLKFVDGIVDNEDGVTPNDFDFSVSNFVDNLYGYPEGKDTLRETIKFMYTDWADKENPETRRKTLVALFTDHQWVAPAVATADLHAQYGSPTYFYAFYHHCQSEMKPSWADSAHGDEVPYVFGIPMIGPTELFSCNFSKNDVMLSAVVMTYWTNFAKTGDPNQPVPQDTKFIHTKPNRFEEVAWSKYNPKDQLYLHIGLKPRVRDHYRATKVAFWLELVPHLHNLNEIFQYVSTTTKVPPPDMTSFPYGTRRSPAKIWPTTKRPAITPANNPKHSKDPHKTGPEDTTVLIETKRDYSTELSVTIAVGASLLFLNILAFAALYYKKDKRRHETHRHPSPQRNTTNDITHIQNEEIMSLQMKQLEHDHECESLQAHDTLRLTCPPDYTLTLRRSPDDIPFMTPNTITMIPNTLMGMQPLHTFKTFSGGQNSTNLPHGHSTTRV

SEQ ID NO: 325356 - protein, 836 aa, Artificial Sequence
  derived and/or modified sequence
MLRPQGLLWLPLLFTSVCVMLNSNVLLWITALAIKFTLIDSQAQYPVVNTNYGKIQGLRTPLPSEILGPVEQYLGVPYASPPTGERRFQPPESPSSWTGIRNATQFSAVCPQHLDERFLLHDMLPIWFTTSLDTLMTYVQDQNEDCLYLNIYVPMEDGTNIKRNADDITSNDHGEDKDIHEQNSKKPVMVYIHGGSYMEGTGNMIDGSILASYGNVIVITINYRLGILGFLSTGDQAAKGNYGLLDQIQALRWIEENVGAFGGDPKRVTIFGSGAGASCVSLLTLSHYSEGLFQKAIIQSGTALSSWAVNYQPAKYTRILADKVGCNMLDTTDMVECLKNKNYKELIQQTITPATYHIAFGPVIDGDVIPDDPQILMEQGEFLNYDIMLGVNQGEGLKFVDGIVDNEDGVTPNDFDFSVSNFVDNLYGYPEGKDTLRETIKFMYTDWADKENPETRRKTLVALFTDHQWVAPAVATADLHAQYGSPTYFYAFYHHCQSEMKPSWADSAHGDEVPYVFGIPMIGPTELFSCNFSKNDVMLSAVVMTYWTNFAKTGDPNQPVPQDTKFIHTKPNRFEEVAWSKYNPKDQLYLHIGLKPRVRDHYRATKVAFWLELVPHLHNLNEIFQYVSTTTKVPPPDMTSFPYGTRRSPAKIWPTTKRPAITPANNPKHSKDPHKTGPEDTTVLIETKRDYSTELSVTIAVGASLLFLNILAFAALYYKKDKRRHETHRHPSPQRNTTNDITHIQNEEIMSLQMKQLEHDHECESLQAHDTLRLTCPPDYTLTLRRSPDDIPFMTPNTITMIPNTLMGMQPLHTFKTFSGGQNSTNLPHGHSTTRV

SEQ ID NO: 325357 - DNA, 82 bp, Artificial Sequence
  derived and/or modified sequence
cacaaccaaagcaatgaaagaaaagcacagacttattgaaatgaaagtacacaccacagaatgggagcaggctcaagcaagc

SEQ ID NO: 325358 - DNA, 2622 bp, Artificial Sequence
  derived and/or modified sequence
atgctcagaccccaggggctcctatggctgccactgctctttactagcgtgtgtgttatgttaaacagcaacgtactcttgtggataactgcattagccatcaagttcacgctaatcgactctcaggctcagtaccctgtggtgaatacaaactacgggaaaatccaagggctgcgcactccccttccaagcgagatcctcgggccagtggaacagtacctgggtgtgccatacgcttcgccaccaactggagaacgacgctttcagccgccggaaagcccttctagttggacaggcataaggaatgcgacccagttctcagccgtgtgtccacagcacttagacgaaagattcttgttgcatgatatgttaccgatttggttcactacatcattagatactttgatgacttacgtccaggaccagaatgaagactgcctgtatcttaacatctacgttcctatggaggacggtaccaacattaagcggaatgcggacgacatcacatccaatgaccatggtgaggacaaagatatccatgagcagaactctaagaaaccagtgatggtttacatccacggggggagttatatggaaggcaccggaaacatgatagacggtagcattctggctagctatggtaacgtgatcgtaattacgattaactatagacttggcattctggcccagaatacactggcccacgggaactgcaagcaccgctgtcaactgcacctacaagccccacgggactgtaaatctgcctatccgtttcgcaatgaggatgaaatccgtggcttcctgtcgaccggcgaccaggcagcaaaggggaattacggattgctcgatcagatccaagcactgcgttggatcgaggagaatgtcggggcctttggtggcgaccctaaacgggtgacaatttttggaagcggcgccggagcctcctgcgtatccctcttgaccctgtctcactattccgagggcctctttcagaaggcaataatacagtctggcactgctctgtcgagctgggcggtaaactaccaacccgctaaatatacgcgtattttggcggataaggtcgggtgtaatatgctagacactaccgatatggtggaatgtttaaaaaacaaaaactacaaagagttaatccagcagactatcacacccgccacctatcacattgcttttgggcccgtcattgacggagatgttattcccgatgatccccagattctgatggagcaaggagagttcctgaactacgatattatgttaggcgtgaatcagggagaaggcctgaaattcgtggacggcatagtggataacgaggacggagtaacccccaatgacttcgacttttccgtgagtaacttcgtggataatctgtacggctaccctgaaggtaaggataccctgcgcgagaccataaaatttatgtacacagattgggccgacaaggaaaatcctgagacgcggagaaaaaccctggttgcactctttactgaccaccagtgggttgcgcccgcagtggctacagcagatctgcacgcgcaatatggctcaccaacctacttctatgccttctaccaccactgtcagtccgagatgaaaccgtcttgggcagattcggcacacggcgacgaggtaccttacgtgtttggtatcccaatgattggccccactgagcttttctcctgcaacttctctaaaaatgacgttatgctgagcgccgtcgtcatgacatattggacaaacttcgccaagacgggggacccaaaccagccggtccctcaagatacaaaatttattcacactaaacccaacaggtttgaggaggtagcttggagcaagtacaatcccaaagatcagctgtatctccatatcggactcaaaccgcgtgtgagggaccattacagggcaacaaaggtggctttctggttagagctcgttccccatctgcataacttgaatgagatatttcaatacgtatctactactactaaggtccccccaccagatatgacctcctttccatacggtacacggagaagcccggcaaagatttggcctactactaaacggcctgcaattacaccagcgaacaaccccaaacactcgaaggatcctcacaagacgggaccagaggacaccactgttttgattgaaactaagcgcgattacagtacagagctgagcgtgactatcgccgttggtgcctcactgctgtttttaaacatcctagcattcgcagcactctattataaaaaagacaagcgaaggcacgaaactcacaggcatccaagtccccagcgcaataccactaatgatatcacgcatatccagaacgaagaaatcatgtcattacagatgaagcagttagagcacgaccacgaatgtgagtctctgcaggctcacgatactctgcggttgacatgtccacctgattacacgcttacactgagacgatctcccgacgacattccttttatgacccctaatactatcaccatgattccaaatacactaatgggaatgcagccactgcacactttcaagaccttcagcgggggccaaaatagcactaatcttccacacggccattcgacgaccagggtttag

SEQ ID NO: 325359 - DNA, 2511 bp, Artificial Sequence
  derived and/or modified sequence
atgctccggccccagggtctcctgtggcttcccctgctctttacttccgtatgcgttatgttgaacagtaacgtgctcctctggattaccgcactagcgataaaattcactctgatagactctcaggcccagtatcctgtggtcaatacaaattatggcaagatccaagggctaagaacccccttgcctagcgaaatcctggggcctgtcgagcagtatctgggagtgccttacgcgagcccgcctacaggcgagcggagatttcagccacccgagtccccttccagttggacggggatccggaatgccacgcaatttagcgctgtttgcccacagcatctcgacgagagatttctcctccatgacatgttgccgatatggttcactacatccttggatacactgatgacatacgtccaagaccagaatgaagactgcctctatctgaacatttacgttccgatggaagatggcaccaacattaaacgcaatgccgacgacatcacgagcaatgaccatggagaagacaaagacattcatgagcagaattctaagaagcccgtgatggtgtatatccacgggggctcatatatggaaggtactgggaatatgattgacggtagcattctggcctcatacggaaacgtcattgtgataaccattaactatagacttgggatccttggctttctctcaactggcgaccaggctgccaaagggaactacggtttgctcgatcagattcaagcgctgcggtggattgaagaaaacgtgggagccttcggaggagacccaaaacgagtcacgatctttggcagcggtgcaggcgcaagctgcgtcagcttgctgaccctcagtcactatagtgagggcctctttcagaaggcgattatccagtcaggaacagccctgtcctcctgggcagtgaattatcaaccagccaagtacactcggattctagccgacaaagtgggctgtaacatgctagatactactgatatggtagaatgtctcaagaataagaattacaaggaattaattcagcaaacaatcacccccgccacatatcacattgcctttggaccagttattgacggcgacgtgattccagacgaccctcagatattgatggaacagggagaattcctgaattacgacataatgcttggagtgaatcaaggtgaagggttaaaattcgtcgacgggattgtggacaatgaagacggcgtgactcctaacgactttgatttctctgtgtccaacttcgtcgacaacctgtatggataccccgagggcaaagataccctccgtgagaccattaaattcatgtacacagattgggctgacaaggagaatcctgagacacgacgcaaaactctggtggcactgtttaccgatcaccagtgggtggcgcccgcggtggcaaccgccgacttgcatgcacaatacggtagcccaacatatttctatgccttttaccatcactgtcagagcgaaatgaagccgtcatgggccgattctgcgcacggagatgaggtcccttacgtattcggcatacctatgatcggccctactgagttattctcatgcaatttcagcaaaaatgatgtgatgctgtccgcggtggtgatgacttactggaccaattttgcgaagaccggtgaccctaaccagcccgtacctcaagacaccaagttcatccataccaagcctaatcgctttgaggaagtggcctggagcaaatacaaccccaaggatcagctgtatctgcacattgggctcaagccccgggtccgagaccattacagggctactaaggtggccttctggctcgagctggtgccacatttacacaatttgaacgaaatcttccaatacgtgagtacaactacaaaagttcccccccctgatatgacgagctttccttacggaacaagacggtctcccgccaaaatctggccaacaaccaagcgtcccgcaatcaccccagcaaataaccccaaacatagcaaagatccccacaaaaccgggcccgaggacacgaccgtgctcatcgagaccaaacgggactactccacagagctctccgtcacaattgcagtgggcgcctcccttctcttcctaaatattctggctttcgccgcactgtactacaagaaggataagcgcagacatgaaactcacagacacccctcaccccaacgaaatactactaatgacatcacccacatccagaatgaagaaattatgtcacttcagatgaaacagctggaacacgatcatgaatgtgagtctctccaagctcacgacacactcaggttgacctgcccacctgattatactctgacactgagaagaagccctgacgatattccattcatgacaccgaacacaatcacaatgatccctaatactcttatgggaatgcagcctctgcatactttcaagacttttagtgggggccaaaattctaccaatctcccccatggccactctacaacgcgcgtgtag

SEQ ID NO: 325360 - DNA, 2622 bp, Artificial Sequence
  derived and/or modified sequence
atgctgcggccccagggcctgctgtggctgcccctgctcttcacctctgtgtgtgtgatgctgaacagcaatgtgctgctgtggatcacagccctggccatcaagttcaccctgattgacagccaggcccagtaccctgtggtgaacaccaactacggcaagatccagggcctgcggacccccctgcccagcgagatcctgggccctgtggagcagtacctgggcgtgccctatgccagccccccaactggagagcggcgcttccagcccccagagagccccagctcctggacaggcatcagaaatgccacccagttctctgctgtgtgcccccagcacctggatgagcgcttcctgctgcatgacatgctgcccatctggttcaccaccagcctggacaccctgatgacctacgtgcaggaccagaatgaagactgcctgtacctgaacatctacgtgcccatggaggatggcaccaacatcaagagaaatgctgatgacatcaccagcaatgaccatggagaggacaaggacatccacgagcagaacagcaagaagcctgtgatggtgtacatccatggaggcagctacatggagggcactggaaacatgattgatggcagcatcctggccagctatggaaatgtgattgtcatcaccatcaactaccgcctgggcatcctggcccagaacaccctggcccacggcaactgcaagcaccgctgccagctgcacctgcaggccccccgggactgcaagagcgcctaccccttcagaaatgaagatgagatccggggcttcctgagcactggagaccaggccgccaagggcaactacggcctgctggaccagatccaggccctgcgctggattgaagaaaatgtgggcgccttcggcggggaccccaagagggtgaccatcttcggcagcggggccggggccagctgtgtgtccctgctgaccctgagccactacagcgagggcctcttccagaaggccatcatccagagcggcacagccctgagctcctgggccgtgaactaccagcctgccaagtacacccgcatcctggccgacaaggtgggctgcaacatgctggacaccacagacatggtggagtgcctgaagaacaagaactacaaggagctgatccagcagaccatcaccccagccacctaccacatcgcctttggacctgtgattgatggagatgtgatcccagatgacccccagatcctgatggagcagggcgagttcctgaactatgacatcatgctgggcgtgaaccagggcgagggcctgaagtttgtggatggcatcgtggacaatgaagatggagtgaccccaaatgactttgacttctctgtgagcaactttgtggacaacctgtatggctacccagagggcaaggacaccctgcgggagaccatcaagttcatgtacacagactgggccgacaaggagaaccctgagaccaggaggaagaccctggtggccctcttcacagaccaccagtgggtggccccagctgtggccacagctgacctgcacgcccagtatggcagccccacctacttctacgccttctaccaccactgccagagcgagatgaagcccagctgggccgacagcgcccatggagatgaggtgccctacgtgtttggcatccccatgattggccccacagagctgttcagctgcaacttcagcaagaatgatgtgatgctgtctgctgtggtgatgacctactggaccaactttgccaagacaggagaccccaaccagcctgtgccccaggacaccaagttcatccacaccaagcccaacagatttgaggaggtggcctggagcaagtacaaccccaaggaccagctgtacctgcacatcggcctgaagccccgggtgcgggaccactaccgggccaccaaggtggccttctggctggagctggtgccccacctgcacaacctgaatgagatcttccagtatgtgtccaccaccaccaaggtgcccccaccagacatgaccagcttcccctacggcaccaggaggagccctgccaagatctggcccaccaccaagaggcctgccatcaccccagccaacaaccccaagcacagcaaggacccccacaagacaggccctgaggacaccaccgtgctgattgagaccaagagggactacagcacagagctgtctgtgaccatcgctgtgggcgccagcctgctcttcctgaacatcctggcctttgctgccctgtactacaagaaggacaagagaagacatgagacccaccgccaccccagcccccagaggaacaccaccaatgacatcacccacatccagaatgaggagatcatgagcctgcagatgaagcagctggagcatgaccatgaatgtgagagcctgcaggcccatgacaccctgcggctgacctgccccccagactacaccctgaccctgcggcgcagcccagatgacatccccttcatgacccccaacaccatcaccatgatccccaacaccctgatgggcatgcagcccctgcacaccttcaagaccttcagcggcggccagaacagcaccaacctgccccacggccacagcaccaccagggtgtag

SEQ ID NO: 325361 - DNA, 2511 bp, Artificial Sequence
  derived and/or modified sequence
atgctgcggccccagggcctgctgtggctgcccctgctcttcacctctgtgtgtgtgatgctgaacagcaatgtgctgctgtggatcacagccctggccatcaagttcaccctgattgacagccaggcccagtaccctgtggtgaacaccaactacggcaagatccagggcctgcggacccccctgcccagcgagatcctgggccctgtggagcagtacctgggcgtgccctatgccagccccccaactggagagcggcgcttccagcccccagagagccccagctcctggacaggcatcagaaatgccacccagttctctgctgtgtgcccccagcacctggatgagcgcttcctgctgcatgacatgctgcccatctggttcaccaccagcctggacaccctgatgacctacgtgcaggaccagaatgaagactgcctgtacctgaacatctacgtgcccatggaggatggcaccaacatcaagagaaatgctgatgacatcaccagcaatgaccatggagaggacaaggacatccacgagcagaacagcaagaagcctgtgatggtgtacatccatggaggcagctacatggagggcactggaaacatgattgatggcagcatcctggccagctatggaaatgtgattgtcatcaccatcaactaccgcctgggcatcctgggcttcctgagcactggagaccaggccgccaagggcaactacggcctgctggaccagatccaggccctgcgctggattgaggagaatgtgggcgcctttggaggagaccccaagagggtgaccatctttggaagtggagctggggccagctgtgtgtccctgctgaccctgagccactacagcgagggcctcttccagaaggccatcatccagagcggcacagccctgagctcctgggccgtgaactaccagcctgccaagtacacccgcatcctggccgacaaggtgggctgcaacatgctggacaccacagacatggtggagtgcctgaagaacaagaactacaaggagctgatccagcagaccatcaccccagccacctaccacatcgccttcggccctgtgattgatggagatgtgatcccagatgacccccagatcctgatggagcagggcgagttcctgaactatgacatcatgctgggcgtgaaccagggcgagggcctgaagtttgtggatggcatcgtggacaatgaagatggagtgaccccaaatgactttgacttctctgtgagcaactttgtggacaacctgtatggctacccagagggcaaggacaccctgcgggagaccatcaagttcatgtacacagactgggccgacaaggaaaatcctgagaccaggaggaagaccctggtggccctcttcacagaccaccagtgggtggccccagctgtggccacagctgacctgcacgcccagtatggcagccccacctacttctacgccttctaccaccactgccagagcgagatgaagcccagctgggccgacagcgcccatggagatgaggtgccctacgtgtttggcatccccatgattggccccacagagctgttcagctgcaacttcagcaagaatgatgtgatgctgtctgctgtggtgatgacctactggaccaactttgccaagacaggagaccccaaccagcctgtgccccaggacaccaagttcatccacaccaagcccaacagatttgaggaggtggcctggagcaagtacaaccccaaggaccagctgtacctgcacatcggcctgaagccccgggtgcgggaccactaccgggccaccaaggtggccttctggctggagctggtgccccacctgcacaacctgaatgagatcttccagtatgtgtccaccaccaccaaggtgcccccaccagacatgaccagcttcccctacggcacccggcgcagccctgccaagatctggcccaccaccaagaggcctgccatcaccccagccaacaaccccaagcacagcaaggacccccacaagacaggccctgaggacaccaccgtgctgattgagaccaagagggactacagcacagagctgtctgtgaccatcgctgtgggcgccagcctgctcttcctgaacatcctggcctttgctgccctgtactacaagaaggacaagagaagacatgagacccaccgccaccccagcccccagaggaacaccaccaatgacatcacccacatccagaatgaggagatcatgagcctgcagatgaagcagctggagcatgaccatgaatgtgagagcctgcaggcccatgacaccctgcggctgacctgccccccagactacaccctgaccctgcggcgcagcccagatgacatccccttcatgacccccaacaccatcaccatgatccccaacaccctgatgggcatgcagcccctgcacaccttcaagaccttcagcggcggccagaacagcaccaacctgccccacggccacagcaccaccagggtgtag

SEQ ID NO: 325362 - DNA, 2622 bp, Artificial Sequence
  derived and/or modified sequence
atgctgcggccccagggcctgctgtggctgcccctgctgttcacctctgtgtgcgtgatgctgaattcaaacgtgttgctgtggatcaccgccctggctatcaaattcacactgattgattcgcaggcccaatatccggtggtcaacaccaattacggcaagatacagggcctccgcacaccgcttcctagcgagatcctggggcccgtagagcagtacctgggtgtgccttatgcatctccacccaccggtgaaagaagatttcaaccacctgagagtcctagctcatggactgggataaggaacgcaacccaattttcagctgtttgtccacaacacctagatgaacgctttctactccacgacatgctaccaatctggttcaccacctcactggacaccctcatgacgtatgtgcaggaccagaatgaggactgcctgtatctgaacatctacgtccccatggaagacggcaccaacataaagcggaatgctgatgacatcacatccaacgatcacggtgaggacaaagatatccacgaacagaattccaaaaaacctgtaatggtgtacatccatgggggaagctatatggaaggaactggcaatatgattgacggcagtatcctggctagctacggcaacgtgatcgtgattacaattaattatcggttggggattttagcccagaatacattggcccacggaaactgtaagcatcggtgtcagcttcatctgcaggctccaagagattgcaaatcagcttatcccttcagaaacgaggacgaaattcgcggatttctttcaaccggtgatcaggccgctaaaggaaactacgggctgctggatcaaattcaggctctccgctggatcgaggagaacgtgggcgccttcggtggcgatcctaagcgggtgaccatctttggttccggcgctggggcctcctgtgtgtctctgcttactctatctcactattcagaggggctgtttcagaaagctatcattcagagtggaacggcattaagctcatgggcagttaactatcagcccgctaagtatacacgtatactggctgacaaggtgggttgcaacatgctggacaccactgacatggtagaatgccttaagaataagaactataaggaactcatccagcagaccatcacacctgctacataccacatcgcttttggcccagtcatcgatggggatgtaatcccggacgatccacagatattaatggaacagggcgagtttctgaattatgatataatgctcggagtgaaccaaggcgaaggtctgaagttcgtcgacgggattgtggataacgaagatggtgtcactcctaatgactttgacttctctgtctccaacttcgtagacaacctctacggctacccagaaggcaaagacactcttagagaaaccatcaaatttatgtacacagattgggcggataaggagaaccctgagactcgcaggaagacactggtcgcccttttcactgaccaccagtgggtggctcctgccgtggcaactgccgaccttcacgcccagtatggctcacccacgtatttttacgcattttaccaccactgtcaatcagagatgaaaccttcttgggctgatagcgcccacggcgatgaggtgccttatgtgttcggaatccccatgattggcccaacagagctgttcagctgcaacttttcaaaaaatgacgtcatgctttctgcagtcgtgatgacctactggactaactttgcaaaaaccggagatcctaaccagcccgtaccccaggacactaagtttatccacacgaaacccaaccggtttgaggaagtggcttggtccaaatataacccgaaagatcaactctatttacacatagggttgaaaccgagggtgagggatcattacagagccaccaaggtcgctttctggctagagctggtgccacacttacacaatctcaacgaaatttttcagtatgtgagcactaccactaaggtcccgccccctgacatgacttcatttccatacggtactagaaggagccccgctaagatctggcctacaaccaaaaggcccgcgattactcccgcaaataatcccaagcattccaaagacccgcacaaaaccggaccggaagacactacagtactgattgaaacaaaacgtgattactctactgaactatcagtaacaatagccgtgggcgcttcccttttgtttctaaacatcctggccttcgccgccttgtactataagaaagataaaagacgccacgagactcaccgccacccaagccctcaacggaataccacaaacgacatcacccatatacaaaacgaggaaattatgtctctgcaaatgaagcagttagaacacgaccatgaatgtgaaagtttgcaggctcacgatactctcaggctcacctgcccccctgattacacgctcacactgaggcgctcccccgatgacatacctttcatgacacctaacaccatcacgatgatacctaatacactgatgggaatgcagcctctgcacacttttaagacatttagcggcggtcaaaattccactaatctgcctcacgggcacagtacaacaagagtgtag

SEQ ID NO: 325363 - DNA, 2511 bp, Artificial Sequence
  derived and/or modified sequence
atgctgcggccccagggcctgctgtggctgcccctgctgttcaccagtgtctgcgtgatgttgaattcgaacgtgctgctgtggataacagcccttgccattaaattcaccctgatcgattcccaggcccagtatcctgtcgttaacacaaattacgggaaaatccagggcctacgcacccctttgcccagtgagattttaggtcctgtcgagcagtacttgggcgtcccatatgcctcacccccgacgggcgagagacgcttccaaccccccgagtctccttcctcctggacaggtattcgtaacgccactcagtttagcgcagtctgtccacagcacttagatgagagattcctgttgcatgatatgctgcctatatggtttactacaagcctggacaccctgatgacgtatgtgcaggatcaaaatgaagactgcttatacctgaacatctatgtgcctatggaggatggtaccaacattaaaaggaatgccgatgatatcacctctaacgaccacggggaagacaaagacattcacgagcagaatagtaaaaagcccgtgatggtgtatatccacgggggttcatatatggaggggactggcaacatgatcgatggatccatcctggcatcatacgggaacgtgatcgtcatcaccatcaattatcgtctgggcattctgggtttcctttccaccggcgaccaggccgccaaaggaaattatggcctgctggatcagattcaagctctccgatggatcgaagaaaatgtgggggccttcggaggagatcctaagagggtgaccatttttggcagtggcgcgggcgccagttgtgtttcactgctgaccctgtcccactacagtgagggacttttccaaaaagccataatccagagcgggaccgcgctgagctcttgggccgtgaactaccagccagctaagtatacccggatccttgccgacaaggtggggtgcaacatgttggatacaaccgatatggtggagtgcctcaagaacaagaactacaaagagttgatccagcagaccattacacctgccacctaccacattgccttcggacccgtgattgacggcgatgtgatcccggacgacccgcaaatactcatggaacagggggagttcctcaattatgatatcatgctgggcgtcaaccaaggggagggactgaagttcgtcgatggcatagtggacaacgaggacggtgtcacacccaatgatttcgacttcagtgtgagtaactttgtggacaacctttacggatatccagaggggaaggacacactcagggagaccattaagtttatgtacacggattgggccgacaaggaaaatcccgaaacaaggcgcaaaacattggtcgctttatttacggatcaccagtgggtggcacctgctgtggccaccgccgacctgcatgcgcagtatggatctcctacctatttttacgcattctatcatcactgtcagagtgagatgaaaccctcctgggcagactcagcccacggagatgaggtaccatacgtttttggcatacccatgatcggtccaaccgaattgtttagctgcaacttttcaaagaacgatgtgatgctgagtgcagtcgtcatgacctactggacaaacttcgcaaaaactggagatcctaaccagcccgtcccacaggataccaaattcattcataccaaacccaataggtttgaagaagtggcttggagcaagtacaatcctaaagatcagctgtatttacacatcggtctgaaaccgcgagtaagagaccattatcgcgctaccaaggtggctttttggctggagttggtgccccatttacataacctgaacgagatatttcagtatgtgtcgacaacgactaaggtcccacctccagatatgacttcgttcccatacggtacgaggagatcccctgccaaaatctggccaacgacaaagcgtcccgccataacgccggccaacaatccaaaacactctaaagatccccataagactggccccgaagacacaactgttttgattgagacaaagcgcgactattccactgaactgagcgtgaccattgccgtgggtgcgtctctgttgttcctgaacatcctcgcattcgctgccctgtactacaagaaggacaagaggagacacgagacacatcggcaccctagcccacagagaaataccaccaatgatataacccatatacagaacgaggagataatgagcctgcagatgaaacaactggaacacgatcacgagtgcgaaagtctgcaggcccacgacacactccgtttgacttgccccccagactatacgctgacactgaggcgctcaccagatgatatcccattcatgaccccgaatacgatcacaatgatccccaacactttaatgggtatgcagccactgcacaccttcaaaaccttcagcggcggtcagaactcaacaaatctcccccatggccactccacgaccagggtttag

SEQ ID NO: 325364 - DNA, 5338 bp, Artificial Sequence
  derived and/or modified sequence
tttttttcccttccttcatctcctggcctcggataagataaggcttgggggatgcacgaaataatccaagtgattgattagacctggcatggcttggttgggctggagaaagatcggggcgcgctggaaaccccgcgtgaagatgaaatgactttttcgaaagacttatctttctgcaggctcgcctctgagctttgtctccttggagccacctcacttagacagcttcggatgtggatgcagatttgaaccatgttgcgtccccagggactgctatggctccctttgttgttcacctctgtctgtgtcatgttaaactccaatgttcttctgtggataactgctcttgccatcaagttcaccctcattgacagccaagcacagtatccagttgtcaacacaaattatggtaaaatccagggcctaagaacaccattacccagtgagatcttgggtccagtggagcagtacttaggggtcccctatgcctcacccccaactggagagaggcggtttcagccaccagaatccccatcctcctggactggcatccgaaatgctactcagttttctgctgtgtgcccccagcacctggatgaaagattcttattgcatgacatgctgcccatctggtttaccaccagtttggatactttgatgacctatgttcaagatcaaaatgaagactgcctttacttaaacatctatgtgcccatggaagatggaaccaacataaagagaaatgcagacgatataaccagtaatgaccatggtgaagataaagatattcatgaacagaacagtaagaagcctgttatggtctatatccatgggggatcttacatggagggaaccggtaacatgattgatggcagcattttggccagctatgggaacgtcatcgttatcaccattaactaccgtctgggaatactagcacaaaacaccctggctcatggaaactgcaagcatcgttgtcagctgcacctgcaggcaccacgggattgcaagtcagcataccctttcagaaatgaggatgaaattagagggtttttaagtaccggtgaccaggcagcaaaaggcaactatgggctcctggatcagattcaagcactgaggtggattgaggagaatgtcggagcctttggcggggaccccaagagagtgactatctttggctcgggggctggggcctcctgtgtcagcctgttgaccctgtcccactactcagaaggtctcttccagaaggccatcattcagagcggcactgccctgtccagctgggcagtgaactaccagccggccaagtacactcggatattggcagacaaggtcggctgcaacatgctggacaccacggacatggtagaatgtctgaagaacaagaactacaaggagctcatccagcagaccatcaccccggccacctaccacatagcctttgggccggtgatcgacggcgacgtcatcccagacgacccccagatcctgatggagcaaggcgagttcctcaactacgacatcatgctgggcgtcaaccaaggggaaggcctgaagttcgtggacggcatcgtggataacgaggacggtgtgacgcccaacgactttgacttctccgtgtccaacttcgtggacaacctttacggctaccctgaagggaaagacactttgcgggagactatcaagttcatgtacacagactgggccgataaggaaaacccggagacgcggcggaaaaccctggtggctctctttactgaccatcagtgggtggcccccgccgtggccaccgccgacctgcacgcgcagtacggctcccccacctacttctatgccttctatcatcactgccaaagcgaaatgaagcccagctgggcagattcggcccatggcgatgaagtcccctatgtcttcggcatccccatgatcggtcccacagagctcttcagttgtaatttctccaagaacgacgtcatgctcagtgccgtggtgatgacctactggacgaacttcgccaaaactggtgatccaaaccaaccagttcctcaggataccaagttcattcatacaaaacccaatcgctttgaagaagtggcctggtccaagtataatcccaaagaccagctctatctgcatattggcttgaaacccagagtgagagatcactaccgggcaacgaaagtggctttctggttggaattggttcctcatttgcacaacttgaacgagatattccagtatgtttcaacaaccacaaaggttcctccaccagacatgacatcatttccctatggcacccggcgatctcccgccaagatatggccaaccaccaaacgcccagcaatcactcctgccaacaatcccaaacactctaaggaccctcacaaaacagggcccgaggacacaactgtcctcattgaaaccaaacgagattattccaccgaattaagtgtcaccattgccgtcggggcgtcgctcctcttcctcaacatcttagcctttgcggcgctgtactacaaaaaggacaagaggcgccatgagactcacaggcaccccagtccccagagaaacaccacaaatgatatcactcacatccagaacgaagagatcatgtctctgcagatgaagcagctggaacacgatcacgagtgtgagtcgctgcaggcacacgacacgctgaggctcacctgccctccagactacaccctcacgctgcgccggtcgccggatgacatcccatttatgacgccaaacaccatcaccatgattccaaacacattgatggggatgcagcctttacacacttttaaaaccttcagtggaggacaaaacagtacaaatttaccccacggacattccaccactagagtatagcttttccctatttcccctcctatccctctgcccctactgctcagcaatgtaaaagagacaaataaggagaaagaaaatctccaaaccaggaatgtttttgtgccactgactttagataaaaatgcaaaagggcagtcatcctgtcccagcagacccttctcattggcattttccagtattgtgagatcaatttctgaccatatgaaatgtgaaaagtatatgtttctgttacaatactgctttaagatctaaaccatgccaacagatgtttcgtgtgactaggacatcaccatttcaaggaactgtgtgtttccaacatcatggtagcagcacacacttccaaagctcagccagggacacttaatattttttaattacaatggaaatttaaacatttttatgtgggctacacaatggatggctcttcttaagtgaagaaagactctataggcttttacacagcacatgaagcagtaatccagaaagaaggaaatgcagaattttattatcaaagtaagcgaattgactgtgcagaaaaattgtagggttctgtggaaggaggtattctgccagcctgaactatatttaagaaactttgtaaaaaataaaaatgtatatagctgtgagctcaaacaaaaactgcagacaaacaaaaaagagaaaagcttttatttgtgttttcagtttgaaagaacttttagcaaggttgtgctttcaaacacatattagtcctaccaccttagttcctctacagcaaaagaggcttttcttcttaattacatgtaaacaaagacatgggattttctgacgtaagattttcatttgtaggaatatgtgatgtcaaatggaagactcagaagttttgtgtggcctatttctccctgtcaggttgcacagatgcatgtagagcattcttaggagaccattgttttagaaaactttgatttgtacatgttagttttcatgaaattgcaacacagagataggtcctaaaagtggaatgtatttaaaacttgttgaattagacacacacacacagacacacacaaagaatcagcagagaaaacaaaatacaagtcctgttctgtagttcttgccctttgaatatatttgggaagagttgcttcctatttcaggaccctgccaaaaaagaagaaagcttgcctttggtggggctatgccccttggagtaaatacagctctgtgttccctagcagctgccggaggatttggctgatgaagtacctgctcagcttagctaatcagattaaaggaagacatgtatgtcttttgtttaagcacctagtcccttatgtatcagtaaacaggtttttaaaaatcttttatgtcatttataggataaaacatatgcttgtctgaaaatatcaccttttgtggatttatctgatcaccaaataataaatattaagaagaatgggggaaaaaggatagaatattaaaactgctttgcataggtttttggggaaattaggatatcttcactgacaagacactgaatggaatttattcacccattttaaattggttacttggggatcagagatttgtctctccaacagcttgtggttttcttattactcattttcaggaaagtttgtagtattacaaggcagaaggaaacacagtagcaatggttgctctatattttgtctttcaaagattactgcattaccaagaaacagtagccaaagatgtttgaagatcatgtcccttagctgcattgtgggttattctagaaatccaatgttaaatgcctctactaaagtggggattccccataaaaattgtccagctacctgactcttttgcaataacaactttgattactgaatccatacactcaaactatagtgatatatcagtgtttgggagtgacctctagaaaaaagaaaactgtttttagaaatacataaaatcacttccaaatcctgttgcttatgttgggttaaatttgaaagcaattctctatatataaatatgtgaaatattatgatctgaacttagcacacatgaagcaacatttctttgctacacagaggtgtcttggaaagatttcattcccaattcatttttcatagatctataatcaggcaatttctgcaagcaatgtatgaccccacctgagcaaccacaaataggctctccatgaaactgcaaaggaactgatgtgtggcatccatgctggttttgtctgtctataatatgaattcaagtatctgttcatatttccaattgtctcctgctagcaatatgtgccacaacatgacagtcttgtgacatcttaaggaaaagaagagttcctgttaaatgaatagctttagcttttacaggggattatgattaaaagtgatttagtacatcttacatgatatctcatttctacgtgaaaagaagttatagaatcttcatagagttccatgagaaaaatatacttgctatttat

SEQ ID NO: 325365 - DNA, 6617 bp, Artificial Sequence
  derived and/or modified sequence
tccaaacccggcaatgttggtggctcttgcattcctctggatgagcgaatctagttggggggttcccgaaggggaaggcgcctgggctttcaatacatcctcctgaatcatactgcgtttcaggttccttagaaaaatttggatgtgtaaaaagaactcttaacggcgatgcaggtcttccacagctaaggaaccaacataaagagaaatgcagacgatataaccagtaatgaccatggtgaagataaagatattcatgaacagaacagtaagaagcctgttatggtctatatccatgggggatcttacatggagggaaccggtaacatgattgatggcagcattttggccagctatgggaacgtcatcgttatcaccattaactaccgtctgggaatactagggtttttaagtaccggtgaccaggcagcaaaaggcaactatgggctcctggatcagattcaagcactgaggtggattgaggagaatgtcggagcctttggcggggaccccaagagagtgactatctttggctcgggggctggggcctcctgtgtcagcctgttgaccctgtcccactactcagaaggtctcttccagaaggccatcattcagagcggcactgccctgtccagctgggcagtgaactaccagccggccaagtacactcggatattggcagacaaggtcggctgcaacatgctggacaccacggacatggtagaatgtctgaagaacaagaactacaaggagctcatccagcagaccatcaccccggccacctaccacatagcctttgggccggtgatcgacggcgacgtcatcccagacgacccccagatcctgatggagcaaggcgagttcctcaactacgacatcatgctgggcgtcaaccaaggggaaggcctgaagttcgtggacggcatcgtggataacgaggacggtgtgacgcccaacgactttgacttctccgtgtccaacttcgtggacaacctttacggctaccctgaagggaaagacactttgcgggagactatcaagttcatgtacacagactgggccgataaggaaaacccggagacgcggcggaaaaccctggtggctctctttactgaccatcagtgggtggcccccgccgtggccaccgccgacctgcacgcgcagtacggctcccccacctacttctatgccttctatcatcactgccaaagcgaaatgaagcccagctgggcagattcggcccatggcgatgaagtcccctatgtcttcggcatccccatgatcggtcccacagagctcttcagttgtaatttctccaagaacgacgtcatgctcagtgccgtggtgatgacctactggacgaacttcgccaaaactggtgatccaaaccaaccagttcctcaggataccaagttcattcatacaaaacccaatcgctttgaagaagtggcctggtccaagtataatcccaaagaccagctctatctgcatattggcttgaaacccagagtgagagatcactaccgggcaacgaaagtggctttctggttggaattggttcctcatttgcacaacttgaacgagatattccagtatgtttcaacaaccacaaaggttcctccaccagacatgacatcatttccctatggcacccggcgatctcccgccaagatatggccaaccaccaaacgcccagcaatcactcctgccaacaatcccaaacactctaaggaccctcacaaaacagggcccgaggacacaactgtcctcattgaaaccaaacgagattattccaccgaattaagtgtcaccattgccgtcggggcgtcgctcctcttcctcaacatcttagcctttgcggcgctgtactacaaaaaggacaagaggcgccatgagactcacaggcaccccagtccccagagaaacaccacaaatgatatcactcacatccagaacgaagagatcatgtctctgcagatgaagcagctggaacacgatcacgagtgtgagtcgctgcaggcacacgacacgctgaggctcacctgccctccagactacaccctcacgctgcgccggtcgccggatgacatcccatttatgacgccaaacaccatcaccatgattccaaacacattgatggggatgcagcctttacacacttttaaaaccttcagtggaggacaaaacagtacaaatttaccccacggacattccaccactagagtatagcttttccctatttcccctcctatccctctgcccctactgctcagcaatgtaaaagagacaaataaggagaaagaaaatctccaaaccaggaatgtttttgtgccactgactttagataaaaatgcaaaagggcagtcatcctgtcccagcagacccttctcattggcattttccagtattgtgagatcaatttctgaccatatgaaatgtgaaaagtatatgtttctgttacaatactgctttaagatctaaaccatgccaacagatgtttcgtgtgactaggacatcaccatttcaaggaactgtgtgtttccaacatcatggtagcagcacacacttccaaagctcagccagggacacttaatattttttaattacaatggaaatttaaacatttttatgtgggctacacaatggatggctcttcttaagtgaagaaagactctataggcttttacacagcacatgaagcagtaatccagaaagaaggaaatgcagaattttattatcaaagtaagcgaattgactgtgcagaaaaattgtagggttctgtggaaggaggtattctgccagcctgaactatatttaagaaactttgtaaaaaataaaaatgtatatagctgtgagctcaaacaaaaactgcagacaaacaaaaaagagaaaagcttttatttgtgttttcagtttgaaagaacttttagcaaggttgtgctttcaaacacatattagtcctaccaccttagttcctctacagcaaaagaggcttttcttcttaattacatgtaaacaaagacatgggattttctgacgtaagattttcatttgtaggaatatgtgatgtcaaatggaagactcagaagttttgtgtggcctatttctccctgtcaggttgcacagatgcatgtagagcattcttaggagaccattgttttagaaaactttgatttgtacatgttagttttcatgaaattgcaacacagagataggtcctaaaagtggaatgtatttaaaacttgttgaattagacacacacacacagacacacacaaagaatcagcagagaaaacaaaatacaagtcctgttctgtagttcttgccctttgaatatatttgggaagagttgcttcctatttcaggaccctgccaaaaaagaagaaagcttgcctttggtggggctatgccccttggagtaaatacagctctgtgttccctagcagctgccggaggatttggctgatgaagtacctgctcagcttagctaatcagattaaaggaagacatgtatgtcttttgtttaagcacctagtcccttatgtatcagtaaacaggtttttaaaaatcttttatgtcatttataggataaaacatatgcttgtctgaaaatatcaccttttgtggatttatctgatcaccaaataataaatattaagaagaatgggggaaaaaggatagaatattaaaactgctttgcataggtttttggggaaattaggatatcttcactgacaagacactgaatggaatttattcacccattttaaattggttacttggggatcagagatttgtctctccaacagcttgtggttttcttattactcattttcaggaaagtttgtagtattacaaggcagaaggaaacacagtagcaatggttgctctatattttgtctttcaaagattactgcattaccaagaaacagtagccaaagatgtttgaagatcatgtcccttagctgcattgtgggttattctagaaatccaatgttaaatgcctctactaaagtggggattccccataaaaattgtccagctacctgactcttttgcaataacaactttgattactgaatccatacactcaaactatagtgatatatcagtgtttgggagtgacctctagaaaaaagaaaactgtttttagaaatacataaaatcacttccaaatcctgttgcttatgttgggttaaatttgaaagcaattctctatatataaatatgtgaaatattatgatctgaacttagcacacatgaagcaacatttctttgctacacagaggtgtcttggaaagatttcattcccaattcatttttcatagatctataatcaggcaatttctgcaagcaatgtatgaccccacctgagcaaccacaaataggctctccatgaaactgcaaaggaactgatgtgtggcatccatgctggttttgtctgtctataatatgaattcaagtatctgttcatatttccaattgtctcctgctagcaatatgtgccacaacatgacagtcttgtgacatcttaaggaaaagaagagttcctgttaaatgaatagctttagcttttacaggggattatgattaaaagtgatttagtacatcttacatgatatctcatttctacgtgaaaagaagttatagaatcttcatagagttccatgagaaaaatatacttgctatttatagaaaacgagaaaaaagaaaaaaatgagaaacaagtaagaaaaaatcctttcctaggcttttccttgatcttcagaggcacacagggtttaatggttccttaggttattattttgaggttttgttctttcttttgccttaagtaatgacagaagatatatatggccagacacatatgtataaacttttcagcagcattttaataataaaatatcacactattttctaatgctttgtacaaacaattatgcatctgttctttcttggtaggtggaatattttatttacttttgccattctttgaatgcctttttctttgtaaatgctacatggtagctctcacataggctacaaatggataaatacatttggtaatgggatggtttctttagctttggccagctgcacagttgaggaggctctgctggcctgattttggaaaaccaagccctgtttggtgaagctcctgagatgacactgcctgaaaatgagtatttggttgtgttatttctaccactgttcattcttgtgtctctgtgttttgatttgtgttcaacaaactgatgccttaatggtttcaaatagaaagccttaggtgagtaaaccttctagtgacagtaagaaattctactgaatgaaactccagaggcagaaaatcattgtcattccaatgggagctcaattgtcaattccttcctgtgcattcagccatcacgaacttatttcacattcacagtagctctaaggggcaggcacctgcattactcccctttcataatggaagatgttctgactttgaaacatgcccccttggacaggaaaatttgatggataacaggatagcatatcctcatatcccaatctttcaccaagaagttatacagcaaacacttgtaagtcaaggtcttgcatgataatctttgctaagtagcaagtaaagaaatatagcaaggacccagactctttggaatatgtgaactaaatccttcagatgttgttggcctcaatcatgttgtgaaggcacacaggagaatacatacacacacatatgcatatatgtatatatgtacatgtatgtgtacattatatatgagtatacatgtacctatcctatatatgtatgtatgtatagagtcacagactgcataatgttttggacaaatatagatcacatatatgatgatagtgtcttgagattaaaataccatgtttttattgtaccttttcagtgttcagatatgtttagacaaacaaatgcttatcattgtgttacagttgcctaaggtcttctctccagtcacatgctgtacaggtttgtagactggaagaactaggctataccatagagcctaggtgtgctataggctacacatcggttttgtgtaagtatactacatgatgtttgcacaatgatgaaattgcctaacgaaacttttctcagaaacctattgatacatgactgtgtatgtttacattatatatactgtatatgcacacatgcatatatgcatatatatgttatacatttacatatgtacatggatatcacatactttaaattcctgaagatgtcattttcattaaatacatatgcacacacactcataaacacacacagactcatatatacacacaaatctataacacatttgtgctcacatatacattcctctgtgtgtgtgtgtgtattacattactgctttttatctgtgaaatcacattctgcagtttcatttactgtgatcaactatgatctaaaaatatatgagtacttcaataagatattttgaaagaaaccacattcacataacatttatgacattataattgttctattttattagctattgttcatctcttactccatctactttataaattaagcttcataataagtgtgtatatttaataaaatatatagtata

SEQ ID NO: 325366 - DNA, 3003 bp, Artificial Sequence
  derived and/or modified sequence
agtacaggggaaaaggagggaaaaggccagggctggagatggcgaaagcaggaggacttctgcaaactgttgcattggagttttcgaaagacttatctttctgcaggctcgcctctgagctttgtctccttggagccacctcacttagacagcttcggatgtggatgcagatttgaaccatgttgcgtccccagggactgctatggctccctttgttgttcacctctgtctgtgtcatgttaaactccaatgttcttctgtggataactgctcttgccatcaagttcaccctcattgacagccaagcacagtatccagttgtcaacacaaattatggtaaaatccagggcctaagaacaccattacccagtgagatcttgggtccagtggagcagtacttaggggtcccctatgcctcacccccaactggagagaggcggtttcagccaccagaatccccatcctcctggactggcatccgaaatgctactcagttttctgctgtgtgcccccagcacctggatgaaagattcttattgcatgacatgctgcccatctggtttaccaccagtttggatactttgatgacctatgttcaagatcaaaatgaagactgcctttacttaaacatctatgtgcccatggaagatggaaccaacataaagagaaatgcagacgatataaccagtaatgaccatggtgaagataaagatattcatgaacagaacagtaagaagcctgttatggtctatatccatgggggatcttacatggagggaaccggtaacatgattgatggcagcattttggccagctatgggaacgtcatcgttatcaccattaactaccgtctgggaatactagggtttttaagtaccggtgaccaggcagcaaaaggcaactatgggctcctggatcagattcaagcactgaggtggattgaggagaatgtcggagcctttggcggggaccccaagagagtgactatctttggctcgggggctggggcctcctgtgtcagcctgttgaccctgtcccactactcagaaggtctcttccagaaggccatcattcagagcggcactgccctgtccagctgggcagtgaactaccagccggccaagtacactcggatattggcagacaaggtcggctgcaacatgctggacaccacggacatggtagaatgtctgaagaacaagaactacaaggagctcatccagcagaccatcaccccggccacctaccacatagcctttgggccggtgatcgacggcgacgtcatcccagacgacccccagatcctgatggagcaaggcgagttcctcaactacgacatcatgctgggcgtcaaccaaggggaaggcctgaagttcgtggacggcatcgtggataacgaggacggtgtgacgcccaacgactttgacttctccgtgtccaacttcgtggacaacctttacggctaccctgaagggaaagacactttgcgggagactatcaagttcatgtacacagactgggccgataaggaaaacccggagacgcggcggaaaaccctggtggctctctttactgaccatcagtgggtggcccccgccgtggccaccgccgacctgcacgcgcagtacggctcccccacctacttctatgccttctatcatcactgccaaagcgaaatgaagcccagctgggcagattcggcccatggcgatgaagtcccctatgtcttcggcatccccatgatcggtcccacagagctcttcagttgtaatttctccaagaacgacgtcatgctcagtgccgtggtgatgacctactggacgaacttcgccaaaactggtgatccaaaccaaccagttcctcaggataccaagttcattcatacaaaacccaatcgctttgaagaagtggcctggtccaagtataatcccaaagaccagctctatctgcatattggcttgaaacccagagtgagagatcactaccgggcaacgaaagtggctttctggttggaattggttcctcatttgcacaacttgaacgagatattccagtatgtttcaacaaccacaaaggttcctccaccagacatgacatcatttccctatggcacccggcgatctcccgccaagatatggccaaccaccaaacgcccagcaatcactcctgccaacaatcccaaacactctaaggaccctcacaaaacagggcccgaggacacaactgtcctcattgaaaccaaacgagattattccaccgaattaagtgtcaccattgccgtcggggcgtcgctcctcttcctcaacatcttagcctttgcggcgctgtactacaaaaaggacaagaggcgccatgagactcacaggcaccccagtccccagagaaacaccacaaatgatatcactcacatccagaacgaagagatcatgtctctgcagatgaagcagctggaacacgatcacgagtgtgagtcgctgcaggcacacgacacgctgaggctcacctgccctccagactacaccctcacgctgcgccggtcgccggatgacatcccatttatgacgccaaacaccatcaccatgattccaaacacattgatggggatgcagcctttacacacttttaaaaccttcagtggaggacaaaacagtacaaatttaccccacggacattccaccactagagtatagcttttccctatttcccctcctatccctctgcccctactgctcagcaatgtaaaagagacaaataaggagaaagaaaatctccaaaccaggaatgtttttgtgccactgactttagataaaaatgcaaaagggcagtcatcctgtcccagcagacccttctcattggcattttccagtattgtgagatcaatttctgaccatatgaaatgtgaaaagtatatgtttctgttacaatactgctttaagatctaaaccatgccaacagatgtttcgtgtgactaggacatcaccatttcaaggaactgtgtgtttc

SEQ ID NO: 325367 - DNA, 2622 bp, Artificial Sequence
  derived and/or modified sequence
atgttacggccacaagggctgctatggctgcctctgctctttaccagtgtgtgcgtgatgctcaacagcaacgttttgctgtggatcactgcgctggccataaaattcacactcatagacagccaagctcagtaccctgttgtcaataccaactatgggaagatccagggtctgaggaccccccttcctagcgagattctggggccagtagagcagtaccttggggtgccctacgcaagtccacctacaggcgaaagacggttccagccacctgaatcgccatcctcctggacaggcatacgcaacgctacccagtttagtgccgtgtgcccccagcatctggacgaacgcttcctactccacgatatgttgcctatctggttcaccacgagcttggatacactcatgacctatgtgcaggatcagaacgaagactgcctatatttgaatatctatgtcccaatggaggatggaaccaatattaaacgaaatgcggatgatattacatcaaatgatcacggcgaggataaagacattcacgagcagaacagcaagaaaccagttatggtgtacatccacggcggtagctacatggaaggcactggcaatatgatagatgggtccatcttggcaagttacggtaatgtcatagttattaccatcaactatcgactgggaattctggcccaaaacaccttggctcacggtaattgcaagcataggtgtcaactgcatctgcaggcacctcgcgactgtaagtctgcatatccttttcggaatgaggacgaaattaggggcttcctgagcacaggtgatcaagccgcaaagggcaattatggccttttagaccagatccaggctctccggtggattgaggagaatgtgggcgcttttggcggtgatcccaaaagagttaccatcttcggaagtggcgcaggcgcaagctgtgtgtctctgcttactctgagccattactctgagggcctttttcagaaagccatcattcagtccggcacagcactctcttcttgggctgtgaattatcaacctgccaagtacaccagaatccttgccgacaaggtggggtgcaatatgctcgacacgaccgatatggtggaatgtctgaaaaacaagaattacaaggaacttattcaacagactattacaccagccacttaccacatcgcattcggccctgtgatcgatggagatgtgatacctgatgacccacagattttaatggagcagggagagttcctgaactacgacatcatgctgggcgtgaatcagggcgaggggctgaagttcgtcgacggaatcgtggacaacgaggacggtgtgacccccaatgatttcgacttttcagtgtccaattttgtggacaacttatacgggtaccctgaaggaaaagatactctgagagagacgatcaagttcatgtacacagattgggcagacaaagagaaccctgaaaccagacgaaaaaccttagtggcactatttacagatcatcaatgggttgcccctgctgtagccacggctgacctccacgcccagtacgggagtcctacctacttctatgcgttctaccatcactgccagagcgaaatgaagcctagctgggccgactctgcacacggggacgaggtgccatacgtattcggaatccctatgattggccctacagagctgttctcctgtaacttcagcaagaatgacgttatgctgagcgcagtggtcatgacatattggaccaacttcgccaagaccggagatcccaaccaacccgtacctcaggatacgaaatttattcatacaaaaccaaaccgcttcgaagaggtggcctggtccaagtataatcccaaagatcagctctatctgcatattgggctgaaacctcgagtacgtgaccattaccgggctacaaaggtggctttttggctcgaattagtgcctcatttacataacttaaatgaaattttccagtatgtttctacgaccacgaaagtgcctcctccagacatgacatcgtttccatatggaacacgcagatcaccagccaagatttggcccacgaccaagagacctgccattacaccagctaataatcctaaacattccaaagacccacataaaaccggccctgaggacacgacagtcctcattgagactaaacgcgactactccaccgagctcagtgtgaccatcgctgttggagcctctttgctgtttttaaacatcctcgcttttgccgctctttactataagaaggacaaacggagacatgagacccacaggcaccccagtccacaaaggaataccactaacgatattacacacatccagaatgaagagatcatgagccttcagatgaagcagctggagcacgatcacgaatgtgagtctctccaggcgcacgatacattgcgtctgacatgtcctcctgactacacccttaccctcagaagatctcctgacgacattccatttatgactccgaataccatcacaatgatcccgaacacgctgatgggcatgcagccccttcatacctttaaaactttcagcggagggcagaacagtacaaatctcccacacggccactcgactacacgggtgtag

SEQ ID NO: 325368 - DNA, 2511 bp, Artificial Sequence
  derived and/or modified sequence
atgctccggcctcagggcttactctggctgcccctgttatttacctctgtctgcgtcatgctaaacagcaacgtcctgctgtggattactgcccttgcaattaagttcacactgatcgactcccaagcccagtatcctgtggtgaacaccaactacggcaagattcaggggttgcgcacacctctcccaagtgagattttgggtccagtggagcagtacctgggcgttccctatgcaagcccccctacaggagagcgccgttttcagccacccgagtctcctagctcttggacaggaatccgtaacgccacacaattcagtgccgtgtgcccacagcatctcgatgaacgattcctcctgcacgatatgctcccaatttggttcactacctcacttgacacgctcatgacctatgtccaggaccaaaacgaggattgtctctacctgaatatatacgtgcccatggaggacgggacaaacatcaaaagaaacgccgatgacataacctccaatgaccacggtgaggataaggatatacacgaacagaattccaagaaacctgtgatggtctacattcacggcggatcatatatggaggggacagggaacatgatcgacggcagcatcctggctagttacggcaacgtgattgtaatcacaatcaactaccggctgggaattctcggttttctgtccaccggagaccaagctgccaaaggcaactacgggctgcttgatcagattcaagcactgaggtggattgaggagaacgtgggggcatttggaggcgatcctaagcgggtgaccatctttggatcaggagctggtgcatcctgcgtgtcccttctgactctgagtcactacagcgagggactcttccagaaggccatcatccaatccggtaccgctctgtcatcatgggcggttaattatcaaccagcaaaatacacccggattttagctgataaagtgggatgtaatatgctggacactactgacatggtggagtgtttgaaaaacaagaattacaaggaactgattcagcaaacaatcacacctgcgacctatcacatagctttcggtcccgtcatcgatggtgacgtaatccccgacgatccccaaattttaatggaacagggtgagttcctgaattatgacataatgctcggtgtgaatcagggagagggcctgaagtttgtggatgggatcgtagataacgaggacggggttacccctaatgactttgactttagtgtgagtaactttgtagacaacctgtatggttaccctgaaggcaaagataccctacgggagacaataaaattcatgtatacagactgggccgacaaagagaatccagaaaccaggagaaaaacactcgtggctctgtttacagatcaccagtgggtcgccccagcagtggccacagcggacctgcatgcccagtatggctctccaacttacttctacgctttttatcaccactgtcagtctgaaatgaaaccaagctgggccgattcagctcacggagatgaggtgccttacgtatttggcatccccatgataggcccaacagagcttttctcctgcaatttttctaaaaacgacgtaatgttgagtgctgtggtaatgacctactggacaaatttcgcaaagactggcgaccctaatcagcctgtgccccaagataccaaattcatccacaccaagcctaacagatttgaagaagtagcctggagtaagtacaacccaaaggaccagctttatctgcacattggcttaaagccaagggtgagagaccactatcgtgccactaaggtggccttttggcttgagctggtgcctcacctccacaatttgaacgagatatttcaatatgtgagcaccaccaccaaggtcccccctcctgatatgacaagttttccatacggcacccgcagatcacctgccaagatctggcccactaccaaaaggcctgccattacaccagccaataatcctaagcacagtaaggacccacacaagaccgggccagaagataccacggtcctgatcgagaccaagagggactactccacagaattgtcagtcacaattgctgtaggagcttccctcctgttcctgaatattctggcattcgccgctctgtattacaagaaggataaacggagacatgagactcatcgccacccaagtcctcagcgcaatacgactaacgacattacgcacatacagaacgaggaaattatgtctctgcaaatgaaacagctggagcatgatcacgagtgtgagagcctccaggctcacgacacacttagactgacctgtccccctgattatacacttaccctgagacgtagccctgatgatatccctttcatgactccgaacacaattacaatgattcccaacacgctcatgggcatgcagcctctgcacacctttaagaccttttccggaggtcaaaacagcaccaatctgcctcatggacactccactacacgcgtgtag

SEQ ID NO: 325369 - DNA, 2622 bp, Artificial Sequence
  derived and/or modified sequence
atgctgagaccccagggcctgctgtggctgcccctgctgttcaccagcgtgtgcgtgatgctgaacagcaacgtgctgctgtggatcaccgccctggccatcaagttcaccctgatcgacagccaggcccagtaccccgtggtgaacaccaactacggcaagatccagggcctgagaacccccctgcccagcgagatcctgggccccgtggagcagtacctgggcgtgccctacgccagcccccccaccggcgagagaagattccagccccccgagagccccagcagctggaccggcatcagaaacgccacccagttcagcgccgtgtgcccccagcacctggacgagagattcctgctgcacgacatgctgcccatctggttcaccaccagcctggacaccctgatgacctacgtgcaggaccagaacgaggactgcctgtacctgaacatctacgtgcccatggaggacggcaccaacatcaagagaaacgccgacgacatcaccagcaacgaccacggcgaggacaaggacatccacgagcagaacagcaagaagcccgtgatggtgtacatccacggcggcagctacatggagggcaccggcaacatgatcgacggcagcatcctggccagctacggcaacgtgatcgtgatcaccatcaactacagactgggcatcctggcccagaacaccctggcccacggcaactgcaagcacagatgccagctgcacctgcaggcccccagagactgcaagagcgcctaccccttcagaaacgaggacgagatcagaggcttcctgagcaccggcgaccaggccgccaagggcaactacggcctgctggaccagatccaggccctgagatggatcgaggagaacgtgggcgccttcggcggcgaccccaagagagtgaccatcttcggcagcggcgccggcgccagctgcgtgagcctgctgaccctgagccactacagcgagggcctgttccagaaggccatcatccagagcggcaccgccctgagcagctgggccgtgaactaccagcccgccaagtacaccagaatcctggccgacaaggtgggctgcaacatgctggacaccaccgacatggtggagtgcctgaagaacaagaactacaaggagctgatccagcagaccatcacccccgccacctaccacatcgccttcggccccgtgatcgacggcgacgtgatccccgacgacccccagatcctgatggagcagggcgagttcctgaactacgacatcatgctgggcgtgaaccagggcgagggcctgaagttcgtggacggcatcgtggacaacgaggacggcgtgacccccaacgacttcgacttcagcgtgagcaacttcgtggacaacctgtacggctaccccgagggcaaggacaccctgagagagaccatcaagttcatgtacaccgactgggccgacaaggagaaccccgagaccagaagaaagaccctggtggccctgttcaccgaccaccagtgggtggcccccgccgtggccaccgccgacctgcacgcccagtacggcagccccacctacttctacgccttctaccaccactgccagagcgagatgaagcccagctgggccgacagcgcccacggcgacgaggtgccctacgtgttcggcatccccatgatcggccccaccgagctgttcagctgcaacttcagcaagaacgacgtgatgctgagcgccgtggtgatgacctactggaccaacttcgccaagaccggcgaccccaaccagcccgtgccccaggacaccaagttcatccacaccaagcccaacagattcgaggaggtggcctggagcaagtacaaccccaaggaccagctgtacctgcacatcggcctgaagcccagagtgagagaccactacagagccaccaaggtggccttctggctggagctggtgccccacctgcacaacctgaacgagatcttccagtacgtgagcaccaccaccaaggtgcccccccccgacatgaccagcttcccctacggcaccagaagaagccccgccaagatctggcccaccaccaagagacccgccatcacccccgccaacaaccccaagcacagcaaggacccccacaagaccggccccgaggacaccaccgtgctgatcgagaccaagagagactacagcaccgagctgagcgtgaccatcgccgtgggcgccagcctgctgttcctgaacatcctggccttcgccgccctgtactacaagaaggacaagagaagacacgagacccacagacaccccagcccccagagaaacaccaccaacgacatcacccacatccagaacgaggagatcatgagcctgcagatgaagcagctggagcacgaccacgagtgcgagagcctgcaggcccacgacaccctgagactgacctgcccccccgactacaccctgaccctgagaagaagccccgacgacatccccttcatgacccccaacaccatcaccatgatccccaacaccctgatgggcatgcagcccctgcacaccttcaagaccttcagcggcggccagaacagcaccaacctgccccacggccacagcaccaccagagtgtag

SEQ ID NO: 325370 - DNA, 2511 bp, Artificial Sequence
  derived and/or modified sequence
atgctgagaccccagggcctgctgtggctgcccctgctgttcaccagcgtgtgcgtgatgctgaacagcaacgtgctgctgtggatcaccgccctggccatcaagttcaccctgatcgacagccaggcccagtaccccgtggtgaacaccaactacggcaagatccagggcctgagaacccccctgcccagcgagatcctgggccccgtggagcagtacctgggcgtgccctacgccagcccccccaccggcgagagaagattccagccccccgagagccccagcagctggaccggcatcagaaacgccacccagttcagcgccgtgtgcccccagcacctggacgagagattcctgctgcacgacatgctgcccatctggttcaccaccagcctggacaccctgatgacctacgtgcaggaccagaacgaggactgcctgtacctgaacatctacgtgcccatggaggacggcaccaacatcaagagaaacgccgacgacatcaccagcaacgaccacggcgaggacaaggacatccacgagcagaacagcaagaagcccgtgatggtgtacatccacggcggcagctacatggagggcaccggcaacatgatcgacggcagcatcctggccagctacggcaacgtgatcgtgatcaccatcaactacagactgggcatcctgggcttcctgagcaccggcgaccaggccgccaagggcaactacggcctgctggaccagatccaggccctgagatggatcgaggagaacgtgggcgccttcggcggcgaccccaagagagtgaccatcttcggcagcggcgccggcgccagctgcgtgagcctgctgaccctgagccactacagcgagggcctgttccagaaggccatcatccagagcggcaccgccctgagcagctgggccgtgaactaccagcccgccaagtacaccagaatcctggccgacaaggtgggctgcaacatgctggacaccaccgacatggtggagtgcctgaagaacaagaactacaaggagctgatccagcagaccatcacccccgccacctaccacatcgccttcggccccgtgatcgacggcgacgtgatccccgacgacccccagatcctgatggagcagggcgagttcctgaactacgacatcatgctgggcgtgaaccagggcgagggcctgaagttcgtggacggcatcgtggacaacgaggacggcgtgacccccaacgacttcgacttcagcgtgagcaacttcgtggacaacctgtacggctaccccgagggcaaggacaccctgagagagaccatcaagttcatgtacaccgactgggccgacaaggagaaccccgagaccagaagaaagaccctggtggccctgttcaccgaccaccagtgggtggcccccgccgtggccaccgccgacctgcacgcccagtacggcagccccacctacttctacgccttctaccaccactgccagagcgagatgaagcccagctgggccgacagcgcccacggcgacgaggtgccctacgtgttcggcatccccatgatcggccccaccgagctgttcagctgcaacttcagcaagaacgacgtgatgctgagcgccgtggtgatgacctactggaccaacttcgccaagaccggcgaccccaaccagcccgtgccccaggacaccaagttcatccacaccaagcccaacagattcgaggaggtggcctggagcaagtacaaccccaaggaccagctgtacctgcacatcggcctgaagcccagagtgagagaccactacagagccaccaaggtggccttctggctggagctggtgccccacctgcacaacctgaacgagatcttccagtacgtgagcaccaccaccaaggtgcccccccccgacatgaccagcttcccctacggcaccagaagaagccccgccaagatctggcccaccaccaagagacccgccatcacccccgccaacaaccccaagcacagcaaggacccccacaagaccggccccgaggacaccaccgtgctgatcgagaccaagagagactacagcaccgagctgagcgtgaccatcgccgtgggcgccagcctgctgttcctgaacatcctggccttcgccgccctgtactacaagaaggacaagagaagacacgagacccacagacaccccagcccccagagaaacaccaccaacgacatcacccacatccagaacgaggagatcatgagcctgcagatgaagcagctggagcacgaccacgagtgcgagagcctgcaggcccacgacaccctgagactgacctgcccccccgactacaccctgaccctgagaagaagccccgacgacatccccttcatgacccccaacaccatcaccatgatccccaacaccctgatgggcatgcagcccctgcacaccttcaagaccttcagcggcggccagaacagcaccaacctgccccacggccacagcaccaccagagtgtag

SEQ ID NO: 325371 - protein, 256 aa, Artificial Sequence
  derived and/or modified sequence
MLRPQGLLWLPLLFTSVCVMLNSNVLLWITALAIKFTLIDSQAQYPVVNTNYGKIQGLRTPLPSEILGPVEQYLGVPYASPPTGERRFQPPESPSSWTGIRNATQFSAVCPQHLDERFLLHDMLPIWFTTSLDTLMTYVQDQNEDCLYLNIYVPMEDGTNIKRNADDITSNDHGEDKDIHEQNSKKPVMVYIHGGSYMEGTGNMIDGSILASYGNVIVITINYRLGILGMQEARLCGSSKMFNYFKSPFTNLINFF

SEQ ID NO: 325372 - protein, 236 aa, Artificial Sequence
  derived and/or modified sequence
  misc_feature (1)..(1): Xaa can be any naturally occurring amino acid
XNSNVLLWITALAIKFTLIDSQAQYPVVNTNYGKIQGLRTPLPSEILGPVEQYLGVPYASPPTGERRFQPPESPSSWTGIRNATQFSAVCPQHLDERFLLHDMLPIWFTTSLDTLMTYVQDQNEDCLYLNIYVPMEDGTNIKRNADDITSNDHGEDKDIHEQNSKKPVMVYIHGGSYMEGTGNMIDGSILASYGNVIVITINYRLGILGMQEARLCGSSKMFNYFKSPFTNLINFF

SEQ ID NO: 325373 - DNA, 771 bp, Artificial Sequence
  derived and/or modified sequence
atgcttagaccccagggactgctgtggctccctctgctgttcacatcagtgtgtgtcatgttgaactcgaatgtgctactgtggattacggctttggccataaaattcaccctaatcgatagtcaggcccagtaccccgttgtgaataccaattatggaaagattcaaggactacgaacccccctgcctagcgagattcttggccctgtggagcagtatcttggcgtgccctatgcttccccgcccacgggtgagcggagattccagccacctgagtcgccgagctcttggactggcatccgaaatgccacacagttctcagcagtatgtcctcagcacctcgacgaacgcttcctgctgcacgacatgctgcctatctggttcaccacatcgttggacaccctgatgacctacgtccaggatcagaacgaggattgcttgtacctgaacatctatgtccccatggaggatggtacaaatattaagcgaaatgccgatgacattactagtaatgatcacggagaggacaaggatatccacgaacaaaactcgaaaaaacccgtaatggtttacattcatggagggagctatatggaggggacgggaaacatgattgatggctcaatcctggccagctacggtaacgtcattgtgatcactatcaattaccggctgggcattcttgggatgcaggaggctaggctctgcggctcctcaaaaatgttcaactatttcaagagcccatttaccaatctgattaattttttctag

SEQ ID NO: 325374 - DNA, 711 bp, Artificial Sequence
  derived and/or modified sequence
tagaattcaaatgtactgctatggatcaccgctctcgcaattaagtttacactgatcgacagccaagcacagtacccggtggttaacacaaattatggcaaaattcagggcctccgaacacctcttccatccgagatcctggggcctgtggagcagtacctgggcgtaccctacgctagtcctcctacaggcgaacggcgattccaaccccccgagtctccatcgtcctggaccgggattagaaacgcaacacaattcagcgctgtgtgcccgcaacacctggacgaaagattcttgttacatgacatgttgcctatatggttcaccacctcactcgacactcttatgacttacgtgcaggatcagaatgaggactgcctctatctgaatatctatgtgccaatggaagacggtaccaacataaaacgcaacgcagacgatatcactagtaacgatcacggcgaggacaaagacatccatgaacagaattctaaaaaacccgttatggtctacatccacggtgggtcctatatggaagggaccgggaacatgattgatggcagcatcctggcctcctatgggaacgttattgtgatcaccatcaattatcgcctggggattctgggaatgcaggaagcaagactctgcggatcaagtaagatgtttaattactttaagtccccctttaccaatctgattaatttcttttag

SEQ ID NO: 325375 - DNA, 771 bp, Artificial Sequence
  derived and/or modified sequence
atgctgcggccccagggcctgctgtggctgcccctgctcttcacctctgtgtgtgtgatgctgaacagcaatgtgctgctgtggatcacagccctggccatcaagttcaccctgattgacagccaggcccagtaccctgtggtgaacaccaactacggcaagatccagggcctgcggacccccctgcccagcgagatcctgggccctgtggagcagtacctgggcgtgccctatgccagccccccaactggagagcggcgcttccagcccccagagagccccagctcctggacaggcatcagaaatgccacccagttctctgctgtgtgcccccagcacctggatgagcgcttcctgctgcatgacatgctgcccatctggttcaccaccagcctggacaccctgatgacctacgtgcaggaccagaatgaagactgcctgtacctgaacatctacgtgcccatggaggatggcaccaacatcaagagaaatgctgatgacatcaccagcaatgaccatggagaggacaaggacatccacgagcagaacagcaagaagcctgtgatggtgtacatccatggaggcagctacatggagggcactggaaacatgattgatggcagcatcctggccagctatggaaatgtgattgtcatcaccatcaactaccgcctgggcatcctgggcatgcaggaggcccggctgtgtggcagcagcaagatgttcaactacttcaagagccccttcaccaacctgatcaacttcttctag

SEQ ID NO: 325376 - DNA, 711 bp, Artificial Sequence
  derived and/or modified sequence
tgaaacagcaatgtgctgctgtggatcacagccctggccatcaagttcaccctgattgacagccaggcccagtaccctgtggtgaacaccaactacggcaagatccagggcctgcggacccccctgcccagcgagatcctgggccctgtggagcagtacctgggcgtgccctatgccagccccccaactggagagcggcgcttccagcccccagagagccccagctcctggacaggcatcagaaatgccacccagttctctgctgtgtgcccccagcacctggatgagcgcttcctgctgcatgacatgctgcccatctggttcaccaccagcctggacaccctgatgacctacgtgcaggaccagaatgaagactgcctgtacctgaacatctacgtgcccatggaggatggcaccaacatcaagagaaatgctgatgacatcaccagcaatgaccatggagaggacaaggacatccacgagcagaacagcaagaagcctgtgatggtgtacatccatggaggcagctacatggagggcactggaaacatgattgatggcagcatcctggccagctatggaaatgtgattgtcatcaccatcaactaccgcctgggcatcctgggcatgcaggaggcccggctgtgtggcagcagcaagatgttcaactacttcaagagccccttcaccaacctgatcaacttcttctag

SEQ ID NO: 325377 - DNA, 771 bp, Artificial Sequence
  derived and/or modified sequence
atgctgcggccccagggcctgctgtggctgcccctgctgttcacctccgtgtgcgtgatgctgaatagtaacgtccttctgtggattactgctctggcaatcaagttcacactcatcgactcacaggctcaatatccggtggtgaatactaactacggcaagattcagggcttgaggaccccactgcccagcgagatcctgggcccagtggagcagtacctgggagtgccctatgcttcaccgcccaccggagaacgccgctttcagccgcccgagtccccttcctcgtggaccggaattcgcaatgccacgcagttcagtgctgtgtgtccacagcacctcgacgagaggttcctgctgcacgacatgctccccatttggtttaccacttcactcgacactctgatgacgtacgtccaagaccaaaatgaagactgcctgtatctgaatatatatgtccccatggaagatgggactaatatcaaacgaaatgcagatgatatcacgtctaacgaccacggggaagataaggacattcacgagcagaattccaaaaaacccgtgatggtatatattcacggggggtcttatatggaaggcacgggcaatatgatcgatggttccatccttgccagctacggtaatgtcattgtgatcacaatcaattatcggttaggcatcctggggatgcaggaggcacgcctgtgtgggagctccaaaatgttcaactattttaagtctccctttacaaacctgatcaacttcttttag

SEQ ID NO: 325378 - DNA, 711 bp, Artificial Sequence
  derived and/or modified sequence
tgaaacagcaacgtgctgctgtggatcaccgccctggccatcaagttcaccctcattgatagccaggcccagtatccagttgtaaacaccaattacggcaaaatacagggtcttcggactcctctgccttctgaaattttaggccctgtggagcagtacttaggagtgccctacgcaagccccccaaccggcgaaaggagatttcagccccctgagtccccatccagttggacaggcatccgaaacgccactcagtttagtgcggtctgtccgcagcatctggatgagcgttttctgctgcatgatatgctccccatctggttcaccacgtctctggacaccctgatgacttatgtgcaagaccagaacgaagactgtctttacttgaacatctatgtgccaatggaggatggaacgaatattaaacgcaatgccgatgacatcacctccaacgatcacggggaagataaggatattcacgaacagaattctaagaagcccgtgatggtatatattcatggcggctcctacatggaaggaacaggcaacatgattgatgggagcattttagccagctacggcaatgtgatcgtgattacaataaattaccgcttaggcatattgggaatgcaggaagcccggctgtgcggatcttcaaagatgttcaactactttaagtctccattcacaaacctgattaactttttctag

SEQ ID NO: 325379 - DNA, 882 bp, Artificial Sequence
  derived and/or modified sequence
ttttcgaaagacttatctttctgcaggctcgcctctgagctttgtctccttggagccacctcacttagacagcttcggatgtggatgcagatttgaaccatgttgcgtccccagggactgctatggctccctttgttgttcacctctgtctgtgtcatgttaaactccaatgttcttctgtggataactgctcttgccatcaagttcaccctcattgacagccaagcacagtatccagttgtcaacacaaattatggtaaaatccagggcctaagaacaccattacccagtgagatcttgggtccagtggagcagtacttaggggtcccctatgcctcacccccaactggagagaggcggtttcagccaccagaatccccatcctcctggactggcatccgaaatgctactcagttttctgctgtgtgcccccagcacctggatgaaagattcttattgcatgacatgctgcccatctggtttaccaccagtttggatactttgatgacctatgttcaagatcaaaatgaagactgcctttacttaaacatctatgtgcccatggaagatggaaccaacataaagagaaatgcagacgatataaccagtaatgaccatggtgaagataaagatattcatgaacagaacagtaagaagcctgttatggtctatatccatgggggatcttacatggagggaaccggtaacatgattgatggcagcattttggccagctatgggaacgtcatcgttatcaccattaactaccgtctgggaatactaggtatgcaagaggcacgtttgtgtgggagctcaaaaatgtttaattattttaaatctcctttcactaatttaataaattttttttgagttcagatgcaa

SEQ ID NO: 325380 - DNA, 722 bp, Artificial Sequence
  derived and/or modified sequence
taaactccaatgttcttctgtggataactgctcttgccatcaagttcaccctcattgacagccaagcacagtatccagttgtcaacacaaattatggtaaaatccagggcctaagaacaccattacccagtgagatcttgggtccagtggagcagtacttaggggtcccctatgcctcacccccaactggagagaggcggtttcagccaccagaatccccatcctcctggactggcatccgaaatgctactcagttttctgctgtgtgcccccagcacctggatgaaagattcttattgcatgacatgctgcccatctggtttaccaccagtttggatactttgatgacctatgttcaagatcaaaatgaagactgcctttacttaaacatctatgtgcccatggaagatggaaccaacataaagagaaatgcagacgatataaccagtaatgaccatggtgaagataaagatattcatgaacagaacagtaagaagcctgttatggtctatatccatgggggatcttacatggagggaaccggtaacatgattgatggcagcattttggccagctatgggaacgtcatcgttatcaccattaactaccgtctgggaatactaggtatgcaagaggcacgtttgtgtgggagctcaaaaatgtttaattattttaaatctcctttcactaatttaataaattttttttgagttcagatgcaa

SEQ ID NO: 325381 - DNA, 771 bp, Artificial Sequence
  derived and/or modified sequence
atgttacgaccccaggggcttctgtggctgcccctcctattcacatccgtttgtgtgatgctcaacagcaacgtcctgttatggataactgccctggcaattaagttcaccctaatcgactcccaggcacagtacccggtggtgaacacgaactacggaaagattcagggtcttagaacccccctaccatccgagattttaggtcccgtggaacagtatctgggggtcccatatgccagccccccaacaggagagcgccgtttccagcctccagaatccccgtcttcctggactgggattcgaaacgcaacccagttcagtgctgtgtgcccacagcacctggacgagagattcctgctgcacgacatgcttcctatctggttcacaacgtctctggacacactgatgacttacgtgcaggaccaaaacgaggactgcttgtacttaaatatctacgttccaatggaggacggcacgaacatcaagcgaaatgccgatgatataacaagtaatgatcacggggaagataaggatatccacgagcagaacagcaaaaagccagtcatggtgtacattcacggcggttcctatatggagggtactggcaatatgattgatggctctatcctggcatcctatgggaatgtcatcgttatcacaattaactaccgtctgggcatactcggcatgcaggaagccagactgtgcggatcgagcaaaatgtttaattattttaaatccccatttaccaacctgatcaattttttttag

SEQ ID NO: 325382 - DNA, 711 bp, Artificial Sequence
  derived and/or modified sequence
tgaaactccaacgtgttgctgtggattaccgccctggctatcaagtttacactgattgactcccaggctcagtatcctgtggtcaatactaattatggaaagatacaaggactcagaactcccctcccctcagagatcttgggaccagtggagcaatatctcggagtgccgtatgcgagccctcctacaggcgaacggcgattccagccaccggaaagtccaagcagctggactgggatcagaaatgcgacccagttttcggctgtatgtcctcaacacttggatgaaaggttcctactgcatgacatgctgccgatatggttcacgacatctttggataccctaatgacttacgtgcaggatcagaacgaagactgtctttacctcaatatttatgtcccaatggaggacggaacaaacatcaagaggaacgcagacgatattacttcaaatgatcatggggaagataaggatattcatgaacagaactcaaaaaagcccgttatggtgtacattcacgggggatcctacatggaaggaaccggtaatatgatcgacgggagtatcttggccagctacgggaacgttatagtgattaccatcaattacagactcggcatcctcgggatgcaggaggctaggctgtgtggcagctccaagatgttcaattatttcaagagtccattcaccaatttgattaacttcttctag

SEQ ID NO: 325383 - DNA, 771 bp, Artificial Sequence
  derived and/or modified sequence
atgctgagaccccagggcctgctgtggctgcccctgctgttcaccagcgtgtgcgtgatgctgaacagcaacgtgctgctgtggatcaccgccctggccatcaagttcaccctgatcgacagccaggcccagtaccccgtggtgaacaccaactacggcaagatccagggcctgagaacccccctgcccagcgagatcctgggccccgtggagcagtacctgggcgtgccctacgccagcccccccaccggcgagagaagattccagccccccgagagccccagcagctggaccggcatcagaaacgccacccagttcagcgccgtgtgcccccagcacctggacgagagattcctgctgcacgacatgctgcccatctggttcaccaccagcctggacaccctgatgacctacgtgcaggaccagaacgaggactgcctgtacctgaacatctacgtgcccatggaggacggcaccaacatcaagagaaacgccgacgacatcaccagcaacgaccacggcgaggacaaggacatccacgagcagaacagcaagaagcccgtgatggtgtacatccacggcggcagctacatggagggcaccggcaacatgatcgacggcagcatcctggccagctacggcaacgtgatcgtgatcaccatcaactacagactgggcatcctgggcatgcaggaggccagactgtgcggcagcagcaagatgttcaactacttcaagagccccttcaccaacctgatcaacttcttctag

SEQ ID NO: 325384 - DNA, 711 bp, Artificial Sequence
  derived and/or modified sequence
tgaaacagcaacgtgctgctgtggatcaccgccctggccatcaagttcaccctgatcgacagccaggcccagtaccccgtggtgaacaccaactacggcaagatccagggcctgagaacccccctgcccagcgagatcctgggccccgtggagcagtacctgggcgtgccctacgccagcccccccaccggcgagagaagattccagccccccgagagccccagcagctggaccggcatcagaaacgccacccagttcagcgccgtgtgcccccagcacctggacgagagattcctgctgcacgacatgctgcccatctggttcaccaccagcctggacaccctgatgacctacgtgcaggaccagaacgaggactgcctgtacctgaacatctacgtgcccatggaggacggcaccaacatcaagagaaacgccgacgacatcaccagcaacgaccacggcgaggacaaggacatccacgagcagaacagcaagaagcccgtgatggtgtacatccacggcggcagctacatggagggcaccggcaacatgatcgacggcagcatcctggccagctacggcaacgtgatcgtgatcaccatcaactacagactgggcatcctgggcatgcaggaggccagactgtgcggcagcagcaagatgttcaactacttcaagagccccttcaccaacctgatcaacttcttctag

SEQ ID NO: 325385 - protein, 496 aa, Artificial Sequence
  derived and/or modified sequence
MVEADHPGKLFIGGLNRETNEKMLKAVFGKHGPISEVLLIKDRTSKSRGFAFITFENPADAKNAAKDMNGKSLHGKAIKVEQAKKPSFQSGGRRRPPASSRNRSPSGSLRSARGSRGGTRGWLPSHEGHLDDGGYTPDLKMSYSRGLIPVKRGPSSRSGGPPPKKSAPSAVARSNSWMGSQGPMSQRRENYGVPPRRATISSWRNDRMSTRHDGYATNDGNHPSCQETRDYAPPSRGYAYRDNGHSNRDEHSSRGYRNHRSSRETRDYAPPSRGHAYRDYGHSRRDESYSRGYRNRRSSRETREYAPPSRGHGYRDYGHSRRHESYSRGYRNHPSSRETRDYAPPHRDYAYRDYGHSSWDEHSSRGYSYHDGYGEALGRDHSEHLSGSSYRDALQRYGTSHGAPPARGPRMSYGGSTCHAYSNTRDRYGRSWESYSSCGDFHYCDREHVCRKDQRNPPSLGRVLPDPREACGSSSYVASIVDGGESRSEKGDSSRY

SEQ ID NO: 325386 - DNA, 1921 bp, Artificial Sequence
  derived and/or modified sequence
atttccgggcacggcttccggcgtccttccctctcagggaagctccagctgtccctcccgcagttggccctgtggtgttccgaagccggttacgtacggcctgagggccaggcgaacctcaggctctttgtcctactaaaaagcgcagcacaatggtagaagcagatcatcctggcaagcttttcattggtggcctcaatagagaaaccaatgagaagatgcttaaagcagtatttgggaaacatggtcccatatcagaagttcttttgataaaggatcgaaccagcaaatccagaggctttgcatttattacttttgagaaccctgcagatgctaagaatgctgccaaagatatgaatggaaagtctttgcatggaaaagcaataaaagtagaacaagccaagaaaccatcttttcaaagtggtggtaggcggagaccaccagcttcttcgagaaacagaagcccttcaggaagtctgagatctgcaagaggaagccgtggaggaacaagagggtggcttccctcacatgaagggcacctggatgatggtggatacactcctgatctcaagatgagttattctaggggactcattccagttaaaagaggtccatcttcaagaagtggaggtcctcctccgaaaaaatctgctccttctgctgtggcaagaagcaatagttggatgggaagccaaggtcccatgtcacaaagaagagagaattatggagttcctccacgcagagcgacaatatcttcctggagaaatgatcgcatgtcaacaagacatgatggttatgcaactaacgatggaaatcatccaagttgccaagaaacgagggattatgctccaccatctagaggctatgcataccgtgataatggtcattctaatcgggatgaacattcctctagaggatatagaaatcatcgaagttcccgagaaactagggattatgctccaccatctagaggccatgcataccgtgattatggtcattctcgtcgggatgaaagttattctagaggatacagaaatcgtcgaagttcccgagaaactagggagtatgctccaccatctagaggccatggataccgtgattatggtcattctcgtcgacatgaaagttattctagaggatatagaaatcatccaagttcccgagaaaccagggattatgctccaccacatagagactatgcataccgtgattatggtcattctagttgggatgaacattcctctagaggatatagttatcatgatggctacggtgaggcccttggtagagatcattctgaacatctaagtggaagttcttatagagatgcacttcagagatacgggacctctcatggtgcaccacctgcaagagggcctcggatgtcttatggtggaagcacctgccacgcatatagtaatacacgagatagatatggcagaagttgggagagttactcgagctgtggtgattttcattattgtgatcgtgagcatgtttgcagaaaagaccaaaggaatccgccttctctgggtagggtgctccctgatcctcgtgaagcatgtggtagctcaagttatgtggcatctatagtagatggtggggagagtcgatctgaaaaaggagactcgagcagatattaaagcaagcattgaaaataatagttattgcataccaatccttgtttgcaaatcaaaaattgaaatgttatttctgcattgttacctgcatattactgaaagaaacatgttggttttgtggagagaggtagatactaacttcctccatgaattttttgaggtattcaaaggaaaaggaattgttttcaaagtaatttcatacttgttgatgctatttgaaaagtgtttagatgtaatatctaccttaaaattttcacaataaaatttgacatgtactgcaa

SEQ ID NO: 325387 - DNA, 1885 bp, Artificial Sequence
  derived and/or modified sequence
cagggaagctccagctgtccctcccgcagttggccctgtggtgttccgaagccggttacgtacggcctgagggccaggcgaacctcaggctctttgtcctactaaaaagcgcagcacaatggtagaagcagatcatcctggcaagcttttcattggtggcctcaatagagaaaccaatgagaagatgcttaaagcagtatttgggaaacatggtcccatatcagaagttcttttgataaaggatcgaaccagcaaatccagaggctttgcatttattacttttgagaaccctgcagatgctaagaatgctgccaaagatatgaatggaaagtctttgcatggaaaagcaataaaagtagaacaagccaagaaaccatcttttcaaagtggtggtaggcggagaccaccagcttcttcgagaaacagaagcccttcaggaagtctgagatctgcaagaggaagccgtggaggaacaagagggtggcttccctcacatgaagggcacctggatgatggtggatacactcctgatctcaagatgagttattctaggggactcattccagttaaaagaggtccatcttcaagaagtggaggtcctcctccgaaaaaatctgctccttctgctgtggcaagaagcaatagttggatgggaagccaaggtcccatgtcacaaagaagagagaattatggagttcctccacgcagagcgacaatatcttcctggagaaatgatcgcatgtcaacaagacatgatggttatgcaactaacgatggaaatcatccaagttgccaagaaacgagggattatgctccaccatctagaggctatgcataccgtgataatggtcattctaatcgggatgaacattcctctagaggatatagaaatcatcgaagttcccgagaaactagggattatgctccaccatctagaggccatgcataccgtgattatggtcattctcgtcgggatgaaagttattctagaggatacagaaatcgtcgaagttcccgagaaactagggagtatgctccaccatctagaggccatggataccgtgattatggtcattctcgtcgacatgaaagttattctagaggatatagaaatcatccaagttcccgagaaaccagggattatgctccaccacatagagactatgcataccgtgattatggtcattctagttgggatgaacattcctctagaggatatagttatcatgatggctacggtgaggcccttggtagagatcattctgaacatctaagtggaagttcttatagagatgcacttcagagatacgggacctctcatggtgcaccacctgcaagagggcctcggatgtcttatggtggaagcacctgccacgcatatagtaatacacgagatagatatggcagaagttgggagagttactcgagctgtggtgattttcattattgtgatcgtgagcatgtttgcagaaaagaccaaaggaatccgccttctctgggtagggtgctccctgatcctcgtgaagcatgtggtagctcaagttatgtggcatctatagtagatggtggggagagtcgatctgaaaaaggagactcgagcagatattaaagcaagcattgaaaataatagttattgcataccaatccttgtttgcaaatcaaaaattgaaatgttatttctgcattgttacctgcatattactgaaagaaacatgttggttttgtggagagaggtagatactaacttcctccatgaattttttgaggtattcaaaggaaaaggaattgttttcaaagtaatttcatacttgttgatgctatttgaaaagtgtttagatgtaatatctaccttaaaattttcacaataaaatttgacatgtactgc

SEQ ID NO: 325388 - DNA, 1767 bp, Artificial Sequence
  derived and/or modified sequence
atggtagaagcagatcatcctggcaagcttttcattggtggcctcaatagagaaaccaatgagaagatgcttaaagcagtatttgggaaacatggtcccatatcagaagttcttttgataaaggatcgaaccagcaaatccagaggctttgcatttattacttttgagaaccctgcagatgctaagaatgctgccaaagatatgaatggaaagtctttgcatggaaaagcaataaaagtagaacaagccaagaaaccatcttttcaaagtggtggtaggcggagaccaccagcttcttcgagaaacagaagcccttcaggaagtctgagatctgcaagaggaagccgtggaggaacaagagggtggcttccctcacatgaagggcacctggatgatggtggatacactcctgatctcaagatgagttattctaggggactcattccagttaaaagaggtccatcttcaagaagtggaggtcctcctccgaaaaaatctgctccttctgctgtggcaagaagcaatagttggatgggaagccaaggtcccatgtcacaaagaagagagaattatggagttcctccacgcagagcgacaatatcttcctggagaaatgatcgcatgtcaacaagacatgatggttatgcaactaacgatggaaatcatccaagttgccaagaaacgagggattatgctccaccatctagaggctatgcataccgtgataatggtcattctaatcgggatgaacattcctctagaggatatagaaatcatcgaagttcccgagaaactagggattatgctccaccatctagaggccatgcataccgtgattatggtcattctcgtcgggatgaaagttattctagaggatacagaaatcgtcgaagttcccgagaaactagggagtatgctccaccatctagaggccatggataccgtgattatggtcattctcgtcgacatgaaagttattctagaggatatagaaatcatccaagttcccgagaaaccagggattatgctccaccacatagagactatgcataccgtgattatggtcattctagttgggatgaacattcctctagaggatatagttatcatgatggctacggtgaggcccttggtagagatcattctgaacatctaagtggaagttcttatagagatgcacttcagagatacgggacctctcatggtgcaccacctgcaagagggcctcggatgtcttatggtggaagcacctgccacgcatatagtaatacacgagatagatatggcagaagttgggagagttactcgagctgtggtgattttcattattgtgatcgtgagcatgtttgcagaaaagaccaaaggaatccgccttctctgggtagggtgctccctgatcctcgtgaagcatgtggtagctcaagttatgtggcatctatagtagatggtggggagagtcgatctgaaaaaggagactcgagcagatattaaagcaagcattgaaaataatagttattgcataccaatccttgtttgcaaatcaaaaattgaaatgttatttctgcattgttacctgcatattactgaaagaaacatgttggttttgtggagagaggtagatactaacttcctccatgaattttttgaggtattcaaaggaaaaggaattgttttcaaagtaatttcatacttgttgatgctatttgaaaagtgtttagatgtaatatctaccttaaaattttcacaataaaatttgacatgtactgc

SEQ ID NO: 325389 - DNA, 1491 bp, Artificial Sequence
  derived and/or modified sequence
atggtggaagcagatcaccccggtaagctgttcattggaggtcttaatagggaaactaacgagaaaatgttgaaggctgtgtttggcaaacacgggccgatcagcgaggtactgctcatcaaggataggaccagtaaatctcggggctttgcctttataaccttcgagaatccagcagacgccaagaatgcggccaaagacatgaacggaaaatcccttcatgggaaagctataaaagtcgagcaggcaaaaaaaccctcttttcagtccgggggccgacgacggccacccgcctcctcccgcaaccgatccccgtcaggatcacttcggtccgccagaggatcccggggcgggacgcgggggtggttgccgtctcacgaggggcaccttgacgacggcggatatactcctgatttaaagatgtcatactcccgggggctgatcccagtgaagaggggccctagcagcagatcaggtggcccaccaccgaaaaagtctgctccttcagcagtggctcgatctaattcttggatgggcagccagggaccaatgtcgcaacgcagggaaaactatggcgtacccccccgtcgagcgacaatctccagttggaggaacgatagaatgtccactcgacacgatggttatgccactaatgatggcaatcatcccagttgtcaagagacaagggactacgcaccaccgagtcgcggctatgcttatcgagacaacgggcatagtaaccgagatgagcatagcagcaggggttacagaaatcaccgctctagcagggaaacacgggattacgctccgccaagtcgagggcacgcctaccgcgattacggtcacagcagaagggacgagtcctattcgcgtggatatcgaaacagacgctcctctcgggagaccagggaatacgcccctcccagccgtggccatgggtaccgcgattacgggcactctagaaggcatgagagctactcgcgcggctatcgtaatcatccctcttcaagagaaacccgagactacgccccaccgcatagggattacgcctatcgggattacggccattcttcttgggacgaacatagcagcagaggttattcctatcacgacgggtacggggaggctctgggacgcgatcactctgagcacttaagtggctcctcctatagagatgccctgcagagatatgggacgtcacatggggcaccaccggctcgggggcctagaatgagctacggagggtccacgtgccatgcatatagtaacacacgagacagatatggacgatcttgggagagctattcctcatgtggtgatttccactattgcgaccgcgaacatgtctgcaggaaggaccagaggaacccaccttcactgggccgggttctgccagatccccgagaagcgtgtggtagctcctcgtatgtcgccagtatcgtcgatggcggggagtcccggtctgagaaaggggactcatcacggtattag

SEQ ID NO: 325390 - DNA, 1491 bp, Artificial Sequence
  derived and/or modified sequence
atggtggaagcagaccaccctggcaagctttttatcggcggccttaatagagagaccaatgaaaagatgctaaaagccgttttcggtaaacatggaccaatatcggaagtgttgctcattaaggatagaacttccaagtcaagggggttcgcttttattactttcgagaatccagcagacgcaaaaaacgcggccaaggatatgaacggtaaaagcctgcatggtaaagctatcaaagtcgaacaagctaaaaagccttcctttcagagcggagggcgccggcgcccccctgcgtcgagccgtaaccgctcaccctctggctccctcaggagcgcgcgcggcagtcgcggcgggaccagaggatggctgccttcacacgaaggacatttggatgacggtggttacaccccagacctgaagatgagctactcacgtggattaatacccgtgaagcgaggtcccagttcaaggtcaggagggccccccccgaagaaaagcgcaccatctgccgtagctaggagcaatagctggatgggctctcaggggccgatgtcgcaaaggcgggaaaactacggagttcctccacgacgggctacgattagctcatggaggaatgaccgtatgtccactagacatgacggctatgctaccaatgacggcaatcacccctcttgtcaagagactcgagactatgcgcctccttcccggggctacgcctacagagataacggccattctaatagagacgagcacagcagcagaggctatcggaaccatcgctccagcagggagacacgcgactatgccccccctagccgcggacacgcttacagggactacggtcactcccgtcgcgacgaaagctatagccgaggttaccggaatcggcgaagctccagggaaacccgcgagtacgccccacctagtagaggccacggataccgagattacggccattctagacgccacgagtcgtattctcgaggctatcgcaaccacccgtctagccgggagacccgagattacgcgcctccccaccgcgattatgcttacagagattacggacatagttcttgggacgaacatagcagtaggggttacagttaccacgacggctatggtgaagctcttggaagggaccatagcgagcacttgtcaggatctagctatcgcgacgcacttcagcgctatggaacttctcacggagctccgcccgctagaggtccccgaatgagttacgggggcagcacctgtcatgcctatagcaacaccagagaccgatatggccggtcgtgggaatcctatagttcttgtggcgacttccattattgtgacagggaacacgtctgccgcaaagaccagagaaaccccccctccctcggccgggtcctgcctgatcctagagaagcctgcggcagttcttcctatgttgcctctatcgtggacgggggtgagtcgcgcagtgagaagggggattcaagtaggtactag

SEQ ID NO: 325391 - DNA, 1491 bp, Artificial Sequence
  derived and/or modified sequence
atggtggaggccgaccaccctgggaagctgttcatcggcggcctgaaccgggagaccaatgagaagatgctgaaggctgtgtttgggaagcacggccccatcagcgaggtgctgctgatcaaggacaggaccagcaagagccggggctttgccttcatcacctttgagaacccagcagatgccaagaatgctgccaaggacatgaatggcaagagcctgcacggcaaggccatcaaggtggagcaggccaagaagcccagcttccagagcggcggcagaagaagacctccagccagcagcaggaacagaagccccagcggcagcctgcggagcgcccggggcagcagaggaggcacccggggctggctgcccagccatgagggccacctggatgatggcggctacaccccagacctgaagatgagctacagccggggcctcatccctgtgaagaggggccccagcagccgcagcggcggccccccacccaagaagagcgcccccagcgctgtggcccggagcaacagctggatgggcagccagggccccatgagccagaggagagaaaattatggagtgcccccccggcgggccaccatcagctcctggagaaatgacaggatgagcaccaggcatgatggctacgccaccaatgatggcaaccaccccagctgccaggagacccgggactatgccccacccagccggggctacgcctacagagacaatggccacagcaacagagatgagcacagcagccggggctacagaaaccacaggagcagccgggagacccgggactatgccccacccagccggggccacgcctacagagattatggccacagcagaagagatgagagctacagccggggctacagaaacagaagaagcagccgggagacccgggagtatgccccacccagccggggccacggctacagagattatggccacagcagaagacatgagagctacagccggggctacagaaaccaccccagcagccgggagacccgggactatgccccaccccaccgggactatgcctacagagattatggccacagctcctgggatgagcacagcagccggggctacagctaccatgatggctatggagaggccctgggccgggaccacagcgagcacctgagcggcagcagctacagagatgccctgcagagatatggcaccagccatggagcccccccagcccggggccccaggatgtcctatggaggcagcacctgccacgcctacagcaacacccgggacagatatggccgctcctgggagagctacagcagctgtggggacttccactactgtgaccgggagcacgtgtgcaggaaggaccagagaaatccacccagcctgggccgggtgctgcctgacccccgggaggcctgtggcagcagcagctatgtggccagcatcgtggatggaggagagagccgctctgagaagggggacagcagccgctactag

SEQ ID NO: 325392 - DNA, 1491 bp, Artificial Sequence
  derived and/or modified sequence
atggtggaggccgaccaccccggcaagctgttcatcggcggcctgaaccgggagaccaacgagaaaatgctgaaagccgtattcggcaagcacggacctatatccgaagtcctccttatcaaagacaggaccagtaaaagccgaggattcgccttcatcacctttgaaaatcctgcagacgccaaaaatgccgccaaagatatgaacgggaaaagcctacacggcaaggcgattaaggtggaacaagcaaaaaagcccagcttccagagcggcgggcgcaggaggccacccgctagtagtagaaacaggagcccctccgggtccctacggtcagcgaggggctcccgtggagggaccaggggatggctgccctcacacgaaggccatctcgatgatggcgggtatacacctgacttgaaaatgtcttactcaaggggtctcatccccgtgaaacgcggcccttcttcccggtccggaggtcctcctccaaagaagtctgccccaagcgcggtggcccgctcaaattcatggatgggctctcagggtcccatgagccagcgcagagagaactacggcgtgccccccagaagggcaacgatctccagttggcgcaatgacaggatgtctaccaggcacgatggatacgctacaaatgacggaaatcacccaagttgccaggagaccagagactatgctcctccctcaagaggctatgcctatagggataacggccactcaaatagagacgaacacagttcacggggttaccgcaaccacagaagtagcagggagactcgggactatgcaccacccagtcggggtcacgcctatcgggattatgggcattctcggcgagacgaatcatacagtagaggttaccggaacagacgttcttctcgcgagaccagggagtacgctcctcccagtcggggacacgggtaccgagactacggacacagtcgccgacatgagtcttattcaagaggataccgcaaccatcccagctcgagagaaactagggattacgcacccccccaccgtgattacgcctacagagactatgggcactcctcatgggacgaacactcctcgagagggtactcctatcacgacggatacggcgaggccctgggcagagatcattctgaacatctgtctggttctagctatcgggacgctctacagcgctatggaacatcccatggagctcccccggctcggggccctcgtatgtcttacggcggctccacgtgtcacgcctactctaatacccgcgatcgctacggccgatcctgggaatcatatagctcttgcggcgattttcactattgcgatcgcgagcatgtctgtaggaaggatcaaaggaatccaccgagcttgggaagagtgctgccagacccccgagaggcttgcggcagttcgtcttacgtggcctccatagttgatgggggagagtcgcgctccgagaagggggacagctcaagatattag

SEQ ID NO: 325393 - DNA, 1491 bp, Artificial Sequence
  derived and/or modified sequence
atggtggaggccgaccaccccggcaagctgttcatcggcggcctgaatagagagacaaacgagaaaatgttaaaggccgttttcggaaagcacggacccatctctgaggtgctgttgataaaggaccgcaccagcaaatcgagaggatttgcttttattaccttcgagaatcccgccgatgcaaagaatgcagcaaaagacatgaatggcaagagtctgcacgggaaggctatcaaggtcgagcaagcaaagaagccctcctttcagtctggcggccgtcgtcgccctcccgcctcgtcccgcaacaggagtccttctggctcgcttaggagtgctaggggttctagaggcggtactcgaggctggctgccaagccacgaaggacacctagacgatggaggttacacacctgaccttaaaatgtcctattctcgcggattgataccggttaagagaggccctagcagccgatccggggggcccccacccaaaaagtccgccccctccgccgtggcacgctctaactcatggatgggtagccagggaccgatgtctcagcgccgtgaaaattacggagtgcctccacgcagagctacaatctctagttggcggaacgaccggatgagcacaaggcatgatggctatgccactaatgacggaaatcatcctagctgccaagagacacgagactatgcgccgccatcccggggctatgcctacagggacaacggccattccaaccgcgatgagcactcctcacgcggctatcgcaatcaccggagtagtagggaaacacgtgattatgccccaccctctagaggacatgcctatcgcgactacggacatagtagacgggacgaaagttatagtcgggggtaccgtaatagacgctccagtagagagacacgagagtacgcacccccctccaggggccacggatatcgggattatgggcacagccgccgccacgagtcctatagccgcgggtatagaaaccaccctagttcgagggaaacaagagactacgctcctccgcatagagactatgcataccgggattacggccactctagctgggacgagcattcgtctaggggatattcctaccacgacggctacggtgaggcactcggccgtgaccactccgagcacctgagcgggtcctcatatcgcgatgctctccagcgctacgggacctctcacggtgccccaccagcccgggggccaaggatgtcatacgggggcagtacgtgccatgcttacagtaataccagagaccggtacgggcgctcgtgggagagttacagttcatgcggcgacttccattactgtgaccgagaacacgtttgcagaaaggaccagagaaatcccccatctctcggccgagttctccctgatcctagagaagcatgtggcagtagcagctacgttgcgtctatcgtagacggcggcgaatcccggtctgaaaaaggtgattcgtctaggtactag

SEQ ID NO: 325394 - DNA, 1491 bp, Artificial Sequence
  derived and/or modified sequence
atggtggaggccgaccatccgggaaaattgttcattggcggtctgaacagggagaccaatgaaaagatgttaaaagccgtctttggcaaacatggcccaatttcagaggtgctccttatcaaagaccgtacctccaaatcccgcggatttgcctttattaccttcgaaaacccagctgacgcaaaaaacgcagccaaagacatgaacggcaagtcactgcacggaaaggcaattaaggtagagcaggccaagaagccatcatttcagtcaggcggacgaaggagaccacccgcttcatcaagaaataggagtcctagtggcagcctacggagtgctcgcggaagcaggggcggaactaggggctggctaccctcccatgagggacatctggatgatggaggctatacaccggatttgaagatgtcctattctagagggttgatccccgtaaaacggggaccttcctccagatcaggaggcccaccacctaaaaagtcggcaccgtccgctgttgcgagaagcaattcctggatggggtctcagggaccaatgtcccaacgcagggagaattatggcgtgccacctcggagagccacaatctcttcatggcgtaacgatcgcatgtctacacgtcacgacgggtatgctactaacgacggaaatcacccttcttgccaggagacgagggattatgctcctccgtctagaggctatgcctatcgcgataacgggcacagcaatcgcgatgagcactccagtcgcggttatcgtaaccacaggtccagtagggagacgcgagactacgctccgcctagcaggggccacgcctaccgggactatggtcactcaagacgcgacgaatcatactcacggggttaccgtaatcgccgtagttcacgggagacacgggagtacgccccaccctcgaggggccatggataccgcgactacggccatagccggagacacgagtcttactcccgcggataccgaaatcacccatcatctcgggaaactcgcgattacgccccaccccaccgcgactatgcctatagggattacggtcactcttcctgggatgaacatagcagccggggttactcataccatgatggctacggtgaagccctggggagggaccactcagagcacctaagcggaagcagctaccgcgatgccctgcagagatatgggacttctcacggcgcaccccctgcaagaggtccacggatgagctatgggggaagcacttgccatgcatatagcaacacaagggatcgatatggacgctcgtgggagagttattcttcatgcggggattttcattattgtgaccgcgagcacgtctgtagaaaagatcaaagaaacccgccaagtctgggcagggtcctaccagatccaagagaagcttgcggcagcagttcttacgtggcctctatcgtggatggcggagagtcccggtccgaaaagggcgatagctccagatattag

SEQ ID NO: 325395 - DNA, 1491 bp, Artificial Sequence
  derived and/or modified sequence
atggtcgaggcggatcatccaggcaaattgtttataggcggtctaaaccgcgaaacaaacgaaaagatgctgaaggccgtgtttggcaaacacggaccaatttctgaagtgctgctcataaaagacaggacgagtaaatcccgaggcttcgctttcataactttcgagaatccagctgacgctaaaaatgccgctaaggatatgaatggcaagtccctgcacggtaaggctattaaggtcgagcaggccaagaaaccctctttccaatcaggcggtcgaagacgacctccggctagttctcgtaatcgttccccatctgggagtctccggagcgcgagagggagcagaggcggaacacggggatggctcccgtcccacgagggacacctggatgatggcggatacacgcccgacctgaaaatgagttattcgagaggcttaataccagtgaagcggggaccctcaagcaggagcggagggcctcccccaaaaaagtcagcaccaagcgctgtggctagatcgaattcctggatggggtcacaggggcctatgtcacagcggagggaaaattacggtgtccccccaagacgcgctaccatcagcagctggcgcaacgatcgaatgagtactcgccatgatggctatgccaccaatgatggcaaccatcccagctgtcaggagacccgggattatgctccaccatctcggggttacgcctacagagacaacggacattcaaacagagacgaacacagcagccgcggttatagaaaccaccgaagctcacgcgaaaccagggactatgcacccccaagtaggggccacgcctaccgtgactatggccattctcggagagacgagtcctactcccgcggttacaggaaccggaggagtagccgggagaccagggagtacgcccctcctagccggggacatgggtacagagattacggccactcaagaaggcatgaatcctatagccggggatatagaaatcacccctctagtcgggagactcgagattatgcccctccgcatagggactatgcatatcgagattacgggcatagttcctgggacgaacacagttccagagggtattcttatcacgatggatatggcgaggcgctcggcagagaccactccgagcacctctctggatcctcttatcgagatgcactgcagcggtatggaacatctcacggtgcccctcctgcgcgtgggccacgtatgagctatggtggctctacgtgccacgcctacagcaatactcgtgatcgatatggcaggtcttgggaatcgtactccagctgcggggacttccattattgcgaccgggagcatgtctgtcgtaaagatcagaggaacccaccatccttgggacgagtgctccctgatccgagagaggcttgcgggtcctccagctacgtggctagcatcgtcgacggtggtgagtctcggtccgagaagggcgactcctcacgatactag

SEQ ID NO: 325396 - DNA, 1491 bp, Artificial Sequence
  derived and/or modified sequence
atggtggaggccgaccaccccggcaagctgttcatcggcggcctgaacagagagaccaacgagaagatgctgaaggccgtgttcggcaagcacggccccatcagcgaggtgctgctgatcaaggacagaaccagcaagagcagaggcttcgccttcatcaccttcgagaaccccgccgacgccaagaacgccgccaaggacatgaacggcaagagcctgcacggcaaggccatcaaggtggagcaggccaagaagcccagcttccagagcggcggcagaagaagaccccccgccagcagcagaaacagaagccccagcggcagcctgagaagcgccagaggcagcagaggcggcaccagaggctggctgcccagccacgagggccacctggacgacggcggctacacccccgacctgaagatgagctacagcagaggcctgatccccgtgaagagaggccccagcagcagaagcggcggccccccccccaagaagagcgcccccagcgccgtggccagaagcaacagctggatgggcagccagggccccatgagccagagaagagagaactacggcgtgccccccagaagagccaccatcagcagctggagaaacgacagaatgagcaccagacacgacggctacgccaccaacgacggcaaccaccccagctgccaggagaccagagactacgccccccccagcagaggctacgcctacagagacaacggccacagcaacagagacgagcacagcagcagaggctacagaaaccacagaagcagcagagagaccagagactacgccccccccagcagaggccacgcctacagagactacggccacagcagaagagacgagagctacagcagaggctacagaaacagaagaagcagcagagagaccagagagtacgccccccccagcagaggccacggctacagagactacggccacagcagaagacacgagagctacagcagaggctacagaaaccaccccagcagcagagagaccagagactacgcccccccccacagagactacgcctacagagactacggccacagcagctgggacgagcacagcagcagaggctacagctaccacgacggctacggcgaggccctgggcagagaccacagcgagcacctgagcggcagcagctacagagacgccctgcagagatacggcaccagccacggcgccccccccgccagaggccccagaatgagctacggcggcagcacctgccacgcctacagcaacaccagagacagatacggcagaagctgggagagctacagcagctgcggcgacttccactactgcgacagagagcacgtgtgcagaaaggaccagagaaacccccccagcctgggcagagtgctgcccgaccccagagaggcctgcggcagcagcagctacgtggccagcatcgtggacggcggcgagagcagaagcgagaagggcgacagcagcagatactag

SEQ ID NO: 325397 - DNA, 4179 bp, Artificial Sequence
  derived and/or modified sequence
atgaagagctgcgccgtgagcctgaccaccgccgccgtggccttcggcgacgaggccaagaagatggccgagggcaaggccagcagagagagcgaggaggagagcgtgagcctgaccgtggaggagagagaggccctgggcggcatggacagcagactgttcggcttcgtgagactgcacgaggacggcgccagaaccaagaccctgctgggcaaggccgtgagatgctacgagagcctgatcctgaaggccgagggcaaggtggagagcgacttcttctgccagctgggccacttcaacctgctgctggaggactacagcaaggccctgagcgcctaccagagatactacagcctgcaggccgactactggaagaacgccgccttcctgtacggcctgggcctggtgtacttctactacaacgccttccactgggccatcaaggccttccaggacgtgctgtacgtggaccccagcttctgcagagccaaggagatccacctgagactgggcctgatgttcaaggtgaacaccgactacaagagcagcctgaagcacttccagctggccctgatcgactgcaacccctgcaccctgagcaacgccgagatccagttccacatcgcccacctgtacgagacccagagaaagtaccacagcgccaaggaggcctacgagcagctgctgcagaccgagaacctgcccgcccaggtgaaggccaccgtgctgcagcagctgggctggatgcaccacaacatggacctggtgggcgacaaggccaccaaggagagctacgccatccagtacctgcagaagagcctggaggccgaccccaacagcggccagagctggtacttcctgggcagatgctacagcagcatcggcaaggtgcaggacgccttcatcagctacagacagagcatcgacaagagcgaggccagcgccgacacctggtgcagcatcggcgtgctgtaccagcagcagaaccagcccatggacgccctgcaggcctacatctgcgccgtgcagctggaccacggccacgccgccgcctggatggacctgggcaccctgtacgagagctgcaaccagccccaggacgccatcaagtgctacctgaacgccgccagaagcaagagatgcagcaacaccagcaccctggccgccagaatcaagttcctgcaggcccagctgtgcaacctgccccagagcagcctgcagaacaagaccaagctgctgcccagcatcgaggaggcctggagcctgcccatccccgccgagctgaccagcagacagggcgccatgaacaccgcccagcagaacggcagcgacaactggaacggcggccagagcctgagccaccaccccgtgcagcaggtgtacagcctgtgcctgaccccccagaagctgcagcacctggagcagctgagagccaacagagacaacctgaaccccgcccagaagcaccagctggagcagctggagagccagttcgtgctgatgcagcagatgagacacaaggaggtggcccaggtgagaaccaccggcatccacaacggcgccatcaccgacagcagcctgcccaccaacagcgtgagcaacagacagccccacggcgccctgaccagagtgagcagcgtgagccagcccggcgtgagacccgcctgcgtggagaagctgctgagcagcggcgccttcagcgccggctgcatcccctgcggcaccagcaagatcctgggcagcaccgacaccatcctgctgggcagcaactgcatcgccggcagcgagagcaacggcaacgtgccctacctgcagcagaacacccacaccctgccccacaaccacaccgacctgaacagcagcaccgaggagccctggagaaagcagctgagcaacagcgcccagggcctgcacaagagccagagcagctgcctgagcggccccaacgaggagcagcccctgttcagcaccggcagcgcccagtaccaccaggccaccagcaccggcatcaagaaggccaacgagcacctgaccctgcccagcaacagcgtgccccagggcgacgccgacagccacctgagctgccacaccgccaccagcggcggccagcagggcatcatgttcaccaaggagagcaagcccagcaagaacagaagcctggtgcccgagaccagcagacacaccggcgacaccagcaacggctgcgccgacgtgaagggcctgagcaaccacgtgcaccagctgatcgccgacgccgtgagcagccccaaccacggcgacagccccaacctgctgatcgccgacaacccccagctgagcgccctgctgatcggcaaggccaacggcaacgtgggcaccggcacctgcgacaaggtgaacaacatccaccccgccgtgcacaccaagaccgaccacagcgtggccagcagccccagcagcgccatcagcaccgccacccccagccccaagagcaccgagcagagaagcatcaacagcgtgaccagcctgaacagcccccacagcggcctgcacaccgtgaacggcgagggcctgggcaagagccagagcagcaccaaggtggacctgcccctggccagccacagaagcaccagccagatcctgcccagcatgagcgtgagcatctgccccagcagcaccgaggtgctgaaggcctgcagaaaccccggcaagaacggcctgagcaacagctgcatcctgctggacaagtgccccccccccagaccccccaccagcccctacccccccctgcccaaggacaagctgaacccccccacccccagcatctacctggagaacaagagagacgccttcttcccccccctgcaccagttctgcaccaaccccaagaaccccgtgaccgtgatcagaggcctggccggcgccctgaagctggacctgggcctgttcagcaccaagaccctggtggaggccaacaacgagcacatggtggaggtgagaacccagctgctgcagcccgccgacgagaactgggaccccaccggcaccaagaagatctggagatgcgagagcaacagaagccacaccaccatcgccaagtacgcccagtaccaggccagcagcttccaggagagcctgagagaggagaacgagaagagaacccagcacaaggaccacagcgacaacgagagcaccagcagcgagaacagcggcagaagaagaaagggccccttcaagaccatcaagttcggcaccaacatcgacctgagcgacaacaagaagtggaagctgcagctgcacgagctgaccaagctgcccgccttcgccagagtggtgagcgccggcaacctgctgacccacgtgggccacaccatcctgggcatgaacaccgtgcagctgtacatgaaggtgcccggcagcagaacccccggccaccaggagaacaacaacttctgcagcgtgaacatcaacatcggccccggcgactgcgagtggttcgtggtgcccgaggactactggggcgtgctgaacgacttctgcgagaagaacaacctgaacttcctgatgagcagctggtggcccaacctggaggacctgtacgaggccaacgtgcccgtgtacagattcatccagagacccggcgacctggtgtggatcaacgccggcaccgtgcactgggtgcaggccgtgggctggtgcaacaacatcgcctggaacgtgggccccctgaccgcctgccagtacaagctggccgtggagagatacgagtggaacaagctgaagagcgtgaagagccccgtgcccatggtgcacctgagctggaacatggccagaaacatcaaggtgagcgaccccaagctgttcgagatgatcaagtactgcctgctgaagatcctgaagcagtaccagaccctgagagaggccctggtggccgccggcaaggaggtgatctggcacggcagaaccaacgacgagcccgcccactactgcagcatctgcgaggtggaggtgttcaacctgctgttcgtgaccaacgagagcaacacccagaagacctacatcgtgcactgccacgactgcgccagaaagaccagcaagagcctggagaacttcgtggtgctggagcagtacaagatggaggacctgatccaggtgtacgaccagttcaccctggccctgagcctgagcagcagcagctag

SEQ ID NO: 325398 - DNA, 4179 bp, Artificial Sequence
  derived and/or modified sequence
atgaagtcctgcgccgtgtcactgactacagctgccgttgcctttggcgacgaggcaaagaagatggctgaaggcaaggcaagcagggaatctgaagaagagagtgttagtctcacggtcgaggagagggaagccctgggcggaatggattctcgcctgttcggcttcgtgaggttacacgaggatggagcccgcactaagaccctgctgggtaaggcagttagatgctacgaaagcctcatcttaaaagcagaagggaaagtggaaagcgattttttttgtcagctcgggcattttaaccttttgttagaggactactctaaggccctctccgcttaccagaggtattatagcctccaggctgattattggaaaaacgctgcttttttgtacggcttgggtcttgtctacttctactacaacgctttccattgggccatcaaagcgttccaggacgtcttgtacgtggatcctagcttttgccgcgctaaggaaatacacctgaggcttgggctgatgtttaaagtgaataccgactacaagtcctccttaaagcactttcagctggctcttattgactgcaatccatgtacactgtccaacgcagagattcagtttcacatcgctcatctatatgagacacagcgcaagtatcactccgccaaggaggcatatgaacagctcctccagacagagaacctgcccgcccaggtgaaagctaccgtactccagcagctcggctggatgcaccataacatggacctggttggggacaaagctacaaaggaaagctacgctattcaatacctgcagaaaagtctggaggcagaccccaattctggccagagttggtatttcctaggaagatgctattccagcatcggaaaagtgcaggatgcctttattagctaccgtcaatccatagataaaagtgaagccagtgccgacacatggtgttcaataggggtcctgtatcagcagcagaaccagcctatggacgctctgcaagcatatatctgcgccgtgcagctggatcatggccacgcagccgcctggatggacctgggtaccctctatgagagctgcaatcagccccaggacgctatcaagtgttatttgaatgccgcccgatcaaagaggtgtagtaatacctctaccctggctgcgagaattaagttcctacaagctcagctttgtaacctgccccagtcctccctccagaataagaccaaactcttaccatccattgaagaggcctggtcgttgcccatcccggctgaactgacctcaaggcagggggctatgaacacagcacaacagaacggatccgacaattggaatggagggcagagcttgtctcatcatccagtgcaacaggtgtattccctgtgcttaaccccccagaagcttcaacacctggaacagctcagagccaaccgggacaaccttaatccagcacagaaacatcaactggaacaacttgagtcccagtttgtgttgatgcaacaaatgagacacaaggaggtggcacaggtgcgaacaacgggaatccacaacggagccataaccgattccagcttgcctacaaattcagtgagtaatcggcaaccacacggggcgcttacacgcgtatcttccgtatcgcagccaggcgttcgccccgcctgcgtggagaagctgctgtcaagcggagctttctcagctggctgtatcccctgtggcacctccaagatcctgggctcaaccgacaccatcctgctcggtagcaattgtatcgccggcagcgaaagtaacggcaacgtcccatacctccagcaaaacacccacaccctccctcataatcacaccgacctcaatagttcaaccgaagaaccttggcgaaagcaactctccaattcagctcagggcctgcataagagccaatcatcgtgcctgtcagggccaaacgaggagcaaccactgttcagtacaggaagcgcacagtaccatcaggccacaagcaccgggattaagaaagcgaacgaacacctcacactgccatcaaatagcgtcccacagggcgatgctgacagtcacctatcctgccatactgcaacatccgggggacagcaggggatcatgtttacaaaagagtcaaaacctagcaaaaatcgctcccttgtccccgagacctcaaggcacactggagacaccagcaacggatgtgctgacgtgaagggtctgtccaaccacgtgcatcagctcatcgccgatgccgtgtccagtccgaaccacggcgatagtccaaatttgctcattgccgacaatccccaactgagtgcattgttaattggtaaagccaatggtaacgtgggcaccggcacatgcgataaagtaaacaacatccacccggccgttcatacaaaaactgaccacagcgtggcgagctccccaagctccgctatttctacagccaccccatcacccaagagcacagagcagaggtccattaacagtgtcacaagtctgaattcccctcatagcggcttacatacggtaaatggtgagggcctcggaaagtcacagtccagtactaaggtggacctccccctggcgtctcatcgaagcacatcacagatactccctagcatgagcgtgtccatctgcccctcgagcactgaagtgctgaaggcttgccgtaaccccggtaagaatggattgtccaattcatgcatcctgcttgacaagtgtcccccaccaaggccacctacttccccctacccccctctgcctaaggataagctcaaccctccaacgccttccatttatctggaaaacaagagggatgcctttttcccccccttacatcagttctgcacaaacccaaaaaatccggtgaccgtcattcgtggcctcgcaggcgctctcaaacttgacctcggcctgttttccaccaaaaccttggtggaggccaacaatgagcacatggtggaagtgcggactcagctcctgcagcccgctgacgagaactgggacccaactggcactaagaagatctggcgatgtgaaagcaacagatcgcataccaccatcgcaaaatacgctcaataccaagcctctagctttcaagaaagcctgcgggaagaaaacgagaagagaactcagcacaaggatcattccgataacgagtctacttcctccgaaaacagcggccgcagacgaaaaggacccttcaaaacgataaaattcggtactaatattgatttaagcgacaacaaaaagtggaaactgcagcttcatgagctgactaagcttcccgcgttcgcacgtgtcgtgagcgcaggcaatctgttgacacacgttggccataccatactggggatgaatacagtccagctatatatgaaagtgcccggatccaggactcctggacatcaggagaacaacaatttttgctcagtgaacattaacatcgggcccggcgactgtgagtggtttgtggtccccgaggattactggggagtacttaatgacttttgcgagaaaaataatctgaacttcctgatgtcatcatggtggccaaatctggaagacttgtatgaagcaaatgtgcccgtctacaggtttatacagcgccccggagatctggtatggataaatgcaggcacagttcactgggtccaggcagtaggctggtgtaataatattgcgtggaatgtgggccccctgaccgcatgtcagtacaaactcgcagtggagagatacgagtggaacaaactgaagagcgtgaaaagcccggttccaatggtacacctgtcttggaacatggcccggaacatcaaggtgtcggaccccaagcttttcgagatgataaagtattgcttactaaagatccttaaacagtaccagactctcagggaggcactggtagccgccggaaaagaagtgatatggcacggaaggacaaacgatgaaccagcacattattgtagcatatgtgaagttgaggtcttcaacctgttgttcgtcactaatgagtctaacacacagaagacttacattgtccattgtcacgactgtgctagaaaaacgtccaaaagcctggaaaatttcgtagtgctggagcaatacaagatggaagatctgatacaggtttatgatcagtttaccctggccctgtcccttagctcatctagttag

SEQ ID NO: 325399 - DNA, 4179 bp, Artificial Sequence
  derived and/or modified sequence
atgaagagctgtgctgtgtccctgaccacagctgctgtggcctttggagatgaggccaagaagatggccgagggcaaggccagccgggagagcgaggaggagagcgtgtccctgactgtggaggagcgggaggccctgggcggcatggacagccggctgtttggatttgtgcggctgcatgaagatggagcccggaccaagaccctgctgggcaaggctgtgcgctgctatgagagcctcatcctgaaggccgagggcaaggtggagagtgacttcttctgccagctgggccacttcaacctgctgctggaggactacagcaaggccctgagcgcctaccagcgctactacagcctgcaggccgactactggaagaatgctgccttcctgtatggcctgggcctggtgtacttctactacaatgccttccactgggccatcaaggccttccaggatgtgctgtatgtggaccccagcttctgccgggccaaggagatccacctgcggctgggcctgatgttcaaggtgaacacagactacaagagcagcctgaagcacttccagctggccctgattgactgcaacccctgcaccctgagcaatgctgagatccagttccacatcgcccacctgtatgagacccagaggaagtaccacagcgccaaggaggcctatgagcagctgctgcagacagagaacctgcctgcccaggtgaaggccaccgtgctgcagcagctgggctggatgcaccacaacatggacctggtgggggacaaggccaccaaggagagctatgccatccagtacctgcagaagagcctggaggccgaccccaacagcggccagagctggtacttcctgggccgctgctacagcagcatcggcaaggtgcaggatgccttcatctcctaccggcagagcattgacaagtctgaggccagcgctgacacctggtgcagcattggagtgctgtaccagcagcagaaccagcccatggatgccctgcaggcctacatctgtgctgtgcagctggaccacggccatgctgctgcctggatggacctgggcaccctgtatgagagctgcaaccagccccaggatgccatcaagtgctacctgaatgctgcccggagcaagcgctgcagcaacaccagcaccctggccgcccgcatcaagttcctgcaggcccagctgtgcaacctgccccagagcagcctgcagaacaagaccaagctgctgcccagcattgaggaggcctggagcctgcccatcccagctgagctgaccagccggcagggcgccatgaacacagcccagcagaatggaagtgacaactggaatggaggccagagcctgagccaccaccctgtgcagcaggtgtacagcctgtgcctgaccccccagaagctgcagcacctggagcagctgcgggccaacagagacaacctgaacccagcccagaagcaccagctggagcagctggagagccagtttgtgctgatgcagcagatgaggcacaaggaggtggcccaggtgaggaccaccggcatccacaatggagccatcacagacagcagcctgcccaccaacagcgtgagcaaccggcagccccacggggccctgaccagggtgtcctctgtgtcccagcccggggtgcggcctgcctgtgtggagaagctgctgagcagcggggccttctctgctggctgcatcccctgtggcaccagcaagatcctgggcagcacagacaccatcctgctgggcagcaactgcatcgccggcagcgagagcaatggaaatgtgccctacctgcagcagaacacccacaccctgccccacaaccacacagacctgaacagcagcacagaggagccctggaggaagcagctgagcaacagcgcccagggcctgcacaagagccagagcagctgcctgagcggccccaatgaggagcagcccctcttcagcactggaagtgcccagtaccaccaggccaccagcacaggcatcaagaaggccaatgagcacctgaccctgcccagcaacagcgtgccccagggagatgctgacagccacctgagctgccacacagccaccagcggcggccagcagggcatcatgttcaccaaggagagcaagcccagcaagaacagaagcctggtgcctgagaccagccgccacactggagacaccagcaatggctgtgctgatgtgaagggcctgagcaaccacgtgcaccagctgattgctgatgctgtgagcagccccaaccacggggacagccccaacctgctgattgctgacaacccccagctgagcgccctgctgattggcaaggccaatggaaatgtgggcaccggcacctgtgacaaggtgaacaacatccaccctgctgtgcacaccaagacagaccacagcgtggccagcagccccagcagcgccatcagcacagccacccccagccccaagagcacagagcagaggagcatcaacagcgtgaccagcctgaacagcccccacagcggcctgcacacagtgaatggagagggcctgggcaagagccagagcagcaccaaggtggacctgcccctggccagccacaggagcaccagccagatcctgcccagcatgtctgtgtccatctgccccagcagcacagaggtgctgaaggcctgcagaaatcctgggaagaatggcctgagcaacagctgcatcctgctggacaagtgccccccacccaggcctcccaccagcccctacccacccctgcccaaggacaagctgaacccccccacccccagcatctacctggagaacaagagagatgccttcttcccccccctgcaccagttctgcaccaaccccaagaaccctgtgaccgtcatccggggcctggccggggccctgaagctggacctgggcctcttcagcaccaagaccctggtggaggccaacaatgagcacatggtggaggtgaggacccagctgctgcagcctgcagatgagaactgggaccccaccggcaccaagaagatctggaggtgtgagagcaacagaagccacaccaccatcgccaagtatgcccagtaccaggccagcagcttccaggagagcctgcgggaggagaatgagaagaggacccagcacaaggaccacagcgacaatgaaagcaccagcagtgaaaattctggaagaagaaggaagggccccttcaagaccatcaagtttggcaccaacatcgacctgagtgacaacaagaagtggaagctgcagctgcacgagctgaccaagctgcctgcctttgcccgggtggtgtctgctggcaacctgctgacccacgtgggccacaccatcctgggcatgaacacagtgcagctgtacatgaaggtgcccggcagcaggaccccaggccaccaggagaacaacaacttctgcagcgtgaacatcaacatcggccctggggactgtgagtggtttgtggtgcctgaggactactggggcgtgctgaatgacttctgtgagaagaacaacctgaacttcctgatgagctcctggtggcccaacctggaggacctgtatgaggccaacgtgcctgtgtaccgcttcatccagaggcctggggacctggtgtggatcaatgccggcaccgtgcactgggtgcaggccgtgggctggtgcaacaacatcgcctggaatgtgggccccctgacagcctgccagtacaagctggccgtggagagatatgagtggaacaagctgaagtctgtgaagagccctgtgcccatggtgcacctgtcctggaacatggccaggaacatcaaggtgtctgaccccaagctgtttgagatgatcaagtactgcctgctgaagatcctgaagcagtaccagaccctgcgggaggccctggtggccgccggcaaggaggtgatctggcacggccgcaccaatgatgagcccgcccactactgcagcatctgtgaggtggaggtgttcaacctgctgtttgtgaccaatgaaagcaacacccagaagacctacatcgtgcactgccacgactgtgccaggaagaccagcaagagcctggagaactttgtggtgctggagcagtacaagatggaggacctgatccaggtgtatgaccagttcaccctggccctgagcctgagcagcagcagctag

SEQ ID NO: 325400 - DNA, 4179 bp, Artificial Sequence
  derived and/or modified sequence
atgaagagctgcgccgtgagcctgaccaccgccgccgtggccttcggcgacgaagccaagaagatggcggagggcaaggcctcacgcgagtccgaagaagaaagtgtgagtctcaccgtcgaggaacgggaagctctgggcggtatggacagtcgtctgttcggatttgtgaggctacacgaagacggggctagaaccaaaacgttactggggaaggccgtgcgatgctacgagagtctcatcttgaaagctgagggtaaagtcgagtctgattttttctgtcagcttggtcactttaacctgctcctcgaggactactctaaggccctttccgcttaccaacggtattatagcttacaggcagactactggaagaacgccgccttcttgtacggtttaggcttggtgtacttttattataacgcctttcattgggccataaaggcattccaggacgtattatacgtggaccccagcttctgccgggctaaagaaatacatctgcgcttgggcttaatgttcaaagtgaacacagactacaaatcatcacttaaacatttccagcttgccttgatcgactgtaatccctgtacactcagcaatgcagaaatccagttccatatcgctcatctctacgagacacagcgcaagtaccacagtgccaaagaggcttatgagcagctgttacagacagaaaatcttcctgcacaggttaaagctaccgtcttgcaacagttagggtggatgcaccacaatatggacttagttggagacaaagcgaccaaggaatcctacgccattcagtacctgcagaagtcattggaagctgaccccaacagtggccaatcttggtattttctgggacgctgctatagctcaataggcaaggtgcaggacgcgtttatatcctatcggcaatcaattgataagtccgaagcctccgcagacacctggtgttctattggagtcctatatcaacaacagaaccaacccatggatgccctgcaggcctacatatgcgcagtacagctagaccatgggcatgctgccgcctggatggacctcgggaccctgtacgagtcatgtaaccagccccaggacgctataaagtgttacctgaacgcggctcggagcaaaaggtgttctaatactagcactctcgccgcccgtataaaatttctgcaggcccagctctgtaacctgccccagtcaagcctccaaaacaagactaagctgcttcccagcattgaagaagcatggtccctgccaatccccgctgaactcacctctaggcaaggagcaatgaatacagctcagcagaacggctccgacaattggaacggcgggcaaagtttgtctcaccatcccgtgcagcaggtttattctctgtgtctaaccccgcaaaaattacaacatttagagcagctgcgggccaaccgggataatttgaatcccgcacaaaaacatcaactggagcagctggagtcccaatttgtcctgatgcagcaaatgcgccacaaagaggtggcacaagtccgcacaaccggaatacataacggcgccattactgatagttcactacccacgaattccgtgagtaataggcagcctcatggagcattaacccgagtatcctctgtatcccaacctggggttcgacctgcctgcgtggagaagcttctaagcagtggcgccttctcagcgggttgtattccctgcggcacaagtaagatccttggctctacagatacaatcttgctcggttcaaactgtatcgcgggtagtgagtcaaatggcaatgttccgtacctccaacagaacacccacactttacctcataaccatacggacttgaactcatccacagaagaaccttggcgaaagcagttgtccaacagcgcgcaggggttacacaagtcccagagctcatgcctgagtggcccaaacgaagagcagccactgttctctaccgggagtgcccaataccatcaggcgacatccacgggcatcaagaaagcaaatgagcatttaactctgccctcgaactcagtccctcaaggagatgcggatagtcatcttagttgccatactgcgaccagcggcggacagcaaggaattatgttcactaaggagtccaagccttccaagaatcgctccctcgtcccggaaacatcccgccacaccggtgacacttcaaatggctgcgccgacgtcaaaggtttgagcaatcatgtgcaccagttgatcgctgatgccgtttctagccccaatcatggggactccccaaaccttctcattgccgataatccacaactctccgcattgttgatcggaaaagcaaacggcaatgtaggtactggaacctgcgataaagtaaataatattcaccccgcagttcataccaaaacggaccactccgttgcttcgtctccgtctagtgctatttcgactgctaccccgtcccccaagtccactgagcagcgctctattaacagtgttacctccctaaacagcccacacagcggactgcacaccgtcaatggcgaaggcctcggcaaatcgcagagcagcacaaaagtggatctaccacttgcctcccatcgatcaacatctcagatcctcccttccatgtcggtgtcaatctgcccatcttccacagaggtgctcaaggcttgcagaaaccctggcaaaaatgggctgagtaattcttgcatcctgctggataagtgtcccccaccacgccctccgacttctccttatccacctctcccgaaggataagctcaacccgcccacgccctcaatttacctcgagaacaagcgggatgcctttttccccccactccatcagttctgtactaatccaaagaatcctgtcactgtgatcaggggcctggctggagcactaaagctggatctcggcctgtttagcaccaaaactctcgtggaggccaataatgagcacatggtggaggtcagaactcagcttcttcaacccgccgatgagaactgggatcccaccggaacgaaaaagatttggcgctgcgaatctaacaggagccatactacgatagcaaaatacgcccagtaccaagctagcagctttcaggaaagtctgcgggaagaaaatgagaaacggacccagcataaagaccactcagataacgaatcaaccagctccgagaactcgggacgcagacggaaaggaccctttaagaccatcaaattcggaaccaatatcgatctttccgacaataagaaatggaaacttcaactccacgaattaacaaagctgcccgcatttgctcgggtagttagcgctggaaatttgctgacccacgttggacatactatactaggcatgaataccgtgcagctctacatgaaggtccccggctccaggacacccggccaccaggagaacaacaatttttgttccgtcaacattaatatcggtcccggagactgcgaatggttcgtcgtccctgaggattattggggcgtgcttaacgatttttgcgagaaaaacaacctcaatttcctaatgagctcctggtggcccaacctggaggacctttacgaggccaatgttcctgtgtatcgtttcatccagaggcctggcgatttggtctggatcaacgcaggaaccgttcactgggtgcaggccgtggggtggtgtaacaatatagcgtggaatgttggccccctcacagcctgtcagtataaactcgctgttgaaagatacgaatggaacaaacttaagagtgtcaagagccctgtgccaatggtgcatctctcctggaatatggctcggaacattaaagtttcagatcccaaattattcgagatgatcaaatactgtctcctgaaaatcttgaaacagtaccaaacattacgggaggctctggtggctgcaggcaaggaagtgatctggcacggacggaccaatgatgaacctgcccattactgcagcatatgcgaagtggaagtttttaaccttctgttcgtaacaaacgaatcaaacactcagaaaacatacatcgtccactgccacgattgcgctcggaagacgagcaagtcactggagaactttgtggtgctcgaacaatataaaatggaggatcttattcaggtgtacgaccagtttaccctcgcactctccctgtctagtagctcctag

SEQ ID NO: 325401 - DNA, 4179 bp, Artificial Sequence
  derived and/or modified sequence
atgaagagctgcgcggtctcactgaccacagccgcagtagcttttggcgatgaggcaaagaagatggccgagggaaaagccagtagggagagtgaggaagagtcagtctctctaaccgtcgaagaacgagaggccctgggcggaatggactctagactctttggcttcgtgagactccatgaagacggcgcacgaactaaaaccctgctcgggaaggcggtcagatgctatgagagcctgattttaaaggccgagggtaaagtggagagtgatttcttttgccaattaggtcactttaatctgttactggaggactacagtaaggccctttccgcttatcagcgctattactctttacaagccgactattggaagaatgcagcattcttgtatggacttggccttgtgtacttttactacaacgctttccattgggccattaaagcctttcaagatgttctgtatgtggacccctccttttgtcgcgcaaaagagatccacctcagactcggcctgatgtttaaggtcaataccgattacaagtccagcttgaaacactttcaactagccctgatcgactgtaacccttgcaccctgtccaacgcggagatccagttccatatcgcccacctctatgagacccaacggaagtaccactctgcaaaggaagcgtacgagcagctgcttcagaccgagaacctaccagctcaggtgaaagcgacagtactccagcagctgggttggatgcaccacaatatggatctggtaggcgacaaggcaactaaagagagttatgcgatccagtatcttcagaaatcactggaggctgatcctaactccggtcagagctggtactttctgggaagatgctatagcagtatcgggaaggtgcaggatgcattcataagttatcgtcagtctatagacaagtccgaggctagcgcggacacctggtgcagcatcggggtgctctaccagcaacaaaatcagcccatggatgcattacaggcctacatctgcgccgttcagctagaccacgggcacgcagccgcatggatggatttgggcaccctgtacgagtcttgcaaccaaccccaggacgccattaagtgttatctgaacgcagccaggtccaagcgctgctcgaatacttctactcttgctgcacgcatcaaatttttacaggcacagctgtgtaaccttccacaatcctccctgcaaaacaaaacgaaacttttaccaagtatagaagaggcatggtccctgcccataccggctgagctcacatccagacagggtgctatgaatacagcacagcagaatgggtcagataactggaatggcggacagtccctttctcaccatcctgtccagcaggtatatagtctctgtcttactccacagaagttacagcacttggagcagctccgggctaatcgcgataatctgaacccagcccagaagcatcagttagaacagctcgagagccagtttgtgctaatgcagcagatgagacacaaagaagtggcccaagtgcggacaactggtatccacaatggtgctatcaccgactcctcactccccactaatagtgttagtaaccgccagccccacggtgcactcaccagggtatccagtgtgagtcagcccggagtaagacccgcatgcgtggaaaagctgctgtcatccggcgcattctccgcaggatgtatcccatgcgggacaagtaaaatactgggatccaccgacaccatacttttgggctcaaattgtattgccggatcagagtctaatggcaatgtgccctacctacagcaaaatacacacaccttgccacataatcacacagatcttaatagctccacagaggagccatggaggaaacagttgtcaaactcggcgcagggactacacaagagccagtcatcatgcctgtccggacctaacgaggaacagccattattttccaccgggagtgcccagtatcaccaggctacgtctaccggaattaagaaagccaacgaacatctgaccctgcctagcaacagcgtgccccaaggggacgcagacagccacctctcttgtcacactgccacttcaggcggtcagcagggaattatgttcacaaaggaaagcaaaccttccaaaaataggtcattagtgcccgaaacaagtcggcacacaggggacactagcaatggatgcgcagatgtgaagggcctcagcaatcacgtgcaccagttgatcgccgacgcagtgtcatccccaaatcacggagattctcccaatctcctgatagctgacaacccccagctgagcgctctgctgatcggcaaggccaatggaaacgtggggacagggacctgtgataaggtaaacaatatccatcccgctgtccacaccaaaaccgaccattctgtagcttcatccccatctagcgccatttctacagcgaccccttcccctaaatccaccgagcagaggtccattaactccgtgacctctctcaatagcccccacagtgggttacataccgtcaatggcgagggactgggaaagagccagtcgagcaccaaagtagacctgcccttagcctcacacaggtctacaagtcaaatccttccctctatgtccgttagcatctgcccttcttccactgaagttctcaaagcgtgtcgtaatccgggtaagaatggcctgagtaactcatgtattctattggacaaatgcccaccacctcgaccaccgactagcccatacccgccacttccaaaagacaagctcaatccccctacaccatcaatatacctggaaaataaacgcgacgcgtttttcccacctctgcaccagttctgcacaaacccaaagaacccagtgactgtgattcgcggattagcaggagctctgaagctggatttaggattgttcagtactaaaactcttgtcgaagctaacaatgagcacatggtggaggtgcggacgcagctgcttcagccggctgatgaaaattgggatcccactggcaccaagaaaatctggcgctgtgagagtaatagatcccatacgactatcgcaaagtacgcccaatatcaggcttcaagtttccaagagtcacttcgggaagaaaacgaaaaaagaacacagcataaagaccactcggataacgaaagtaccagcagcgagaacagtgggcgtaggagaaagggcccttttaaaaccattaagtttggcaccaacatcgacctgtccgacaataagaagtggaaactgcagctgcacgagctgacaaagctgcccgcttttgccagggtagtgtccgctggcaatctgttgacccacgttgggcataccattctgggcatgaacacggttcaactgtacatgaaagttcctggtagccgcacccccggacatcaggagaataacaacttttgcagcgtaaacatcaatattgggcctggcgactgcgaatggttcgtggtacctgaggactattggggggtcctgaatgatttttgtgaaaagaacaatttgaatttcttaatgtctagttggtggcccaacttggaagatctctacgaagccaatgtcccggtgtatcgatttatccaacgtccgggtgacctggtttggataaacgccggtactgttcactgggtgcaggcggttgggtggtgtaataatatcgcctggaatgtgggccctctgactgcctgtcagtacaaacttgctgtggagaggtacgagtggaataagctgaaaagcgtgaaaagtccagtcccaatggtgcacctgtcgtggaatatggcccgtaacatcaaggtctccgatcctaaacttttcgaaatgataaagtattgtctgcttaaaattctgaaacaataccagactctgagagaagcactcgtcgccgcaggcaaggaagtaatctggcatggtcgaactaacgacgaacctgcccactattgttccatttgcgaggtcgaagtcttcaacctcttgtttgttactaacgagagcaacacccagaaaacctacatcgtacattgccatgattgtgctcgcaagacaagcaagtcactagagaactttgtggtgctggagcagtacaaaatggaggaccttatccaggtatatgatcaattcactctggctctctccctgtccagttccagctag

SEQ ID NO: 325402 - DNA, 4179 bp, Artificial Sequence
  derived and/or modified sequence
atgaaatcctgcgcagtgtcgctcactaccgccgctgttgccttcggtgatgaggcaaagaaaatggcggaaggaaaagcgagccgcgagagtgaagaggagtctgttagcctgacagtcgaggaaagggaggcgcttggtggcatggacagccgtctcttcgggttcgtgaggcttcatgaagatggcgccagaacgaagaccctactaggcaaggctgttcgctgctacgaatctttaatcttaaaagctgaaggaaaagtggagtctgacttcttttgccaattaggtcacttcaacctcttgttggaagattattcaaaagcattatctgcatatcagagatattacagtttacaggctgactactggaagaatgctgcgtttttatatggccttggtttggtctacttctactacaatgcatttcattgggcaattaaagcatttcaagatgtcctttatgttgaccccagcttttgtcgagccaaggaaattcatttacgacttgggctcatgttcaaagtgaacacagactacaagtctagtttaaagcattttcagttagccttgattgactgtaatccatgtactttgtccaatgctgaaattcaatttcatattgcccatttgtatgaaacccagaggaagtatcattctgcaaaggaggcatatgaacaacttttgcagacagaaaaccttcctgcacaagtaaaagcaactgtattgcaacagttaggttggatgcatcataatatggatctagtaggagacaaagccacaaaggaaagctatgctattcagtatctccaaaagtctttggaggcagatcctaattctggccaatcgtggtattttcttggaaggtgttattcaagtattgggaaagttcaggatgcctttatatcttacaggcaatctattgataaatcagaagcaagtgcagatacatggtgttcaataggtgtgttgtatcagcagcaaaatcagcctatggatgctttacaggcatatatttgtgctgtacaattggaccatgggcatgccgcagcctggatggacctaggtactctctatgaatcctgcaatcaacctcaagatgccattaaatgctacctaaatgcagctagaagcaaacgttgtagtaatacctctacgcttgctgcaagaattaaatttctacaggctcagttgtgtaaccttccacaaagtagtctacagaataaaactaaattacttcctagtattgaggaggcatggagcctaccaatccccgcagagcttacctccaggcagggtgccatgaacacagcacagcagaatggttctgataactggaatggtggccagagtctttcacatcatccagtacagcaagtttattcgttgtgtttgacaccacagaaattacagcacttggaacaactgcgagcaaatagagataatttaaatccagcacagaagcatcagctggaacagttagaaagtcagtttgtcttaatgcagcaaatgagacacaaagaagttgctcaggtacgaactactggaattcataacggggccataactgattcatcactgcctacaaactctgtctctaatcgacaaccacatggtgctctgaccagagtatctagcgtctctcagcctggagttcgccctgcttgtgttgaaaaacttttgtccagtggagctttttctgcaggctgtattccttgtggcacatcaaaaattctaggaagtacagacactatcttgctaggcagtaattgtatagcaggaagtgaaagtaatggaaatgtgccttacctgcagcaaaatacacacactctacctcataatcatacagacctgaacagcagcacagaagagccatggagaaaacagctatctaactccgctcaggggcttcataaaagtcagagttcatgtttgtcaggacctaatgaagaacaacctctgttttccactgggtcagcccagtatcaccaggcaactagcactggtattaagaaggcgaatgaacatctcactctgcctagtaattcagtaccacagggggatgctgacagtcacctctcctgtcatactgctacctcaggtggacaacaaggcattatgtttaccaaagagagcaagccttcaaaaaatagatccttggtgcctgaaacaagcaggcatactggagacacatctaatggctgtgctgatgtcaagggactttctaatcatgttcatcagttgatagcagatgctgtttccagtcctaaccatggagattcaccaaatttattaattgcagacaatcctcagctctctgctttgttgattggaaaagccaatggcaatgtgggtactggaacctgtgacaaagtgaataatattcacccagctgttcatacaaagactgatcattctgttgcctcttcaccctcttcagccatttccacagcaacaccttctcctaaatccactgagcagagaagcataaacagtgttaccagccttaacagtcctcacagtggattacacacagtcaatggagaggggctggggaagtcacagagctctacaaaagtagacctgcctttagctagccacagatctacttctcagatcttaccatcaatgtcagtgtctatatgccccagttcaacagaagttctgaaagcatgcaggaatccaggtaaaaatggcttgtctaatagctgcattttgttagataaatgtccacctccaagaccaccaacttcaccatacccacccttgccaaaggacaagttgaatccacccacacctagtatttacttggaaaataaacgtgatgctttctttcctccattacatcaattttgtacaaatccaaaaaaccctgttacagtaatacgtggccttgctggagctcttaaattagatcttggacttttctctaccaaaactttggtagaagctaacaatgaacatatggtagaagtgaggacacagttgctgcaaccagcagatgaaaactgggatcccactggaacaaagaaaatctggcgttgtgaaagcaatagatctcatactacaattgccaaatacgcacaataccaggcttcctccttccaggaatcattgagagaagaaaatgagaaaagaacacaacacaaagatcattcagataacgaatccacatcttcagagaattctggaaggagaaggaaaggaccttttaaaaccataaaatttgggaccaacattgacctctctgataacaaaaagtggaagttgcagttacatgaactgactaaacttcctgcttttgcgcgtgtggtgtcagcaggaaatcttctaacccatgttgggcataccattctgggcatgaatacagtacaactgtatatgaaagttccagggagtcggacaccaggtcaccaagaaaataacaacttctgctctgttaacataaatattggtccaggagattgtgaatggtttgttgtacctgaagattattggggtgttctgaatgacttctgtgaaaaaaataatttgaattttttaatgagttcttggtggcccaaccttgaagatctttatgaagcaaatgtccctgtgtatagatttattcagcgacctggagatttggtctggataaatgcaggcactgtgcattgggttcaagctgttggctggtgcaataacattgcctggaatgttggtccacttacagcctgccagtataaattggcagtggaacggtatgaatggaacaaattgaaaagtgtgaagtcaccagtacccatggtgcatctttcctggaatatggcacgaaatatcaaagtctcagatccaaagctttttgaaatgattaagtattgtcttttgaaaattctgaagcaatatcagacattgagagaagctcttgttgcagcaggaaaagaggttatatggcatgggcggacaaatgatgaaccagctcattactgtagcatttgtgaggtggaggtttttaatctgctttttgtcactaatgaaagcaatactcaaaaaacctacatagtacattgccatgattgtgcacgaaaaacaagcaaaagtttggaaaattttgtggtgctcgaacagtacaaaatggaggacctaatccaagtttatgatcaatttacactagctctttcattatcatcctcatcttga

SEQ ID NO: 325403 - DNA, 3018 bp, Artificial Sequence
  derived and/or modified sequence
atgaagagctgcgccgtgagcctgaccaccgccgccgtggccttcggcgacgaggccaagaagatggccgagggcaaggccagcagagagagcgaggaggagagcgtgagcctgaccgtggaggagagagaggccctgggcggcatggacagcagactgttcggcttcgtgagactgcacgaggacggcgccagaaccaagaccctgctgggcaaggccgtgagatgctacgagagcctgatcctgaaggccgagggcaaggtggagagcgacttcttctgccagctgggccacttcaacctgctgctggaggactacagcaaggccctgagcgcctaccagagatactacagcctgcaggccgactactggaagaacgccgccttcctgtacggcctgggcctggtgtacttctactacaacgccttccactgggccatcaaggccttccaggacgtgctgtacgtggaccccagcttctgcagagccaaggagatccacctgagactgggcctgatgttcaaggtgaacaccgactacaagagcagcctgaagcacttccagctggccctgatcgactgcaacccctgcaccctgagcaacgccgagatccagttccacatcgcccacctgtacgagacccagagaaagtaccacagcgccaaggaggcctacgagcagctgctgcagaccgagaacctgcccgcccaggtgaaggccaccgtgctgcagcagctgggctggatgcaccacaacatggacctggtgggcgacaaggccaccaaggagagctacgccatccagtacctgcagaagagcctggaggccgaccccaacagcggccagagctggtacttcctgggcagcgtgctgtaccagcagcagaaccagcccatggacgccctgcaggcctacatctgcgccgtgcagctggaccacggccacgccgccgcctggatggacctgggcaccctgtacgagagctgcaaccagccccaggacgccatcaagtgctacctgaacgccgccagaagcaagagatgcagcaacaccagcaccctggccgccagaatcaagttcctgcagcagagcctgagcctgcacatgatcaccagcagccaggtggagggcctgagcagccccgccaagaagaagagaaccagcagccccaccaagaacggcagcgacaactggaacggcggccagagcctgagccaccaccccgtgcagcaggtgtacagcctgtgcctgaccccccagaagctgcagcacctggagcagctgagagccaacagagacaacctgaaccccgcccagaagcaccagctggagcagctggagagccagttcgtgctgatgcagcagatgagacacaaggaggtggcccaggtgagaaccaccggcatccacaacggcgccatcaccgacagcagcctgcccaccaacagcgtgagcaacagacagccccacggcgccctgaccagagtgagcagcgtgagccagcccggcgtgagacccgcctgcgtggagaagctgctgagcagcggcgccttcagcgccggctgcatcccctgcggcaccagcaagatcctgggcagcaccgacaccatcctgctgggcagcaactgcatcgccggcagcgagagcaacggcaacgtgccctacctgcagcagaacacccacaccctgccccacaaccacaccgacctgaacagcagcaccgaggagccctggagaaagcagctgagcaacagcgcccagggcctgcacaagagccagagcagctgcctgagcggccccaacgaggagcagcccctgttcagcaccggcagcgcccagtaccaccaggccaccagcaccggcatcaagaaggccaacgagcacctgaccctgcccagcaacagcgtgccccagggcgacgccgacagccacctgagctgccacaccgccaccagcggcggccagcagggcatcatgttcaccaaggagagcaagcccagcaagaacagaagcctggtgcccgagaccagcagacacaccggcgacaccagcaacggctgcgccgacgtgaagggcctgagcaaccacgtgcaccagctgatcgccgacgccgtgagcagccccaaccacggcgacagccccaacctgctgatcgccgacaacccccagctgagcgccctgctgatcggcaaggccaacggcaacgtgggcaccggcacctgcgacaaggtgaacaacatccaccccgccgtgcacaccaagaccgaccacagcgtggccagcagccccagcagcgccatcagcaccgccacccccagccccaagagcaccgagcagagaagcatcaacagcgtgaccagcctgaacagcccccacagcggcctgcacaccgtgaacggcgagggcctgggcaagagccagagcagcaccaaggtggacctgcccctggccagccacagaagcaccagccagatcctgcccagcatgagcgtgagcatctgccccagcagcaccgaggtgctgaaggcctgcagaaaccccggcaagaacggcctgagcaacagctgcatcctgctggacaagtgccccccccccagaccccccaccagcccctacccccccctgcccaaggacaagctgaacccccccacccccagcatctacctggagaacaagagagacgccttcttcccccccctgcaccagttctgcaccaaccccaagaaccccgtgaccgtgatcagaggcctggccggcgccctgaagctggacctgggcctgttcagcaccaagaccctggtggaggccaacaacgagcacatggtggaggtgagaacccagctgctgcagcccgccgacgagaactgggaccccaccggcaccaagaagatctggagatgcgagagcaacagaagccacaccaccatcgccaagtacgcccagtaccaggccagcagcttccaggagagcctgagaagcctgatcctgagccaccccggctggaacgccatggtgtag

SEQ ID NO: 325404 - DNA, 3018 bp, Artificial Sequence
  derived and/or modified sequence
atgaaatcatgcgccgtgtctcttaccacagctgctgttgcctttggggacgaagctaaaaaaatggcagaaggaaaggcaagccgagagagcgaagaggaatcagtctcactcaccgtggaggaacgtgaggccctgggggggatggacagtcgtcttttcggcttcgtccggttgcacgaggatggtgctcgcaccaagactcttctgggcaaagctgtgcgctgctacgaatcactaatcctcaaagctgagggaaaggttgagtctgacttcttttgccaattgggacattttaacctgctattagaagactacagcaaggccctttcagcgtaccaacgatactattccttgcaggccgattactggaaaaatgccgcattcctctacggcctcggactggtttatttctactataatgcttttcattgggccatcaaagcgttccaggacgtactgtacgtagatcccagcttctgccgagccaaagagatccacctgaggcttggcctcatgttcaaagtgaacacagactataagtcttcccttaagcatttccagctcgccctgattgactgcaacccatgtacgctgtcaaatgcagaaatccagttccatattgcccatctgtacgaaacgcaacggaagtatcactccgctaaagaggcgtacgagcagctgctacaaacggaaaatctccctgctcaggtcaaggccaccgtgctccaacagttaggatggatgcatcataacatggacctcgtgggggataaggccactaaggagtcatacgcaatccagtatctgcagaagtccctcgaagctgacccaaactcggggcagtcctggtatttcctaggctctgtgctttatcagcagcagaatcagcccatggatgctctgcaagcttatatctgcgcagtccaactggaccacggtcacgcagcagcctggatggacctgggaacgctgtacgagagttgcaaccaaccacaggatgctataaaatgctatttgaacgctgctagatcaaagcggtgtagtaatacatccacactagccgcccgaataaagttcctgcagcagagtcttagtctacacatgattacctcaagccaggtcgagggactgtctagccccgccaagaagaagaggacgtcatcgcctactaaaaatggaagtgataattggaacgggggtcaatccttaagccaccatccagtccaacaggtgtacagcctttgtctgactccccaaaagctgcagcatcttgagcagctgagggctaaccgtgacaatcttaaccccgcacaaaagcatcagctggagcaactggaatcacaattcgtgctaatgcaacagatgcgacacaaggaagtcgctcaggtgcgcactacaggtatccacaatggtgcgatcactgactctagtttgcctaccaacagtgtatctaacagacagccccatggagcactgacccgagtgtcgtcagtgagccaaccaggcgtacggccagcctgcgtggagaagctgctcagcagcggcgcattcagtgccggttgcattccttgcggaacgtcaaaaatccttgggtccactgacaccattctgctcggtagcaattgcatcgccggatccgagagcaatgggaacgtaccttatctgcaacagaatacacacaccctcccgcacaatcataccgatcttaattccagcaccgaggaaccatggagaaaacaactgtcaaacagcgcacaaggactccacaagtctcagtctagttgcctgagcggccccaacgaggaacaaccactcttctcgacaggcagtgctcagtaccatcaggcaacatcaaccggcataaaaaaggcgaatgaacatctcactctgcctagcaatagcgtgccccaaggcgacgcagatagccatctgtcatgtcatacagcaacttctggcgggcaacaggggatcatgtttacaaaagagtctaaacccagcaagaataggtcactggtgcctgaaaccagccggcataccggagacacatccaatggttgcgccgacgtcaaaggactgtcgaaccatgtccaccagctgatcgccgatgcggttagttctcctaatcacggagattccccaaacctcctgatcgctgacaacccccaactgagcgccttgctgattgggaaggccaacggcaatgttgggacaggaacttgtgacaaggtgaataacatccacccggcagtccatacaaagaccgatcattccgttgcctcgtctccttcctctgccatcagtacggctacaccctctcctaaaagcaccgagcaacgaagcatcaattcagttacatctttgaacagtccccacagtggactccacacagtgaatggcgagggactagggaagtctcaaagctccactaaggtcgatttgcccctcgccagtcatcgctccacttcgcagatccttccaagtatgtctgtatccatatgcccatcatccactgaagttctcaaggcgtgcagaaatccaggcaagaatggactctctaattcatgcatcctccttgataaatgtccacctccgcggcccccgactagcccctatccacctctgcctaaggacaagctgaatcctcctaccccgtctatctatctcgagaataagagggatgctttttttcccccgctgcatcagttttgtaccaatccaaaaaacccagtcactgttattcgtgggctggccggggcactgaagctggatttagggctcttcagcacaaagaccctcgttgaggcaaataatgagcacatggttgaagtcagaacccagctgctccaacctgccgatgaaaattgggatcctacagggaccaagaagatctggagatgcgaatcaaataggagccacacgacaatcgccaaatatgcacagtaccaggccagttccttccaagagagtctgaggtcgttgattctgagtcatccaggctggaacgccatggtttag

SEQ ID NO: 325405 - DNA, 3018 bp, Artificial Sequence
  derived and/or modified sequence
atgaagagctgtgctgtgtccctgaccacagctgctgtggcctttggagatgaggccaagaagatggccgagggcaaggccagccgggagagcgaggaggagagcgtgtccctgactgtggaggagcgggaggccctgggcggcatggacagccggctgtttggatttgtgcggctgcatgaagatggagcccggaccaagaccctgctgggcaaggctgtgcgctgctatgagagcctcatcctgaaggccgagggcaaggtggagagtgacttcttctgccagctgggccacttcaacctgctgctggaggactacagcaaggccctgagcgcctaccagcgctactacagcctgcaggccgactactggaagaatgctgccttcctgtatggcctgggcctggtgtacttctactacaatgccttccactgggccatcaaggccttccaggatgtgctgtatgtggaccccagcttctgccgggccaaggagatccacctgcggctgggcctgatgttcaaggtgaacacagactacaagagcagcctgaagcacttccagctggccctgattgactgcaacccctgcaccctgagcaatgctgagatccagttccacatcgcccacctgtatgagacccagaggaagtaccacagcgccaaggaggcctatgagcagctgctgcagacagagaacctgcctgcccaggtgaaggccaccgtgctgcagcagctgggctggatgcaccacaacatggacctggtgggggacaaggccaccaaggagagctatgccatccagtacctgcagaagagcctggaggccgaccccaacagcggccagagctggtacttcctgggctctgtgctgtaccagcagcagaaccagcccatggatgccctgcaggcctacatctgtgctgtgcagctggaccacggccacgccgccgcctggatggacctgggcaccctgtatgagagctgcaaccagccccaggatgccatcaagtgctacctgaatgctgcccggagcaagcgctgcagcaacaccagcaccctggccgcccgcatcaagttcctgcagcagagcctgagcctgcacatgatcaccagcagccaggtggagggcctgagcagccctgccaagaagaagaggaccagcagccccaccaagaatggaagtgacaactggaatggaggccagagcctgagccaccaccctgtgcagcaggtgtacagcctgtgcctgaccccccagaagctgcagcacctggagcagctgcgggccaacagagacaacctgaacccagcccagaagcaccagctggagcagctggagagccagtttgtgctgatgcagcagatgaggcacaaggaggtggcccaggtgaggaccaccggcatccacaatggagccatcacagacagcagcctgcccaccaacagcgtgagcaaccggcagccccacggggccctgaccagggtgtcctctgtgtcccagcccggggtgcggcctgcctgtgtggagaagctgctgagcagcggggccttctctgctggctgcatcccctgtggcaccagcaagatcctgggcagcacagacaccatcctgctgggcagcaactgcatcgccggcagcgagagcaatggaaatgtgccctacctgcagcagaacacccacaccctgccccacaaccacacagacctgaacagcagcacagaggagccctggaggaagcagctgagcaacagcgcccagggcctgcacaagagccagagcagctgcctgagcggccccaatgaggagcagcccctcttcagcactggaagtgcccagtaccaccaggccaccagcacaggcatcaagaaggccaatgagcacctgaccctgcccagcaacagcgtgccccagggagatgctgacagccacctgagctgccacacagccaccagcggcggccagcagggcatcatgttcaccaaggagagcaagcccagcaagaacagaagcctggtgcctgagaccagccgccacactggagacaccagcaatggctgtgctgatgtgaagggcctgagcaaccacgtgcaccagctgattgctgatgctgtgagcagccccaaccacggggacagccccaacctgctgattgctgacaacccccagctgagcgccctgctgattggcaaggccaatggaaatgtgggcaccggcacctgtgacaaggtgaacaacatccaccctgctgtgcacaccaagacagaccacagcgtggccagcagccccagcagcgccatcagcacagccacccccagccccaagagcacagagcagaggagcatcaacagcgtgaccagcctgaacagcccccacagcggcctgcacacagtgaatggagagggcctgggcaagagccagagcagcaccaaggtggacctgcccctggccagccacaggagcaccagccagatcctgcccagcatgtctgtgtccatctgccccagcagcacagaggtgctgaaggcctgcagaaatcctgggaagaatggcctgagcaacagctgcatcctgctggacaagtgccccccacccaggcctcccaccagcccctacccacccctgcccaaggacaagctgaacccccccacccccagcatctacctggagaacaagagagatgccttcttcccccccctgcaccagttctgcaccaaccccaagaaccctgtgaccgtcatccggggcctggccggggccctgaagctggacctgggcctcttcagcaccaagaccctggtggaggccaacaatgagcacatggtggaggtgaggacccagctgctgcagcctgcagatgagaactgggaccccaccggcaccaagaagatctggaggtgtgagagcaacagaagccacaccaccatcgccaagtatgcccagtaccaggccagcagcttccaggagagcctgcggagcctcatcctgagccaccctggctggaatgccatggtgtag

SEQ ID NO: 325406 - DNA, 3018 bp, Artificial Sequence
  derived and/or modified sequence
atgaagagctgcgccgtgagcctgaccaccgccgccgtggccttcggagacgaggccaagaagatggcagagggtaaagcaagccgggaatcagaggaggagagtgtgagtttgacggtcgaggagagagaggcgttgggagggatggacagcaggctgttcggcttcgttagattacatgaggacggagcaaggactaagacattgttggggaaagccgtccggtgctatgagtcgcttattctgaaagcagagggaaaagtagagagtgattttttctgccaactcggacatttcaatctcttgcttgaggactatagcaaggcattgagtgcataccagcggtactactccctgcaagctgactactggaagaacgccgcctttctgtacggcctgggcctagtttatttctattataacgccttccactgggccatcaaggctttccaggatgtactgtacgtggacccaagcttctgtagagcaaaggaaatccatctgaggctgggcctaatgtttaaagtgaatacagactataaatctagcctaaagcatttccaactggctctgattgattgcaacccctgcaccttatctaatgccgagatacaatttcatatcgcacatctctatgagactcagcgtaagtatcacagcgccaaggaggcatatgagcaactgctccagaccgagaatctacctgctcaggtgaaggccactgtgctgcagcagctgggttggatgcatcacaacatggatttggtgggagacaaggcgaccaaagaatcttacgcaatccagtatttgcagaaatctttggaggctgaccctaacagcggacagagttggtactttctggggagcgtcctgtaccaacagcagaatcaacctatggacgctcttcaagcatacatctgcgccgttcagctggaccatggccacgctgcagcttggatggatcttgggaccctgtatgagagttgtaaccagccgcaggacgcaattaagtgttacctaaatgcggcccgcagtaaacgctgctcaaatacttcaacgctggcagccaggatcaaattcttgcagcaatcattatcactacatatgatcacctccagccaagtagaggggctctcgtcccccgcaaagaagaagcgtacttcctccccgaccaagaacggctctgacaattggaacggcggtcaaagtctctcccatcaccctgtgcaacaggtgtacagtctgtgcttaactcctcaaaagttgcagcacctggaacagcttcgagcaaatcgcgataacctgaatcctgcccagaaacaccagctcgaacaactggagtctcaatttgttctaatgcagcagatgcgccacaaagaggtggctcaggtacgcacaaccgggatccacaatggtgccatcacagacagttcactcccaacaaactctgtgagcaacagacagccgcatggcgcactgacgcgggtgagcagtgtgtcccagccaggtgtgcgtcctgcttgtgtggaaaaattgctttcttccggcgctttttccgcggggtgtatcccctgcgggacaagcaagattctcggcagcaccgacaccatcttactcgggagcaattgcattgctgggagtgaatcgaacgggaacgtgccgtatttgcaacagaacacacacacactgcctcataaccacaccgacttgaactcatctacggaagagccttggcgtaaacagctgtccaactctgcacagggtctgcacaagtcacagtcttcttgtctgtccgggccaaacgaagagcaacctctgttcagtaccggctctgctcagtaccaccaggctacctccacaggcataaaaaaggccaacgagcacctgaccctgcccagtaacagtgtcccccaaggagacgctgactcccacttgtcatgccacactgccacatccggcggccagcagggcatcatgtttaccaaagaatccaagccctcaaaaaatcgctccctggtgcccgagacgagtcgccatacaggcgacacctcaaatggctgtgccgacgtcaagggcctttccaaccacgtgcaccagctaatagctgacgcggtcagcagtccaaaccacggagattcccctaatctcctcatagcagacaacccacagctgagcgccttgctaatcgggaaagcaaatggtaatgtaggcaccggcacatgcgacaaggtaaacaatatccatcctgctgtgcataccaaaactgatcactcagtcgcaagctcaccaagttccgccatctctacggccacccccagtcctaagagtacggagcagcgctccataaactctgttacgagcctaaacagtccacattctggactgcacacggttaatggagaagggctgggaaaatctcagtcctccacaaaggtggatcttccccttgccagtcatcggtcaacaagtcaaatcctgccttcaatgagcgtgtctatctgtccctcaagtacagaagtcttaaaagcatgccggaatcctggaaaaaacggtctgtcaaatagctgcattcttctggataagtgtcctcctccacggccacccacttccccatatccccctttaccaaaggacaagttgaatccgcctactcccagcatctatttagaaaataaacgcgatgcattctttcctcctctgcaccaattctgcacgaaccctaaaaatcccgtgacagttatccgtggccttgccggggcactgaaattggatcttggtctgttcagcaccaagacactggttgaggctaacaatgagcacatggtagaagtacgtacacagttgctgcagcccgccgacgaaaactgggacccaactgggaccaagaaaatttggcgctgtgaatctaataggtctcacaccaccatcgccaagtacgcacagtaccaggccagtagttttcaagagtctctacgatccctaatcctcagtcatcctggatggaacgcaatggtctag

SEQ ID NO: 325407 - DNA, 3018 bp, Artificial Sequence
  derived and/or modified sequence
atgaagtcctgcgctgtatctctcaccacagcagccgtggccttcggcgatgaggccaagaaaatggccgagggcaaggcaagtagggagagtgaagaggagtcagtctctctgactgtagaggaacgggaggcactaggtggcatggactccagattgttcggcttcgtccgcctgcacgaagacggggctcggaccaagaccttgctgggaaaagccgtacgctgctatgagagcttaatactgaaagcggaggggaaagttgaatcagactttttctgccagctaggtcacttcaacctgctgttagaggactactccaaagctttgtccgcataccagagatattactcccttcaagccgactactggaagaatgctgcttttctctatggcctgggcctggtatatttttattataacgccttccactgggcaatcaaggcattccaggatgtgctgtacgtagatccatcgttctgccgcgcaaaagagatacacctgcgtctgggactaatgtttaaagtgaatactgactacaaaagctctctcaagcacttccagctggccctaatcgactgcaatccttgcacactgtccaacgccgagatccaattccacatagctcacctctacgagacgcagcgcaagtaccattccgccaaagaggcttacgaacagctgctacagactgaaaacctgccagcccaggtcaaagctaccgtcctgcaacagctgggctggatgcaccataatatggatctggtgggcgacaaggccaccaaggagtcttatgctatacagtacttgcagaaaagcctcgaagctgatcccaactcaggtcagtcatggtacttcttgggctccgtgctgtaccaacagcaaaaccaacctatggatgcactgcaggcttacatttgcgccgtccagcttgatcacggacacgccgcagcgtggatggatctcgggacactgtacgagagctgtaaccagccccaagatgctattaaatgctacttgaacgcagctcgatcaaagcgttgttctaatacaagcactctggcggcaagaataaaattcctccagcaatccctgagtctgcacatgatcacaagctcgcaggtggagggcctctcatccccagcaaagaagaagcgtacttcgagccctacaaaaaacggaagtgataactggaatggcggacagagcctgagtcatcatccagtgcagcaggtttatagtctctgcctgactccacagaagttgcaacatctggaacagctccgggcaaatagagacaacctcaacccagctcagaagcaccaacttgaacagcttgagtctcaatttgttcttatgcaacaaatgaggcacaaggaagttgcccaggtgcggactacaggcatccataacggagcaatcactgattcctcattacccactaacagtgtgtctaatcggcagccccacggggcactgacccgcgtttcatccgtgagccagcccggagtgagacccgcttgcgtggagaaactgctgagctccggcgctttcagcgctggctgcattccctgcgggaccagcaagatcctgggatcaaccgacaccatcctattaggctctaactgtatcgctggtagcgaaagtaacggcaatgtcccctacctgcagcagaacacccataccctccctcataaccacaccgacttaaatagttcaacagaggagccttggcggaaacagctgagcaactctgctcagggattgcacaaatcacaaagtagttgcctgtccgggccaaacgaggagcagccgctgttctctactggcagcgctcagtatcatcaggcaacatcaaccgggattaagaaggccaatgagcacctgaccttgccgtccaatagtgtccctcagggggacgcggactcacatctgtcttgtcacactgcaacgagtgggggtcagcaaggcatcatgtttaccaaagaaagtaaaccctccaagaaccgatcattagtgccggagacctctcggcatactggcgataccagcaacgggtgtgccgatgttaaaggcctgtcaaaccacgtgcaccagctgattgcagacgccgtatcttcccctaaccatggagactcacctaacttgttaattgctgataatcctcagctctctgccctacttattggaaaagccaatggcaacgtcggcacgggcacctgcgataaagtaaacaatatacaccccgcagtccacactaaaaccgaccactccgtggcttcgagccccagcagtgctatatccacggcaacaccttcaccaaagtccacagagcagagatctattaactcagtgactagccttaacagcccgcacagtggccttcacacagttaacggtgagggtctaggtaaaagccagagctccacaaaggtggacctaccgctggctagtcaccggagtaccagccaaatactcccctcgatgtctgtatctatctgtccatctagcactgaagttttgaaagcctgtcgtaaccccggaaagaatggactatcaaactcttgtatcctgctcgataaatgcccgccacctagaccgcctactagtccttaccccccacttcccaaagataagctcaatccccctaccccaagcatctacctggagaacaagcgggacgcatttttcccccctctgcatcagttctgcacgaaccctaagaatcccgtgacagtcatccgagggctggctggcgctctcaagctggacctgggcttattctccacaaaaactttggtcgaagcgaacaatgagcacatggtagaagtgcgtacacagctgttgcaaccggcagatgaaaattgggaccccaccggcactaaaaagatctggagatgtgagagtaatcgttctcacaccactattgctaagtacgcccagtaccaggcatcaagcttccaggaatcgctccgatccctgattctgagtcatccaggatggaatgccatggtgtag

SEQ ID NO: 325408 - DNA, 3299 bp, Artificial Sequence
  derived and/or modified sequence
atgaaatcctgcgcagtgtcgctcactaccgccgctgttgccttcggtgatgaggcaaagaaaatggcggaaggaaaagcgagccgcgagagtgaagaggagtctgttagcctgacagtcgaggaaagggaggcgcttggtggcatggacagccgtctcttcgggttcgtgaggcttcatgaagatggcgccagaacgaagaccctactaggcaaggctgttcgctgctacgaatctttaatcttaaaagctgaaggaaaagtggagtctgacttcttttgccaattaggtcacttcaacctcttgttggaagattattcaaaagcattatctgcatatcagagatattacagtttacaggctgactactggaagaatgctgcgtttttatatggccttggtttggtctacttctactacaatgcatttcattgggcaattaaagcatttcaagatgtcctttatgttgaccccagcttttgtcgagccaaggaaattcatttacgacttgggctcatgttcaaagtgaacacagactacaagtctagtttaaagcattttcagttagccttgattgactgtaatccatgtactttgtccaatgctgaaattcaatttcatattgcccatttgtatgaaacccagaggaagtatcattctgcaaaggaggcatatgaacaacttttgcagacagaaaaccttcctgcacaagtaaaagcaactgtattgcaacagttaggttggatgcatcataatatggatctagtaggagacaaagccacaaaggaaagctatgctattcagtatctccaaaagtctttggaggcagatcctaattctggccaatcgtggtattttcttggaagtgtgttgtatcagcagcaaaatcagcctatggatgctttacaggcatatatttgtgctgtacaattggaccatgggcatgccgcagcctggatggacctaggtactctctatgaatcctgcaatcaacctcaagatgccattaaatgctacctaaatgcagctagaagcaaacgttgtagtaatacctctacgcttgctgcaagaattaaatttctacagcaatccttgtcactacacatgattacttctagccaagtagaaggcctgtccagtcctgccaagaagaaaagaacatctagtccaacaaagaatggttctgataactggaatggtggccagagtctttcacatcatccagtacagcaagtttattcgttgtgtttgacaccacagaaattacagcacttggaacaactgcgagcaaatagagataatttaaatccagcacagaagcatcagctggaacagttagaaagtcagtttgtcttaatgcagcaaatgagacacaaagaagttgctcaggtacgaactactggaattcataacggggccataactgattcatcactgcctacaaactctgtctctaatcgacaaccacatggtgctctgaccagagtatctagcgtctctcagcctggagttcgccctgcttgtgttgaaaaacttttgtccagtggagctttttctgcaggctgtattccttgtggcacatcaaaaattctaggaagtacagacactatcttgctaggcagtaattgtatagcaggaagtgaaagtaatggaaatgtgccttacctgcagcaaaatacacacactctacctcataatcatacagacctgaacagcagcacagaagagccatggagaaaacagctatctaactccgctcaggggcttcataaaagtcagagttcatgtttgtcaggacctaatgaagaacaacctctgttttccactgggtcagcccagtatcaccaggcaactagcactggtattaagaaggcgaatgaacatctcactctgcctagtaattcagtaccacagggggatgctgacagtcacctctcctgtcatactgctacctcaggtggacaacaaggcattatgtttaccaaagagagcaagccttcaaaaaatagatccttggtgcctgaaacaagcaggcatactggagacacatctaatggctgtgctgatgtcaagggactttctaatcatgttcatcagttgatagcagatgctgtttccagtcctaaccatggagattcaccaaatttattaattgcagacaatcctcagctctctgctttgttgattggaaaagccaatggcaatgtgggtactggaacctgtgacaaagtgaataatattcacccagctgttcatacaaagactgatcattctgttgcctcttcaccctcttcagccatttccacagcaacaccttctcctaaatccactgagcagagaagcataaacagtgttaccagccttaacagtcctcacagtggattacacacagtcaatggagaggggctggggaagtcacagagctctacaaaagtagacctgcctttagctagccacagatctacttctcagatcttaccatcaatgtcagtgtctatatgccccagttcaacagaagttctgaaagcatgcaggaatccaggtaaaaatggcttgtctaatagctgcattttgttagataaatgtccacctccaagaccaccaacttcaccatacccacccttgccaaaggacaagttgaatccacccacacctagtatttacttggaaaataaacgtgatgctttctttcctccattacatcaattttgtacaaatccaaaaaaccctgttacagtaatacgtggccttgctggagctcttaaattagatcttggacttttctctaccaaaactttggtagaagctaacaatgaacatatggtagaagtgaggacacagttgctgcaaccagcagatgaaaactgggatcccactggaacaaagaaaatctggcgttgtgaaagcaatagatctcatactacaattgccaaatacgcacaataccaggcttcctccttccaggaatcattgagaagtctcattctctctcacccaggctggaatgcaatggtgtgatctcagctcactgcagcctccgcctcctgggttcaagcgattctcccacctcagcctcccgaatagctggaattacaggcacctgccatcatgcccaactaatttttgtatttttgtagagacagggtttcaccatgttggccaggcttgtcttgaactcctgacctcaggtggtctgcttgcctcagcatcccaaagtgctgggattacaggtgtgagccaccatgcccggtaaacttttaaaaatgtaagcaaaattacagtatgtaaaacacacattg

SEQ ID NO: 325409 - DNA, 4044 bp, Artificial Sequence
  derived and/or modified sequence
atgaagagctgcgccgtgagcctgaccaccgccgccgtggccttcggcgacgaggccaagaagatggccgagggcaaggccagcagagagagcgaggaggagagcgtgagcctgaccgtggaggagagagaggccctgggcggcatggacagcagactgttcggcttcgtgagactgcacgaggacggcgccagaaccaagaccctgctgggcaaggccgtgagatgctacgagagcctgatcctgaaggccgagggcaaggtggagagcgacttcttctgccagctgggccacttcaacctgctgctggaggactacagcaaggccctgagcgcctaccagagatactacagcctgcaggccgactactggaagaacgccgccttcctgtacggcctgggcctggtgtacttctactacaacgccttccactgggccatcaaggccttccaggacgtgctgtacgtggaccccagcttctgcagagccaaggagatccacctgagactgggcctgatgttcaaggtgaacaccgactacaagagcagcctgaagcacttccagctggccctgatcgactgcaacccctgcaccctgagcaacgccgagatccagttccacatcgcccacctgtacgagacccagagaaagtaccacagcgccaaggaggcctacgagcagctgctgcagaccgagaacctgcccgcccaggtgaaggccaccgtgctgcagcagctgggctggatgcaccacaacatggacctggtgggcgacaaggccaccaaggagagctacgccatccagtacctgcagaagagcctggaggccgaccccaacagcggccagagctggtacttcctgggcagatgctacagcagcatcggcaaggtgcaggacgccttcatcagctacagacagagcatcgacaagagcgaggccagcgccgacacctggtgcagcatcggcgtgctgtaccagcagcagaaccagcccatggacgccctgcaggcctacatctgcgccgtgcagctggaccacggccacgccgccgcctggatggacctgggcaccctgtacgagagctgcaaccagccccaggacgccatcaagtgctacctgaacgccgccagaagcaagagatgcagcaacaccagcaccctggccgccagaatcaagttcctgcagaacggcagcgacaactggaacggcggccagagcctgagccaccaccccgtgcagcaggtgtacagcctgtgcctgaccccccagaagctgcagcacctggagcagctgagagccaacagagacaacctgaaccccgcccagaagcaccagctggagcagctggagagccagttcgtgctgatgcagcagatgagacacaaggaggtggcccaggtgagaaccaccggcatccacaacggcgccatcaccgacagcagcctgcccaccaacagcgtgagcaacagacagccccacggcgccctgaccagagtgagcagcgtgagccagcccggcgtgagacccgcctgcgtggagaagctgctgagcagcggcgccttcagcgccggctgcatcccctgcggcaccagcaagatcctgggcagcaccgacaccatcctgctgggcagcaactgcatcgccggcagcgagagcaacggcaacgtgccctacctgcagcagaacacccacaccctgccccacaaccacaccgacctgaacagcagcaccgaggagccctggagaaagcagctgagcaacagcgcccagggcctgcacaagagccagagcagctgcctgagcggccccaacgaggagcagcccctgttcagcaccggcagcgcccagtaccaccaggccaccagcaccggcatcaagaaggccaacgagcacctgaccctgcccagcaacagcgtgccccagggcgacgccgacagccacctgagctgccacaccgccaccagcggcggccagcagggcatcatgttcaccaaggagagcaagcccagcaagaacagaagcctggtgcccgagaccagcagacacaccggcgacaccagcaacggctgcgccgacgtgaagggcctgagcaaccacgtgcaccagctgatcgccgacgccgtgagcagccccaaccacggcgacagccccaacctgctgatcgccgacaacccccagctgagcgccctgctgatcggcaaggccaacggcaacgtgggcaccggcacctgcgacaaggtgaacaacatccaccccgccgtgcacaccaagaccgaccacagcgtggccagcagccccagcagcgccatcagcaccgccacccccagccccaagagcaccgagcagagaagcatcaacagcgtgaccagcctgaacagcccccacagcggcctgcacaccgtgaacggcgagggcctgggcaagagccagagcagcaccaaggtggacctgcccctggccagccacagaagcaccagccagatcctgcccagcatgagcgtgagcatctgccccagcagcaccgaggtgctgaaggcctgcagaaaccccggcaagaacggcctgagcaacagctgcatcctgctggacaagtgccccccccccagaccccccaccagcccctacccccccctgcccaaggacaagctgaacccccccacccccagcatctacctggagaacaagagagacgccttcttcccccccctgcaccagttctgcaccaaccccaagaaccccgtgaccgtgatcagaggcctggccggcgccctgaagctggacctgggcctgttcagcaccaagaccctggtggaggccaacaacgagcacatggtggaggtgagaacccagctgctgcagcccgccgacgagaactgggaccccaccggcaccaagaagatctggagatgcgagagcaacagaagccacaccaccatcgccaagtacgcccagtaccaggccagcagcttccaggagagcctgagagaggagaacgagaagagaacccagcacaaggaccacagcgacaacgagagcaccagcagcgagaacagcggcagaagaagaaagggccccttcaagaccatcaagttcggcaccaacatcgacctgagcgacaacaagaagtggaagctgcagctgcacgagctgaccaagctgcccgccttcgccagagtggtgagcgccggcaacctgctgacccacgtgggccacaccatcctgggcatgaacaccgtgcagctgtacatgaaggtgcccggcagcagaacccccggccaccaggagaacaacaacttctgcagcgtgaacatcaacatcggccccggcgactgcgagtggttcgtggtgcccgaggactactggggcgtgctgaacgacttctgcgagaagaacaacctgaacttcctgatgagcagctggtggcccaacctggaggacctgtacgaggccaacgtgcccgtgtacagattcatccagagacccggcgacctggtgtggatcaacgccggcaccgtgcactgggtgcaggccgtgggctggtgcaacaacatcgcctggaacgtgggccccctgaccgcctgccagtacaagctggccgtggagagatacgagtggaacaagctgaagagcgtgaagagccccgtgcccatggtgcacctgagctggaacatggccagaaacatcaaggtgagcgaccccaagctgttcgagatgatcaagtactgcctgctgaagatcctgaagcagtaccagaccctgagagaggccctggtggccgccggcaaggaggtgatctggcacggcagaaccaacgacgagcccgcccactactgcagcatctgcgaggtggaggtgttcaacctgctgttcgtgaccaacgagagcaacacccagaagacctacatcgtgcactgccacgactgcgccagaaagaccagcaagagcctggagaacttcgtggtgctggagcagtacaagatggaggacctgatccaggtgtacgaccagttcaccctggccctgagcctgagcagcagcagctag

SEQ ID NO: 325410 - DNA, 3723 bp, Artificial Sequence
  derived and/or modified sequence
atgaagagctgcgccgtgagcctgaccaccgccgccgtggccttcggcgacgaggccaagaagatggccgagggcaaggccagcagagagagcgaggaggagagcgtgagcctgaccgtggaggagagagaggccctgggcggcatggacagcagactgttcggcttcgtgagactgcacgaggacggcgccagaaccaagaccctgctgggcaaggccgtgagatgctacgagagcctgatcctgaaggccgagggcaaggtggagagcgacttcttctgccagctgggccacttcaacctgctgctggaggactacagcaaggccctgagcgcctaccagagatactacagcctgcaggccgactactggaagaacgccgccttcctgtacggcctgggcctggtgtacttctactacaacgccttccactgggccatcaaggccttccaggacgtgctgtacgtggaccccagcttctgcagagccaaggagatccacctgagactgggcctgatgttcaaggtgaacaccgactacaagagcagcctgaagcacttccagctggccctgatcgactgcaacccctgcaccctgagcaacgccgagatccagttccacatcgcccacctgtacgagacccagagaaagtaccacagcgccaaggaggcctacgagcagctgctgcagaccgagaacctgcccgcccaggtgaaggccaccgtgctgcagcagctgggctggatgcaccacaacatggacctggtgggcgacaaggccaccaaggagagctacgccatccagtacctgcagaagagcctggaggccgaccccaacagcggccagagctggtacttcctgggcagatgctacagcagcatcggcaaggtgcaggacgccttcatcagctacagacagagcatcgacaagagcgaggccagcgccgacacctggtgcagcatcggcgtgctgtaccagcagcagaaccagcccatggacgccctgcaggcctacatctgcgccgtgcagctggaccacggccacgccgccgcctggatggacctgggcaccctgtacgagagctgcaaccagccccaggacgccatcaagtgctacctgaacgccgccagaagcaagagatgcagcaacaccagcaccctggccgccagaatcaagttcctgcagaacggcagcgacaactggaacggcggccagagcctgagccaccaccccgtgcagcaggtgtacagcctgtgcctgaccccccagaagctgcagcacctggagcagctgagagccaacagagacaacctgaaccccgcccagaagcaccagctggagcagctggagagccagttcgtgctgatgcagcagatgagacacaaggaggtggcccaggtgagaaccaccggcatccacaacggcgccatcaccgacagcagcctgcccaccaacagcgtgagcaacagacagccccacggcgccctgaccagagtgagcagcgtgagccagcccggcgtgagacccgcctgcgtggagaagctgctgagcagcggcgccttcagcgccggctgcatcccctgcggcaccagcaagatcctgggcagcaccgacaccatcctgctgggcagcaactgcatcgccggcagcgagagcaacggcaacgtgccctacctgcagcagaacacccacaccctgccccacaaccacaccgacctgaacagcagcaccgaggagccctggagaaagcagctgagcaacagcgcccagggcctgcacaagagccagagcagctgcctgagcggccccaacgaggagcagcccctgttcagcaccggcagcgcccagtaccaccaggccaccagcaccggcatcaagaaggccaacgagcacctgaccctgcccagcaacagcgtgccccagggcgacgccgacagccacctgagctgccacaccgccaccagcggcggccagcagggcatcatgttcaccaaggagagcaagcccagcaagaacagaagcctggtgcccgagaccagcagacacaccggcgacaccagcaacggctgcgccgacgtgaagggcctgagcaaccacgtgcaccagctgatcgccgacgccgtgagcagccccaaccacggcgacagccccaacctgctgatcgccgacaacccccagctgagcgccctgctgatcggcaaggccaacggcaacgtgggcaccggcacctgcgacaaggtgaacaacatccaccccgccgtgcacaccaagaccgaccacagcgtggccagcagccccagcagcgccatcagcaccgccacccccagccccaagagcaccgagcagagaagcatcaacagcgtgaccagcctgaacagcccccacagcggcctgcacaccgtgaacggcgagggcctgggcaagagccagagcagcaccaaggtggacctgcccctggccagccacagaagcaccagccagatcctgcccagcatgagcgtgagcatctgccccagcagcaccgaggtgctgaaggcctgcagaaaccccggcaagaacggcctgagcaacagctgcatcctgctggacaagtgccccccccccagaccccccaccagcccctacccccccctgcccaaggacaagctgaacccccccacccccagcatctacctggagaacaagagagacgccttcttcccccccctgcaccagttctgcaccaaccccaagaaccccgtgaccgtgatcagaggcctggccggcgccctgaagctggacctgggcctgttcagcaccaagaccctggtggaggccaacaacgagcacatggtggaggtgagaacccagctgctgcagcccgccgacgagaactgggaccccaccggcaccaagaagatctggagatgcgagagcaacagaagccacaccaccatcgccaagtacgcccagtaccaggccagcagcttccaggagagcctgagagaggagaacgagaagagaacccagcacaaggaccacagcgacaacgagagcaccagcagcgagaacagcggcagaagaagaaagggccccttcaagaccatcaagttcggcaccaacatcgacctgagcgacaacaagaagtggaagctgcagctgcacgagctgaccaagctgcccgccttcgccagagtggtgagcgccggcaacctgctgacccacgtgggccacaccatcctgggcatgaacaccgtgcagctgtacatgaaggtgcccggcagcagaacccccggccaccaggagaacaacaacttctgcagcgtgaacatcaacatcggccccggcgactgcgagtggttcgtggtgcccgaggactactggggcgtgctgaacgacttctgcgagaagaacaacctgaacttcctgatgagcagctggtggcccaacctggaggacctgtacgaggccaacgtgcccgtgtacagattcatccagagacccggcgacctggtgtggatcaacgccggcaccgtgcactgggtgcaggccgtgggctggtgcaacaacatcgcctggaacgtgggccccctgaccgcctgccagtacaagctggccgtggagagatacgagtggaacaagctgaagagcgtgaagagccccgtgcccatggtgcacctgagctggaacatggccagaaacatcaaggtgagcgaccccaagctgttcgagatgatcaagtag

SEQ ID NO: 325411 - DNA, 4044 bp, Artificial Sequence
  derived and/or modified sequence
atgaagtcctgtgccgtatccttgactacagcagccgtcgcttttggcgacgaagccaaaaagatggcagaggggaaagccagcagggaaagcgaggaagaatccgtctcactgacggttgaagaacgcgaagctctcggtggcatggattctcgccttttcggtttcgtccggttacatgaagacggcgcaaggaccaaaacactgctgggcaaagccgtccggtgctatgagagcctgattttgaaagccgaaggaaaggttgagtctgattttttttgtcagctgggacactttaatctccttctcgaggattatagcaaggccctgagtgcttaccagagatattacagccttcaggctgactactggaaaaatgccgcctttttatatggactggggctcgtatacttttattacaatgctttccattgggctatcaaagcatttcaagacgtgctttatgtcgatccgagcttctgccgtgcgaaagagatccatctgcgcctggggctcatgtttaaagtaaacacagattataagagcagtctcaaacacttccaacttgcattaatcgactgcaatccctgcacattgagtaacgccgaaatccagtttcacattgcccacctctatgaaacccaaagaaagtatcacagcgctaaagaggcatatgaacaactgcttcagacagagaatctgccagctcaagtgaaggccacagttctgcaacagctgggctggatgcaccacaacatggatctggtgggagacaaggctactaaggagtcttacgctatccagtatttgcagaagagcttggaggccgaccctaattcaggccagagctggtactttcttggaagatgctactccagtattggcaaggtccaggacgcttttatttcatatcggcaaagtatagacaaatctgaagcctctgccgacacttggtgctcgatcggtgttttataccagcagcagaaccagccaatggatgcactccaagcgtatatctgcgccgttcagcttgaccatggccacgcagctgcttggatggaccttggcacgctgtacgagtcctgcaaccagcctcaggatgctattaagtgttacctgaatgccgccagatccaaacgctgtagcaatacgagtactcttgctgcaagaataaaattccttcagaacgggtcagataactggaatgggggccagtccctctcccaccacccagtgcagcaagtgtattccctctgcttgactccccagaagctgcagcatctcgaacagctgcgggcaaatcgagataacctcaatcctgcgcaaaagcaccagctcgaacagctggagtcacagttcgtcctgatgcaacagatgcggcataaagaagtcgcccaggtgcgaaccaccgggatacataacggggcaataacggacagtagtttaccgactaattccgtgtcaaaccggcaacctcacggagccctcaccagggtatctagcgtctcccagcctggggtccggccagcctgcgtagaaaaactcctctcttctggtgccttcagtgccggctgcatcccctgcggcaccagcaagatcctgggctccaccgacaccatcctgctcggctctaactgcattgctggtagcgagtccaacgggaacgtgccttatctgcaacagaacacccacacactgccacataaccatactgacctgaattcatcaaccgaggagccttggagaaaacagctgtcaaattccgctcagggactgcacaaaagccagagtagctgtctgagcggaccaaatgaggagcagcctcttttctcaactgggtctgcccagtatcaccaggcaactagtactgggataaaaaaagcaaacgaacaccttactttgccttccaacagtgtgcctcagggtgacgccgattctcatctttcctgccacacagctacatcagggggacagcagggcattatgtttactaaggaatccaagccctccaaaaaccggtctctggtgcccgaaacctctcgccacaccggcgacacgtctaacggctgcgcggatgtgaaaggcctgagcaaccatgtgcatcagttgatcgctgacgccgtttcctcgcccaatcacggggattcccctaacttgctcatcgcggataacccacagctgtcagccctgctgatcggcaaggcgaatggtaatgtgggtacaggcacttgcgacaaagtcaacaatattcacccagcggtccatacaaaaacagaccattctgtcgctagctctcccagcagtgcgatcagcacagctactccatcacccaagagcactgagcagaggtcaatcaactctgtgacctccttgaactcccctcactccggcctgcacacggttaatggagaaggactcgggaaaagccagagttccacaaaggttgatcttccactggcaagccatcgctccacctcacagatacttccctcgatgagcgtgagtatttgtccctcgtccaccgaagtcctgaaggcttgcagaaatcctggaaagaacgggctgtctaatagctgcatcctgctggacaaatgtcctcccccccgcccccccactagcccatatccacctttgcccaaagataagctgaatccccccactccgtccatatacttggaaaacaaacgggacgctttcttccctcctctacatcagttttgtactaatcccaaaaatcctgtgaccgttatcagaggattggcaggggcactgaaacttgatctgggcctgttcagcacaaaaacactggtggaggccaataacgaacacatggtagaggtaaggacacagctgttgcaaccagctgatgagaattgggaccccacgggcacaaagaagatctggcggtgcgagtctaatagatctcacacaacgatcgccaaatatgcgcagtatcaggcttccagttttcaggagagccttcgcgaggagaacgaaaagcggactcaacataaggatcacagcgataatgagagcacctcatcagaaaatagcgggcgccgccggaaggggcctttcaagacaataaaattcggaaccaacattgacttaagcgataataagaaatggaaacttcagttgcatgagttgaccaagctaccggcctttgcccgtgtcgtctctgccggcaacctcctgacccacgttggccacactattctggggatgaacactgtacagttatacatgaaggtgccgggatcaagaacccctggacaccaagagaataacaatttctgttctgtgaatataaatattggcccaggagattgcgagtggttcgtcgtccccgaagactactggggtgtgctcaatgacttctgtgagaagaacaacttaaacttcctgatgagctcgtggtggcccaatctggaagatctgtacgaagcgaatgtgcccgtgtacagatttattcaaagaccaggcgaccttgtgtggatcaatgctggaaccgttcattgggtgcaggcagttggatggtgcaacaacattgcgtggaacgttggacctctcacagcctgtcaatacaaacttgccgtggagaggtacgaatggaataagctcaaaagcgtgaaatctccagtaccaatggtacacctgagttggaatatggcgcgcaatattaaggtaagtgacccgaagctcttcgagatgatcaaatactgccttctgaagatcctgaagcaataccaaacccttcgagaagccctcgtggctgccgggaaggaagtcatttggcacggaaggacaaacgacgagccggcccactattgttcaatctgcgaggttgaagtattcaacctgttatttgttactaatgagtccaatacacagaagacatacatagtgcactgccacgactgtgctcggaagaccagtaagagcctggaaaatttcgtagtgctcgaacagtataaaatggaagatctcattcaggtgtacgatcagtttacactcgcattatcactgagtagttcctcctag

SEQ ID NO: 325412 - DNA, 3723 bp, Artificial Sequence
  derived and/or modified sequence
atgaaaagttgtgctgtttctttgacgacagccgccgtggcgttcggtgacgaagcgaaaaagatggccgaaggcaaagccagtcgagagtccgaagaggagagtgtctcactgacagtcgaagagagagaggccttgggcggcatggatagcagactttttgggttcgtgcgcttgcacgaggatggagccagaacaaagaccctactggggaaggcagtcagatgctatgagtccttgatcctgaaagccgagggaaaagtcgagtctgatttcttctgccaactggggcacttcaacttattgctggaggattactctaaagccctgagcgcctaccagcgttactactcactccaggcagactattggaaaaacgcagcattcttatacggactggggctcgtgtacttctattataacgccttccattgggccataaaagcctttcaagacgtgctctacgtggacccgtctttctgccgagccaaggagattcatctgcgactaggtttaatgttcaaagtgaataccgattacaaatcctcactgaagcattttcagctggcgctgattgactgcaatccatgtaccctgtccaatgccgaaatccagtttcacatagctcacctctacgagacccagcggaagtatcactccgcgaaggaagcatatgaacaattgctgcagactgaaaatcttcctgcacaggtcaaggcaacggtcctacagcagctaggatggatgcaccacaacatggatctggtgggtgataaagccaccaaggagtcctacgctatccaatatctgcaaaagtcactggaggcggatcccaatagtggtcagtcatggtacttcctggggcgctgttatagcagcattggcaaggttcaagacgcctttatatcataccgtcagtcgatagacaagagcgaggctagcgccgacacctggtgttccatcggagtactgtaccagcagcagaaccagccaatggacgcactgcaggcatacatctgcgctgtacagctcgaccacggacatgctgccgcttggatggacctgggcactctgtacgagagttgcaaccagcctcaggatgctattaagtgttatctgaacgctgctcgatccaagaggtgcagtaacacctcaactttggcagcacggataaagttcctgcagaatggaagcgataattggaacggcgggcagagcctctctcaccatccagtgcagcaagtttattcactgtgtctgacccctcagaaacttcagcatctggagcaactgagagctaatagagacaacctcaacccagcccaaaaacatcagctggaacaactggaatctcagtttgtgttaatgcagcaaatgagacataaggaagttgctcaagtgagaacaaccggaatccataacggggccattacagacagttcacttcccactaatagcgtcagcaatcgccaacctcacggggccttgaccagagtctcgagcgtgtcacagcccggcgtccgcccggcgtgcgtagagaaactgctgtcttcgggggcctttagtgcaggatgcatcccttgcggtacatcgaaaatcctgggatcgacagacaccatcctgcttggctctaattgcatcgccggtagtgagtctaacggcaatgtcccctacctgcagcagaacacacatacgctgccgcacaaccacacagaccttaacagctcaacagaggaaccttggcgaaagcaactgtccaacagtgcccagggcttgcacaagagccaatccagctgtctgtcaggacctaatgaggaacaaccactgttctcgaccggttctgcccagtaccatcaggccacctctacagggatcaaaaaagctaacgaacacctcactctgcccagcaattccgtgccccaaggtgatgccgatagtcatctatcctgccacactgcaacatctggagggcagcagggtattatgttcaccaaagagtctaagccatccaaaaacaggagcctggtcccagagacctccagacatactggagacacttccaatgggtgcgctgatgtgaaggggcttagcaaccacgtgcaccagctaattgcggacgccgtaagctcccccaatcacggtgacagtcccaacctgctaatcgctgataatccacagctctctgcgttattgatagggaaggcgaatgggaatgtggggactggaacttgtgataaggtaaacaacatccacccggccgtgcacactaaaacggatcacagcgttgcatccagccccagctctgcaataagtactgcgactcctagcccaaaaagcaccgagcagagaagcattaactccgtgacctcattgaattctccccactcaggcctgcacactgtgaacggcgaaggccttggcaaatctcaatcctccaccaaggttgatctacctttagcctctcaccggagtactagtcagatcttgcctagtatgtcagtgagcatttgcccctctagtactgaagtcctgaaagcttgcaggaatcccgggaagaatggcctgtctaatagctgcatcttactggataagtgtcctccaccacgtcccccgacctctccatacccgcctctgcctaaggataagctcaaccctcctactcctagcatctatctggagaacaagcgcgatgcattttttcctcccctacaccaattctgcactaatccgaagaatcctgtcactgttattagaggactggccggggccttgaagctcgaccttggtttattcagtactaagacacttgtagaagccaacaacgaacacatggtggaggtgcgcacccaactgctgcagccagccgatgaaaattgggatcccaccggcacaaaaaaaatatggcgttgcgagagtaataggagccacacgactatagccaaatatgcacagtaccaggcctcctcctttcaggagtcattgcgagaagaaaacgagaagaggacacagcacaaggaccactcagacaacgaatccacatctagtgagaattccggacggcgccgaaaagggcctttcaaaacgatcaaattcgggaccaacattgacctgtcagataataaaaaatggaagctgcagctccatgaactgactaagttgccggctttcgccagggtagtgagcgccgggaacttgctgacacacgtgggacatacgatactggggatgaacacagtgcagctgtacatgaaagtgcccggttctcgtacacccggccatcaagaaaacaacaatttctgcagcgtgaacattaatatcggcccaggtgactgcgagtggtttgtagtgccggaagactactggggggtcttgaacgacttctgtgagaagaacaacctaaattttctgatgagcagttggtggcctaatctggaagacctttacgaggctaacgttccagtctatcgttttatacaacgacccggtgacctcgtatggataaatgcaggcactgtgcactgggtgcaggcagtaggatggtgtaacaacattgcctggaatgtgggcccacttacggcctgtcagtacaagctggctgtcgaacggtatgagtggaacaagcttaagtctgtcaaaagccctgtgcctatggtccacctctcctggaatatggccaggaatatcaaggttagtgatcccaaactcttcgagatgattaaatag

SEQ ID NO: 325413 - DNA, 4044 bp, Artificial Sequence
  derived and/or modified sequence
atgaagagctgtgctgtgtccctgaccacagctgctgtggcctttggagatgaggccaagaagatggccgagggcaaggccagccgggagagcgaggaggagagcgtgtccctgactgtggaggagcgggaggccctgggcggcatggacagccggctgtttggatttgtgcggctgcatgaagatggagcccggaccaagaccctgctgggcaaggctgtgcgctgctatgagagcctcatcctgaaggccgagggcaaggtggagagtgacttcttctgccagctgggccacttcaacctgctgctggaggactacagcaaggccctgagcgcctaccagcgctactacagcctgcaggccgactactggaagaatgctgccttcctgtatggcctgggcctggtgtacttctactacaatgccttccactgggccatcaaggccttccaggatgtgctgtatgtggaccccagcttctgccgggccaaggagatccacctgcggctgggcctgatgttcaaggtgaacacagactacaagagcagcctgaagcacttccagctggccctgattgactgcaacccctgcaccctgagcaatgctgagatccagttccacatcgcccacctgtatgagacccagaggaagtaccacagcgccaaggaggcctatgagcagctgctgcagacagagaacctgcctgcccaggtgaaggccaccgtgctgcagcagctgggctggatgcaccacaacatggacctggtgggggacaaggccaccaaggagagctatgccatccagtacctgcagaagagcctggaggccgaccccaacagcggccagagctggtacttcctgggccgctgctacagcagcatcggcaaggtgcaggatgccttcatctcctaccggcagagcattgacaagtctgaggccagcgctgacacctggtgcagcattggagtgctgtaccagcagcagaaccagcccatggatgccctgcaggcctacatctgtgctgtgcagctggaccacggccatgctgctgcctggatggacctgggcaccctgtatgagagctgcaaccagccccaggatgccatcaagtgctacctgaatgctgcccggagcaagcgctgcagcaacaccagcaccctggccgcccgcatcaagttcctgcagaatggaagtgacaactggaatggaggccagagcctgagccaccaccctgtgcagcaggtgtacagcctgtgcctgaccccccagaagctgcagcacctggagcagctgcgggccaacagagacaacctgaacccagcccagaagcaccagctggagcagctggagagccagtttgtgctgatgcagcagatgaggcacaaggaggtggcccaggtgaggaccaccggcatccacaacggggccatcacagacagcagcctgcccaccaacagcgtgagcaaccggcagccccatggagccctgaccagggtgtcctctgtgtcccagcccggggtgcggcctgcctgtgtggagaagctgctgagcagcggggccttctctgctggctgcatcccctgtggcaccagcaagatcctgggcagcacagacaccatcctgctgggcagcaactgcatcgccggcagcgagagcaatggaaatgtgccctacctgcagcagaacacccacaccctgccccacaaccacacagacctgaacagcagcacagaggagccctggaggaagcagctgagcaacagcgcccagggcctgcacaagagccagagcagctgcctgagcggccccaatgaggagcagcccctcttcagcacaggcagcgcccagtaccaccaggccaccagcacaggcatcaagaaggccaatgagcacctgaccctgcccagcaacagcgtgccccagggagatgctgacagccacctgagctgccacacagccaccagcggcggccagcagggcatcatgttcaccaaggagagcaagcccagcaagaacagaagcctggtgcctgagaccagccgccacactggagacaccagcaatggctgtgctgatgtgaagggcctgagcaaccacgtgcaccagctgattgctgatgctgtgagcagccccaaccacggggacagccccaacctgctgattgctgacaacccccagctgagcgccctgctgattggcaaggccaatggaaatgtgggcaccggcacctgtgacaaggtgaacaacatccaccctgctgtgcacaccaagacagaccacagcgtggccagcagccccagcagcgccatcagcacagccacccccagccccaagagcacagagcagaggagcatcaacagcgtgaccagcctgaacagcccccacagcggcctgcacacagtgaatggagagggcctgggcaagagccagagcagcaccaaggtggacctgcccctggccagccacaggagcaccagccagatcctgcccagcatgtctgtgtccatctgccccagcagcacagaggtgctgaaggcctgcaggaaccctgggaagaatggcctgagcaacagctgcatcctgctggacaagtgccccccaccccggccccccaccagcccctacccacccctgcccaaggacaagctgaacccccccacccccagcatctacctggagaacaagagagatgccttcttcccccccctgcaccagttctgcaccaaccccaagaaccctgtgaccgtcatccggggcctggccggggccctgaagctggacctgggcctcttcagcaccaagaccctggtggaggccaacaatgagcacatggtggaggtgaggacccagctgctgcagcctgcagatgagaactgggaccccaccggcaccaagaagatctggaggtgtgagagcaacagaagccacaccaccatcgccaagtatgcccagtaccaggccagcagcttccaggagagcctgcgggaggagaatgagaagaggacccagcacaaggaccacagcgacaatgaaagcaccagcagcgagaacagcggcagaagaaggaagggccccttcaagaccatcaagtttggcaccaacatcgacctgagtgacaacaagaagtggaagctgcagctgcacgagctgaccaagctgcctgcctttgcccgggtggtgtctgctggcaacctgctgacccacgtgggccacaccatcctgggcatgaacacagtgcagctgtacatgaaggtgcccggcagcaggaccccaggccaccaggagaacaacaacttctgcagcgtgaacatcaacatcggccctggggactgtgagtggtttgtggtgcctgaggactactggggcgtgctgaatgacttctgtgagaagaacaacctgaacttcctgatgagctcctggtggcccaacctggaggacctgtatgaggccaacgtgcctgtgtaccgcttcatccagaggcctggggacctggtgtggatcaatgccggcaccgtgcactgggtgcaggccgtgggctggtgcaacaacatcgcctggaatgtgggccccctgacagcctgccagtacaagctggccgtggagagatatgagtggaacaagctgaagtctgtgaagagccctgtgcccatggtgcacctgtcctggaacatggccaggaacatcaaggtgtctgaccccaagctgtttgagatgatcaagtactgcctgctgaagatcctgaagcagtaccagaccctgcgggaggccctggtggccgccggcaaggaggtgatctggcacggccgcaccaatgatgagcccgcccactactgcagcatctgtgaggtggaggtgttcaacctgctgtttgtgaccaatgaaagcaacacccagaagacctacatcgtgcactgccacgactgtgccaggaagaccagcaagagcctggagaactttgtggtgctggagcagtacaagatggaggacctgatccaggtgtatgaccagttcaccctggccctgagcctgagcagcagcagctag

SEQ ID NO: 325414 - DNA, 3723 bp, Artificial Sequence
  derived and/or modified sequence
atgaagagctgtgctgtgtccctgaccacagctgctgtggcctttggagatgaggccaagaagatggccgagggcaaggccagccgggagagcgaggaggagagcgtgtccctgactgtggaggagcgggaggccctgggcggcatggacagccggctgtttggatttgtgcggctgcatgaagatggagcccggaccaagaccctgctgggcaaggctgtgcgctgctatgagagcctcatcctgaaggccgagggcaaggtggagagtgacttcttctgccagctgggccacttcaacctgctgctggaggactacagcaaggccctgagcgcctaccagcgctactacagcctgcaggccgactactggaagaatgctgccttcctgtatggcctgggcctggtgtacttctactacaatgccttccactgggccatcaaggccttccaggatgtgctgtatgtggaccccagcttctgccgggccaaggagatccacctgcggctgggcctgatgttcaaggtgaacacagactacaagagcagcctgaagcacttccagctggccctgattgactgcaacccctgcaccctgagcaatgctgagatccagttccacatcgcccacctgtatgagacccagaggaagtaccacagcgccaaggaggcctatgagcagctgctgcagacagagaacctgcctgcccaggtgaaggccaccgtgctgcagcagctgggctggatgcaccacaacatggacctggtgggggacaaggccaccaaggagagctatgccatccagtacctgcagaagagcctggaggccgaccccaacagcggccagagctggtacttcctgggccgctgctacagcagcatcggcaaggtgcaggatgccttcatctcctaccggcagagcattgacaagtctgaggccagcgctgacacctggtgcagcattggagtgctgtaccagcagcagaaccagcccatggatgccctgcaggcctacatctgtgctgtgcagctggaccacggccatgctgctgcctggatggacctgggcaccctgtatgagagctgcaaccagccccaggatgccatcaagtgctacctgaatgctgcccggagcaagcgctgcagcaacaccagcaccctggccgcccgcatcaagttcctgcagaatggaagtgacaactggaatggaggccagagcctgagccaccaccctgtgcagcaggtgtacagcctgtgcctgaccccccagaagctgcagcacctggagcagctgcgggccaacagagacaacctgaacccagcccagaagcaccagctggagcagctggagagccagtttgtgctgatgcagcagatgaggcacaaggaggtggcccaggtgaggaccaccggcatccacaacggggccatcacagacagcagcctgcccaccaacagcgtgagcaaccggcagccccatggagccctgaccagggtgtcctctgtgtcccagcccggggtgcggcctgcctgtgtggagaagctgctgagcagcggggccttctctgctggctgcatcccctgtggcaccagcaagatcctgggcagcacagacaccatcctgctgggcagcaactgcatcgccggcagcgagagcaatggaaatgtgccctacctgcagcagaacacccacaccctgccccacaaccacacagacctgaacagcagcacagaggagccctggaggaagcagctgagcaacagcgcccagggcctgcacaagagccagagcagctgcctgagcggccccaatgaggagcagcccctcttcagcacaggcagcgcccagtaccaccaggccaccagcacaggcatcaagaaggccaatgagcacctgaccctgcccagcaacagcgtgccccagggagatgctgacagccacctgagctgccacacagccaccagcggcggccagcagggcatcatgttcaccaaggagagcaagcccagcaagaacagaagcctggtgcctgagaccagccgccacactggagacaccagcaatggctgtgctgatgtgaagggcctgagcaaccacgtgcaccagctgattgctgatgctgtgagcagccccaaccacggggacagccccaacctgctgattgctgacaacccccagctgagcgccctgctgattggcaaggccaatggaaatgtgggcaccggcacctgtgacaaggtgaacaacatccaccctgctgtgcacaccaagacagaccacagcgtggccagcagccccagcagcgccatcagcacagccacccccagccccaagagcacagagcagaggagcatcaacagcgtgaccagcctgaacagcccccacagcggcctgcacacagtgaatggagagggcctgggcaagagccagagcagcaccaaggtggacctgcccctggccagccacaggagcaccagccagatcctgcccagcatgtctgtgtccatctgccccagcagcacagaggtgctgaaggcctgcaggaaccctgggaagaatggcctgagcaacagctgcatcctgctggacaagtgccccccaccccggccccccaccagcccctacccacccctgcccaaggacaagctgaacccccccacccccagcatctacctggagaacaagagagatgccttcttcccccccctgcaccagttctgcaccaaccccaagaaccctgtgaccgtcatccggggcctggccggggccctgaagctggacctgggcctcttcagcaccaagaccctggtggaggccaacaatgagcacatggtggaggtgaggacccagctgctgcagcctgcagatgagaactgggaccccaccggcaccaagaagatctggaggtgtgagagcaacagaagccacaccaccatcgccaagtatgcccagtaccaggccagcagcttccaggagagcctgcgggaggagaatgagaagaggacccagcacaaggaccacagcgacaatgaaagcaccagcagcgagaacagcggcagaagaaggaagggccccttcaagaccatcaagtttggcaccaacatcgacctgagtgacaacaagaagtggaagctgcagctgcacgagctgaccaagctgcctgcctttgcccgggtggtgtctgctggcaacctgctgacccacgtgggccacaccatcctgggcatgaacacagtgcagctgtacatgaaggtgcccggcagcaggaccccaggccaccaggagaacaacaacttctgcagcgtgaacatcaacatcggccctggggactgtgagtggtttgtggtgcctgaggactactggggcgtgctgaatgacttctgtgagaagaacaacctgaacttcctgatgagctcctggtggcccaacctggaggacctgtatgaggccaacgtgcctgtgtaccgcttcatccagaggcctggggacctggtgtggatcaatgccggcaccgtgcactgggtgcaggccgtgggctggtgcaacaacatcgcctggaatgtgggccccctgacagcctgccagtacaagctggccgtggagagatatgagtggaacaagctgaagtctgtgaagagccctgtgcccatggtgcacctgtcctggaacatggccaggaacatcaaggtgtctgaccccaagctgtttgagatgatcaagtag

SEQ ID NO: 325415 - DNA, 4044 bp, Artificial Sequence
  derived and/or modified sequence
atgaagagctgcgccgtgagcctgaccaccgccgccgtggccttcggcgacgaggccaaaaagatggccgaaggcaaggcatcgcgcgaaagtgaagaggagagcgtttccctgacagtggaggagcgggaggcactgggcgggatggattcacgactgttcggttttgttagactacatgaggacggcgcgagaaccaagacgcttctggggaaggccgtccgctgctacgagtctcttattctaaaagccgagggaaaggtggaaagcgatttcttctgccagctcggccactttaatcttttgctggaggactactcgaaggccctatcagcctaccagaggtactacagcctgcaagctgattactggaagaacgccgccttcttgtacggccttggactggtctacttttattataatgctttccattgggcaattaaggctttccaagatgttctgtatgtcgatccctcgttctgtagggccaaggagattcatttaaggctggggctcatgttcaaagtgaacaccgattataaatcctcattaaaacacttccaactcgctctgatcgattgcaacccttgtacactttccaacgctgagatccagttccacattgcccacttgtacgagacccaaaggaagtaccacagcgcaaaggaagcctatgagcagttgctccagaccgagaatctgccagcgcaagttaaggctactgtgctgcaacagctgggatggatgcatcacaatatggacttggtgggcgacaaggctactaaagaatcctatgccattcagtacctgcaaaaaagcttggaagcggatcctaactctggacaatcttggtacttcctgggcaggtgttatagtagtatcggtaaggttcaggatgcttttatatcctacaggcaatcaatagacaagagcgaagcttcagccgacacgtggtgttccatcggagtgctataccagcagcaaaaccagcccatggatgcgctccaagcttatatttgcgcagtacagttagaccacggtcacgctgcggcatggatggacctgggaacactgtatgagagctgtaatcagccgcaggacgctatcaaatgctacctgaacgctgcacggtcaaagcgttgttctaacacctcaactctcgcagcccgaattaaattcctgcagaatggatccgacaattggaatggcggccaatcactctctcaccaccctgtacagcaagtgtactccctttgtctcacaccccagaaattgcaacacctagagcagcttcgggcaaatagagacaatctgaaccctgcacagaaacatcagctggagcagctggaatcccagttcgtcctgatgcaacaaatgcgccacaaagaagtcgcccaagttcgcacaacaggcattcataatggcgccattacggactctagtctgcctaccaactccgtgagcaataggcagccgcacggcgcattaactcgagtgagtagtgtatcacagccgggtgtgcggccagcttgcgtcgaaaaactcctgagtagcggagcattcagcgctggatgtatcccctgcggaacgtcaaagatattaggatcaacagacactattctattaggaagcaattgcattgctgggagcgagagtaatggaaacgtgccgtacttgcaacagaacacccacacattaccccacaaccatacagatttgaactcatcaactgaagaaccttggcggaaacagctgtcaaatagcgcacaaggactgcacaaaagccaatcatcctgtctttctggaccaaacgaggaacagcctttgttcagcaccgggtccgcccagtatcaccaggccacatcaaccggtattaaaaaagccaacgaacaccttactctcccaagcaattcagtacctcagggggacgccgacagtcatctatcttgccataccgcaacttctggagggcaacagggcatcatgttcacaaaggaatctaagccctctaagaaccggtcactagtgcctgaaacctccaggcataccggcgatacatcgaacggctgcgcagacgttaagggactgagtaaccacgtgcaccagcttatcgccgacgcagtatcaagcccaaaccacggggatagccccaatcttctgattgcagacaatccgcagctgtctgcactcctgatcggcaaggctaacggcaacgtgggtactggcacgtgtgacaaagtgaataatatccaccctgctgtccacacaaagacagaccacagtgtggccagcagcccgtcttcggcgatctctaccgccaccccatcgccaaaatccaccgaacagagaagtataaacagcgtgacctccctcaactcgccacatagtgggctgcataccgtgaacggtgagggcttgggcaagagccagagcagtacaaaggtggacctccccttggcctctcatcgatcaacaagccagatcttacctagcatgagtgtgtcgatctgccccagcagtacagaagtgttaaaggcctgtcgcaacccagggaagaacgggttatctaattcatgcattctcttagataagtgcccgccgccaaggcctcctacctcgccatacccccccctgcctaaagataagcttaatcccccaacaccatccatctatctcgagaacaagcgcgatgcatttttcccaccactgcaccagttctgcactaaccctaagaacccagtcactgtgatccgggggctggctggcgctctgaagttagacttagggctattttcaacaaagacactcgtggaggcaaacaacgagcacatggtggaggtacggacccaactcttacagccagctgacgaaaactgggatcccaccggaactaagaagatctggcgctgcgagagtaacaggtctcataccaccatcgcaaaatacgcgcagtaccaagctagttctttccaagaaagcctccgcgaggagaatgagaaaaggacccagcataaagaccacagtgataacgaaagcaccagcagtgaaaattctggacggagacgcaagggcccattcaaaaccatcaaatttggcactaacatcgacctgtctgataacaaaaaatggaagctgcagctccacgagctgacaaagcttcctgccttcgcccgggtcgtttctgcaggcaacctcctgacccacgtaggccacaccatccttggcatgaatacagtacagctgtacatgaaagtcccgggttcaagaacgcccgggcaccaggagaataataatttctgctctgttaatataaacatcggtcccggcgattgtgaatggttcgtggtccccgaagactactggggcgtgcttaatgacttctgcgagaagaacaacctcaattttttgatgtctagttggtggccaaacttagaagacttgtacgaggccaatgtgcctgtgtataggtttatccaaaggccgggcgacctggtatggatcaacgctggaacagtccactgggtgcaggccgtgggctggtgcaataacattgcctggaacgtgggcccactgactgcttgtcaatataaactggcggtcgagagatatgagtggaacaagctgaaatccgtcaagagcccggttcccatggtgcacctgtcatggaatatggcaaggaacatcaaagtgagcgatccaaagctctttgaaatgatcaagtactgtctgctcaaaattctcaaacagtaccagaccctgagggaggccctggtagcggcaggaaaggaagtcatatggcatggcaggacaaatgacgagcctgcccactactgttccatctgtgaggttgaagtgttcaaccttctgtttgtgacaaatgagtccaatactcaaaagacttacattgtgcattgccacgactgcgccaggaagaccagtaagtccttagagaactttgtagtacttgagcaatacaagatggaagacttaattcaggtctatgaccagttcactctggccctcagtctcagtagctcatcctag

SEQ ID NO: 325416 - DNA, 3723 bp, Artificial Sequence
  derived and/or modified sequence
atgaagagctgcgccgtgagcctgaccaccgccgccgtggccttcggggatgaggccaagaagatggcagaaggaaaagccagccgggagtccgaagaggaatcagttagtctgaccgtggaggagagggaagccctgggcgggatggactcccggctgttcggatttgtgcggctgcacgaggatggggctaggactaaaaccctattagggaaggcagtgcgctgttatgagagcttgattctgaaggctgaaggcaaagtggaatcggacttcttctgtcagctgggacacttcaatctgctgctggaggactatagcaaggctcttagcgcttaccaaaggtattacagcctgcaggcagattactggaagaacgctgcttttttatatggactgggactagtttatttctactacaacgcctttcactgggccatcaaagcattccaggatgtgctttacgtagacccatctttttgtcgggcgaaagagattcacctcaggctgggcctgatgttcaaggtgaatactgactacaaaagcagcctgaagcactttcagctggctctgatcgactgcaatccctgcacgctgagcaacgccgagattcagttccacattgcccacctgtacgaaacacagagaaaatatcattctgctaaggaggcctacgagcagttgctgcagacagagaaccttccagcccaggttaaggccaccgtactgcagcagcttggctggatgcatcacaacatggacctcgttggcgacaaggctacgaaagaatcctacgccatacaatatctgcaaaagagtcttgaagccgacccgaattcaggacagagctggtacttcctggggagatgctacagctcgataggcaaggtacaagatgccttcatttcctataggcagagcatcgacaagagcgaagcctctgcagacacttggtgctctataggcgtgctgtaccagcaacagaatcaaccaatggacgcattgcaggcctacatatgcgcagtgcagctcgaccacggccatgcggccgcttggatggacttagggaccctctacgaaagttgcaaccaacctcaggacgcaataaagtgttacttgaatgctgcccgttcaaagcggtgtagcaatacatccactctcgccgcgcgcatcaaattcctgcagaacggctctgacaattggaacggcggccagagcctctcccaccaccctgtgcagcaggtgtattccctgtgtctaacgccgcagaagctccaacatctagagcagttgcgagccaatcgcgacaatcttaacccagcacagaagcaccagctggagcaactggaatcccagtttgtgctgatgcagcaaatgcgccataaggaagttgcccaagtgaggacaaccgggattcacaatggggctatcacagatagttccctgccgacaaatagtgtgagcaacaggcaaccacatggcgccctgaccagggtctcttccgtgtcgcagcccggggtgcgccctgcatgcgtcgagaaacttctctcctccggagcattcagcgcagggtgtattccgtgcgggacgtccaagatattggggtcaacggacactatccttctgggttccaactgtattgctggatcggagtctaacggtaatgttccttacctgcagcagaacacccacaccctaccacacaaccatacagatctgaactcatcaacagaggagccctggcgcaaacagttatcaaactccgcgcaggggcttcacaaaagtcagtcatcttgcctgagtggcccaaatgaggagcagccattattttccaccggatcggctcagtatcaccaggctaccagcaccgggataaaaaaagccaatgaacacctgaccctccccagcaactctgtgccacaaggggatgccgattcccatctcagttgtcataccgcaacttccggtggtcagcaaggcatcatgtttaccaaggagtctaagccttcgaaaaaccggtccctggtcccagaaaccagcagacatacaggagacacttctaacggatgcgctgacgtcaagggcttatcaaaccatgtgcaccagctgatcgctgatgcagtgagttcccctaaccacggggacagtcccaatctgctcattgccgataacccgcagcttagtgcactgctcattggcaaggccaatggcaatgttggcaccggaacctgtgacaaagtaaataacatccatcctgctgtacatactaagactgaccactccgtcgcaagcagtccatccagcgccatctcgacggccacacccagcccaaaatccacagaacagcgttctattaactctgtaacctctctgaactctcctcattccgggctgcataccgttaatggggagggcctgggaaagtcccagtcgtccaccaaagtggacctcccactggcgagccatagatcaactagtcaaatccttccaagtatgagtgtctctatatgtccatcctcaactgaagttttgaaagcttgccgcaatcccggcaagaacggactcagtaacagttgtattctgctggacaaatgccccccccctcgacctccaacttccccctatccccctctgccaaaagacaagctcaatccgccaactcctagcatctaccttgaaaataaaagagacgctttcttcccgccactccatcagttttgtactaaccccaagaaccccgtgaccgtgattcgcggccttgcaggagccctcaagttagacctcggcctgttcagcacaaaaactctggtggaagccaacaatgagcatatggttgaagttcgcacgcagttgctacaacccgccgacgagaattgggaccccaccgggacaaaaaaaatatggcgttgtgagagcaacagaagccataccacaatcgctaagtacgcacaatatcaggccagctctttccaagagagcctacgagaggagaatgaaaaacggacgcagcacaaggaccattctgataatgaaagtacatcttctgaaaatagcggcagacggagaaaggggcctttcaagacaattaagtttgggacaaatatcgatctgtcagataataagaaatggaagctgcagttgcatgaactgaccaagctccccgcttttgctcgcgttgtgagtgctgggaacctcctcactcacgtcgggcacactattcttggcatgaacacagtgcagctttatatgaaggttccaggtagccgcacaccaggccatcaggaaaacaataatttttgttctgtgaacatcaatatcggaccgggggactgcgagtggtttgtcgtgccagaggattactggggcgtcttgaacgacttctgtgaaaagaataaccttaatttcctgatgagcagctggtggccaaatttggaggacctctacgaggccaatgtgcccgtatacagattcatccagagacccggcgacctcgtgtggattaatgctggtaccgtccactgggtgcaggcagtcggttggtgcaataatatagcatggaatgtcgggcccctgaccgcctgccaatataaactggccgtcgaacgatacgaatggaataaactgaaaagcgtgaagtcaccagtccccatggttcatctgagctggaacatggccaggaatataaaagtgagcgatcctaaactgtttgagatgatcaagtag

SEQ ID NO: 325417 - DNA, 4044 bp, Artificial Sequence
  derived and/or modified sequence
atgaaatcctgtgcggtgagcctgaccaccgcagccgtcgcttttggtgatgaagcaaaaaagatggcagaaggcaaggcctcaagggaatccgaagaggagtctgtctcactgactgtggaagaacgtgaagctctgggaggcatggactcccgcctgtttggattcgttcgtctgcacgaggacggcgctagaactaaaaccctgctcggaaaggctgtgcggtgttacgagagtctgattctcaaagccgagggcaaagtggaaagtgatttcttttgccagcttgggcactttaatctgctgctggaggactattccaaagccctttcagcctaccagcgctattactccctgcaagccgactattggaagaacgcagccttcctttatggcttaggcctagtgtatttttactataatgcttttcactgggcaataaaggcattccaggacgtgctgtatgtagacccctctttctgtcgcgcaaaagaaatccacttgcggctgggactgatgtttaaagtcaatactgactacaagtcaagtcttaagcattttcaattagcgttaatagactgtaatccatgtaccctttcaaatgcggagatacagtttcatattgcccacttatacgaaactcagcgtaagtaccactcagctaaagaggcctacgagcaactcctgcaaacagagaacctacccgcacaggttaaagcaaccgtactgcaacaactgggctggatgcaccataatatggatttagtaggcgacaaggcaaccaaggagtcgtacgcgattcagtacttgcagaaaagcctagaggccgaccctaattccggccagagctggtattttcttgggcgttgctactcttccataggaaaggtgcaagacgcattcataagctaccgtcaaagcattgacaagagcgaagccagcgctgacacgtggtgttctatcggtgtgctgtaccagcaacagaatcagcccatggatgctttacaagcgtatatttgcgcagtacagttggaccatggacacgctgcagcatggatggacctggggacattatacgaatcctgcaaccagccacaggatgcaattaaatgctacctaaatgccgctcgctcaaagaggtgctccaacaccagcacgttggccgcaaggattaaatttctgcagaacggctctgataattggaacggaggtcaatctctgtcccaccaccctgtccaacaggtgtattcactgtgcctcacaccacaaaagcttcagcacctggagcagctcagagccaatagagataatctcaaccccgctcagaagcaccaactggagcagttagagagccagttcgtcctgatgcagcagatgcgacacaaggaagtcgcacaggtcaggactaccggcatccacaatggtgcaattactgacagtagcctgccaaccaatagcgtcagcaacaggcagccgcatggcgcactcactcgtgtgtcttcggtttctcagccaggggtcaggcccgcatgcgtggagaagcttctgtcatcaggggcattttccgccggatgcattccctgcggaacatccaagattctcggcagtacagacacaatcctcctagggagcaattgcatcgctgggagtgagagcaatggaaacgtaccatatctgcagcagaatactcacacattaccacataatcatacagacttaaatagctccaccgaggaaccttggcgaaagcagctgtcgaacagcgcccaaggccttcacaaatcccagtccagctgcctctcagggcctaacgaagagcaacctctgttctccacaggctcagcccagtaccatcaggcgacaagcactggaatcaagaaggccaacgagcacctgactctgccctccaacagtgtcccacaaggagatgccgatagtcacctgagctgccatacggccacctctggaggtcagcagggaatcatgttcaccaaagaaagcaaacccagtaagaatcgtagcttagtgcctgagacttcccggcacaccggggacacaagtaatggatgcgccgacgtgaaaggtctatccaatcacgttcaccagctgatcgccgacgctgtgtcaagtccaaatcacggcgattctcccaatctcctgattgcagataacccacagctctctgccctgctgatcggcaaagccaatggcaatgttggcacggggacctgtgacaaagtcaataatatccacccagctgtccacaccaagaccgatcattccgtcgccagctctccctccagcgccatcagtactgcaacaccaagtccaaagtccaccgaacagagatcaattaattcagtgacctctctcaattctcctcactccggcttgcacacagttaatggggagggtctcgggaagtctcaatccagcacaaaagtcgacttacccctcgctagtcaccggtccacctcgcagattcttccctcaatgtcggtttcaatctgccccagtagtacagaagtgctgaaagcctgtcgaaaccccggaaaaaacggtctgtctaactcctgtatactactcgacaagtgccctcctcctagacctccaaccagtccatatcctccacttcccaaggacaaactgaatcccccaacgccatcgatttatttagaaaacaagagagacgccttctttccccctttacaccagttctgcacaaaccctaagaatccggtcactgtaataaggggcctggctggcgcattaaagcttgacctggggctgttttctacaaaaaccctagtggaagccaacaatgaacacatggtcgaagttagaacgcagctgctgcagcctgctgatgagaattgggaccccaccggcaccaagaaaatctggaggtgcgagtctaacaggtctcatacaacaatagccaagtacgctcagtaccaagcaagtagttttcaagagagccttcgggaggaaaatgagaaaagaactcagcataaggaccattcagacaatgaatctactagctccgaaaattctggcagacggagaaaaggtcctttcaaaaccatcaagttcggaactaatattgacttatccgacaacaaaaagtggaagctccagctccacgaactgaccaaactacccgctttcgctcgggtcgtgagcgcagggaatctgctgacccatgtaggtcacacaattctgggcatgaatacagtccaactgtatatgaaagtgcccggttctcgaaccccaggtcaccaggagaacaataacttttgctcggtcaatatcaacattggtccaggcgactgcgaatggttcgtagtccccgaggactactggggcgtactaaatgacttctgtgaaaaaaataacctcaacttcttaatgagcagttggtggcctaacctcgaagacctctacgaggctaatgtcccagtttaccggttcattcagcggcctggcgacctcgtctggattaatgcaggcaccgttcactgggtccaggccgtcggttggtgtaacaatatcgcttggaacgttggacctcttactgcctgtcagtataagttagccgtggagagatacgaatggaataagttgaaaagcgtcaagtcccctgtacccatggtccacctgtcctggaacatggccagaaacatcaaggtgagcgatcctaagctcttcgaaatgattaagtactgtctgctcaaaatcttgaagcaataccaaacccttcgcgaggccctggtagcagcaggcaaagaagtcatttggcacggccgaactaatgatgaaccagcgcattattgtagcatctgtgaagtagaggtctttaacttgcttttcgtgactaacgagtccaatacgcaaaaaacttatattgtgcactgccacgactgtgccaggaagacttccaagtctttagaaaacttcgtggttctggagcagtacaagatggaggacctaatccaggtgtacgaccagttcaccctagccctgagtctgagctctagtagttag

SEQ ID NO: 325418 - DNA, 3723 bp, Artificial Sequence
  derived and/or modified sequence
atgaagtcatgcgccgtatctttaaccacggccgctgtggctttcggggatgaggccaaaaaaatggctgaaggcaaagcatctagagaaagtgaagaggagtctgtctctttaaccgttgaggagagggaggccttgggagggatggacagcaggctgttcgggtttgtgcggctgcatgaggacggggctcgcaccaaaaccctgttaggaaaggctgtgagatgctacgaaagccttatattaaaggctgagggaaaggtggagagcgattttttctgccaactcggccatttcaacttgctcctagaagactattccaaagccttatccgcctaccagcgatattactcactgcaggccgactactggaagaacgcagcctttttgtacggcttagggctggtgtatttttactataacgcctttcactgggcaatcaaggctttccaggacgtgctatacgtcgacccttcattctgccgggctaaagagatccatctcagactcggcctcatgttcaaagtaaatacagactataaatccagtctgaaacacttccaactggccctcatcgattgtaatccttgtaccctcagtaacgccgagatccagttccatatcgcgcacctgtatgaaacccaaagaaaataccacagtgctaaagaggcttatgagcagctgttacagactgagaacctgccagcacaggttaaggccacagttctgcagcaactcggctggatgcatcacaacatggacctggttggcgacaaggcaacaaaggagagttatgcaattcagtatctccagaagtctctggaagctgacccgaatagcgggcagtcttggtactttctggggaggtgctattcaagtatcggtaaagtgcaggacgctttcattagttacagacaaagtattgacaagagtgaagccagcgccgacacatggtgctctattggggtcctctaccagcagcaaaatcagcctatggacgcactgcaggcatatatctgtgccgtgcagctcgatcacgggcatgccgctgcttggatggacctcggcaccctgtatgagtcctgcaaccagccacaggatgccatcaaatgttacctaaacgccgcacgaagcaagaggtgctcgaatactagtaccctggccgcaagaattaaattcctacaaaacggaagtgacaattggaacggagggcagtcactttctcaccaccccgtgcagcaggtctatagcctctgtctgaccccgcagaagctgcagcacctcgagcagctccgtgccaaccgcgataatcttaaccccgcacaaaaacaccaactggaacagttggagtcacaattcgtgctgatgcagcagatgcgtcataaggaggtggctcaggtgaggaccactgggatacataatggggcaattaccgatagctctctgccaaccaactcggtctccaatagacagccacacggcgctctaaccagggttagctccgttagccagcctggggttcggcctgcttgtgtagaaaaactgttgagctcaggtgccttcagtgctggttgtattccctgtggcacctcaaaaatcttaggaagtactgacacgattcttctggggagcaattgtattgccggatctgagtcaaatggtaacgtgccatatctacagcagaacacacacaccctcccccacaatcacaccgatctcaatagcagcacggaggagccatggcgtaaacagttatctaactcagcccagggactccacaagtcacagagtagttgcctgagcggcccaaacgaagagcaaccactattctcaaccgggagtgctcagtaccatcaggccacgtccacagggattaagaaggcgaatgagcacctgactttaccttccaatagcgtccctcagggagatgccgactcgcacttgtcgtgccacactgccacctcgggaggccagcagggaatcatgtttaccaaggaaagcaagccaagcaaaaatcggagtcttgtgccagaaaccagtaggcatacaggcgatacttctaacgggtgtgcagacgtgaaaggactgtcaaaccatgttcatcagttgatcgccgacgccgtttcctctcccaaccacggggactctcctaatctgctgatcgccgacaatccccagctatcagctctgctgatagggaaggccaatggaaacgttggtaccgggacatgtgataaagtaaataacattcatcccgctgtgcatacaaagacagaccacagcgtcgcaagctccccctcctcagcaatctctaccgccacacccagccctaagtcgacagaacagagatctattaacagcgtgacgagcctaaatagccctcattcggggctacatactgtcaacggagagggcctggggaaatcccagtcttctaccaaggtggacttgcccctcgcttctcaccgctcaaccagccagatactgccatctatgtccgtgtcaatttgtccatcatctaccgaagtgctaaaagcgtgtcggaaccctggcaaaaatggcctgtctaactcatgtattttactggataaatgccccccaccaagacctcccacgtctccctatccgcctcttcccaaagacaagctaaacccgcctactcccagcatctacctcgagaacaagcgggatgcattctttcctccacttcatcaattttgcaccaacccaaagaatcccgtgactgtaattaggggcctcgccggtgccctgaaactagatctcggacttttctccactaaaactttggtggaagccaataacgagcatatggtcgaagtccggacgcagctgctgcagccagccgatgaaaactgggaccccactggcaccaagaagatttggaggtgtgaatccaacaggtcccacactaccatcgccaagtatgcccagtaccaggccagtagcttccaagagtccttacgcgaagagaatgagaaaagaacccagcacaaagatcacagcgataacgaatccacatcgagcgagaattctggcaggaggcggaagggtccttttaagaccataaagttcggaaccaatatcgacctatcagataacaaaaaatggaagcttcagctgcacgagctgacgaaactaccagcgttcgctagagttgtgtccgccggaaacttactgacgcatgtcggtcacacaatcctcgggatgaacactgtgcagctgtatatgaaagtcccagggtctcgaactcccggacaccaagagaataacaatttttgttcagtcaatatcaacattgggccaggcgactgtgagtggttcgtcgtacctgaagattattggggggttttgaacgatttctgtgaaaagaataacctgaacttcctgatgtctagttggtggccgaatctagaggacctgtatgaagccaatgtccctgtctatcgttttattcagcgcccaggagacctcgtatggattaacgcaggtacagtgcattgggtccaagctgtggggtggtgcaacaacatcgcctggaatgttgggcctctcactgcctgtcagtacaaactagcggtagagcgctacgagtggaataagctcaaatccgtgaaaagccccgtcccaatggttcacctaagttggaacatggccaggaacattaaagtgagcgacccgaaattgttcgagatgattaaatag

SEQ ID NO: 325419 - DNA, 6529 bp, Artificial Sequence
  derived and/or modified sequence
tttgctcatcgtttgttgtttagataatatcatgaactgataaatgcagttgccacgttgattccctagggcctggcttaccgactgaggtcataagatattatgccttctctttagacttggtcagtggagaggaaatgggcaaagaaccagcctatggaggtgacaaggccttagggccaaaagtcttgagggtgaaggtttagggcctgcgcagcttccctgccatgccccgcaaggtctcgcattcgcaaggcttgtgacagtgggagcctcattacggactctcctaaagtccatggtgtcctcttttcgcatttgcgccccgtgggtgatgcccgatgccgcccttcccatcgctctcttccccttcaagcgtatcgcaactgcaaaaacacccagcacagacactccattttctatcttaatgcatttaactagcacaacctacaggttgttccatcccagagactacccttttctccatagacgtgaccatcaaccaaccagcggtcagaatcagtcagcctctgtcatgttcctaggtccttggcgaactggctgggcggggtcccagcagcctaggagtacagtggagcaatgcctgacgtaagtcaacaaagatcacgtgagacgaatcagtcgcctagattggctacaactaagtggttgggagcggggaggtcgcggcggctgcgtggggttcgcccgtgacacaattacaactttgtgctggtgctggcaaagtttgtgattttaagaaattctgctgtgctctccagcactgcgagcttctgccttccctgtagtttcccagatgtgatccaggtagccgagttccgctgcccgtgcttcggtagcttaagtctttgcctcagcttttttccttgcagccgctgaggaggcgataaaattggcgtcacagtctcaagcagcgattgaaggcgtcttttcaactactcgattaaggttgggtatcgtcgtgggacttggaaatttgttgtttccatgaaatcctgcgcagtgtcgctcactaccgccgctgttgccttcggtgatgaggcaaagaaaatggcggaaggaaaagcgagccgcgagagtgaagaggagtctgttagcctgacagtcgaggaaagggaggcgcttggtggcatggacagccgtctcttcgggttcgtgaggcttcatgaagatggcgccagaacgaagaccctactaggcaaggctgttcgctgctacgaatctttaatcttaaaagctgaaggaaaagtggagtctgacttcttttgccaattaggtcacttcaacctcttgttggaagattattcaaaagcattatctgcatatcagagatattacagtttacaggctgactactggaagaatgctgcgtttttatatggccttggtttggtctacttctactacaatgcatttcattgggcaattaaagcatttcaagatgtcctttatgttgaccccagcttttgtcgagccaaggaaattcatttacgacttgggctcatgttcaaagtgaacacagactacaagtctagtttaaagcattttcagttagccttgattgactgtaatccatgtactttgtccaatgctgaaattcaatttcatattgcccatttgtatgaaacccagaggaagtatcattctgcaaaggaggcatatgaacaacttttgcagacagaaaaccttcctgcacaagtaaaagcaactgtattgcaacagttaggttggatgcatcataatatggatctagtaggagacaaagccacaaaggaaagctatgctattcagtatctccaaaagtctttggaggcagatcctaattctggccaatcgtggtattttcttggaaggtgttattcaagtattgggaaagttcaggatgcctttatatcttacaggcaatctattgataaatcagaagcaagtgcagatacatggtgttcaataggtgtgttgtatcagcagcaaaatcagcctatggatgctttacaggcatatatttgtgctgtacaattggaccatgggcatgccgcagcctggatggacctaggtactctctatgaatcctgcaatcaacctcaagatgccattaaatgctacctaaatgcagctagaagcaaacgttgtagtaatacctctacgcttgctgcaagaattaaatttctacagaatggttctgataactggaatggtggccagagtctttcacatcatccagtacagcaagtttattcgttgtgtttgacaccacagaaattacagcacttggaacaactgcgagcaaatagagataatttaaatccagcacagaagcatcagctggaacagttagaaagtcagtttgtcttaatgcagcaaatgagacacaaagaagttgctcaggtacgaactactggaattcataacggggccataactgattcatcactgcctacaaactctgtctctaatcgacaaccacatggtgctctgaccagagtatctagcgtctctcagcctggagttcgccctgcttgtgttgaaaaacttttgtccagtggagctttttctgcaggctgtattccttgtggcacatcaaaaattctaggaagtacagacactatcttgctaggcagtaattgtatagcaggaagtgaaagtaatggaaatgtgccttacctgcagcaaaatacacacactctacctcataatcatacagacctgaacagcagcacagaagagccatggagaaaacagctatctaactccgctcaggggcttcataaaagtcagagttcatgtttgtcaggacctaatgaagaacaacctctgttttccactgggtcagcccagtatcaccaggcaactagcactggtattaagaaggcgaatgaacatctcactctgcctagtaattcagtaccacagggggatgctgacagtcacctctcctgtcatactgctacctcaggtggacaacaaggcattatgtttaccaaagagagcaagccttcaaaaaatagatccttggtgcctgaaacaagcaggcatactggagacacatctaatggctgtgctgatgtcaagggactttctaatcatgttcatcagttgatagcagatgctgtttccagtcctaaccatggagattcaccaaatttattaattgcagacaatcctcagctctctgctttgttgattggaaaagccaatggcaatgtgggtactggaacctgtgacaaagtgaataatattcacccagctgttcatacaaagactgatcattctgttgcctcttcaccctcttcagccatttccacagcaacaccttctcctaaatccactgagcagagaagcataaacagtgttaccagccttaacagtcctcacagtggattacacacagtcaatggagaggggctggggaagtcacagagctctacaaaagtagacctgcctttagctagccacagatctacttctcagatcttaccatcaatgtcagtgtctatatgccccagttcaacagaagttctgaaagcatgcaggaatccaggtaaaaatggcttgtctaatagctgcattttgttagataaatgtccacctccaagaccaccaacttcaccatacccacccttgccaaaggacaagttgaatccacccacacctagtatttacttggaaaataaacgtgatgctttctttcctccattacatcaattttgtacaaatccaaaaaaccctgttacagtaatacgtggccttgctggagctcttaaattagatcttggacttttctctaccaaaactttggtagaagctaacaatgaacatatggtagaagtgaggacacagttgctgcaaccagcagatgaaaactgggatcccactggaacaaagaaaatctggcgttgtgaaagcaatagatctcatactacaattgccaaatacgcacaataccaggcttcctccttccaggaatcattgagagaagaaaatgagaaaagaacacaacacaaagatcattcagataacgaatccacatcttcagagaattctggaaggagaaggaaaggaccttttaaaaccataaaatttgggaccaacattgacctctctgataacaaaaagtggaagttgcagttacatgaactgactaaacttcctgcttttgcgcgtgtggtgtcagcaggaaatcttctaacccatgttgggcataccattctgggcatgaatacagtacaactgtatatgaaagttccagggagtcggacaccaggtcaccaagaaaataacaacttctgctctgttaacataaatattggtccaggagattgtgaatggtttgttgtacctgaagattattggggtgttctgaatgacttctgtgaaaaaaataatttgaattttttaatgagttcttggtggcccaaccttgaagatctttatgaagcaaatgtccctgtgtatagatttattcagcgacctggagatttggtctggataaatgcaggcactgtgcattgggttcaagctgttggctggtgcaataacattgcctggaatgttggtccacttacagcctgccagtataaattggcagtggaacggtatgaatggaacaaattgaaaagtgtgaagtcaccagtacccatggtgcatctttcctggaatatggcacgaaatatcaaagtctcagatccaaagctttttgaaatgattaagtattgtcttttgaaaattctgaagcaatatcagacattgagagaagctcttgttgcagcaggaaaagaggttatatggcatgggcggacaaatgatgaaccagctcattactgtagcatttgtgaggtggaggtttttaatctgctttttgtcactaatgaaagcaatactcaaaaaacctacatagtacattgccatgattgtgcacgaaaaacaagcaaaagtttggaaaattttgtggtgctcgaacagtacaaaatggaggacctaatccaagtttatgatcaatttacactagctctttcattatcatcctcatcttgatatagttccatgaatattaaatgagattatttctgctcttcaggaaatttctgcaccactggttttgtagctgtttcataaaactgttgactaaaagctatgtctatgcaaccttccaagaatagtatgtcaagcaactggacacagtgctgcctctgcttcaggacttaacatgctgatccagctgtacttcagaaaaataatattaatcatatgttttgtgtacgtatgacaaactgtcaaagtgacacagaatactgatttgaagatagccttttttatgtttctctatttctgggctgatgaattaatattcatttgtattttaaccctgcagaattttccttagttaaaaacactttcctagctggtcatttcttcataagatagcaaatttaaatctctcctcgatcagcttttaaaaaatgtgtactattatctgaggaagttttttactgctttatgtttttgtgtgttttgaggccatgatgattacatttgtggttccaaaataatttttttaaatattaatagcccatatacaaagataatggattgcacatagacaaagaaataaacttcagatttgtgatttttgtttctaaacttgatacagatttacactatttataaatacgtatttattgcctgaaaatatttgtgaatggaatgttgtttttttccagacgtaactgccattaaatactaaggagttctgtagttttaaacactactcctattacattttatatgtgtagataaaactgcttagtattatacagaaatttttattaaaattgttaaatgtttaaagggtttcccaatgtttgagtttaaaaaagactttctgaaaaaatccactttttgttcattttcaaacctaatgattatatgtattttatatgtgtgtgtatgtgtacacacatgtataatatatacagaaacctcgatatataattgtatagattttaaaagttttattttttacatctatggtagtttttgaggtgcctattataaagtattacggaagtttgctgtttttaaagtaaatgtcttttagtgtgatttattaagttgtagtcaccatagtgatagcccataaataattgctggaaaattgtattttataacagtagaaaacatatagtcagtgaagtaaatattttaaaggaaacattatatagatttgataaatgttgtttataattaagagtttcttatggaaaagagattcagaatgataacctcttttagagaacaaataagtgacttatttttttaaagctagatgactttgaaatgctatactgtcctgcttgtacaacatggtttggggtgaaggggaggaaagtattaaaaaatctatatcgctagtaaattgtaataagttctattaaaacttgtatttcatatgaaaaatttgctaatttaatattaactcatttgataataatacttgtcttttctacctctc

SEQ ID NO: 325420 - DNA, 4990 bp, Artificial Sequence
  derived and/or modified sequence
gctcatcgtttgttgtttagataatatcatgaactgataaatgcagttgccacgttgattccctagggcctggcttaccgactgaggtcataagatattatgccttctctttagacttggtcagtggagaggaaatgggcaaagaaccagcctatggaggtgacaaggccttagggccaaaagtcttgagggtgaaggtttagggcctgcgcagcttccctgccatgccccgcaaggtctcgcattcgcaaggcttgtgacagtgggagcctcattacggactctcctaaagtccatggtgtcctcttttcgcatttgcgccccgtgggtgatgcccgatgccgcccttcccatcgctctcttccccttcaagcgtatcgcaactgcaaaaacacccagcacagacactccattttctatcttaatgcatttaactagcacaacctacaggttgttccatcccagagactacccttttctccatagacgtgaccatcaaccaaccagcggtcagaatcagtcagcctctgtcatgttcctaggtccttggcgaactggctgggcggggtcccagcagcctaggagtacagtggagcaatgcctgacgtaagtcaacaaagatcacgtgagacgaatcagtcgcctagattggctacaactaagtggttgggagcggggaggtcgcggcggctgcgtggggttcgcccgtgacacaattacaactttgtgctggtgctggcaaagtttgtgattttaagaaattctgctgtgctctccagcactgcgagcttctgccttccctgtagtttcccagatgtgatccaggtagccgagttccgctgcccgtgcttcggtagcttaagtctttgcctcagcttttttccttgcagccgctgaggaggcgataaaattggcgtcacagtctcaagcagcgattgaaggcgtcttttcaactactcgattaaggttgggtatcgtcgtgggacttggaaatttgttgtttccatgaaatcctgcgcagtgtcgctcactaccgccgctgttgccttcggtgatgaggcaaagaaaatggcggaaggaaaagcgagccgcgagagtgaagaggagtctgttagcctgacagtcgaggaaagggaggcgcttggtggcatggacagccgtctcttcgggttcgtgaggcttcatgaagatggcgccagaacgaagaccctactaggcaaggctgttcgctgctacgaatctttaatcttaaaagctgaaggaaaagtggagtctgacttcttttgccaattaggtcacttcaacctcttgttggaagattattcaaaagcattatctgcatatcagagatattacagtttacaggctgactactggaagaatgctgcgtttttatatggccttggtttggtctacttctactacaatgcatttcattgggcaattaaagcatttcaagatgtcctttatgttgaccccagcttttgtcgagccaaggaaattcatttacgacttgggctcatgttcaaagtgaacacagactacaagtctagtttaaagcattttcagttagccttgattgactgtaatccatgtactttgtccaatgctgaaattcaatttcatattgcccatttgtatgaaacccagaggaagtatcattctgcaaaggaggcatatgaacaacttttgcagacagaaaaccttcctgcacaagtaaaagcaactgtattgcaacagttaggttggatgcatcataatatggatctagtaggagacaaagccacaaaggaaagctatgctattcagtatctccaaaagtctttggaggcagatcctaattctggccaatcgtggtattttcttggaaggtgttattcaagtattgggaaagttcaggatgcctttatatcttacaggcaatctattgataaatcagaagcaagtgcagatacatggtgttcaataggtgtgttgtatcagcagcaaaatcagcctatggatgctttacaggcatatatttgtgctgtacaattggaccatgggcatgccgcagcctggatggacctaggtactctctatgaatcctgcaatcaacctcaagatgccattaaatgctacctaaatgcagctagaagcaaacgttgtagtaatacctctacgcttgctgcaagaattaaatttctacagaatggttctgataactggaatggtggccagagtctttcacatcatccagtacagcaagtttattcgttgtgtttgacaccacagaaattacagcacttggaacaactgcgagcaaatagagataatttaaatccagcacagaagcatcagctggaacagttagaaagtcagtttgtcttaatgcagcaaatgagacacaaagaagttgctcaggtacgaactactggaattcataacggggccataactgattcatcactgcctacaaactctgtctctaatcgacaaccacatggtgctctgaccagagtatctagcgtctctcagcctggagttcgccctgcttgtgttgaaaaacttttgtccagtggagctttttctgcaggctgtattccttgtggcacatcaaaaattctaggaagtacagacactatcttgctaggcagtaattgtatagcaggaagtgaaagtaatggaaatgtgccttacctgcagcaaaatacacacactctacctcataatcatacagacctgaacagcagcacagaagagccatggagaaaacagctatctaactccgctcaggggcttcataaaagtcagagttcatgtttgtcaggacctaatgaagaacaacctctgttttccactgggtcagcccagtatcaccaggcaactagcactggtattaagaaggcgaatgaacatctcactctgcctagtaattcagtaccacagggggatgctgacagtcacctctcctgtcatactgctacctcaggtggacaacaaggcattatgtttaccaaagagagcaagccttcaaaaaatagatccttggtgcctgaaacaagcaggcatactggagacacatctaatggctgtgctgatgtcaagggactttctaatcatgttcatcagttgatagcagatgctgtttccagtcctaaccatggagattcaccaaatttattaattgcagacaatcctcagctctctgctttgttgattggaaaagccaatggcaatgtgggtactggaacctgtgacaaagtgaataatattcacccagctgttcatacaaagactgatcattctgttgcctcttcaccctcttcagccatttccacagcaacaccttctcctaaatccactgagcagagaagcataaacagtgttaccagccttaacagtcctcacagtggattacacacagtcaatggagaggggctggggaagtcacagagctctacaaaagtagacctgcctttagctagccacagatctacttctcagatcttaccatcaatgtcagtgtctatatgccccagttcaacagaagttctgaaagcatgcaggaatccaggtaaaaatggcttgtctaatagctgcattttgttagataaatgtccacctccaagaccaccaacttcaccatacccacccttgccaaaggacaagttgaatccacccacacctagtatttacttggaaaataaacgtgatgctttctttcctccattacatcaattttgtacaaatccaaaaaaccctgttacagtaatacgtggccttgctggagctcttaaattagatcttggacttttctctaccaaaactttggtagaagctaacaatgaacatatggtagaagtgaggacacagttgctgcaaccagcagatgaaaactgggatcccactggaacaaagaaaatctggcgttgtgaaagcaatagatctcatactacaattgccaaatacgcacaataccaggcttcctccttccaggaatcattgagagaagaaaatgagaaaagaacacaacacaaagatcattcagataacgaatccacatcttcagagaattctggaaggagaaggaaaggaccttttaaaaccataaaatttgggaccaacattgacctctctgataacaaaaagtggaagttgcagttacatgaactgactaaacttcctgcttttgcgcgtgtggtgtcagcaggaaatcttctaacccatgttgggcataccattctgggcatgaatacagtacaactgtatatgaaagttccagggagtcggacaccaggtcaccaagaaaataacaacttctgctctgttaacataaatattggtccaggagattgtgaatggtttgttgtacctgaagattattggggtgttctgaatgacttctgtgaaaaaaataatttgaattttttaatgagttcttggtggcccaaccttgaagatctttatgaagcaaatgtccctgtgtatagatttattcagcgacctggagatttggtctggataaatgcaggcactgtgcattgggttcaagctgttggctggtgcaataacattgcctggaatgttggtccacttacagcctgccagtataaattggcagtggaacggtatgaatggaacaaattgaaaagtgtgaagtcaccagtacccatggtgcatctttcctggaatatggcacgaaatatcaaagtctcagatccaaagctttttgaaatgattaagtaagtgccttctgaaactgctgcagtttctctttgggggtattggtagccattcagtatttttttcaaaagaattctgttgacattaaatgatatcagcagtccagaagtcttggcaaaatgtaataagatgtaaataatcttatatattcataagtgttataaaatctcataagattaaaatattgccttcccttacagatagtcacttgtgtttattacaatttagagaggaataaagatgtacatgaatatacactggtaaa

SEQ ID NO: 325421 - protein, 207 aa, Artificial Sequence
  derived and/or modified sequence
MKSCAVSLTTAAVAFGDEAKKMAEGKASRESEEESVSLTVEEREALGGMDSRLFGFVRLHEDGARTKTLLGKAVRCYESLILKAEGKVESDFFCQLGHFNLLLEDYSKALSAYQRYYSLQADYWKNAAFLYGLGLVYFYYNAFHWAIKAFQDVLYVDPSFCRAKEIHLRLGLMFKVNTDYKSSLKHFQLALIDCNPCTLSNAESKYF

SEQ ID NO: 325422 - DNA, 2775 bp, Artificial Sequence
  derived and/or modified sequence
ctcagttttctaatctgaaaaatgagaatattaaccatagacaactgccactcactgaacaccagctgcagtagagccgagcatacacgtaatcctcaccgcaaccataggagctggatcctgacatccccatctcacagaggaggagactgaggttaatgacgtggcaaatatccacaatgacagtttctgcaagtctttcctagtgcaatcacccacaaccacagccctagaaagaaggatgaacactcttccacagaggctggcacgcaccttaaggcaggtgcccactggaaccctgtctgtggtgtcaaggattttacagttgaccttgaagaccacctagtccaaagctctcattgtacaaaaagccaagcccagaggtcacacaaagctttggacctgagcctctgggccccgcggtctggaaagtgctcctttctctgcatgctacggggctatcaacttgagctggtccagtctgcagatctacatcctgcccgcctgagcagaggcgggtgtgggaccagtgcggatctccacgatttgtcagcccatcctgataagtctgaggctctgaccatcatatctcatcacagcatcattaggattacaagtgccatgcggtagaagaggaagggaaacacgaacaaaaggatgagaaattaagcccatttcacccggaaaagatgactctgatttattgctctatagcagctgacgatggcctgtcagagaaattctgtgttgaaaataaagaataaaaatcacccagagttgttttgccacacatccaaattagaaaatgctactctccggatgatttatgcttcaattttttcccttattcacagagaatttgtccagcattacaagagcacctaagagcaataatacaattcaaaaggagatagaagaggccgcagaggtgttgatgtgcggctgagggcggggtgctggcccaaaggcagggctttggtgctcagaagcattgaccttacagggaggaacaaggagaaaccagccaggcaggccccgcaggcagcccacagagccacttcgccgtgcagccgagggagtcccgcaccacggggcctcgctcagggtagccaccatgggagaatgtccccacctcgtggatgtcaggcttggccacaggtccttggccacgggacctgagcagagtgacatatgccacactggatcagaagcacgctggaccaccacgtggtatggctccctttctttctcccgtcataagtacaagatgttggctgacctgactcctggggtagaaatgtcatgtagacactgggcgcggtggctcacgcctgtaatcccagcactttggaaggccgaggcaggtggattgcctgagctcaggagttcgagaccagcctggacaacatggtgaaacccgtctctactaatttacaaaaaaaattagccaggtgtgttggcacatgcctgtagtcccagctacgtgggaggctgaggcacgagaattgcctgaaccccagaggtggaggttgcagtgagccgagatggtacctctgcactgcagcctgggcaacagaatgagactgtgtcttcaaaaaaaaaaagcactgtcatgcagggcagggtcccaaggccccagccaacctctcgttgacatgtaatgtaagaagatgtcaactcatgcttatagtcactgacatttaggaatagtctgttaccacagcataagctggtaaaaaaaaaaaaaaaaatcatacagctcttcttcccggaacgcccctgcacctctgctccggtgcacaaatgctttctcttcaaggcatggcgcaaaaaagccactacttccagaagcatctcctcattccccgccgggagcaacatctctcttctcgagaccccagcccctccgctgtctacccatggacttcctcagtgtttgttttttgcatgattctttgtgaccaagctgtttctccagctgccttgaggacatgccctagggaacagtgctctgaatcgtacctggattctgtgcctacctgctccatctaaagcagaaaactccacaactaagatctcttctaacatttaaggaatagagcctaattagcgcatgaatacgtgttgaactgtgaatgaatcaatgagtatggaaactacattatacgcagtgctgatagaaccaagttgccaagggagatatcatctctcctgcaggaaggaagtcctgcctcccactgatccactcagcgcacagccttgaacaaaacagagcaagagttataaccttcagatgtgggggcagaataggacccatttgggcagacacaggccacggaaaccacagggccagcgtcttgagccctcgatcagacgcctcccgcccaccgcggccgcttctccacgcttttgcccagatctctgcaccgcgtggcccggtcttgcctccctgaggaccacactggctgcaacccaaactcgactcttctacttacacttgctcagcatttttgtcatccctgcccttggccaatccctgtcttggtttctgctcttcccacacaaagttttgggaatcaattcatacatatttgagattaaccaaagtccatgatcagttctggaccgctatggattccagatccaccttacgtagccgtgtgagctccggtaaattacataacccatcaaatttctttatctataaagcagcaacaataatgtcacgaaggattaaggtaaagatgagaaatagtatagcaaaagcatctacta

SEQ ID NO: 325423 - protein, 195 aa, Artificial Sequence
  derived and/or modified sequence
MPNFLGLHRARSFTVLCFWSTADVLNASGPRRQWHPLASCSSWSRPQSQGSTPGVLCKTGMGREPIPETQCHFANSMCSLHVSVPYFGNSPNISNFFRWSLALSPRQWCDLGSLQPPSPRFKGFSCLSLPSSWDYRRAPSPANFCILVEMGFHHVGQADLELLTSADLPTSASQSAGITGVSHHAWPQTLSLLLY

SEQ ID NO: 325424 - protein, 100 aa, Artificial Sequence
  derived and/or modified sequence
FLRRSLALSPRQWHDLGSLQPPPPGFKPFSCLSLLSSWDYRCAPPCPANFCILVEMGFHHVGQAGLELLTSDLPTSASQRAGITGVNHHAWPRDAFSISY

SEQ ID NO: 325425 - protein, 100 aa, Artificial Sequence
  derived and/or modified sequence
FLRRSLALSPRQWHDLGSLQPPAPGFKPFSCLSLLSSWDYRCAPPCPANFCILVEMGFHHVGQAGLELLTSDLPASASQRAGITGVNHHAWPRDAFSISY

SEQ ID NO: 325426 - protein, 1070 aa, Artificial Sequence
  derived and/or modified sequence
MKSCAVSLTTAAVAFGDEAKKMAEGKASRESEEESVSLTVEEREALGGMDSRLFGFVRLHEDGARTKTLLGKAVRCYESLILKAEGKVESDFFCQLGHFNLLLEDYSKALSAYQRYYSLQADYWKNAAFLYGLGLVYFYYNAFHWAIKAFQDVLYVDPSFCRAKEIHLRLGLMFKVNTDYKSSLKHFQLALIDCNPCTLSNAEIQFHIAHLYETQRKYHSAKEAYEQLLQTENLPAQVKATVLQQLGWMHHNMDLVGDKATKESYAIQYLQKSLEADPNSGQSWYFLGRCYSSIGKVQDAFISYRQSIDKSEASADTWCSIGVLYQQQNQPMDALQAYICAVQLDHGHAAAWMDLGTLYESCNQPQDAIKCYLNAARSKRCSNTSTLAARIKFLQAQLCNLPQSSLQNKTKLLPSIEEAWSLPIPAELTSRQGAMNTAQQQSLSLHMITSSQVEGLSSPAKKKRTSSPTKNGSDNWNGGQSLSHHPVQQVYSLCLTPQKLQHLEQLRANRDNLNPAQKHQLEQLESQFVLMQQMRHKEVAQVRTTGIHNGAITDSSLPTNSVSNRQPHGALTRVSSVSQPGVRPACVEKLLSSGAFSAGCIPCGTSKILGSTDTILLGSNCIAGSESNGNVPYLQQNTHTLPHNHTDLNSSTEEPWRKQLSNSAQGLHKSQSSCLSGPNEEQPLFSTGSAQYHQATSTGIKKANEHLTLPSNSVPQGDADSHLSCHTATSGGQQGIMFTKESKPSKNRSLVPETSRHTGDTSNGCADVKGLSNHVHQLIADAVSSPNHGDSPNLLIADNPQLSALLIGKANGNVGTGTCDKVNNIHPAVHTKTDHSVASSPSSAISTATPSPKSTEQRSINSVTSLNSPHSGLHTVNGEGLGKSQSSTKVDLPLASHRSTSQILPSMSVSICPSSTEVLKACRNPGKNGLSNSCILLDKCPPPRPPTSPYPPLPKDKLNPPTPSIYLENKRDAFFPPLHQFCTNPKNPVTVIRGLAGALKLDLGLFSTKTLVEANNEHMVEVRTQLLQPADENWDPTGTKKIWRCESNRSHTTIAKYAQYQASSFQESLR

SEQ ID NO: 325427 - DNA, 3213 bp, Artificial Sequence
  derived and/or modified sequence
atgaagagctgcgccgtgagcctgaccaccgccgccgtggccttcggcgacgaggccaagaagatggccgagggcaaggccagcagagagagcgaggaggagagcgtgagcctgaccgtggaggagagagaggccctgggcggcatggacagcagactgttcggcttcgtgagactgcacgaggacggcgccagaaccaagaccctgctgggcaaggccgtgagatgctacgagagcctgatcctgaaggccgagggcaaggtggagagcgacttcttctgccagctgggccacttcaacctgctgctggaggactacagcaaggccctgagcgcctaccagagatactacagcctgcaggccgactactggaagaacgccgccttcctgtacggcctgggcctggtgtacttctactacaacgccttccactgggccatcaaggccttccaggacgtgctgtacgtggaccccagcttctgcagagccaaggagatccacctgagactgggcctgatgttcaaggtgaacaccgactacaagagcagcctgaagcacttccagctggccctgatcgactgcaacccctgcaccctgagcaacgccgagatccagttccacatcgcccacctgtacgagacccagagaaagtaccacagcgccaaggaggcctacgagcagctgctgcagaccgagaacctgcccgcccaggtgaaggccaccgtgctgcagcagctgggctggatgcaccacaacatggacctggtgggcgacaaggccaccaaggagagctacgccatccagtacctgcagaagagcctggaggccgaccccaacagcggccagagctggtacttcctgggcagatgctacagcagcatcggcaaggtgcaggacgccttcatcagctacagacagagcatcgacaagagcgaggccagcgccgacacctggtgcagcatcggcgtgctgtaccagcagcagaaccagcccatggacgccctgcaggcctacatctgcgccgtgcagctggaccacggccacgccgccgcctggatggacctgggcaccctgtacgagagctgcaaccagccccaggacgccatcaagtgctacctgaacgccgccagaagcaagagatgcagcaacaccagcaccctggccgccagaatcaagttcctgcaggcccagctgtgcaacctgccccagagcagcctgcagaacaagaccaagctgctgcccagcatcgaggaggcctggagcctgcccatccccgccgagctgaccagcagacagggcgccatgaacaccgcccagcagcagagcctgagcctgcacatgatcaccagcagccaggtggagggcctgagcagccccgccaagaagaagagaaccagcagccccaccaagaacggcagcgacaactggaacggcggccagagcctgagccaccaccccgtgcagcaggtgtacagcctgtgcctgaccccccagaagctgcagcacctggagcagctgagagccaacagagacaacctgaaccccgcccagaagcaccagctggagcagctggagagccagttcgtgctgatgcagcagatgagacacaaggaggtggcccaggtgagaaccaccggcatccacaacggcgccatcaccgacagcagcctgcccaccaacagcgtgagcaacagacagccccacggcgccctgaccagagtgagcagcgtgagccagcccggcgtgagacccgcctgcgtggagaagctgctgagcagcggcgccttcagcgccggctgcatcccctgcggcaccagcaagatcctgggcagcaccgacaccatcctgctgggcagcaactgcatcgccggcagcgagagcaacggcaacgtgccctacctgcagcagaacacccacaccctgccccacaaccacaccgacctgaacagcagcaccgaggagccctggagaaagcagctgagcaacagcgcccagggcctgcacaagagccagagcagctgcctgagcggccccaacgaggagcagcccctgttcagcaccggcagcgcccagtaccaccaggccaccagcaccggcatcaagaaggccaacgagcacctgaccctgcccagcaacagcgtgccccagggcgacgccgacagccacctgagctgccacaccgccaccagcggcggccagcagggcatcatgttcaccaaggagagcaagcccagcaagaacagaagcctggtgcccgagaccagcagacacaccggcgacaccagcaacggctgcgccgacgtgaagggcctgagcaaccacgtgcaccagctgatcgccgacgccgtgagcagccccaaccacggcgacagccccaacctgctgatcgccgacaacccccagctgagcgccctgctgatcggcaaggccaacggcaacgtgggcaccggcacctgcgacaaggtgaacaacatccaccccgccgtgcacaccaagaccgaccacagcgtggccagcagccccagcagcgccatcagcaccgccacccccagccccaagagcaccgagcagagaagcatcaacagcgtgaccagcctgaacagcccccacagcggcctgcacaccgtgaacggcgagggcctgggcaagagccagagcagcaccaaggtggacctgcccctggccagccacagaagcaccagccagatcctgcccagcatgagcgtgagcatctgccccagcagcaccgaggtgctgaaggcctgcagaaaccccggcaagaacggcctgagcaacagctgcatcctgctggacaagtgccccccccccagaccccccaccagcccctacccccccctgcccaaggacaagctgaacccccccacccccagcatctacctggagaacaagagagacgccttcttcccccccctgcaccagttctgcaccaaccccaagaaccccgtgaccgtgatcagaggcctggccggcgccctgaagctggacctgggcctgttcagcaccaagaccctggtggaggccaacaacgagcacatggtggaggtgagaacccagctgctgcagcccgccgacgagaactgggaccccaccggcaccaagaagatctggagatgcgagagcaacagaagccacaccaccatcgccaagtacgcccagtaccaggccagcagcttccaggagagcctgagatag

SEQ ID NO: 325428 - DNA, 3213 bp, Artificial Sequence
  derived and/or modified sequence
atgaaatcttgcgctgtttcacttaccactgctgccgtggcattcggcgacgaagcaaagaagatggccgagggcaaggcgtcaagggagagtgaagaagagtcggtgagtctcacagtggaggagcgagaggccctaggaggaatggatagcaggctctttgggtttgtgcggctgcacgaggacggtgcccgcacaaaaacactgctcggcaaagccgttcgctgttacgagagtctcatcctcaaggctgaaggcaaagtggagtcagactttttctgccaactgggccattttaaccttctgttggaggattattctaaggccttatcagcatatcaacgatattactcactgcaagccgactactggaagaacgcagcatttctgtatgggctgggactggtctacttttattataatgcgttccactgggctatcaaggctttccaggacgtactgtacgtcgacccgtccttttgtcgggccaaagaaatccatcttcgtctcggactcatgttcaaagttaacacagattacaagtccagcttgaagcacttccaattggctctcatagattgtaacccctgtactctctctaacgcagagattcagttccatattgcacacctatacgaaacccaacggaaatatcactcggccaaagaagcgtacgagcagttgctacaaacggagaacttgcctgcacaggtgaaggccactgtgcttcaacaactcggctggatgcaccataatatggatctagtgggagataaagctacgaaagaatcttatgcaattcaatacctacagaaatcccttgaagccgatccgaactctggacagtcctggtacttcctgggccgttgctacagttccatcggtaaggtccaggacgcattcatctcctacaggcagtctatcgataagtctgaggcatcagcagatacctggtgcagtatcggcgtactctaccaacagcagaatcagccgatggacgccctgcaggcatacatctgcgccgtacaactggaccacggacacgccgcggcctggatggacctcggaactttatatgagagctgcaatcagcctcaagacgcaatcaaatgctacctgaatgccgcacgctccaagcgatgttctaacacttcgacgctcgcagctagaataaagttcctgcaggcccagctttgtaatctcccacaatcttcgttacagaataaaacgaagctgttgccttctatcgaggaggcctggagcctccctattccggccgagctgacttccaggcagggtgcgatgaatacagcccagcaacagtcgctatccctgcatatgatcaccagctcccaggtggaaggactatcaagcccggccaagaagaaacgcaccagctctcccaccaaaaatgggagcgataactggaatggggggcagtcactcagccatcacccagtccaacaagtgtacagtctgtgcctgacgccccagaagctccagcatctggaacaattgcgggcgaatcgtgacaacctgaacccagcgcagaagcaccagttggaacagctggaaagccaattcgtccttatgcagcagatgcggcataaggaggtcgcccaggttaggaccaccgggatccataacggggccatcaccgacagttccttgcccacaaactcagtctccaatcggcagccccatggtgcgctgacgcgcgtgagcagcgtgagccagcctggcgtccggcctgcctgcgttgagaaactcttatccagcggggctttctccgccgggtgcatcccctgcggtacgagtaagatcctgggttctacagatactattctcttgggaagcaactgtattgctggatcggaatcgaatggaaatgtcccatatcttcagcagaacacccacacgctgccccacaaccacactgaccttaattccagcacagaggaaccttggcgcaagcagctgtccaatagcgctcaaggcctccataagtcccaaagtagctgcctcagcgggcccaacgaagaacagccccttttctcaaccgggtcagcccagtaccatcaggctacaagtacaggcattaaaaaagccaatgaacacctgacattgcctagtaactccgtgcctcagggcgatgccgattcccatctgagttgccacactgcaactagtgggggacagcaggggattatgtttactaaagagtccaaaccatctaagaatcgttctcttgtgcccgaaacgtctaggcataccggggacactagtaacggctgcgctgatgtcaagggactctccaaccacgtccaccagctgatcgctgatgcggtgagcagtcctaatcacggggatagtccaaatctgcttatcgcagataatccacagctttccgcattattgatcggaaaggccaatggaaacgttggtaccggtacttgtgataaagtgaacaatattcacccagcagtccacacaaaaactgatcattccgttgcaagctccccttcatctgccattagtaccgctacgccatctcccaaaagcacagagcagcgctcaattaactctgttacatcgctaaacagcccacattctggcctgcatactgttaacggagaaggattaggcaagtctcaatcttctacgaaggtggacctccctctcgctagccacaggtccacaagccagatcttaccctctatgagcgttagcatttgtccgagcagtacagaggtacttaaagcctgcaggaatccagggaagaatggactgtcaaactcctgcattctgctggataaatgtccaccaccccgtcctccaactagcccttacccaccgctcccaaaggacaaactgaaccctccaacacccagcatttacctggagaacaaacgcgacgctttcttccctcccctccaccagttttgtaccaacccaaaaaacccagtgactgtgattcgggggctggcgggagccttgaagctagatctgggcttattctcaacgaaaacgctggtggaggcaaacaacgaacacatggttgaggtgcgcacccagttgctccagccggccgatgaaaactgggatccaacaggcacgaagaagatctggcgatgtgagtccaataggtcccacacaaccatagcaaagtacgcccaataccaggcaagcagctttcaggagagcctgcgctag

SEQ ID NO: 325429 - DNA, 3213 bp, Artificial Sequence
  derived and/or modified sequence
atgaagagctgtgctgtgtccctgaccacagctgctgtggcctttggagatgaggccaagaagatggccgagggcaaggccagccgggagagcgaggaggagagcgtgtccctgactgtggaggagcgggaggccctgggcggcatggacagccggctgtttggatttgtgcggctgcatgaagatggagcccggaccaagaccctgctgggcaaggctgtgcgctgctatgagagcctcatcctgaaggccgagggcaaggtggagagtgacttcttctgccagctgggccacttcaacctgctgctggaggactacagcaaggccctgagcgcctaccagcgctactacagcctgcaggccgactactggaagaatgctgccttcctgtatggcctgggcctggtgtacttctactacaatgccttccactgggccatcaaggccttccaggatgtgctgtatgtggaccccagcttctgccgggccaaggagatccacctgcggctgggcctgatgttcaaggtgaacacagactacaagagcagcctgaagcacttccagctggccctgattgactgcaacccctgcaccctgagcaatgctgagatccagttccacatcgcccacctgtatgagacccagaggaagtaccacagcgccaaggaggcctatgagcagctgctgcagacagagaacctgcctgcccaggtgaaggccaccgtgctgcagcagctgggctggatgcaccacaacatggacctggtgggggacaaggccaccaaggagagctatgccatccagtacctgcagaagagcctggaggccgaccccaacagcggccagagctggtacttcctgggccgctgctacagcagcatcggcaaggtgcaggatgccttcatctcctaccggcagagcattgacaagtctgaggccagcgctgacacctggtgcagcattggagtgctgtaccagcagcagaaccagcccatggatgccctgcaggcctacatctgtgctgtgcagctggaccacggccatgctgctgcctggatggacctgggcaccctgtatgagagctgcaaccagccccaggatgccatcaagtgctacctgaatgctgcccggagcaagcgctgcagcaacaccagcaccctggccgcccgcatcaagttcctgcaggcccagctgtgcaacctgccccagagcagcctgcagaacaagaccaagctgctgcccagcattgaggaggcctggagcctgcccatcccagctgagctgaccagccggcagggcgccatgaacacagcccagcagcagagcctgagcctgcacatgatcaccagcagccaggtggagggcctgagcagccctgccaagaagaagaggaccagcagccccaccaagaatggaagtgacaactggaatggaggccagagcctgagccaccaccctgtgcagcaggtgtacagcctgtgcctgaccccccagaagctgcagcacctggagcagctgcgggccaacagagacaacctgaacccagcccagaagcaccagctggagcagctggagagccagtttgtgctgatgcagcagatgaggcacaaggaggtggcccaggtgaggaccaccggcatccacaatggagccatcacagacagcagcctgcccaccaacagcgtgagcaaccggcagccccacggggccctgaccagggtgtcctctgtgtcccagcccggggtgcggcctgcctgtgtggagaagctgctgagcagcggggccttctctgctggctgcatcccctgtggcaccagcaagatcctgggcagcacagacaccatcctgctgggcagcaactgcatcgccggcagcgagagcaatggaaatgtgccctacctgcagcagaacacccacaccctgccccacaaccacacagacctgaacagcagcacagaggagccctggaggaagcagctgagcaacagcgcccagggcctgcacaagagccagagcagctgcctgagcggccccaatgaggagcagcccctcttcagcactggaagtgcccagtaccaccaggccaccagcacaggcatcaagaaggccaatgagcacctgaccctgcccagcaacagcgtgccccagggagatgctgacagccacctgagctgccacacagccaccagcggcggccagcagggcatcatgttcaccaaggagagcaagcccagcaagaacagaagcctggtgcctgagaccagccgccacactggagacaccagcaatggctgtgctgatgtgaagggcctgagcaaccacgtgcaccagctgattgctgatgctgtgagcagccccaaccacggggacagccccaacctgctgattgctgacaacccccagctgagcgccctgctgattggcaaggccaatggaaatgtgggcaccggcacctgtgacaaggtgaacaacatccaccctgctgtgcacaccaagacagaccacagcgtggccagcagccccagcagcgccatcagcacagccacccccagccccaagagcacagagcagaggagcatcaacagcgtgaccagcctgaacagcccccacagcggcctgcacacagtgaatggagagggcctgggcaagagccagagcagcaccaaggtggacctgcccctggccagccacaggagcaccagccagatcctgcccagcatgtctgtgtccatctgccccagcagcacagaggtgctgaaggcctgcagaaatcctgggaagaatggcctgagcaacagctgcatcctgctggacaagtgccccccacccaggcctcccaccagcccctacccacccctgcccaaggacaagctgaacccccccacccccagcatctacctggagaacaagagagatgccttcttcccccccctgcaccagttctgcaccaaccccaagaaccctgtgaccgtcatccggggcctggccggggccctgaagctggacctgggcctcttcagcaccaagaccctggtggaggccaacaatgagcacatggtggaggtgaggacccagctgctgcagcctgcagatgagaactgggaccccaccggcaccaagaagatctggaggtgtgagagcaacagaagccacaccaccatcgccaagtatgcccagtaccaggccagcagcttccaggagagcctgaggtag

SEQ ID NO: 325430 - DNA, 3213 bp, Artificial Sequence
  derived and/or modified sequence
atgaagagctgcgccgtgagcctgaccaccgccgccgtggccttcggtgacgaggcaaagaaaatggcagagggtaaggctagcagggaatctgaggaagagtccgtgagtttaaccgtcgaagagagggaagccctgggggggatggactctcgtctcttcggcttcgtgcggctgcacgaagatggtgctcgtaccaagacattactcggcaaagccgtgcgttgttacgaatcactgatccttaaggccgaaggcaaggtggaaagcgattttttttgccagctgggtcacttcaatctgcttctcgaggattactctaaagctttgagcgcctaccagcgatactattctctacaagcagattattggaaaaacgctgcgttcctttatggcctgggcctggtgtatttttactataacgcctttcactgggctatcaaagcctttcaagatgtgctctatgttgacccctccttttgccgtgcaaaggaaattcatctacgactagggctcatgttcaaggtgaatacagactataagtcttccctcaagcatttccaattggctctgatcgattgcaatccgtgcacactgagtaatgctgaaattcagtttcatatcgcccacctctacgaaacacagcgcaaatatcatagcgctaaggaagcatacgaacagctgctgcaaaccgaaaatctgccagcgcaagtgaaagccacagtccttcagcaactggggtggatgcatcacaacatggatctcgtcggcgataaggccacaaaagagtcttatgctatccaatatcttcagaagtctctggaagctgatcctaattccgggcagagttggtattttctcggccggtgctatagctctattggtaaggtgcaagatgcattcatatcctatcgtcaatccattgataagtccgaagcctcagcagatacctggtgtagtattggtgttctctaccagcaacaaaatcagccaatggacgcactccaagcttacatttgcgccgtgcaactcgatcatggacacgcagcagcttggatggaccttggaacactgtatgaatcttgcaatcagccccaagatgccattaagtgctacttaaacgcagcccggtctaaaagatgtagcaatacatcaacattagccgcacgcatcaaattcctacaggcccagctctgtaatctcccccagtctagcctgcagaataagacgaagctgctaccctcaattgaagaggcttggtcactgccaattcctgctgagcttaccagcaggcagggggcgatgaacaccgcccagcagcagtcactgtccttgcatatgatcaccagcagccaggtggagggactcagctccccagctaaaaagaagaggacaagctctcccactaagaacggtagtgataattggaatggtggccagtcactctcacatcatcctgtgcaacaggtgtattctttgtgcctgactccacaaaagctacagcatctcgagcagttacgcgccaatcgcgataaccttaaccccgcccagaaacaccagttagagcagttagaatctcagtttgtgctgatgcagcagatgcgacacaaagaggttgcccaggtgagaacgacggggatccataatggagcaatcacagacagcagtctgcccactaattctgtatccaaccgacagccacacggggcattaactcgggtaagtagcgtaagtcaacccggtgtgcggccagcatgcgtcgagaaactccttagctcaggagctttcagcgcaggctgcattccttgcggtacatcaaaaatccttggttcgactgatacgatcctgttgggctccaattgcatcgcgggatccgagagtaacgggaacgtgccctacctccagcagaatacccacactctgccgcacaatcataccgatcttaattcctccacagaggagccttggagaaagcaactcagcaattccgcacagggcctccataagagtcagagtagctgtctgtcagggcccaatgaagagcagcctttgttttctaccggctcggcccaatatcaccaggccacatcgaccggcatcaagaaggctaatgaacacttaacacttccctcgaattccgttccgcagggagatgcagattcccacctcagttgccacactgcaacatccggcggacagcagggaattatgttcactaaagagtctaagccatccaagaatagatcccttgtgccagagacgtcccgccatactggcgacacatctaatggctgcgccgacgtgaagggcctgtctaatcatgtgcatcagttgatagccgacgcagttagctctcccaaccatggggatagcccaaatttgctgatcgctgacaacccccagttatcagccctgctgattggcaaagccaatggcaacgttggcacaggcacatgcgataaagtaaataacatccatccagcagtgcatactaagactgatcacagcgtggcgtcttccccgagttcagccattagcaccgcaacaccaagcccaaagagtactgagcagaggtccatcaattcggttacaagccttaattccccacacagcggtctgcatacagtgaacggggaaggcttggggaaatcacagagtagcaccaaggtcgatctccccttagcctctcaccgatcaacgtcgcagatacttccgtctatgtctgtctctatttgcccatcaagcactgaggtgctgaaggcatgtagaaaccccggaaagaacggactgtccaactcttgtattctgctcgataagtgcccccctccgaggccaccaacgagcccttaccctccactgcccaaagacaagttgaatccacctacccccagcatctatttagagaataagagagatgcatttttcccgcctttgcaccagttctgtaccaatccgaagaatcccgtgactgtgatcaggggcctcgccggtgccctaaagcttgacctaggcctgttcagtaccaaaacactggttgaagctaacaatgagcatatggtggaggtcagaacccagctgttgcaacccgccgacgagaattgggatcctacaggcacaaagaagatctggaggtgcgagagcaaccgatcacatacaactatcgccaagtacgcacagtaccaggccagctccttccaggagagcttgcggtag

SEQ ID NO: 325431 - DNA, 3213 bp, Artificial Sequence
  derived and/or modified sequence
atgaaatcctgcgccgttagccttacaacggccgctgtcgcttttggggatgaagccaaaaagatggcggaaggcaaagcatctagggaatccgaggaagaatctgtgtccttaacagtggaagaaagggaggctctggggggaatggactctcggctcttcggctttgtgcgcctgcatgaagacggggctcgaaccaagactcttctgggaaaggccgtgcgttgttacgagagcctcatactgaaggctgaggggaaggtagagtctgacttcttctgtcagctgggacacttcaatctgcttctcgaggattattcgaaggctctctccgcttatcagcgctactacagtcttcaagctgactattggaagaacgccgctttcttgtatggactcgggttggtgtacttctattacaacgcttttcattgggcaattaaggcctttcaggacgtcctgtacgtagaccctagtttttgtagggccaaggaaatccacctgcggcttggcttaatgttcaaggtgaatacagattataaaagttctttgaagcattttcagcttgccttaatcgactgtaatccttgcactctgtcaaatgctgaaattcaatttcatatagcacatctttatgaaacgcagcgaaaataccattctgcaaaggaggcctacgagcaactattgcaaactgagaatctgcccgctcaggtgaaggcaacagtgctccaacaactgggctggatgcaccacaacatggacttagttggagataaagccacaaaggaaagttatgctatccaatatctgcagaaatctcttgaggctgaccctaatagcgggcaatcttggtactttctgggcaggtgttattcaagcatagggaaggtgcaggatgccttcatttcatatcgccagagcattgacaaatctgaggcttctgcagacacttggtgctcaatcggagtcctatatcaacagcaaaaccaaccaatggacgccttacaggcttacatctgcgcggtccagctggatcatggacacgctgccgcatggatggacctaggtaccctgtacgaatcatgtaatcaacctcaagacgctatcaagtgttacctcaacgccgcacggtcaaagcgttgcagtaacacctccaccctggcggcaaggattaagttcctgcaggcacagttgtgcaacctgccgcagagttctctgcagaacaaaaccaagttactgccatctattgaggaagcttggagcctgcccatccccgcagagttgactagtaggcaaggggcaatgaacacagctcaacagcaaagcctatcactgcatatgatcacctcatctcaggtggagggattatcttccccggcaaaaaaaaagcggacctccagtccaactaagaacgggagtgacaattggaacggtgggcagagcctcagtcatcaccccgttcaacaagtgtattcactgtgcctgacccctcagaaacttcagcacctggagcagttgcgcgcaaaccgtgataacctaaaccccgctcagaaacaccagctggagcagctggaaagtcaattcgtcctaatgcagcagatgcgtcataaagaggtagctcaggtccggaccacgggtattcacaatggtgcaattacggatagttccttgcctaccaacagtgtgtcaaacaggcagcctcacggcgctctgacccgggtcagttccgtatcccagccaggtgtgcgacctgcatgcgtggaaaaacttctttcaagtggggcattctctgcaggatgcatcccatgcgggacgagcaagatcctggggtctaccgatactatcctactggggtctaactgcatagctgggagcgagagcaatgggaatgttccctacttgcagcagaacacccacaccctgccacacaatcataccgaccttaatagtagtacagaagagccgtggaggaagcagctctctaattccgcccagggattgcacaaatcacagagcagctgtctgagtgggcctaacgaggagcagccactgttctcaacggggtcagcacagtaccaccaggccaccagcactggcattaaaaaagccaatgagcaccttacactcccatctaactctgtcccccagggagatgcagacagccacctcagctgtcatacagcgacttctggtggacagcaggggatcatgttcactaaagagagcaagcctagcaagaatcgctcattagttcctgagacttcaagacataccggcgacacctccaacggatgcgctgacgtcaaggggctgtccaaccatgtccaccagttgattgctgacgcggtttcaagcccaaatcacggagattcacctaacctgctaattgcagacaacccccagttatctgctcttctcatcggaaaagccaacggcaacgtgggaacaggtacctgcgataaggtgaataacatacatccagctgtccataccaagactgaccacagtgtggcttcaagcccaagctccgcaattagtactgccaccccctctccgaagagtacagagcaacgatccatcaactcagtgacaagtctgaacagcccccattctgggcttcatacagtcaacggagaaggcctgggtaagagccagagcagtactaaggtggacttacccctggcatcacaccgaagcacttcgcaaatactgccatccatgagtgtgtccatttgtccctccagtaccgaagtactgaaggcttgccggaacccaggtaaaaacggcttaagtaattcctgcatactcctcgacaagtgtccgccacccaggccacctacgtccccctacccacctctgccaaaggacaaactcaatccgccaacccctagtatttacctggaaaacaagcgcgacgccttcttccctccccttcaccagttttgcacaaatcccaagaatccagttactgtgatcagagggctggccggagccttaaaactggacctgggactcttttccaccaaaaccctggtggaggctaacaacgaacatatggtggaagtgagaacccagttgctgcaacccgctgatgagaactgggatcccacggggaccaagaaaatctggcggtgtgagagcaatcggtcccataccaccattgccaaatatgcccagtatcaggcatcttcattccaggagtctctgcgatag

SEQ ID NO: 325432 - DNA, 3210 bp, Artificial Sequence
  derived and/or modified sequence
atgaaatcctgcgcagtgtcgctcactaccgccgctgttgccttcggtgatgaggcaaagaaaatggcggaaggaaaagcgagccgcgagagtgaagaggagtctgttagcctgacagtcgaggaaagggaggcgcttggtggcatggacagccgtctcttcgggttcgtgaggcttcatgaagatggcgccagaacgaagaccctactaggcaaggctgttcgctgctacgaatctttaatcttaaaagctgaaggaaaagtggagtctgacttcttttgccaattaggtcacttcaacctcttgttggaagattattcaaaagcattatctgcatatcagagatattacagtttacaggctgactactggaagaatgctgcgtttttatatggccttggtttggtctacttctactacaatgcatttcattgggcaattaaagcatttcaagatgtcctttatgttgaccccagcttttgtcgagccaaggaaattcatttacgacttgggctcatgttcaaagtgaacacagactacaagtctagtttaaagcattttcagttagccttgattgactgtaatccatgtactttgtccaatgctgaaattcaatttcatattgcccatttgtatgaaacccagaggaagtatcattctgcaaaggaggcatatgaacaacttttgcagacagaaaaccttcctgcacaagtaaaagcaactgtattgcaacagttaggttggatgcatcataatatggatctagtaggagacaaagccacaaaggaaagctatgctattcagtatctccaaaagtctttggaggcagatcctaattctggccaatcgtggtattttcttggaaggtgttattcaagtattgggaaagttcaggatgcctttatatcttacaggcaatctattgataaatcagaagcaagtgcagatacatggtgttcaataggtgtgttgtatcagcagcaaaatcagcctatggatgctttacaggcatatatttgtgctgtacaattggaccatgggcatgccgcagcctggatggacctaggtactctctatgaatcctgcaatcaacctcaagatgccattaaatgctacctaaatgcagctagaagcaaacgttgtagtaatacctctacgcttgctgcaagaattaaatttctacaggctcagttgtgtaaccttccacaaagtagtctacagaataaaactaaattacttcctagtattgaggaggcatggagcctaccaatccccgcagagcttacctccaggcagggtgccatgaacacagcacagcagcaatccttgtcactacacatgattacttctagccaagtagaaggcctgtccagtcctgccaagaagaaaagaacatctagtccaacaaagaatggttctgataactggaatggtggccagagtctttcacatcatccagtacagcaagtttattcgttgtgtttgacaccacagaaattacagcacttggaacaactgcgagcaaatagagataatttaaatccagcacagaagcatcagctggaacagttagaaagtcagtttgtcttaatgcagcaaatgagacacaaagaagttgctcaggtacgaactactggaattcataacggggccataactgattcatcactgcctacaaactctgtctctaatcgacaaccacatggtgctctgaccagagtatctagcgtctctcagcctggagttcgccctgcttgtgttgaaaaacttttgtccagtggagctttttctgcaggctgtattccttgtggcacatcaaaaattctaggaagtacagacactatcttgctaggcagtaattgtatagcaggaagtgaaagtaatggaaatgtgccttacctgcagcaaaatacacacactctacctcataatcatacagacctgaacagcagcacagaagagccatggagaaaacagctatctaactccgctcaggggcttcataaaagtcagagttcatgtttgtcaggacctaatgaagaacaacctctgttttccactgggtcagcccagtatcaccaggcaactagcactggtattaagaaggcgaatgaacatctcactctgcctagtaattcagtaccacagggggatgctgacagtcacctctcctgtcatactgctacctcaggtggacaacaaggcattatgtttaccaaagagagcaagccttcaaaaaatagatccttggtgcctgaaacaagcaggcatactggagacacatctaatggctgtgctgatgtcaagggactttctaatcatgttcatcagttgatagcagatgctgtttccagtcctaaccatggagattcaccaaatttattaattgcagacaatcctcagctctctgctttgttgattggaaaagccaatggcaatgtgggtactggaacctgtgacaaagtgaataatattcacccagctgttcatacaaagactgatcattctgttgcctcttcaccctcttcagccatttccacagcaacaccttctcctaaatccactgagcagagaagcataaacagtgttaccagccttaacagtcctcacagtggattacacacagtcaatggagaggggctggggaagtcacagagctctacaaaagtagacctgcctttagctagccacagatctacttctcagatcttaccatcaatgtcagtgtctatatgccccagttcaacagaagttctgaaagcatgcaggaatccaggtaaaaatggcttgtctaatagctgcattttgttagataaatgtccacctccaagaccaccaacttcaccatacccacccttgccaaaggacaagttgaatccacccacacctagtatttacttggaaaataaacgtgatgctttctttcctccattacatcaattttgtacaaatccaaaaaaccctgttacagtaatacgtggccttgctggagctcttaaattagatcttggacttttctctaccaaaactttggtagaagctaacaatgaacatatggtagaagtgaggacacagttgctgcaaccagcagatgaaaactgggatcccactggaacaaagaaaatctggcgttgtgaaagcaatagatctcatactacaattgccaaatacgcacaataccaggcttcctccttccaggaatcattgaga

SEQ ID NO: 325433 - protein, 299 aa, Artificial Sequence
  derived and/or modified sequence
MPEGSVSAMRTSPKSSWPWCCSWSCAWSSSSPPWRSPPSATGTLCRSCSLAPSGDLEVLKSQETGCRDPLQLPGLLGPCALSPMVGSPSGRVKLVGRRSVVQCSRCCIDPLIFFVFVFILFCFVFEMESCSVTQAGVQWCDDLGSLQPPPPGFSCLSLPGSWDYRHPPPHPANFCIFSRDEVSTPTQAGVKLLTASDLPTLASQSVAITGVSHHAQPNPLIFCFSSSTVRKAFDRGPRRWQHGGGLTVWVVVKALESQLQREDVDLRDGQCHLHRRLEAPAWGNLLGKEGSKRGTMKQN

SEQ ID NO: 325434 - protein, 293 aa, Artificial Sequence
  derived and/or modified sequence
LPNIQALKEALTKAQAWIADVDEIQNGDHYPCLDDLEGLVAVGRDLPVGLEELRQLELQVLCPCADAGSDSTKRSRWMEKALGLYQCDTELLGLSAQDLRDPGSVIVAFKEGEQKEKEGILQLRRTNSAKPSPLAPSLMASSPTSICVCGQVPAGVGVLQCDLCQDWFHGQCVSVPHLLTSPKPSLTSSPLLAWWEWDTKFLCPLCMRSRRPRLETILALLVALQRLPVRLPEGEALQCLTERAIGWQDRARKALASEDVTALLRQLAELRQQLQAKPRPEEASVYTSATACD

SEQ ID NO: 325435 - DNA, 882 bp, Artificial Sequence
  derived and/or modified sequence
ctacccaacattcaggcattgaaggaagccctgactaaagcccaggcctggatcgccgacgtggacgaaatacagaacggcgaccactatccttgtcttgacgacctggagggactggtggcagtgggcagagatcttcccgttggcctggaggaattaagacagctcgagttgcaagtcctatgcccctgcgcagacgccggaagcgactctacaaaacgcagccggtggatggagaaagccctgggactttaccagtgcgatacagagctgctgggtttatctgcacaagacctcagagaccctggctctgtgatcgtagccttcaaggaaggcgagcaaaaggagaaggaaggaattcttcaactcaggcgcaccaatagcgccaagccttcaccgctcgcccctagcctcatggcttccagtccaacttctatctgtgtttgcggccaggttcctgccggcgtgggggttctacagtgtgacttatgtcaagactggttccatggccagtgtgtgagcgtgcctcatctacttacttccccgaaaccaagcctgacaagctcacccctgctggcctggtgggagtgggataccaagtttctgtgcccgctgtgtatgagatctcgcaggccccgcctggaaaccatcctggccctcctcgtggctctgcaacggctgccagtgcgcttgcccgaaggtgaggccttacagtgcctcaccgaacgcgcaattggctggcaagatcgcgctcgcaaggcactagcatcggaggacgtcaccgccctgctgaggcaactggccgagctgaggcagcagctgcaggccaaacctaggcccgaggaggccagcgtatacacgtccgcaacggcgtgtgattag

SEQ ID NO: 325436 - DNA, 882 bp, Artificial Sequence
  derived and/or modified sequence
ctgcccaacatccaggccctgaaggaggccctgaccaaggcccaggcctggattgctgatgtggatgagatccagaatggagaccactacccctgcctggatgacctggagggcctggtggccgtgggccgggacctgcctgtgggcctggaggagctgcggcagctggagctgcaggtgctgtgcccctgtgctgatgctggcagtgacagcaccaagaggagccgctggatggagaaggccctgggcctgtaccagtgtgacacagagctgctgggcctgagcgcccaggacctgcgggaccccggcagcgtcatcgtggccttcaaggagggggagcagaaggagaaggagggcatcctgcagctgcggaggaccaacagcgccaagcccagccccctggcccccagcctgatggccagcagccccaccagcatctgtgtgtgtggccaggtgcctgctggggtgggcgtgctgcagtgtgacctgtgccaggactggttccacggccagtgtgtgtctgtgccccacctgctgaccagccccaagcccagcctgaccagcagccccctgctggcctggtgggagtgggacaccaagttcctgtgccccctgtgcatgaggagccggcggccccggctggagaccatcctggccctgctggtggccctgcagaggctgcctgtgcggctgcctgagggggaggccctgcagtgcctgacagagcgggccatcggctggcaggaccgggccaggaaggccctggcctctgaagatgtgacagccctgctgcggcagctggccgagctgcggcagcagctgcaggccaagcccaggcctgaggaggcctctgtgtacaccagcgccacagcctgtgactag

SEQ ID NO: 325437 - DNA, 880 bp, Artificial Sequence
  derived and/or modified sequence
ctgcctaacatccaggctctcaaagaagctctgactaaggcacaagcttggattgctgatgtggatgagatccaaaatggtgaccactacccctgtctagatgacttggagggcctggtggctgtgggccgggacctgcctgtggggctggaagagctgagacagctagagctgcaggtgctttgcccgtgtgcagacgctggctcagacagcaccaagcgtagccggtggatggagaaggcgctggggttgtaccagtgtgacacagagctgctggggctgtctgcacaggacctcagagacccaggctctgtgattgtggccttcaaggaaggggaacagaaggagaaggagggtatcctgcagctgcgtcgcaccaactcagccaagcccagtccactggcaccatccctcatggcctcttctccgacttctatctgtgtgtgtgggcaggtgccagctggggtgggagttctgcagtgtgacctgtgtcaggactggttccatgggcagtgtgtgtcagtgccccatctcctcacctctccaaagcccagtctcacttcatctccactgctagcctggtgggaatgggacacaaaattcctgtgtccactgtgtatgcgctcacgacggccacgcctagagacaatcctagccttgctggttgccctgcagaggctgcccgtgcggctgcctgagggtgaggcccttcagtgtctcacagagagggccattggctggcaagaccgtgccagaaaggctctggcctctgaagatgtgactgctctgttgcgacagctggctgagcttcgccaacagctacaggccaaacccagaccagaggaggcctcagtctacacttcagccactgcctgtgacc

SEQ ID NO: 325438 - DNA, 882 bp, Artificial Sequence
  derived and/or modified sequence
ctgcccaacatccaggccctgaaggaggccctgaccaaggcccaggcctggatcgctgacgtggacgagattcagaatggcgatcattacccctgccttgatgatctggaggggctggtggcggtgggtagagaccttcccgtaggactagaagagctgagacagctcgaactacaggtgctttgcccctgcgccgatgctggatccgactcgaccaagaggagcaggtggatggagaaggcacttggactgtaccaatgcgatacagagctgctgggactgagcgcccaggatctgcgcgacccagggagtgtgatcgtcgctttcaaagaaggggagcaaaaagagaaggaagggatcttacagctccgccgcacaaattcggcgaagccatcccccctggctcctagcctcatggcctccagtccaacatctatctgcgtgtgcggacaggtgccagctggagttggcgtcttgcagtgcgacctatgccaggactggttccacggccagtgcgtgtctgttcctcacctcttaacatcacctaagccgtcccttacgtcatccccactcttggcgtggtgggagtgggatacaaaattcctttgtcctctttgtatgaggtcaagacgtcccaggctcgagaccatcctggctctactggtcgctcttcagcgtctgccagtgagattgcccgagggcgaagcactgcagtgtctgactgagcgcgccattgggtggcaggatagagccaggaaggcactcgcctctgaagacgtgactgctctccttcggcagctcgcagaattgaggcaacagctacaagcgaaaccccggcccgaggaagctagtgtgtacacctccgcgaccgcatgcgattag

SEQ ID NO: 325439 - DNA, 882 bp, Artificial Sequence
  derived and/or modified sequence
cttcccaatatacaggctctcaaggaggcgctgaccaaggcgcaagcgtggatcgcagacgtggacgagatccagaatggggatcactacccctgtctagacgatttggagggcctagtggccgtgggaagagacttacctgtcgggcttgaggagctgaggcagctcgagctgcaggttctttgcccttgtgctgatgccggtagcgactcaacgaagcgttctagatggatggagaaggctctggggctctatcagtgtgataccgagctgctgggcttatctgcccaggatctgagagatcccggttcagttatcgttgcattcaaggaaggggagcagaaggaaaaagagggaattctgcagcttcggaggaccaacagcgctaagcctagtcctctagccccttctctgatggcctcatctcccacgagcatatgtgtctgcggccaggtgcccgctggtgtgggggtgctgcagtgcgacctgtgccaggattggtttcatggacagtgcgtttccgtaccacacctgctgactagccccaagcctagcctgaccagtagccccttgctggcatggtgggagtgggacacgaaatttctttgtcctctgtgcatgcgatcaagacgccctcgactagaaacgatcctcgcactcctcgtcgcattacaacggttgcccgtccgtttgcccgaaggcgaagctcttcaatgcttgacagagcgggctatcggatggcaagatagggctcgaaaggccctcgcaagcgaggacgtcactgctctgcttcgacaactggcagaactgcgacaacagctccaggcgaagcctaggccagaggaggcctctgtgtatacaagcgccacggcgtgtgactag

SEQ ID NO: 325440 - DNA, 882 bp, Artificial Sequence
  derived and/or modified sequence
ctgcccaacatccaggccctgaaggaggccctgaccaaggcccaggcctggatcgccgacgtggacgagatccagaacggcgaccactacccctgcctggacgacctggagggcctggtggccgtgggcagagacctgcccgtgggcctggaggagctgagacagctggagctgcaggtgctgtgcccctgcgccgacgccggcagcgacagcaccaagagaagcagatggatggagaaggccctgggcctgtaccagtgcgacaccgagctgctgggcctgagcgcccaggacctgagagaccccggcagcgtgatcgtggccttcaaggagggcgagcagaaggagaaggagggcatcctgcagctgagaagaaccaacagcgccaagcccagccccctggcccccagcctgatggccagcagccccaccagcatctgcgtgtgcggccaggtgcccgccggcgtgggcgtgctgcagtgcgacctgtgccaggactggttccacggccagtgcgtgagcgtgccccacctgctgaccagccccaagcccagcctgaccagcagccccctgctggcctggtgggagtgggacaccaagttcctgtgccccctgtgcatgagaagcagaagacccagactggagaccatcctggccctgctggtggccctgcagagactgcccgtgagactgcccgagggcgaggccctgcagtgcctgaccgagagagccatcggctggcaggacagagccagaaaggccctggccagcgaggacgtgaccgccctgctgagacagctggccgagctgagacagcagctgcaggccaagcccagacccgaggaggccagcgtgtacaccagcgccaccgcctgcgactag

SEQ ID NO: 325441 - protein, 2555 aa, Artificial Sequence
  derived and/or modified sequence
MTAITHGSPVGGNDSQGQVLDGQSQHLFQQNQTSSPDSSNENSVATPPPEEQGQGDAPPQHEDEEPAFPHTELANLDDMINRPRWVVPVLPKGELEVLLEAAIDLSVKGLDVKSEACQRFFRDGLTISFTKILMDEAVSGWKFEIHRCIINNTHRLVELCVAKLSQDWFPLLELLAMALNPHCKFHIYNGTRPCELISSNAQLPEDELFARSSDPRSPKGWLVDLINKFGTLNGFQILHDRFFNGSALNIQIIAALIKPFGQCYEFLSQHTLKKYFIPVIEIVPHLLENLTDEELKKEAKNEAKNDALSMIIKSLKNLASRISGQDETIKNLEIFRLKMILRLLQISSFNGKMNALNEINKVISSVSYYTHRHSNPEEEEWLTAERMAEWIQQNNILSIVLQDSLHQPQYVEKLEKILRFVIKEKALTLQDLDNIWAAQAGKHEAIVKNVHDLLAKLAWDFSPGQLDHLFDCFKASWTNASKKQREKLLELIRRLAEDDKDGVMAHKVLNLLWNLAQSDDVPVDIMDLALSAHIKILDYSCSQDRDAQKIQWIDHFIEELRTNDKWVIPALKQIREICSLFGEASQNLSQTQRSPHIFYRHDLINQLQQNHALVTLVAENLATYMNSIRLYAGDHEDYDPQTVRLGSRYSHVQEVQERLNFLRFLLKDGQLWLCAPQAKQIWKCLAENAVYLCDREACFKWYSKLMGDEPDLDPDINKDFFESNVLQLDPSLLTENGMKCFERFFKAVNCRERKLIAKRRSYMMDDLELIGLDYLWRVVIQSSDEIANRAIDLLKEIYTNLGPRLKANQVVIHEDFIQSCFDRLKASYDTLCVFDGDKNSINCARQEAIRMVRVLTVIKEYINECDSDYHKERMILPMSRAFRGKHLSLIVRFPNQGRQVDELDIWSHTNDTIGSVRRCIVNRIKANVAHKKIELFVGGELIDSEDDRKLIGQLNLKDKSLITAKLTQINFNMPSSPDSSSDSSTASPGNHRNHYNDGPNLEVESCLPGVIMSVHPRYISFLWQVADLGSNLNMPPLRDGARVLMKLMPPDRTAVEKLRAVCLDHAKLGEGKLSPPLDSLFFGPSASQVLYLTEVVYALLMPAGVPLTDGSSDFQVHFLKSGGLPLVLSMLIRNNFLPNTDMETRRGAYLNALKIAKLLLTAIGYGHVRAVAEACQPVVDGTDPITQINQVTHDQAVVLQSALQSIPNPSSECVLRNESILLAQEISNEASRYMPDICVIRAIQKIIWASACGALGLVFSPNEEITKIYQMTTNGSNKLEVEDEQVCCEALEVMTLCFALLPTALDALSKEKAWQTFIIDLLLHCPSKTVRQLAQEQFFLMCTRCCMGHRPLLFFITLLFTILGSTAREKGKYSGDYFTLLRHLLNYAYNGNINIPNAEVLLVSEIDWLKRIRDNVKNTGETGVEEPILEGHLGVTKELLAFQTSEKKYHFGCEKGGANLIKELIDDFIFPASKVYLQYLRSGELPAEQAIPVCSSPVTINAGFELLVALAIGCVRNLKQIVDCLTEMYYMGTAITTCEALTEWEYLPPVGPRPPKGFVGLKNAGATCYMNSVIQQLYMIPSIRNSILAIEGTGSDLHDDMFGDEKQDSESNVDPRDDVFGYPHQFEDKPALSKTEDRKEYNIGVLRHLQVIFGHLAASQLQYYVPRGFWKQFRLWGEPVNLREQHDALEFFNSLVDSLDEALKALGHPAILSKVLGGSFADQKICQGCPHRYECEESFTTLNVDIRNHQNLLDSLEQYIKGDLLEGANAYHCEKCDKKVDTVKRLLIKKLPRVLAIQLKRFDYDWERECAIKFNDYFEFPRELDMGPYTVAGVANLERDNVNSENELIEQKEQSDNETAGGTKYRLVGVLVHSGQASGGHYYSYIIQRNGKDDQTDHWYKFDDGDVTECKMDDDEEMKNQCFGGEYMGEVFDHMMKRMSYRRQKRWWNAYILFYEQMDMIDEDDEMIRYISELTIARPHQIIMSPAIERSVRKQNVKFMHNRLQYSLEYFQFVKKLLTCNGVYLNPAPGQDYLLPEAEEITMISIQLAARFLFTTGFHTKKIVRGPASDWYDALCVLLRHSKNVRFWFTHNVLFNVSNRFSEYLLECPSAEVRGAFAKLIVFIAHFSLQDGSCPSPFASPGPSSQACDNLSLSDHLLRATLNLLRREVSEHGHHLQQYFNLFVMYANLGVAEKTQLLKLNVPATFMLVSLDEGPGPPIKYQYAELGKLYSVVSQLIRCCNVSSTMQSSINGNPPLPNPFGDLNLSQPIMPIQQNVLDILFVRTSYVKKIIEDCSNSEDTIKLLRFCSWENPQFSSTVLSELLWQVAYSYTYELRPYLDLLFQILLIEDSWQTHRIHNALKGIPDDRDGLFDTIQRSKNHYQKRAYQCIKCMVALFSSCPVAYQILQGNGDLKRKWTWAVEWLGDELERRPYTGNPQYSYNNWSPPVQSNETANGYFLERSHSARMTLAKACELCPEEEPDDQDAPDEHEPSPSEDAPLYPHSPASQYQQNNHVHGQPYTGPAAHHLNNPQKTGQRTQENYEGNEEVSSPQMKDQ

SEQ ID NO: 325442 - DNA, 375 bp, Artificial Sequence
  derived and/or modified sequence
atgaccctgaacgagcacgccgccttcaagcacctgttcaacaaggcccacctggccccccccctgatccacctgaccctgagcggccacagcacctgcttcagagagcacagagtgggcggcaaggtgaccgaccagcaggaccccaaggccgaggagttcttcctggtgcagaacaagatgaagagcctgccctgcctgctgctgagcacccagaccagacagcccagcgacttcagcatcttcagcccccccttcccccccgtgtacagcaccaagccccccctgagcagctggcccgtgctgaacgagctgctgggcaccccccccagaagaggcggcggcagagccgagggcctgctgaccagccagtag

SEQ ID NO: 325443 - DNA, 7668 bp, Artificial Sequence
  derived and/or modified sequence
atgaccgccatcacccacggcagccccgtgggcggcaacgacagccagggccaggtgctggacggccagagccagcacctgttccagcagaaccagaccagcagccccgacagcagcaacgagaacagcgtggccacccccccccccgaggagcagggccagggcgacgcccccccccagcacgaggacgaggagcccgccttcccccacaccgagctggccaacctggacgacatgatcaacagacccagatgggtggtgcccgtgctgcccaagggcgagctggaggtgctgctggaggccgccatcgacctgagcgtgaagggcctggacgtgaagagcgaggcctgccagagattcttcagagacggcctgaccatcagcttcaccaagatcctgatggacgaggccgtgagcggctggaagttcgagatccacagatgcatcatcaacaacacccacagactggtggagctgtgcgtggccaagctgagccaggactggttccccctgctggagctgctggccatggccctgaacccccactgcaagttccacatctacaacggcaccagaccctgcgagctgatcagcagcaacgcccagctgcccgaggacgagctgttcgccagaagcagcgaccccagaagccccaagggctggctggtggacctgatcaacaagttcggcaccctgaacggcttccagatcctgcacgacagattcttcaacggcagcgccctgaacatccagatcatcgccgccctgatcaagcccttcggccagtgctacgagttcctgagccagcacaccctgaagaagtacttcatccccgtgatcgagatcgtgccccacctgctggagaacctgaccgacgaggagctgaagaaggaggccaagaacgaggccaagaacgacgccctgagcatgatcatcaagagcctgaagaacctggccagcagaatcagcggccaggacgagaccatcaagaacctggagatcttcagactgaagatgatcctgagactgctgcagatcagcagcttcaacggcaagatgaacgccctgaacgagatcaacaaggtgatcagcagcgtgagctactacacccacagacacagcaaccccgaggaggaggagtggctgaccgccgagagaatggccgagtggatccagcagaacaacatcctgagcatcgtgctgcaggacagcctgcaccagccccagtacgtggagaagctggagaagatcctgagattcgtgatcaaggagaaggccctgaccctgcaggacctggacaacatctgggccgcccaggccggcaagcacgaggccatcgtgaagaacgtgcacgacctgctggccaagctggcctgggacttcagccccggccagctggaccacctgttcgactgcttcaaggccagctggaccaacgccagcaagaagcagagagagaagctgctggagctgatcagaagactggccgaggacgacaaggacggcgtgatggcccacaaggtgctgaacctgctgtggaacctggcccagagcgacgacgtgcccgtggacatcatggacctggccctgagcgcccacatcaagatcctggactacagctgcagccaggacagagacgcccagaagatccagtggatcgaccacttcatcgaggagctgagaaccaacgacaagtgggtgatccccgccctgaagcagatcagagagatctgcagcctgttcggcgaggccagccagaacctgagccagacccagagaagcccccacatcttctacagacacgacctgatcaaccagctgcagcagaaccacgccctggtgaccctggtggccgagaacctggccacctacatgaacagcatcagactgtacgccggcgaccacgaggactacgacccccagaccgtgagactgggcagcagatacagccacgtgcaggaggtgcaggagagactgaacttcctgagattcctgctgaaggacggccagctgtggctgtgcgccccccaggccaagcagatctggaagtgcctggccgagaacgccgtgtacctgtgcgacagagaggcctgcttcaagtggtacagcaagctgatgggcgacgagcccgacctggaccccgacatcaacaaggacttcttcgagagcaacgtgctgcagctggaccccagcctgctgaccgagaacggcatgaagtgcttcgagagattcttcaaggccgtgaactgcagagagagaaagctgatcgccaagagaagaagctacatgatggacgacctggagctgatcggcctggactacctgtggagagtggtgatccagagcagcgacgagatcgccaacagagccatcgacctgctgaaggagatctacaccaacctgggccccagactgaaggccaaccaggtggtgatccacgaggacttcatccagagctgcttcgacagactgaaggccagctacgacaccctgtgcgtgttcgacggcgacaagaacagcatcaactgcgccagacaggaggccatcagaatggtgagagtgctgaccgtgatcaaggagtacatcaacgagtgcgacagcgactaccacaaggagagaatgatcctgcccatgagcagagccttcagaggcaagcacctgagcctgatcgtgagattccccaaccagggcagacaggtggacgagctggacatctggagccacaccaacgacaccatcggcagcgtgagaagatgcatcgtgaacagaatcaaggccaacgtggcccacaagaagatcgagctgttcgtgggcggcgagctgatcgacagcgaggacgacagaaagctgatcggccagctgaacctgaaggacaagagcctgatcaccgccaagctgacccagatcaacttcaacatgcccagcagccccgacagcagcagcgacagcagcaccgccagccccggcaaccacagaaaccactacaacgacggccccaacctggaggtggagagctgcctgcccggcgtgatcatgagcgtgcaccccagatacatcagcttcctgtggcaggtggccgacctgggcagcaacctgaacatgccccccctgagagacggcgccagagtgctgatgaagctgatgccccccgacagaaccgccgtggagaagctgagagccgtgtgcctggaccacgccaagctgggcgagggcaagctgagcccccccctggacagcctgttcttcggccccagcgccagccaggtgctgtacctgaccgaggtggtgtacgccctgctgatgcccgccggcgtgcccctgaccgacggcagcagcgacttccaggtgcacttcctgaagagcggcggcctgcccctggtgctgagcatgctgatcagaaacaacttcctgcccaacaccgacatggagaccagaagaggcgcctacctgaacgccctgaagatcgccaagctgctgctgaccgccatcggctacggccacgtgagagccgtggccgaggcctgccagcccgtggtggacggcaccgaccccatcacccagatcaaccaggtgacccacgaccaggccgtggtgctgcagagcgccctgcagagcatccccaaccccagcagcgagtgcgtgctgagaaacgagagcatcctgctggcccaggagatcagcaacgaggccagcagatacatgcccgacatctgcgtgatcagagccatccagaagatcatctgggccagcgcctgcggcgccctgggcctggtgttcagccccaacgaggagatcaccaagatctaccagatgaccaccaacggcagcaacaagctggaggtggaggacgagcaggtgtgctgcgaggccctggaggtgatgaccctgtgcttcgccctgctgcccaccgccctggacgccctgagcaaggagaaggcctggcagaccttcatcatcgacctgctgctgcactgccccagcaagaccgtgagacagctggcccaggagcagttcttcctgatgtgcaccagatgctgcatgggccacagacccctgctgttcttcatcaccctgctgttcaccatcctgggcagcaccgccagagagaagggcaagtacagcggcgactacttcaccctgctgagacacctgctgaactacgcctacaacggcaacatcaacatccccaacgccgaggtgctgctggtgagcgagatcgactggctgaagagaatcagagacaacgtgaagaacaccggcgagaccggcgtggaggagcccatcctggagggccacctgggcgtgaccaaggagctgctggccttccagaccagcgagaagaagtaccacttcggctgcgagaagggcggcgccaacctgatcaaggagctgatcgacgacttcatcttccccgccagcaaggtgtacctgcagtacctgagaagcggcgagctgcccgccgagcaggccatccccgtgtgcagcagccccgtgaccatcaacgccggcttcgagctgctggtggccctggccatcggctgcgtgagaaacctgaagcagatcgtggactgcctgaccgagatgtactacatgggcaccgccatcaccacctgcgaggccctgaccgagtgggagtacctgccccccgtgggccccagaccccccaagggcttcgtgggcctgaagaacgccggcgccacctgctacatgaacagcgtgatccagcagctgtacatgatccccagcatcagaaacagcatcctggccatcgagggcaccggcagcgacctgcacgacgacatgttcggcgacgagaagcaggacagcgagagcaacgtggaccccagagacgacgtgttcggctacccccaccagttcgaggacaagcccgccctgagcaagaccgaggacagaaaggagtacaacatcggcgtgctgagacacctgcaggtgatcttcggccacctggccgccagccagctgcagtactacgtgcccagaggcttctggaagcagttcagactgtggggcgagcccgtgaacctgagagagcagcacgacgccctggagttcttcaacagcctggtggacagcctggacgaggccctgaaggccctgggccaccccgccatcctgagcaaggtgctgggcggcagcttcgccgaccagaagatctgccagggctgcccccacagatacgagtgcgaggagagcttcaccaccctgaacgtggacatcagaaaccaccagaacctgctggacagcctggagcagtacatcaagggcgacctgctggagggcgccaacgcctaccactgcgagaagtgcgacaagaaggtggacaccgtgaagagactgctgatcaagaagctgcccagagtgctggccatccagctgaagagattcgactacgactgggagagagagtgcgccatcaagttcaacgactacttcgagttccccagagagctggacatgggcccctacaccgtggccggcgtggccaacctggagagagacaacgtgaacagcgagaacgagctgatcgagcagaaggagcagagcgacaacgagaccgccggcggcaccaagtacagactggtgggcgtgctggtgcacagcggccaggccagcggcggccactactacagctacatcatccagagaaacggcaaggacgaccagaccgaccactggtacaagttcgacgacggcgacgtgaccgagtgcaagatggacgacgacgaggagatgaagaaccagtgcttcggcggcgagtacatgggcgaggtgttcgaccacatgatgaagagaatgagctacagaagacagaagagatggtggaacgcctacatcctgttctacgagcagatggacatgatcgacgaggacgacgagatgatcagatacatcagcgagctgaccatcgccagaccccaccagatcatcatgagccccgccatcgagagaagcgtgagaaagcagaacgtgaagttcatgcacaacagactgcagtacagcctggagtacttccagttcgtgaagaagctgctgacctgcaacggcgtgtacctgaaccccgcccccggccaggactacctgctgcccgaggccgaggagatcaccatgatcagcatccagctggccgccagattcctgttcaccaccggcttccacaccaagaagatcgtgagaggccccgccagcgactggtacgacgccctgtgcgtgctgctgagacacagcaagaacgtgagattctggttcacccacaacgtgctgttcaacgtgagcaacagattcagcgagtacctgctggagtgccccagcgccgaggtgagaggcgccttcgccaagctgatcgtgttcatcgcccacttcagcctgcaggacggcagctgccccagccccttcgccagccccggccccagcagccaggcctgcgacaacctgagcctgagcgaccacctgctgagagccaccctgaacctgctgagaagagaggtgagcgagcacggccaccacctgcagcagtacttcaacctgttcgtgatgtacgccaacctgggcgtggccgagaagacccagctgctgaagctgaacgtgcccgccaccttcatgctggtgagcctggacgagggccccggcccccccatcaagtaccagtacgccgagctgggcaagctgtacagcgtggtgagccagctgatcagatgctgcaacgtgagcagcaccatgcagagcagcatcaacggcaacccccccctgcccaaccccttcggcgacctgaacctgagccagcccatcatgcccatccagcagaacgtgctggacatcctgttcgtgagaaccagctacgtgaagaagatcatcgaggactgcagcaacagcgaggacaccatcaagctgctgagattctgcagctgggagaacccccagttcagcagcaccgtgctgagcgagctgctgtggcaggtggcctacagctacacctacgagctgagaccctacctggacctgctgttccagatcctgctgatcgaggacagctggcagacccacagaatccacaacgccctgaagggcatccccgacgacagagacggcctgttcgacaccatccagagaagcaagaaccactaccagaagagagcctaccagtgcatcaagtgcatggtggccctgttcagcagctgccccgtggcctaccagatcctgcagggcaacggcgacctgaagagaaagtggacctgggccgtggagtggctgggcgacgagctggagagaagaccctacaccggcaacccccagtacagctacaacaactggagcccccccgtgcagagcaacgagaccgccaacggctacttcctggagagaagccacagcgccagaatgaccctggccaaggcctgcgagctgtgccccgaggaggagcccgacgaccaggacgcccccgacgagcacgagcccagccccagcgaggacgcccccctgtacccccacagccccgccagccagtaccagcagaacaaccacgtgcacggccagccctacaccggccccgccgcccaccacctgaacaacccccagaagaccggccagagaacccaggagaactacgagggcaacgaggaggtgagcagcccccagatgaaggaccagtag

SEQ ID NO: 325444 - DNA, 714 bp, Artificial Sequence
  derived and/or modified sequence
tgactgctgaagaccgccgtgacccagagaatccccagcaactacttcgccttcgccctgggcagaatcctgagcagccacctgctgagcagcgccaacttcagcggcagaatccacaacgccctgaagggcatccccgacgacagagacggcctgttcgacaccatccagagaagcaagaaccactaccagaagagagcctaccagtgcatcaagtgcatggtggccctgttcagcagctgccccgtggcctaccagatcctgcagggcaacggcgacctgaagagaaagtggacctgggccgtggagtggctgggcgacgagctggagagaagaccctacaccggcaacccccagtacagctacaacaactggagcccccccgtgcagagcaacgagaccgccaacggctacttcctggagagaagccacagcgccagaatgaccctggccaaggcctgcgagctgtgccccgaggaggagcccgacgaccaggacgcccccgacgagcacgagcccagccccagcgaggacgcccccctgtacccccacagccccgccagccagtaccagcagaacaaccacgtgcacggccagccctacaccggccccgccgcccaccacctgaacaacccccagaagaccggccagagaacccaggagaactacgagggcaacgaggaggtgagcagcccccagatgaaggaccagtag

SEQ ID NO: 325445 - DNA, 7668 bp, Artificial Sequence
  derived and/or modified sequence
atgacagccatcactcatgggagccccgtagggggcaatgattcgcagggtcaggttctggatggccagagtcagcatctattccagcagaatcagacttcttcacctgattctagcaatgagaactccgtggctactccacctcccgaggagcaaggccagggagatgctccacctcagcacgaggatgaagagcccgctttcccacacacggagttggccaacctggacgatatgatcaaccgaccgagatgggtcgttccagtgctcccaaaaggcgagttggaagtcctactcgaagccgccattgatctatcagtcaagggcctcgacgtgaagagtgaggcctgtcagaggtttttcagggacggactgaccattagctttactaagatcctgatggacgaagccgtgagcgggtggaagttcgagattcataggtgcatcatcaacaatacccatagactcgtggagctgtgtgtcgcgaagttgagccaggactggttcccactgctggaacttctggccatggccctcaacccacattgcaaattccacatctataatggtacaagaccctgcgagctgatctcttccaacgcacaactgcccgaagatgaactgtttgccaggagttccgacccccgctcccctaaggggtggctggttgatttgatcaacaagtttggaacactgaatggtttccagattctgcatgacagatttttcaacgggtcagctctgaatattcagatcattgccgcacttatcaagcccttcggacaatgttatgagttcctaagccagcacaccttgaagaagtattttatccctgtcatcgaaatcgtgccacatcttctagaaaacctgactgacgaggaactgaagaaggaggccaaaaatgaagctaagaatgatgcactgagtatgatcattaaatccctgaagaacctggcctccaggataagtggccaagacgagaccattaaaaatctggaaattttccggcttaagatgattttgcggttactccagattagtagctttaatggcaagatgaatgcattgaacgagataaacaaagtgatatcgagcgtgtcttactatactcaccgtcattctaatcctgaggaggaagagtggctgaccgccgaacggatggcagagtggattcagcagaataatatcttaagtatcgtcctgcaggactctctgcatcaacctcagtatgtcgaaaagttggagaagatactgcgttttgttattaaggaaaaagctcttacgcttcaggacttagacaacatttgggctgcacaggcggggaagcacgaggcaatcgtgaaaaatgtacacgacttgctggcaaagctggcctgggatttcagccccggtcagctggaccacctcttcgattgttttaaggctagttggacaaacgcttctaagaaacaaagggagaaattacttgaactcattcgccgcttggccgaggatgacaaagatggagttatggctcataaggtattaaacctgctgtggaatctggcccaaagcgatgacgtacccgtagacatcatggacctggccttatcagctcacatcaagatcttggactattcttgttcccaggacagagacgcccaaaaaattcaatggatagaccactttatcgaggagctacggaccaacgacaagtgggtgattcccgctctgaaacaaatccgcgaaatttgttctctctttggcgaagcgtcccaaaatctgtctcagactcagagatcgccacatattttctacaggcatgatcttatcaatcagctgcaacagaatcacgcactcgttacactcgtagcagagaatctggcgacctatatgaactcgattcgactgtacgctggcgatcatgaagactatgacccacaaactgtgagattgggctccagatactctcacgtgcaggaggtgcaagaacggcttaacttccttcgatttttattgaaggacggacagctgtggctctgcgccccacaggccaagcaaatctggaagtgtctggcagaaaacgcggtttatctgtgtgatcgggaagcgtgcttcaaatggtactcaaaactcatgggtgacgaaccagacctcgacccagatatcaacaaggacttttttgagagcaatgtcctccaactggaccccagcctgttgactgagaacgggatgaaatgcttcgagcggttcttcaaagccgtaaactgcagggagaggaagcttatcgccaagcggcggagctatatgatggacgatctagaactgattgggctcgactatctctggcgagtggtgattcagagttcagatgaaatcgccaacagggccatagacttgctgaaagagatctatacaaatcttggcccaagacttaaagccaaccaggttgtcattcatgaggacttcatccagagttgttttgacaggcttaaagctagctatgataccctgtgtgtctttgatggtgataaaaacagcataaattgcgcgcgacaggaagcaatccgaatggtaagagtgctgacagtgatcaaagagtatattaacgagtgcgactctgattaccacaaagagaggatgatactgcccatgtccagagcatttagaggcaaacatctctccctgatcgttaggtttcccaaccaggggagacaggtggatgagctcgacatttggtctcacacaaatgacaccataggctctgtgcgtcggtgcattgtgaatcgaattaaggccaatgtcgcgcataagaagattgagctatttgtagggggagaactaattgactccgaggacgataggaaactgattgggcagctgaacctcaaagataaaagcttgatcactgctaaactgactcagatcaacttcaatatgccgagttcccctgattcctcctcggactctagcacagcttctccagggaatcataggaaccactacaatgatggtcccaatctcgaggtcgaaagctgtctccctggcgtcatcatgagcgtgcacccgagatatatttcatttctctggcaggtggctgacctgggctctaatctgaatatgcctcctcttcgggacggagcaagggtcttaatgaagctcatgccgccagatcggaccgccgttgaaaaactgcgagcagtgtgtctggatcacgctaaactgggggaggggaagctttcccccccacttgatagcctgttcttcgggccttctgcctcccaggtgctgtaccttacggaggtcgtgtatgccttgctgatgccagccggtgtaccactaactgatggcagctctgatttccaagtgcacttcctaaaatcgggcggcctccccctcgtcctgtccatgcttatacgtaataatttcttaccaaacaccgatatggagactaggagaggggcttatctcaacgcattgaaaatagccaaactgttgctgacggccattggctatggtcatgtccgggccgtggccgaagcctgtcaacccgtggtggacggcacagaccctataacgcagattaaccaggtgacacatgatcaagccgtggtgctacagtctgccctgcagagtatccccaacccctcatctgaatgcgttctcagaaacgagagcattctactggcccaggagatcagcaatgaggcctctcgatacatgccggatatctgtgtaattcgagcaattcagaagatcatctgggcctccgcttgcggagcccttggtctggtcttctcacctaatgaggagattaccaagatttaccaaatgacaaccaatgggtcaaacaagctggaggtggaggatgagcaggtttgctgcgaagcactagaagtcatgaccttatgcttcgcactgctgcccacggcactggacgccttgtccaaagaaaaggcgtggcaaacatttataatagatctcctgctgcattgcccttctaagaccgtgaggcagttagcacaggagcagttttttctgatgtgtaccagatgctgtatggggcaccgtcctcttctgttttttataacactgcttttcaccatccttggatccaccgctagagagaagggaaaatattcgggcgactactttactctcctgcggcacctcttaaattatgcatacaatggcaacatcaatattccaaatgcagaggtgctcctggtgtctgagatagattggcttaaacgcattagagataacgttaaaaatacaggtgagacaggcgtggaagaacctatcctagagggtcaccttggggttaccaaggagttgctcgccttccaaacctctgagaaaaagtatcacttcggttgcgagaaagggggagccaatctgatcaaggaactgatcgacgattttatcttccccgcgagcaaggtgtatctccagtaccttagaagcggggagcttcccgccgagcaggctatccctgtgtgcagcagtccagtgaccatcaacgctggcttcgagctgctcgtggccttagccatcggctgcgtgcgcaatctgaagcaaattgtcgactgcctgaccgagatgtattacatggggaccgcgatcaccacttgcgaggctctgactgaatgggagtacttacctcccgtcggtccaagaccacctaaggggtttgtgggactgaaaaacgctggtgctacctgttatatgaacagtgttatccagcaattatatatgattccctctatacggaatagtatactggcaatagaagggaccggatctgatctgcatgacgatatgtttggcgatgaaaaacaggattctgagagcaatgtggatccgagggatgacgtcttcgggtatccgcaccaatttgaagataagcccgcgctcagcaaaactgaagatagaaaggagtacaacatcggcgtacttagacatctccaggttatttttggacacctcgcggcctcccaactgcaatactacgtgccacggggcttttggaaacagttccgcttatggggcgagccagtaaacctgagggaacaacatgacgcactcgagttttttaatagcctggtagactccctggacgaggccctcaaagcattgggtcacccagcaatactatcaaaggtgcttggggggtcctttgccgatcagaaaatctgccaagggtgcccgcacagatatgaatgcgaggaatcattcactacactgaatgtcgacatccgaaatcatcagaatttactggatagcctggaacagtatataaagggtgatctcctcgaaggggctaacgcatatcactgtgaaaaatgcgataagaaagtcgataccgtcaagaggttgttgatcaagaagttgccacgcgttctggccatacaactcaagaggtttgactacgactgggagagggagtgtgccattaaatttaacgactattttgaattccctcgggaacttgatatgggcccctatactgtggcgggcgtagccaacctggagcgcgataatgtgaactccgaaaacgagctcatcgaacagaaagaacaatctgacaacgagaccgctggaggaacaaagtaccggctcgtcggcgtgctggtccattccggacaggcatcagggggccactattatagttatattatccagcggaacggcaaggatgatcagacagaccattggtataagtttgatgatggggacgtcacagaatgtaagatggacgacgacgaagagatgaaaaaccagtgttttggcggggagtacatgggcgaagtctttgatcacatgatgaagaggatgtcttaccgtaggcagaagaggtggtggaatgcctatatattgttctatgagcagatggacatgattgatgaggacgatgagatgatcaggtacatctctgaattgaccatcgcccgcccgcaccaaattataatgtcccccgctatagagcggtcagtgcgaaagcagaatgtcaaatttatgcacaacagattgcaatatagcctggagtacttccaatttgtgaagaaactgctgacgtgtaatggcgtttacctgaacccagcccctggacaggattatcttctgcccgaggccgaggaaatcacaatgatatccattcaactggcagcccgtttcctatttaccacagggttccacacgaagaaaatcgtgcgtggtcctgcctcggactggtacgacgccctatgcgtgctgttacgccattccaaaaatgtgcggttttggtttacacacaatgtgctgttcaatgtgagcaatagattctccgaatatcttctggaatgtccttccgcagaggtacgcggtgcctttgctaagctgatcgtattcattgcgcatttctcactgcaggacggatcttgcccatctccattcgcgagtcccggcccctcctcacaagcctgtgataatctttccctaagtgatcatctgctcagggccacattgaatctccttagacgggaggtatcagagcatggccatcacctccagcagtacttcaacctgttcgtcatgtatgctaatcttggggtcgctgaaaagactcagttgttaaaactcaatgtgccagccacgttcatgctggtttctcttgatgaaggtccaggccctcccatcaaataccagtatgcagagctcgggaagctgtatagtgtggtgagccagctgattcggtgctgtaatgttagcagcacaatgcagtctagcatcaatggaaacccaccattaccgaacccctttggcgacctcaacctgtcccagcctataatgcccatacagcagaatgttttggacatcctattcgtgcgcaccagctatgtaaagaagataatcgaagactgttcgaactcggaggatacgatcaagctcctccgcttctgcagctgggagaatcctcaatttagcagcacagttctgagtgagctgttatggcaagtggcttatagttacacttacgagctgagaccgtatctggatttgctatttcagattttgttgatcgaagactcttggcaaacgcataggatacacaatgccctgaagggcattccagatgatagagacgggttgtttgatacaatacagcggtctaagaatcattatcaaaagagggcgtaccaatgtatcaaatgtatggtcgccctgtttagctcttgtcccgtggcctatcaaattctgcaggggaacggagacctcaagcgaaagtggacgtgggccgtggagtggctcggtgacgagctggagaggcgcccctatactggcaatccacagtacagctataacaactggagccctccagtacagtccaacgaaacagctaatgggtattttttggagcggagtcattccgctagaatgaccttagctaaagcgtgtgaactgtgccctgaagaggagccagacgatcaagatgcacccgatgaacacgaaccctctccgtcagaggacgcccccctgtatcctcattctccggcctcacagtatcagcaaaacaaccacgtacacggacagccatacacaggacctgccgctcaccatttgaataatccacagaagacaggccagagaactcaggaaaactacgaagggaatgaagaagtgtcaagcccacaaatgaaggatcagtag

SEQ ID NO: 325446 - DNA, 714 bp, Artificial Sequence
  derived and/or modified sequence
taactgcttaaaaccgctgttactcaacgaatccctagcaactacttcgccttcgcgctggggaggatcctctcaagccacctcttgagcagtgccaacttcagcggcaggatacataatgcgctgaaaggcattcccgatgaccgggatggactgttcgacacaatccagcggtcaaagaaccactaccagaagagagcatatcagtgcatcaaatgtatggttgccctcttcagtagctgtcctgtggcctaccagattttgcaggggaatggagacctgaagcggaaatggacatgggccgtggagtggctcggtgatgaactcgaaaggaggccctatacagggaacccgcagtatagctataacaattggagtccccccgtgcagtcaaacgagaccgccaacggctatttcctcgaacgaagccactcggccaggatgacactcgccaaagcttgtgagctatgtcctgaagaggaaccagatgatcaggacgctccggacgagcacgagccctctcccagtgaggatgctccactctacccccactcaccagcttcacagtaccagcagaacaaccacgtacacggccagccctacacagggcctgctgcccatcatttgaataacccgcagaagactgggcagcggactcaggagaactatgagggaaacgaggaggtgtcttctcctcagatgaaggatcagtag

SEQ ID NO: 325447 - DNA, 7668 bp, Artificial Sequence
  derived and/or modified sequence
atgacagccatcacccacggcagccctgtgggcggcaatgacagccagggccaggtgctggatggccagagccagcacctgttccagcagaaccagaccagcagcccagacagcagcaatgaaaattctgtggccaccccacctcctgaggagcagggccagggagatgccccaccccagcatgaagatgaggagcccgccttcccccacacagagctggccaacctggatgacatgatcaaccggccccgctgggtggtgcctgtgctgcccaagggggagctggaggtgctgctggaggccgccatcgacctgtctgtgaagggcctggatgtgaagtctgaggcctgccagcgcttcttcagagatggcctgaccatctccttcaccaagatcctgatggatgaagctgtgtctggctggaagtttgagatccaccgctgcatcatcaacaacacccaccggctggtggagctgtgtgtggccaagctgagccaggactggttccccctgctggagctgctggccatggccctgaacccccactgcaagttccacatctacaacggcacccggccctgtgagctgatcagcagcaatgcccagctgcctgaagatgagctgtttgcccggagcagtgaccccaggagccccaagggctggctggtggacctgatcaacaagtttggcaccctgaatggcttccagatcctgcatgaccgcttcttcaacggcagcgccctgaacatccagatcatcgccgccctgatcaagcccttcggccagtgctatgagttcctgagccagcacaccctgaagaagtacttcatccctgtgattgagatcgtgccccacctgctggagaacctgacagatgaggagctgaagaaggaggccaagaatgaggccaagaatgatgccctgtccatgatcatcaagagcctgaagaacctggccagccgcatcagcggccaggatgagaccatcaagaacctggagatcttccggctgaagatgatcctgcggctgctgcagatcagcagcttcaacgggaagatgaatgccctgaatgagatcaacaaggtgatcagctctgtgtcctactacacccaccgccacagcaaccctgaggaggaggagtggctgacagctgagaggatggccgagtggatccagcagaacaacatcctgagcatcgtgctgcaggacagcctgcaccagccccagtatgtggagaagctggagaagatcctgcgcttcgtcatcaaggagaaggccctgaccctgcaggacctggacaacatctgggccgcccaggccggcaagcatgaggccatcgtgaagaatgtgcatgacctgctggccaagctggcctgggacttcagccctggccagctggaccacctgtttgactgcttcaaggcctcctggaccaatgccagcaagaagcagcgggagaagctgctggagctgatccggcggctggctgaagatgacaaggatggagtgatggcccacaaggtgctgaacctgctgtggaacctggcccagagtgatgatgtgcctgtggacatcatggacctggccctgagcgcccacatcaagatcctggactacagctgcagccaggacagagatgcccagaagatccagtggattgaccacttcatcgaggagctgcggaccaatgacaagtgggtgatcccagccctgaagcagatccgggagatctgcagcctgtttggagaggccagccagaacctgagccagacccagaggagcccccacatcttctacagacatgacctgatcaaccagctgcagcagaaccacgccctggtgaccctggtggccgagaacctggccacctacatgaacagcatccggctgtatgctggggaccacgaggactatgacccccagacagtgcggctgggcagccgctacagccacgtgcaggaggtgcaggagcggctgaacttcctgcgcttcctgctgaaggatggccagctgtggctgtgtgccccccaggccaagcagatctggaagtgcctggctgaaaatgctgtgtacctgtgtgaccgggaggcctgcttcaagtggtacagcaagctgatgggagatgagccagacctggaccctgacatcaacaaggacttctttgagagcaatgtgctgcagctggaccccagcctgctgacagaaaatggcatgaagtgctttgagcgcttcttcaaggctgtgaactgccgggagaggaagctgattgccaagagaagaagctacatgatggatgacctggagctgattggcctggactacctgtggagggtggtgatccagagcagtgatgagatcgccaacagagccatcgacctgctgaaggagatctacaccaacctgggcccccggctgaaggccaaccaggtggtgattcatgaggacttcatccagagctgctttgaccggctgaaggccagctatgacaccctgtgtgtgtttgatggagacaagaacagcatcaactgtgcccggcaggaggccatccgcatggtgcgggtgctgaccgtcatcaaggagtacatcaatgaatgtgacagcgactaccacaaggagaggatgatcctgcccatgagccgggccttccggggcaagcacctgagcctcatcgtgcgcttccccaaccagggccggcaggtggatgagctggacatctggagccacaccaatgacaccatcggctctgtgcggcgctgcatcgtgaaccgcatcaaggccaacgtggcccacaagaagattgagctgtttgtgggcggggagctgattgacagtgaagatgacaggaagctgattggccagctgaacctgaaggacaagagcctcatcacagccaagctgacccagatcaacttcaacatgcccagcagcccagacagcagcagtgacagcagcacagccagccctggcaaccacaggaaccactacaatgatggccccaacctggaggtggagagctgcctgcccggggtcatcatgtctgtgcacccccgctacatctccttcctgtggcaggtggccgacctgggcagcaacctgaacatgccacccctgagagatggagcccgggtgctgatgaagctgatgcccccagacagaacagctgtggagaagctgcgggctgtgtgcctggaccacgccaagctgggggagggcaagctgagcccccccctggacagcctcttcttcggccccagcgccagccaggtgctgtacctgacagaggtggtgtatgccctgctgatgcctgctggggtgcccctgacagatggcagcagtgacttccaggtgcacttcctgaagagcggcggcctgcccctggtgctgtccatgctgatccggaacaacttcctgcccaacacagacatggagaccaggagaggagcctacctgaatgccctgaagatcgccaagctgctgctgacagccatcggctacggccacgtgcgggctgtggccgaggcctgccagcctgtggtggatggaacagaccccatcacccagatcaaccaggtgacccatgaccaggccgtggtgctgcagagcgccctgcagagcatccccaaccccagcagtgaatgtgtgctgagaaatgaaagcatcctgctggcccaggagatcagcaatgaggccagccgctacatgccagacatctgtgtgatccgggccatccagaagatcatctgggccagcgcctgtggggccctgggcctggtgttcagccccaatgaggagatcaccaagatctaccagatgaccaccaacggcagcaacaagctggaggtggaggatgagcaggtgtgctgtgaggccctggaggtgatgaccctgtgctttgccctgctgcccacagccctggatgccctgagcaaggagaaggcctggcagaccttcatcatcgacctgctgctgcactgccccagcaagacagtgcggcagctggcccaggagcagttcttcctgatgtgcacccgctgctgcatgggccaccggcccctgctcttcttcatcaccctgctcttcaccatcctgggcagcacagcccgggagaagggcaagtacagcggggactacttcaccctgctgcggcacctgctgaactatgcctacaacggcaacatcaacatccccaatgctgaggtgctgctggtgtctgaaattgactggctgaagaggatccgggacaacgtgaagaacacaggagagaccggggtggaggagcccatcctggagggccacctgggcgtgaccaaggagctgctggccttccagaccagcgagaagaagtaccacttcggctgtgagaagggcggggccaacctgatcaaggagctgattgatgacttcatcttccctgccagcaaggtgtacctgcagtacctgcggagcggggagctgcctgctgagcaggccatccctgtgtgcagcagccctgtgaccatcaatgccggctttgagctgctggtggccctggccatcggctgtgtgaggaacctgaagcagatcgtggactgcctgacagagatgtactacatgggcacagccatcaccacctgtgaggccctgacagagtgggagtacctgccccctgtgggcccccggccccccaagggctttgtgggcctgaagaatgctggggccacctgctacatgaacagcgtcatccagcagctgtacatgatccccagcatccggaacagcatcctggccatcgagggcactggaagtgacctgcatgatgacatgtttggagatgagaagcaggacagcgagagcaatgtggaccccagagatgatgtgtttggctacccccaccagtttgaggacaagccagccctgagcaagacagaggacaggaaggagtacaacattggagtgctgcggcacctgcaggtgatcttcggccacctggccgccagccagctgcagtactacgtgccccggggcttctggaagcagttccggctgtggggcgagcctgtgaacctgcgggagcagcatgatgccctggagttcttcaacagcctggtggacagcctggatgaggccctgaaggccctgggccacccagccatcctgagcaaggtgctgggcggcagctttgctgaccagaagatctgccagggctgcccccacagatatgaatgtgaggagagcttcaccaccctgaatgtggacatccggaaccaccagaacctgctggacagcctggagcagtacatcaagggggacctgctggagggcgccaatgcctaccactgtgagaagtgtgacaagaaggtggacacagtgaagaggctgctgatcaagaagctgccccgggtgctggccatccagctgaagagatttgattatgactgggagagagaatgtgccatcaagttcaatgactactttgagttcccccgggagctggacatgggcccctacacagtggccggcgtggccaacctggagcgggacaacgtgaacagtgaaaatgagctgattgagcagaaggagcagagcgacaatgaaacagctgggggcaccaagtaccgcctggtgggcgtgctggtgcacagcggccaggccagcggcggccactactacagctacatcatccagagaaatggcaaggatgaccagacagaccactggtacaagtttgatgatggagatgtgacagagtgcaagatggatgatgatgaggagatgaagaaccagtgctttggaggagagtacatgggagaggtgtttgaccacatgatgaagaggatgagctaccgccggcagaagcgctggtggaatgcctacatcctcttctatgagcagatggacatgattgatgaagatgatgagatgatccgctacatcagcgagctgaccatcgcccggccccaccagatcatcatgagccctgccatcgagaggtctgtgaggaagcagaatgtgaagttcatgcacaaccggctgcagtacagcctggagtacttccagtttgtgaagaagctgctgacctgcaatggagtgtacctgaacccagcccctggccaggactacctgctgcctgaggccgaggagatcaccatgatcagcatccagctggccgcccgcttcctgttcaccaccggcttccacaccaagaagatcgtgcggggccctgccagtgactggtatgatgccctgtgtgtgctgctgcggcacagcaagaatgtgcgcttctggttcacccacaacgtgctcttcaacgtgagcaaccgcttcagcgagtacctgctggagtgccccagcgctgaggtgcggggggcctttgccaagctgattgtgttcatcgcccacttcagcctgcaggacggcagctgccccagcccctttgccagccctggccccagcagccaggcctgtgacaacctgagcctgagtgaccacctgctgcgggccaccctgaacctgctgcggcgggaggtgtctgagcacggccaccacctgcagcagtacttcaacctgtttgtgatgtatgccaacctgggcgtggccgagaagacccagctgctgaagctgaatgtgcctgccaccttcatgctggtgtccctggatgagggccctggcccccccatcaagtaccagtatgcagagctgggcaagctgtacagcgtggtgtcccagctgatccgctgctgcaatgtgagcagcaccatgcagagcagcatcaatggaaacccccccctgcccaacccctttggagacctgaacctgagccagcccatcatgcccatccagcagaatgtgctggacatcctgtttgtgaggaccagctatgtgaagaagatcatcgaggactgcagcaacagcgaggacaccatcaagctgctgcgcttctgctcctgggagaacccccagttcagcagcacagtgctgtctgagctgctgtggcaggtggcctacagctacacctatgagctgcggccctacctggacctgctcttccagatcctgctgattgaggacagctggcagacccaccgcatccacaatgccctgaagggcatcccagatgacagagatggcctgtttgacaccatccagaggagcaagaaccactaccagaagagggcctaccagtgcatcaagtgcatggtggccctcttcagcagctgccctgtggcctaccagatcctgcagggcaatggagacctgaagaggaagtggacctgggccgtggagtggctgggagatgagctggagcggcggccctacacaggcaacccccagtacagctacaacaactggagcccccctgtgcagagcaatgaaacagccaacggctacttcctggagaggagccacagcgccaggatgaccctggccaaggcctgtgagctgtgcccagaggaggagccagatgaccaggatgccccagatgaacatgagcccagccccagtgaagatgcccccctgtacccccacagccctgccagccagtaccagcagaacaaccacgtgcacggccagccctacacaggccctgctgcccaccacctgaacaacccccagaagacaggccagaggacccaggagaactatgagggcaatgaggaggtgagcagcccccagatgaaggaccagtag

SEQ ID NO: 325448 - DNA, 714 bp, Artificial Sequence
  derived and/or modified sequence
tgactgctgaagacagctgtgacccagaggatccccagcaactactttgcctttgccctgggccgcatcctgagcagccacctgctgagcagcgccaacttcagcggccgcatccacaatgccctgaagggcatcccagatgacagagatggcctgtttgacaccatccagaggagcaagaaccactaccagaagagggcctaccagtgcatcaagtgcatggtggccctcttcagcagctgccctgtggcctaccagatcctgcagggcaatggagacctgaagaggaagtggacctgggccgtggagtggctgggagatgagctggagcggcggccctacacaggcaacccccagtacagctacaacaactggagcccccctgtgcagagcaatgaaacagccaacggctacttcctggagaggagccacagcgccaggatgaccctggccaaggcctgtgagctgtgcccagaggaggagccagatgaccaggatgccccagatgaacatgagcccagccccagtgaagatgcccccctgtacccccacagccctgccagccagtaccagcagaacaaccacgtgcacggccagccctacacaggccctgctgcccaccacctgaacaacccccagaagacaggccagaggacccaggagaactatgagggcaatgaggaggtgagcagcccccagatgaaggaccagtag

SEQ ID NO: 325449 - DNA, 7668 bp, Artificial Sequence
  derived and/or modified sequence
atgaccgccatcacccacggcagccccgtgggcggcaacgacagccagggacaagtgctggacggtcaatcgcagcacctgtttcagcagaaccaaacctcgtcccccgactcttcaaacgagaattccgttgctacaccaccccccgaggagcagggccagggcgacgctcctcctcagcacgaggacgaggaacctgccttcccccacaccgaactggccaatctggatgatatgatcaatcgcccacggtgggtggtgcctgtactcccgaaaggtgagcttgaggtgctattagaggcagccatcgacttgtctgtgaaaggccttgatgtgaagagtgaagcctgtcagcgattttttagagatgggctcactattagtttcacaaagattctgatggatgaggcagtgtccggttggaagttcgaaatccatcgctgcatcattaataatactcacagacttgtggagctttgtgtagctaagctgtcgcaggactggttccctctcctagagctgcttgcgatggcactcaatccacactgtaagtttcacatctacaacggtacaagaccatgtgagcttatctcttctaacgcacagctgccagaggatgagctgtttgcccgcagctctgatccgaggtcacccaagggttggctagtggatctcatcaataagttcggtacattgaatgggtttcagatcctccatgatcgcttcttcaatggtagcgcactgaacatacagatcatagccgccttgataaagcccttcggacagtgttacgaattcctgtcccaacatacactgaaaaaatatttcatcccggtgattgaaattgtaccccatcttctggagaacctgaccgacgaggagctgaagaaagaagctaagaatgaagctaagaacgatgctctctcgatgattatcaagagcctgaagaatctggctagccgcatctctggacaggatgaaacaattaagaatctggagatcttccggcttaagatgatcctccgacttctgcagatttcctccttcaacgggaagatgaatgcgcttaacgagataaataaggttatctccagtgtatcttactacacccaccgccactccaaccctgaagaggaggagtggctaaccgccgagagaatggcagaatggatacagcaaaataacatcctttccatcgtgctgcaggacagcctacaccagcctcagtatgtagagaaattggagaaaatactgagatttgtcatcaaagagaaggctttgaccctgcaggacctggacaacatctgggcagctcaggcaggaaagcacgaggccattgtgaagaacgtccatgatcttcttgctaagctggcctgggacttctctccagggcagcttgaccatctcttcgattgcttcaaagcctcttggactaatgcttccaagaaacaaagagaaaagttactggaacttatcaggcgactcgccgaggacgataaggacggcgtgatggctcataaggttctgaacttgctttggaacctcgctcagtccgacgacgtgccagtggacattatggacctcgccttgtccgctcatataaagattttagattactcctgttcccaggaccgggatgcacagaagattcaatggatcgaccacttcatcgaagagctcagaaccaacgacaagtgggtaatcccagctctgaagcagatacgagaaatctgtagcctttttggcgaagcttcccagaacctgtctcagacccaacggtctccacacatcttttacagacatgaccttataaaccagctgcaacagaaccacgccttggtgaccttggtggctgagaacctggccacgtacatgaacagtatcagactctacgcgggagatcacgaggactatgatccacagacagtgaggctgggatccaggtatagccacgtgcaagaggtccaagagcggctgaactttctcagatttctcctgaaggacggccagctctggctatgcgcgccacaggcaaagcaaatctggaagtgccttgcagagaatgcggtctatctgtgtgatcgcgaggcttgctttaaatggtactcaaagcttatgggcgacgagccggatctggatccagatatcaataaagacttcttcgaatcgaacgtactccagttagacccctcgttactgacggagaacgggatgaagtgttttgaaagatttttcaaagccgttaactgtagggaaagaaagctgatagctaagaggcgaagttatatgatggatgatcttgaactgatcggacttgactacctgtggcgcgtcgttattcagtcaagtgacgaaattgctaacagagctattgacttgctcaaggaaatttatactaatctcggacctaggctgaaggcaaaccaagtggtgattcatgaagattttattcagtcttgctttgaccgactaaaggcctcttacgataccctgtgtgtttttgacggagacaaaaactcaatcaattgcgcacggcaagaagcgataaggatggtgagggtccttacagttatcaaggaatatattaatgagtgtgattccgactatcacaaagagcggatgattttaccaatgtcaagggcatttcgggggaagcatttgtctttgatcgttcgctttccgaaccaggggcggcaagtggatgagctggacatttggtcacatacaaatgataccatcggaagtgttcggcggtgtattgtgaacagaataaaggcaaacgttgcacataagaaaattgaactgtttgtgggtggagagctaattgattccgaggacgatcgcaagctcataggtcagttaaatctgaaggacaaatcactgatcacggcaaagttgacacagatcaatttcaatatgccctcgagcccggactcttcatcagactccagcacggctagcccaggcaaccacagaaaccactataatgacgggcccaatctggaggtagaaagttgccttcctggagtgatcatgtctgtacatcctaggtacatctcttttctctggcaggttgccgatctgggttcaaatctgaacatgcctcccttaagggacggggccagggttttaatgaagttaatgcccccggaccgtactgctgtagaaaagttgcgtgccgtctgtctagatcacgccaaactaggagaaggcaaactgtcccccccactggattctttgttttttggccccagtgccagccaggttttatacctgactgaggtggtctacgctcttcttatgcccgcaggagtgccattgacagatggatcttcggacttccaggtgcacttcctcaagtccgggggactccccctcgttctctctatgctgataaggaacaactttcttccgaacactgacatggagacaaggaggggcgcttacctgaacgccctgaagattgccaagctactgctcaccgccatcggctatggacatgtgcgcgctgtagctgaggcttgccagccggtcgtcgacgggactgaccccattacccagatcaaccaggtaacccatgatcaggcagttgttcttcagagtgctctccagtccatccccaatccaagctccgagtgcgttctcagaaacgagagtattttgctggcgcaggagatcagtaatgaggcaagtagatatatgcctgacatctgtgttattcgtgccatacagaagatcatctgggcctccgcttgcggagcacttggcctggtgttctcccccaatgaggagatcacaaaaatctaccagatgaccacaaacgggtccaacaaactggaagtcgaggatgaacaggtttgttgtgaagctctggaagttatgaccttgtgctttgcccttctgccgaccgccctagacgccctgtccaaagaaaaggcctggcagacttttatcatcgatctgttactgcactgcccctccaaaacggttcggcagttggcacaagagcagttctttttgatgtgtactagatgttgtatgggccacagacctctcttgttctttataactttgcttttcaccatccttgggagtacagcgcgtgaaaaaggcaagtactcgggcgactactttaccctcctgcgccatttgctgaattacgcttacaacggcaatattaacatccccaacgccgaggtgctactggttagcgagatcgactggctgaaaaggattcgcgataatgtgaaaaatactggagagactggcgtcgaagaacccattctagaaggacacctcggggttacgaaagaactcctggccttccagacatctgaaaaaaaataccatttcgggtgcgaaaaaggcggggctaacctgatcaaggagctgattgatgatttcattttccctgcctccaaggtatatctgcaatatctgcggtctggagaactgcctgcggagcaggcgatccccgtgtgtagctctcctgttacgatcaacgccgggtttgagctgctggtcgcattggcaattggatgcgtcagaaacctcaaacagatcgttgattgtctgacagaaatgtactacatgggaaccgctatcaccacctgtgaagctctgactgagtgggagtatttgccgccagtcgggcccaggccacccaaaggcttcgtaggcttgaagaacgcaggcgcaacatgttacatgaattcagtgattcagcaactttatatgattccatctatccggaattcaattctggccatcgagggtactggcagcgacctccatgatgatatgtttggcgatgagaagcaggatagcgagtcaaatgtggacccacgcgacgacgtgttcggctatccacatcagttcgaggacaagccagctctgtctaaaacggaggaccggaaagagtacaatatcggggtgttacgacacctgcaggtcatctttgggcacctcgcagccagccagttgcagtattacgtgcctcggggtttctggaagcaatttagattgtggggggaaccggtgaatctgcgggaacagcatgatgcgcttgagttctttaattctctggtggacagcctggatgaagccttgaaggcgttggggcacccggccatcttgtcgaaggtgctcggcggctcatttgccgaccagaagatttgccaaggatgccctcacagatatgagtgtgaggagtccttcactacactcaacgtagacattagaaaccaccagaacctcctggacagcctcgagcagtacatcaagggggatctgttggagggtgcaaacgcctaccactgtgaaaaatgcgacaaaaaagtggatactgttaagagactgctcattaaaaaattacccagagttttagcaattcagctgaagcgatttgactacgattgggagcgggagtgcgccattaaattcaatgactacttcgaattccctcgcgagctcgacatgggaccatataccgttgcgggggtcgctaatctcgagcgagacaacgtgaatagtgagaacgaactgatcgaacagaaggagcagagcgataacgaaactgccgggggcacgaagtatcgcttagtcggcgtcctggtgcactcggggcaggccagcggcgggcattactattcttatattatacaacgcaacggaaaggatgaccagactgaccactggtataagtttgacgacggcgacgtgaccgaatgtaaaatggacgacgatgaggaaatgaagaaccagtgtttcggcggggagtacatgggagaagtgtttgatcatatgatgaaaaggatgtcttacaggcgccaaaagcgctggtggaacgcttacattctgttctacgagcagatggatatgattgatgaggatgatgaaatgataaggtatatttccgaattgaccattgcaaggccccaccagatcattatgtctcccgccatcgagcggagcgtccggaagcagaatgtcaaatttatgcacaaccggctacagtacagtctagaatacttccagttcgtgaaaaaactgctcacctgcaacggcgtctatctgaaccccgcccccggccaagactacctcctacctgaggctgaggagatcaccatgatctctatccaattagccgcccgattcctgttcactactgggttccacaccaaaaaaattgtgaggggacctgcttctgactggtacgacgctttgtgcgtcctgcttcgtcacagcaagaatgtgcggttttggttcacccacaacgtcctgtttaacgtgtcaaaccggttctcagagtatctgctagagtgtccatcggctgaggtccgaggagccttcgctaagctgatcgtgttcatcgcccacttttccctgcaagatggatcatgccccagtccgttcgcttctcctggcccctcttcccaagcctgcgacaatttgtctctgtctgaccacctgctcagggctacactgaacctgctgagaagggaggtctcagagcacggccaccacctccagcagtactttaacctctttgttatgtatgctaatctcggggtcgctgagaagactcagctcctcaagctgaacgtgcctgctactttcatgctcgtgagcctcgatgagggacccggaccgcctataaaataccagtacgctgagctcgggaaactctactcggtcgtaagtcaactgatcaggtgttgcaacgtgtcttccacaatgcaaagtagcattaatgggaatcctcccctgcccaatccattcggagatcttaatctgagtcaacctatcatgcccatacagcagaatgtgctggacattctctttgtgaggactagctatgtcaaaaaaataatcgaagactgctcgaactctgaggatacaatcaaactgctacggttttgttcctgggaaaacccccagtttagctcaaccgtcctatccgagctactgtggcaggtggcctactcatatacctatgaactgcgtccctacctggatctgttgttccaaattttactgatagaggacagttggcaaacccaccggattcacaatgccctcaaggggattcccgacgatcgggatggactgttcgacactatacaacggagtaaaaaccactatcagaagagggcatatcagtgcataaagtgcatggtcgccttgttttcctcctgtccggttgcctaccagattctgcagggaaacggggacctaaaacgcaaatggacctgggcagtagagtggttgggggatgaactggaaagacgaccatacacagggaacccccagtactcctataacaactggtcacctcctgttcagagcaacgagacagcaaacggctacttcctggagcggtcccactcggccaggatgacacttgcgaaagcttgcgaattgtgtccagaagaggagccagacgatcaagacgccccagatgaacacgaacccagcccctctgaggacgcccccctgtacccccactccccagcatcacaataccaacagaacaaccacgtgcacgggcagccttataccggacccgctgcccaccatctgaacaacccacaaaaaaccggccagaggacacaagagaactatgaggggaatgaagaggtcagctctccccagatgaaagaccagtag

SEQ ID NO: 325450 - DNA, 714 bp, Artificial Sequence
  derived and/or modified sequence
tgactgctgaagaccgccgtgacccagcggatccccagcaactactttgcctttgctctgggcagaattttaagcagtcatttgctgtcctccgccaacttcagcggccgcatccacaacgctctcaagggcattccagatgaccgtgatggcctgttcgatacaattcagaggagcaagaatcactatcagaagagagcctaccagtgcatcaagtgtatggtcgcccttttctcatcttgcccagtagcatatcagatcttgcaaggtaacggagatctgaagaggaaatggacgtgggcggtggaatggctgggggacgagctggaaagaaggccctacacaggcaacccccaatacagctacaataattggagtcccccagtgcagagcaatgagacagctaatggatattttctggagcgctcccacagtgcccggatgactctggccaaagcgtgtgaactctgtcccgaggaggagccagacgatcaggatgctcctgacgaacacgaacctagcccaagcgaggatgcacctctctatcctcatagtccagcttcccagtaccagcagaataaccacgttcacggtcagccttatacaggaccagcggcacaccacctcaacaatccacagaagaccgggcagaggacacaagagaactacgaaggcaacgaggaggtttccagcccacagatgaaagaccagtag

SEQ ID NO: 325451 - DNA, 7667 bp, Artificial Sequence
  derived and/or modified sequence
atgaccgccataactcacggaagcccggtaggaggcaatgacagtcagggccaggttctcgatggccagtcacagcatcttttccaacaaaatcagacctcaagtcccgacagtagcaacgaaaatagcgtggccacaccgccacctgaagagcagggacaaggagacgcacctccccagcacgaggatgaggagccagcatttccacatacagaactagccaatctggacgatatgatcaatcggcctaggtgggtcgtacccgtgttgcccaaaggggaattagaggtcctgcttgaggctgccattgatctgagcgtcaagggtctcgatgtgaagtcggaagcctgtcaaaggttttttcgggatggactgacaattagtttcaccaagatattgatggacgaggccgttagcggctggaagttcgaaattcatcggtgtatcatcaacaatacccatcggctcgtggagctgtgtgtggctaagttatcacaagattggtttccgttgctcgagcttctagctatggcgctaaatcctcactgtaaatttcacatctataacgggacacgtccatgcgaactcatcagctccaacgctcagctcccggaggacgaattgttcgccagatccagcgacccgaggtctccaaagggctggcttgtcgacttgatcaacaagtttggaacgttaaatggatttcagatcctgcatgaccggttttttaatggctctgcactgaatattcagatcattgccgcactgatcaaacccttcgggcagtgctacgagtttctgtcacagcatactttgaaaaaatactttatccccgtgattgaaatagtgccccacttattggaaaatcttaccgacgaggagctgaagaaagaggcaaaaaatgaagccaagaacgacgcattgtctatgataatcaaatccctaaagaaccttgccagcaggatatccggccaggatgagactataaaaaacctcgaaattttccggttgaagatgattctgcggctgctccagatcagctcctttaacggaaagatgaacgccctcaacgagattaacaaggtcatttcaagtgtatcatattatactcaccgacacagcaacccggaggaggaggagtggctgactgcagagaggatggccgagtggatccaacagaacaatatacttagcatcgtgctccaggattcgctacatcagcctcaatacgttgaaaaactggaaaagattttgcgattcgttatcaaagagaaggccctgacactgcaggacctggataatatctgggcagcccaggccggaaagcatgaggctatcgtcaaaaatgttcatgatcttctggctaaactggcctgggattttagccccggacagctcgatcacttattcgactgcttcaaggctagttggaccaacgcatcgaagaaacaacgggagaaactgttagaactcattcgcaggctggcagaagacgataaggacggtgtgatggcacacaaagtcctgaatcttctgtggaacttagcacaatctgatgacgttcctgttgacattatggacctagctttgtctgcccatatcaaaattctcgattattcctgttctcaagacagagatgctcagaaaatacagtggattgatcatttcatagaggaactccgaaccaacgataagtgggtcatccccgcactgaagcagattagggagatctgcagtttattcggggaggcgtctcagaacctttcacagacacaacgctcccctcatattttctacaggcacgacctgattaaccagctgcagcaaaaccacgcactggtgacattagtggcagaaaacctggctacatacatgaactcaatccgactctacgctggagaccacgaagactatgaccctcaaactgtcagactggggtcccgttacagccatgtccaggaggtacaggaacggctcaacttcctgagattcctgctcaaagacggccagttgtggctctgcgcaccccaggcaaagcagatttggaaatgtctcgcagaaaacgctgtgtatttgtgcgatagagaggcatgtttcaaatggtatagcaaacttatgggggacgaacccgaccttgatccagacatcaacaaagacttctttgaatcaaacgtgctgcagcttgatccatctctgctgacagaaaacggtatgaaatgtttcgagcgcttcttcaaagccgtcaactgcagggaaagaaagctcatagcaaaacgacggtcatatatgatggacgatctggaattaataggtctggattacctctggcgagtcgttattcagtcttccgacgagattgccaacagggccatcgacctacttaaggagatttacaccaatctcggaccacgtctgaaagcgaaccaggtagtgatccacgaagacttcatacagagctgctttgaccgcttaaaagcaagttatgatacgttgtgcgttttcgacggggacaagaatagtattaactgcgcgagacaggaggctatcagaatggttagggtgctgacagtgatcaaggaatatattaacgaatgcgactccgattaccacaaagaaaggatgattctgcctatgtctcgagcttttagaggaaaacatctgagcttgatcgtgaggttcccaaatcaaggacgccaagttgacgagctggacatttggagccacacaaatgatacgattggcagcgtgcggagatgtatagtgaacaggatcaaagccaacgtcgcccacaaaaaaattgagctcttcgtgggaggcgaactgatcgactctgaagatgataggaagctaataggacagctaaatctcaaagataaatctctgatcacagccaagttgacacagattaattttaacatgccctctagcccggacagcagtagtgatagctccacggcttcccctggcaaccaccgaaaccattacaacgacggccctaacttggaggtagagtcatgtctgcccggagtcattatgtccgtgcatccgaggtacatctcattcctgtggcaggtcgctgacttggggtctaatttgaacatgccccctctgcgcgatggagcaagggtcctgatgaagctgatgccacccgaccgcaccgcggttgaaaaactccgtgctgtttgcttggatcacgcaaagttgggagagggcaagctgtcaccaccactggattcactgtttttcgggcctagtgcctctcaagtgctatatctgacagaagttgtctacgccctcctgatgcctgcaggagttcccctgactgatggcagcagtgattttcaggtgcatttcctcaaatcaggagggctcccccttgtgctgtccatgctcattcggaacaatttcctgcccaacacagacatggagactcggcgtggagcatacctgaatgcacttaaaatagccaagctgctgctcaccgctattggatacggccacgtgcgcgctgtcgccgaagcgtgccagccggtagtggatggaaccgatcccatcacgcagattaaccaggtgacccacgaccaggccgtggtgttacagagcgcactgcagagcataccaaatccatcttcggagtgtgtcctgaggaatgaatccattttactcgcccaggagatttctaatgaggcctctcgctatatgcctgacatctgtgtgattagggctatccaaaaaattatctgggctagtgcttgtggagctctcggccttgtgttcagtcccaacgaagagatcacgaagatttatcagatgaccacaaatggctcaaataagttggaggttgaggatgaacaggtatgctgtgaagccctggaggtgatgaccttgtgtttcgcccttttaccaaccgcgcttgacgcgctcagcaaggagaaggcctggcagaccttcatcatcgacctcttactgcattgtcctagcaagacggttcgccagctggcacaggagcaattctttttgatgtgcacacgatgctgcatggggcacaggcctctgcttttttttatcaccttgttgtttacaatcttgggttcaacggcaagagagaaaggaaaatacagtggcgattattttacgctgctccgccatttgctgaactacgcttataacggaaacataaacatcccaaacgccgaggtcctgctcgttagtgagatagattggctgaagcgcatccgtgataatgtaaagaatacaggcgagaccggagtggaagagcccatcctcgaggggcaccttggcgttacaaaagagctgctggcctttcagaccagcgaaaagaaataccatttcggctgcgagaagggcggagcgaatcttattaaagagctcatcgatgacttcatctttccagcgagtaaagtctacctgcagtacctgcgcagtggcgagctcccagcagagcaagcgatccccgtttgtagttctccagtaacaatcaatgcgggttttgaattgttggtcgcacttgccataggttgcgtgcgcaatctgaaacagatcgtggattgcctcacggaaatgtattacatgggaactgcgatcacgacatgcgaggccttgacggaatgggagtatctaccgccagttgggcctcggcctcctaaaggtttcgtgggtctgaagaacgccggagccacctgctatatgaatagcgtaatccagcaactttatatgatccctagcattaggaattctatcctagccattgagggtacgggcagcgacctccacgacgacatgttcggggacgaaaaacaggatagtgaaagtaacgtggatcccagagacgatgtcttcggctatccacatcagttcgaggacaaacctgcgctgagtaagactgaggatcgcaaagaatacaatattggggtcctgagacacctccaggttatttttggccatctggctgcttcacaactgcagtattatgtgcctcgcggtttctggaaacagttccggctgtggggggaacccgtgaatttgcgagagcaacacgacgctcttgagttttttaactctttagttgattccctggacgaagcactgaaagcactgggacaccctgcaatcctgtccaaggtgttagggggaagtttcgcagaccagaagatctgccagggctgtcctcatagatatgagtgtgaggaaagtttcaccacactgaacgtggacatccgaaaccaccagaacttattggattccttggagcagtatattaagggcgatctgcttgagggagctaatgcttatcattgcgaaaaatgtgacaaaaaggtggatacagtgaaaagattactgattaaaaaattgcctagggttttagcaatacagctaaagcgcttcgactacgattgggagcgggagtgcgctattaagttcaatgactattttgagttccccagggagctcgatatgggaccttataccgttgccggtgttgcaaacttggagagggacaatgtgaattcggagaatgagctgatcgagcagaaggagcagtcggataacgagacagccggtggcaccaagtaccggctggtcggggtgctggtacatagcggccaggcctctggtggccactactacagctatattattcagaggaacgggaaggacgaccaaactgatcattggtacaagttcgacgacggcgatgtaaccgaatgtaaaatggacgacgacgaggaaatgaaaaatcagtgtttcggcggagagtatatgggggaggtgtttgaccatatgatgaaaagaatgtcttacaggcgccaaaagcggtggtggaatgcctatatcctgttttacgagcagatggacatgatcgatgaagacgatgaaatgatacgatatatcagcgagttgaccatcgccagacctcaccagattatcatgtcgcctgctatagagcgttcagtgaggaaacagaacgtcaagtttatgcacaacagactgcaatatagcctcgagtacttccagtttgttaagaagctgcttacctgtaatggcgtgtacctgaaccccgcaccagggcaggactacttgctcccagaagctgaggaaatcactatgatttcaattcaactcgccgctcgcttcctttttacaactggtttccatacaaagaagattgtgagagggccagcatccgattggtatgatgcactgtgcgttctgctgagacatagcaaaaacgttaggttctggtttacgcacaacgtactgttcaacgtgtctaatagattctcagagtacctgcttgagtgcccctccgccgaggtgcggggagccttcgcaaagctgattgtgttcatagcccatttctcgttacaggatgggagttgcccaagtccctttgcttcccctgggccttcttcacaggcctgcgacaaccttagtctttcagaccacctactgagggccacactcaacctcctgcgcagagaagtgagtgaacatggacatcatctgcagcaatatttcaacctgttcgtgatgtatgctaacctgggcgtggccgagaaaactcagctgctgaagttaaacgtgccagctacttttatgcttgtaagcctcgacgaggggccagggcctccaattaaataccagtacgccgagctagggaaactctacagcgtggtctctcagcttatcagatgttgcaacgtgagctccacgatgcaatccagtattaatggcaatcctcccctgcctaacccatttggtgacctgaatctgagccagcctattatgccaatccagcagaacgtacttgatatcctgttcgtgcgtacatcatatgtaaagaagattatcgaggattgtagcaacagtgaggacactatcaagttgctgcgcttctgttcctgggaaaaccctcagttttcatcaacagtactcagcgagcttctctggcaggtagcatactcttatacctatgaattgcgaccatacctcgaccttctgttccaaatcctcctgatcgaagacagttggcagacccatcggatccataacgcactgaagggtattcccgacgatcgagatggcctgtttgacactatccagagaagcaagaatcattaccaaaagcgcgcataccagtgtattaaatgtatggttgctcttttcagcagctgccccgtcgcctatcagatactgcagggcaacggcgatttgaagcgcaaatggacctgggccgtggaatggttaggcgatgagttggagaggcgcccatataccggaaacccccagtactcttataataactggtcaccgcctgttcagagcaacgagaccgccaacgggtatttcctggagcgctctcattccgctaggatgacgctggccaaggcatgcgagctctgtccagaggaggaacccgacgaccaagacgccccagatgaacacgagccctctccttctgaagatgctccgttgtatccgcattctccagcctctcaatatcagcaaaataaccatgtacacggacagccttataccgggccagcggctcatcatctgaacaatcctcagaagacgggtcaacggacccaagaaaactacgagggcaacgaggaagtcagttctcctcagatgaaagatcagta

SEQ ID NO: 325452 - DNA, 714 bp, Artificial Sequence
  derived and/or modified sequence
tgactgctgaagactgcagtgacccagaggatcccctctaactattttgccttcgcactggggcgtatcctgtcatcccacctactctctagtgccaacttctcagggcgaattcataacgccctgaaaggtatccccgacgatcgagatggtctattcgatactatccagcggtccaagaaccattatcagaagcgcgcttatcagtgcatcaagtgcatggtagctctctttagcagttgcccagtcgcctaccagatattacagggtaacggtgacctgaagaggaagtggacatgggccgtggagtggctcggggacgagcttgagaggaggccgtatactggaaatcctcagtactcttacaacaattggtcacccccagtgcaaagcaatgaaacggccaacggatatttcctggagcggtcccattctgctcgcatgacattggcaaaggcttgcgagctgtgcccagaggaggagcccgatgaccaggacgccccagatgagcacgaaccttcaccttccgaggatgctccactttatccgcactcaccagcaagccaataccagcagaacaaccatgtacatgggcaaccctacactggccctgccgcacatcatctgaacaaccctcagaagaccgggcagaggacccaagagaactacgaaggcaatgaagaagtgtcctcccctcagatgaaggatcagtag

SEQ ID NO: 325453 - DNA, 10036 bp, Artificial Sequence
  derived and/or modified sequence
tgaataattgaactttgtttatttctccatatttttgcagtggtaattccattataaaacctaatgaaacaatgtttttatagatggtgtggaaagacttttctgggctcagaggtgaaactgacccttgtgtatcagcagcatttctgactgactgagagagtgtagtgattaacagagttgtgatgttagttaagaaacttagatttgccattgtagcttttctaccaattagcagattgtttaactcactgaaattgtaaagtggtagacgtggacttagtcattactgggcagcttatgaattgtattcatttactcatgatgtaaaaatggttagtctccacttttaaggctctagttctagtggctaaataggtacttatttatacagtatgataactgctgtattaaaatacatgtctcaaatgtggaatagtagaagaggtgaagaaaatcatagtttgaggtagaatactgtttgctggtcttaaaaactgtggtattttggtgattccataaattaggtcagatacttccactggagggaaacagtttaaaggatatatgtgatactattaatagaatgaggaagacacaccagatatttaggagggaattagcgagcttgaaactaagagctggtttgaatgagactgggtcataagtgatttcaagtaccagattaaggcactgagattttatttttaagcactgaagtcagattttttccttttaaaagaaaggattcatgatgaaatctgctttttgttttgcagagagcttggagataattctggtggctgtgtggagtatgtgttggaggtattaaattttcacagtatatataaggcagcaattgataggcctttcacagattcttctgataactacataaagagacaaaaaaaagaaaaaagagcaaagatctgtgctgtgtcaagtatgacagccatcactcatggctctccagtaggagggaacgacagccagggccaggttcttgatggccagtctcagcatctcttccaacagaaccagacttcatcacctgattcttccaatgagaattccgtagcaactcctcctccagaggaacaagggcaaggtgatgccccaccacagcatgaagatgaagagcctgcatttccacatactgagctggcaaacctggatgacatgatcaacaggcctcgatgggtggttcctgttttgccaaaaggggaattagaagtgcttttagaagctgctattgatcttagtgtaaaaggccttgatgttaaaagtgaagcatgccaacgtttttttcgagatggactaacaatatctttcactaaaattcttatggatgaggctgtgagtggctggaagtttgaaattcatagatgtattattaacaatactcatcgcctagtggagctttgtgtggccaagttgtcccaagattggtttccacttctagaacttctcgccatggccttaaatcctcactgcaagtttcatatctacaatggtacacgtccgtgtgaattaatttcctcaaatgctcagttgcctgaagatgaattatttgctcgttcttcagatcctcgatcaccaaaaggttggctagtggatctcatcaataaatttggcacattaaatgggttccagattttgcatgatcgtttttttaatggatcagcattaaatattcaaataattgcagctcttattaaaccatttggacaatgctatgagtttctcagtcaacatacactgaaaaagtacttcattccagttatagaaatagttccacatttattggaaaacttaactgatgaagaactgaaaaaggaggcaaagaatgaagccaaaaatgatgccctttcaatgattattaaatctttgaagaacttagcttcaagaatttcaggacaagatgagactataaaaaatttggaaatttttaggttaaagatgatactcagattgttgcaaatttcctcttttaatggaaagatgaatgcactgaatgaaataaataaggttatatctagtgtatcatattatactcatcggcatagtaatcctgaggaggaagaatggctgacagctgagcgaatggcagaatggatacagcaaaataatatcttatccatagtcttgcaagacagtcttcatcaaccacaatatgtagaaaagctagagaaaattcttcgttttgtgattaaagaaaaggctcttacattacaggaccttgataatatctgggcagcacaggcaggaaaacatgaagccattgtgaagaatgtacatgatctgctagcaaagttggcttgggatttttctcctggacaacttgatcatctttttgattgctttaaggcaagttggacaaatgcaagtaaaaagcaacgtgaaaagctccttgagttgatacgccgtcttgcagaagatgataaagatggtgtgatggcacacaaagtgttgaaccttctttggaacctggctcagagtgatgatgtgcctgtagacatcatggaccttgctcttagtgcccacataaaaatactagattatagttgttcccaggatcgagatgcacagaagatccagtggatagatcactttatagaagaacttcgcacaaatgacaagtgggtaattcctgctctgaaacaaataagagaaatttgtagtttgtttggtgaagcatctcaaaatttgagtcaaactcagcgaagtccccacatattttatcgccatgatttaatcaaccagcttcaacaaaatcatgctttagttactttggtagcagaaaaccttgcaacctacatgaatagcatcagattgtatgctggagatcatgaagactatgatccacaaacagtgaggcttggaagtcgatacagtcatgttcaagaagttcaagaacgactaaacttccttagatttttactgaaggatggccaactgtggctctgtgctcctcaggcaaaacaaatatggaagtgcttagcagaaaatgcagtttatctttgtgatcgtgaagcctgttttaagtggtattccaagttaatgggggatgaaccagacttggatcctgatattaataaggacttctttgaaagtaatgtacttcagcttgatccttcccttttaactgaaaatggaatgaaatgctttgaaagatttttcaaagctgtcaattgtcgagaaaggaaactaatagcaaaaagaagatcctatatgatggatgatttggaattaattggactagactacctttggagggttgtgattcagagtagtgacgagattgctaacagagctatagatcttcttaaagagatatacacaaaccttggcccaagattaaaagccaatcaggtggttatccatgaagacttcattcagtcttgctttgatcgtttaaaagcatcatatgatacactgtgtgtttttgatggtgacaaaaacagcattaattgtgcaagacaagaagccattcgaatggttagagtattaactgttataaaagagtacattaatgaatgtgacagtgattatcacaaggaaagaatgattctacctatgtcgagagcatttcgtggcaaacacctctctcttatagttcggtttccaaaccagggcagacaggttgatgagttggatatatggtctcatacgaatgacacaattggttcagtacggcgatgtattgttaatcgtattaaagccaatgtagcccacaaaaaaattgaactttttgtgggtggtgagctgatagattctgaagatgacagaaagctaattggacaattaaacttaaaagataaatctctaattacagccaaacttacacaaataaatttcaatatgccatcaagtcctgatagctcttccgattcctcaactgcatctcctggaaaccaccgtaatcattacaatgatggtcccaatctagaggtggaaagttgtttgcctggggtgataatgtcagtgcatcccagatacatctctttcctttggcaagttgcagacttaggtagcaacctgaatatgccacctcttagagatggagcaagagtacttatgaaacttatgccaccagatagaacagctgtagaaaaattacgagctgtttgtttggaccatgcaaaacttggagaaggcaaacttagtccaccccttgactctcttttctttggtccttctgcctcccaagttctatacctaacagaggtagtttatgccttgttaatgcctgctggtgtgcctctaactgatgggtcctctgactttcaagttcacttcttgaaaagtggtggcttacctcttgtactgagtatgctaataagaaataacttcttgccaaatacagatatggaaactcgaaggggtgcttatttaaatgctcttaaaatagccaaactgttgttaactgcgattggctatggccatgttcgagctgtagcagaagcttgtcagccagttgtagatggtacagaccccataacacagattaaccaagttactcatgatcaagcagtggtgctacaaagtgcccttcagagcattcctaatccctcatccgagtgcgtacttagaaatgagtccatacttcttgctcaggaaatatctaatgaggcttcaagatatatgcctgatatttgtgtaattagggctatacagaaaattatctgggcatcagcatgtggggcattaggactagtttttagcccaaatgaagaaataactaaaatttatcagatgaccaccaatggaagcaataagctggaggtggaagatgaacaagtttgctgtgaagcactggaagtgatgaccttatgttttgctttacttccaacagcgttggatgcacttagtaaagaaaaagcctggcagaccttcatcattgacttattattgcactgtccaagcaaaactgttcgtcagttggcacaggagcagttctttttaatgtgcaccagatgttgcatgggacacaggcctctgcttttcttcattactttactctttaccatactggggagcacagcaagagagaagggtaaatattcaggtgattatttcacacttttacggcaccttctcaattatgcttacaatggcaatattaacatacccaatgctgaagttcttcttgtcagtgaaattgattggctcaaaaggattagggataatgttaaaaacacaggtgaaacaggtgtcgaagagccaatactggaaggccaccttggggtaacaaaagagttattggcctttcaaacttctgagaaaaagtatcactttggttgtgaaaaaggaggtgctaatctcattaaagaattaattgatgatttcatctttcccgcatccaaagtttacctgcagtatttaagaagtggagaactaccagctgagcaggctattccagtctgtagttcacccgttaccatcaatgccggttttgagctacttgtagcattagctattggctgtgtgaggaatctcaaacagatagtagactgtttgactgaaatgtattacatgggcacagcaattactacttgtgaagcacttactgagtgggaatatctgccccctgttggaccccgcccaccaaaaggatttgtgggactcaaaaatgctggtgctacgtgttacatgaactctgtgatccagcagctatacatgattccttctatcaggaacagtattcttgcaattgaaggcacaggtagtgatttacacgatgatatgttcggggatgagaagcaggacagtgagagtaatgttgatccccgagatgatgtatttggatatcctcatcaatttgaagacaagccagcattaagtaagacagaagataggaaagagtataatattggtgtcctaagacaccttcaggtcatctttggtcatttagctgcttcccaactacaatactatgtacccagaggattttggaaacagttcaggctttggggtgaacctgttaatctccgtgaacaacatgatgccttagagttttttaattctttggtggatagtttagatgaagctttaaaagctttaggacacccggctatactaagtaaagtcctaggaggctcctttgctgatcagaagatctgccaaggctgcccacataggtatgaatgtgaagaatcttttacaactttgaatgtggatattagaaatcatcaaaatcttcttgactctttggaacagtatatcaaaggagatttattggaaggtgcaaatgcatatcattgtgaaaaatgtgataaaaaggttgacacagtaaagcgcctgctaattaaaaaattgcctcgggttcttgctatccaactcaaacgatttgactatgactgggaaagagaatgtgcaattaaattcaatgattattttgaatttcctcgagagctggatatgggaccttacacagtagcaggtgttgcaaacctggaaagggataatgtaaactcagaaaatgagttgattgaacagaaagagcagtctgacaatgaaactgcaggaggcacaaagtacagacttgtaggagtgcttgtacacagtggtcaagcaagcggtgggcattattattcttacatcattcaaaggaatggtaaagatgatcagacagatcactggtataaatttgatgatggagatgtaacagaatgcaaaatggatgatgatgaagaaatgaaaaatcagtgttttggtggagagtacatgggagaagtatttgatcacatgatgaagcgcatgtcatataggcgacagaagaggtggtggaatgcttacatacttttttatgaacaaatggatatgatagatgaagatgatgagatgataagatacatatcagagctaactattgcaagaccccatcagatcattatgtcaccagccattgagagaagtgtacggaaacaaaatgtgaaatttatgcataaccgattgcaatatagtttagagtattttcagtttgtgaaaaaactgcttacatgtaatggtgtttatttaaaccctgctccagggcaggattatttgttgcctgaagcagaagaaattactatgattagtattcagcttgctgctagattcctctttaccactggatttcacaccaagaaaatagttcgtggtcctgccagtgactggtatgatgcactgtgcgttcttctccgtcacagcaaaaatgtacgtttttggtttactcataatgtcctttttaatgtatcaaatcgcttctctgaataccttctggagtgccctagtgcagaagtgaggggtgcatttgcaaaacttatagtgtttattgcacacttttccttgcaagatgggtcttgtccttctccttttgcatctccaggaccttctagtcaggcatgtgataacttgagcttgagtgaccacttactaagagccacactaaatctcttgagaagggaagtttcagagcatggacatcatttacagcaatattttaatttgtttgtaatgtatgccaatttaggtgtggcagaaaaaacacagcttctgaaattgaatgtacctgctacctttatgcttgtgtctttagacgaaggaccaggtcctccaatcaaatatcagtatgctgaattaggcaagttatattcagtagtgtctcagctgattcgttgttgcaatgtgtcatcaacaatgcagtcttcaatcaatggtaatccccctctccccaatcctttcggtgaccttaatttatcacagcctataatgccaattcagcagaatgtgttagacattttatttgtgagaacaagttatgtgaagaaaattattgaagactgcagtaactcagaggataccatcaaattacttcgcttttgctcttgggagaatcctcagttctcatctactgtcctcagcgaacttctctggcaggttgcatattcatatacctatgaacttcggccatatttagatctacttttccaaattttactgattgaggactcctggcagactcacagaattcataatgcacttaaaggaattccagatgacagagatgggctgttcgatacaatacagcgctcgaagaatcactatcaaaaacgagcatatcagtgcataaaatgtatggtagctctatttagcagttgtcctgttgcttaccagatcttacagggtaacggagatcttaaaagaaaatggacctgggcagtggaatggctaggagatgaacttgaaagaagaccatatactggcaatcctcagtatagttacaacaattggtctcctccagtacaaagcaatgaaacagcaaatggttatttcttagaaagatcacatagtgctaggatgacacttgcaaaagcttgtgaactctgtccagaagaggagccagatgaccaggatgccccagatgagcatgagccctctccatcagaagatgccccattatatcctcattcacctgcctctcagtatcaacagaataatcatgtacatggacagccatatacaggaccagcagcacatcacttgaacaaccctcagaaaacaggccaacgaacacaagaaaattatgaaggcaatgaagaagtatcctcacctcagatgaaggatcagtgaaaagcaataattaactgcttcctttatgactatgcactaaggtcttatagtccaaactttctctgtgtctggctagtattgaaaactagataaactgctccaaaccaacatggagtaaagagcatattcactggtttatttgcagtaatttgcaatttgtcagtgtataagacacatgcagggtgaagtgtacagagttttgtaacaaatgactggtcctaatctgtaaatgagaaaggtatatatactatgttaatgtctgactgttaattcttaagcaagaaactttttttgatgaaaacaagtcagatctacacagtcacacaattattttttgttgtgttcactacattgtgcaattgatattgcctgctttgagcagtttggtcaacttaccaacttccccccaaaaaagggaacataaaagagcccatctttgtcagtttacaccaatagtttcttgttaatccttctttcctggatatataaggctggtggtaacttttgaattatatggttgatgtggaaaattggcagtgtaacatttctagatacttttcattacctttttattctggtatataggctaaccactttaaagctattcttatgctgtaacagttagcatggcttcacactgtttgtgtagccaagaggacagaattacatgaatgacagtgcccagagtgacagctgtatattgctcagagcttttatttcttatacctagaataaatataaaatgggggaaaaatgtgacagacaagcagtttttcattgcacacatattcttcacatttaatgtttgatagttcaatttcttgagctgaagaatatcaaagtatcgataatacgaattttaaaatattaaaaccaatacacaaaattttcctatgtcagaatgtggtggagcataatagattgtatttggtgtgcttgcgattttttttttccatagaatttattaagtgaagtttctaaaactttgcttctcctgatcccggtgaagtgtacatcataagaatccatagtactttgaagtaccattgcaccaagatgtctgactgaattcatagtcacacttttatttgaaagaaagaattgttgtagttttttttcattattctaaaactcttgttgttagatacaagatttaattaagatctaagctcctgcttatttaatgtaattctaaggtaccattttagaaaaaacatttgttttaagattccaagaaacctgtgagttaatactatatttaaaagagaattggtaaattttgaatgtgtgtaatattttggaacctgtttaaaaaccaaatatacctgcaaatagatacagcctatcctatactatttaaatgtttggctgttttgttttatagaaattattttgctgaattcacaaataaaatttaagaaga

SEQ ID NO: 325454 - DNA, 909 bp, Artificial Sequence
  derived and/or modified sequence
aattattgaagactgcagtaactcagaggataccatcaaattacttcgcttttgctcttgggagaatcctcagttctcatctactgtcctcagcgaacttctctggcagaattcataatgcacttaaaggaattccagatgacagagatgggctgttcgatacaatacagcgctcgaagaatcactatcaaaaacgagcatatcagtgcataaaatgtatggtagctctatttagcagttgtcctgttgcttaccagatcttacagggtaacggagatcttaaaagaaaatggacctgggcagtggaatggctaggagatgaacttgaaagaagaccatatactggcaatcctcagtatagttacaacaattggtctcctccagtacaaagcaatgaaacagcaaatggttatttcttagaaagatcacatagtgctaggatgacacttgcaaaagcttgtgaactctgtccagaagaggagccagatgaccaggatgccccagatgagcatgagccctctccatcagaagatgccccattatatcctcattcacctgcctctcagtatcaacagaataatcatgtacatggacagccatatacaggaccagcagcacatcacttgaacaaccctcagaaaacaggccaacgaacacaagaaaattatgaaggcaatgaagaagtatcctcacctcagatgaaggatcagtgaaaagcaataattaactgcttcctttatgactatgcactaaggtcttatagtccaaactttctctgtgtctggctagtattgaaaactagataaactgctccaaaccaacatggagtaaagagcatattcactggtttatttgcagtaatttgcaatttgtcagtgtataagacacatgcagggtgaagtgtacaga

SEQ ID NO: 325455 - protein, 237 aa, Artificial Sequence
  derived and/or modified sequence
  misc_feature (1)..(1): Xaa can be any naturally occurring amino acid
XLLKTAVTQRIPSNYFAFALGRILSSHLLSSANFSGRIHNALKGIPDDRDGLFDTIQRSKNHYQKRAYQCIKCMVALFSSCPVAYQILQGNGDLKRKWTWAVEWLGDELERRPYTGNPQYSYNNWSPPVQSNETANGYFLERSHSARMTLAKACELCPEEEPDDQDAPDEHEPSPSEDAPLYPHSPASQYQQNNHVHGQPYTGPAAHHLNNPQKTGQRTQENYEGNEEVSSPQMKDQ

SEQ ID NO: 325456 - protein, 224 aa, Artificial Sequence
  derived and/or modified sequence
MSHVVVKNDPELDQQLANLDLNSEKQSGGASTASKGRYIPPHLRNREASKGFHDKDSSGWSCSKDKDAYSSFGSRDSRGKPGYFSERGSGSRGRFDDRGRSDYDGIGNRERPGFGRFERSGHSRWCDKSVEDDWSKPLPPSERLEQELFSGGNTGINFEKYDDIPVEATGSNCPPHIENFSDIDMGEIIMGNIELTRYTRPTPVQKHAIPIIKGKRDLMACAQT

SEQ ID NO: 325457 - DNA, 675 bp, Artificial Sequence
  derived and/or modified sequence
atgagccacgtggtggtgaagaatgaccctgagctcgaccaacagttggccaacctggatcttaattctgagaagcagagcggcggggccagtaccgcctcaaaaggtaggtacatacctccgcatttacgaaatagagaagcctctaagggctttcatgacaaagatagcagcggctggtcttgctctaaggacaaggatgcttactctagctttggctccagggatagtcggggcaaaccaggttacttttccgagaggggctcaggctcgagggggcgattcgacgaccgtggcaggtccgactatgatgggataggaaatcgagagaggcccggattcggcagattcgaaagaagtggacactctaggtggtgcgacaagtcagtcgaagacgactggagcaagcccctgcccccaagcgagcggttggagcaagagttattctccggtgggaacactggtataaacttcgagaagtacgacgatatacccgtggaagccactgggtccaactgtcctcctcacattgaaaatttttccgacatagatatgggagaaatcattatgggtaatattgagttgaccagatacaccaggccaacgcctgtccagaagcacgctatccccatcatcaaaggcaaaagggatctcatggcttgtgcgcagacttag

SEQ ID NO: 325458 - DNA, 675 bp, Artificial Sequence
  derived and/or modified sequence
atgagccacgtggtggtgaagaatgaccctgagctggaccagcagctggccaacctggacctgaacagcgagaagcagagcggcggggccagcacagccagcaagggccgctacatccccccccacctgaggaaccgggaggccagcaagggcttccatgacaaggacagcagcggctggagctgcagcaaggacaaggatgcctacagcagctttggcagccgggacagccggggcaagccaggctacttcagcgagcggggcagcggcagccggggccgctttgatgaccggggccgcagtgactatgatggcatcggcaaccgggagcggcccggcttcggccgctttgagaggagcggccacagccgctggtgtgacaagtctgtggaggatgactggagcaagcccctgcccccatctgagcggctggagcaggagctgttcagcggcggcaacacaggcatcaactttgagaagtatgatgacatccctgtggaggccaccggcagcaactgccccccccacatcgagaacttcagtgacatcgacatgggagagatcatcatgggcaacatcgagctgacccgctacacccggcccacccctgtgcagaagcacgccatccccatcatcaagggcaagagggacctgatggcctgtgcccagacctag

SEQ ID NO: 325459 - DNA, 675 bp, Artificial Sequence
  derived and/or modified sequence
atgagccacgtggtggtgaagaacgaccccgagctggaccagcagctggccaacctggatttgaactctgagaaacaatctggtggcgcatctacagcgagcaaggggagatacatccccccacatctcagaaatagagaagcgagcaagggtttccatgacaaagacagctcaggctggtcctgcagcaaggacaaagacgcctactcttctttcgggagtcgagactcaagggggaaacccgggtatttctcagaaagaggatctggctctaggggtaggttcgacgacaggggccgcagcgattacgatggaattgggaaccgcgagcgacccggctttggtcggtttgagaggtctggccactccaggtggtgcgataagagtgttgaagacgactggagcaaacccctgcctcccagcgagaggctggaacaggagctgttctccgggggtaacacaggaataaactttgaaaagtatgatgacatccccgtggaggctacgggttcaaattgtcccccccacatcgagaacttctcagatattgatatgggcgagatcatcatgggcaatatagagctgaccaggtacacaagaccaacccctgtgcaaaaacatgccatccctataattaaaggtaagcgcgatctgatggcctgtgcccaaacttag

SEQ ID NO: 325460 - DNA, 675 bp, Artificial Sequence
  derived and/or modified sequence
atgtcacacgttgtggtgaagaacgacccggaactggaccagcagctggccaacctggacttgaattctgagaagcaatctggaggggcatctactgccagcaagggtcgttacatccccccacacttgcgcaacagggaggcttctaaaggattccacgacaaagactcctccggatggtcgtgcagtaaggataaggacgcctatagttctttcggctccagggactcgcggggtaagccgggatacttctctgaaagaggatccggcagcagaggacggtttgacgataggggaagatctgactacgacggaattgggaacagagaacggccaggctttggtaggttcgaaaggagcggtcactcgaggtggtgcgacaaatccgtagaagatgactggagtaagcccttgccacctagcgaacgactggaacaggagctgtttagtggaggcaataccggcattaattttgaaaaatatgatgacattccagtggaagccaccggcagcaactgcccaccacacattgagaatttcagcgacatagacatgggtgagataatcatgggtaacatcgagttgacccggtatactcgtccaaccccggtccagaaacatgccattccaatcataaaaggcaagagagacttgatggcatgcgcccagacctag

SEQ ID NO: 325461 - DNA, 1049 bp, Artificial Sequence
  derived and/or modified sequence
ggagttcctaggtgaaccccagcagcctaaccctgtcaagtctgtcgagcctctggctggtcacacgtgctgcggaatccactcagctttcctcaggtgcagtcaggtccatcctgcagagggaccttctgcggacctgttctttcacctccctaacctgaagattgtattcaaaccaccgtggatcgctcacgtaaaatggtcactgcgcctaacacctgggatcccgtaacccttatctatcttggcttcagagagttttttgactagttccaactttgctgaagcttgtcaaagctgtaggtccagtgtaagagttccgctattcggtctcacacctacagtggactacccgatttttcgcttctcttcagggatgagtcatgtggtggtgaaaaatgaccctgaactggaccagcagcttgctaatctggacctgaactctgaaaaacagagtggaggagcaagtacagcgagcaaagggcgctatatacctcctcacttaaggaacagagaagcatctaaaggattccatgataaagacagttcaggttggagttgcagcaaagataaggatgcatatagcagttttgggtctcgagattctagaggaaagcctggttatttcagtgaacgtggaagtggatcaaggggaagatttgatgatcgtggacggagtgactatgatggtattggcaatcgtgaaagacctggctttggcagatttgaacggagtggacatagtcgttggtgtgacaagtcagttgaagatgattggtcaaaaccacttccaccaagtgaacgcttggagcaagaactgttttctggaggaaacacggggattaactttgagaaatatgatgatataccagtagaggcaaccggcagtaactgtcctccacatattgagaattttagcgatattgacatgggagaaattatcatggggaacattgaacttactcgctatactcgtcctactccagtgcaaaaacatgccattcctattattaagggaaaaagagacttaatggcttgtgcccaaacag

SEQ ID NO: 325462 - DNA, 675 bp, Artificial Sequence
  derived and/or modified sequence
atgagccacgtggtggtgaagaacgaccccgagctggaccagcagctggccaacctggacctgaacagcgagaagcagagcggcggcgccagcaccgccagcaagggcagatacatccccccccacctgagaaacagagaggccagcaagggcttccacgacaaggacagcagcggctggagctgcagcaaggacaaggacgcctacagcagcttcggcagcagagacagcagaggcaagcccggctacttcagcgagagaggcagcggcagcagaggcagattcgacgacagaggcagaagcgactacgacggcatcggcaacagagagagacccggcttcggcagattcgagagaagcggccacagcagatggtgcgacaagagcgtggaggacgactggagcaagcccctgccccccagcgagagactggagcaggagctgttcagcggcggcaacaccggcatcaacttcgagaagtacgacgacatccccgtggaggccaccggcagcaactgccccccccacatcgagaacttcagcgacatcgacatgggcgagatcatcatgggcaacatcgagctgaccagatacaccagacccacccccgtgcagaagcacgccatccccatcatcaagggcaagagagacctgatggcctgcgcccagacctag

SEQ ID NO: 325463 - protein, 206 aa, Artificial Sequence
  derived and/or modified sequence
MGTWILFACLVGAAFAMPLPPHPGHPGYINFSYENSHSQAINVDRIALVLTPLKWYQSMIRPPYSSYGYEPMGGWLHHQIIPVVSQQHPLTHTLQSHHHIPVVPAQQPRVRQQALMPVPGQQSMTPTQHHQPNLPLPAQQPFQPQPVQPQPHQPMQPQPPVQPMQPLLPQPPLPPMFPLRPLPPILPDLHLEAWPATDKTKQEEVD

SEQ ID NO: 325464 - protein, 205 aa, Artificial Sequence
  derived and/or modified sequence
MGTWILFACLVGAAFAMPLPPHPGHPGYINFSYENSHSQAINVDRIALVLTPLKWYQSMIRPPYSSYGYEPMGGWLHHQIIPVVSQQHPLTHTLQSHHHIPVVPAQQPRVRQQALMPVPGQQSMTPTQHHQPNLPLPAQQPFQPQPVQPQPHQPMQPQPPVQPMQPLLPQPPLPPMFPLRPLPPILPDLHLEAWPATDKTKQEEV

SEQ ID NO: 325465 - DNA, 764 bp, Artificial Sequence
  derived and/or modified sequence
gggaaataagagagaaaagaagagtaagaagaaatataagagccaccatgggaacatggattctctttgcgtgcttggtgggagcggccttcgcgatgcccctgccgcctcatcccggacatccggggtatatcaacttttcgtacgagaactcccactcccaagccatcaatgtagatcgaatcgcgctcgtgcttacgcctttgaagtggtatcaatcaatgattcggccaccctatagcagctacgggtacgaaccgatgggtggctggctccaccatcagattatccccgtagtgtcgcagcagcacccgctcacgcataccctgcagtcgcaccaccacatccctgtcgtgccagcccagcaaccgagagtccgccagcaggcattgatgcccgtccccggtcagcagtcaatgactccgacgcagcatcatcagcccaatctcccgcttcctgctcagcagcccttccagcctcagcccgtgcaaccgcagccacaccagcccatgcagccccagccgcctgtccaaccaatgcagcctctgcttccacaaccgccactgccgccgatgttccccttgaggcctcttcccccaatcctgccggatcttcacctcgaggcgtggcccgcaaccgacaaaacaaagcaagaagaggtagactaatgagctgccttctgcggggcttgccttctggccatgcccttcttctctcccttgcacctgtacctcttggtctttgaataaagcctgagtaggaag

SEQ ID NO: 325466 - DNA, 621 bp, Artificial Sequence
  derived and/or modified sequence
atgggcacctggatcctgttcgcctgcctggtgggcgccgccttcgccatgcccctgcccccccaccccggccaccccggctacatcaacttcagctacgagaacagccacagccaggccatcaacgtggacagaatcgccctggtgctgacccccctgaagtggtaccagagcatgatcagacccccctacagcagctacggctacgagcccatgggcggctggctgcaccaccagatcatccccgtggtgagccagcagcaccccctgacccacaccctgcagagccaccaccacatccccgtggtgcccgcccagcagcccagagtgagacagcaggccctgatgcccgtgcccggccagcagagcatgacccccacccagcaccaccagcccaacctgcccctgcccgcccagcagcccttccagccccagcccgtgcagccccagccccaccagcccatgcagccccagccccccgtgcagcccatgcagcccctgctgccccagccccccctgccccccatgttccccctgagacccctgccccccatcctgcccgacctgcacctggaggcctggcccgccaccgacaagaccaagcaggaggaggtggactag

SEQ ID NO: 325467 - DNA, 618 bp, Artificial Sequence
  derived and/or modified sequence
atgggcacctggatcctgttcgcctgcctggtgggcgccgccttcgccatgcccctgcccccccaccccggccaccccggctacatcaacttcagctacgagaacagccacagccaggccatcaacgtggacagaatcgccctggtgctgacccccctgaagtggtaccagagcatgatcagacccccctacagcagctacggctacgagcccatgggcggctggctgcaccaccagatcatccccgtggtgagccagcagcaccccctgacccacaccctgcagagccaccaccacatccccgtggtgcccgcccagcagcccagagtgagacagcaggccctgatgcccgtgcccggccagcagagcatgacccccacccagcaccaccagcccaacctgcccctgcccgcccagcagcccttccagccccagcccgtgcagccccagccccaccagcccatgcagccccagccccccgtgcagcccatgcagcccctgctgccccagccccccctgccccccatgttccccctgagacccctgccccccatcctgcccgacctgcacctggaggcctggcccgccaccgacaagaccaagcaggaggaggtgtag

SEQ ID NO: 325468 - DNA, 621 bp, Artificial Sequence
  derived and/or modified sequence
atggggacctggattttgtttgcctgccttgtgggagcagcttttgccatgcctctaccacctcatcctgggcaccctggttatatcaacttcagctatgagaactcacattctcaggctatcaatgttgacaggattgctttagtgctcacccctttgaagtggtaccagagcatgataagaccaccatactcttcctatggttacgagcccatgggtggatggctgcaccaccaaatcatccccgtggtgtcccaacagcaccccctgactcacaccctgcagtctcatcaccacatcccagtggtgccagctcagcagcccagggtccgccagcaagcactgatgcctgttcctggccagcaatccatgactccaacccaacaccatcagccaaacctccctctgcctgcccagcagcccttccagccccagcctgttcagccacagcctcaccagcccatgcagccccagccacctgtgcaacccatgcagcccctgctgccacagccacctctgcctccaatgttccccctgcggcccctgccccccatacttcctgatctgcatctggaagcttggccagcaacagacaagaccaagcaggaggaagtggattaa

SEQ ID NO: 325469 - DNA, 615 bp, Artificial Sequence
  derived and/or modified sequence
atggggacctggattttgtttgcctgccttgtgggagcagcttttgccatgcctctaccacctcatcctgggcaccctggttatatcaacttcagctatgagaactcacattctcaggctatcaatgttgacaggattgctttagtgctcacccctttgaagtggtaccagagcatgataagaccaccatactcttcctatggttacgagcccatgggtggatggctgcaccaccaaatcatccccgtggtgtcccaacagcaccccctgactcacaccctgcagtctcatcaccacatcccagtggtgccagctcagcagcccagggtccgccagcaagcactgatgcctgttcctggccagcaatccatgactccaacccaacaccatcagccaaacctccctctgcctgcccagcagcccttccagccccagcctgttcagccacagcctcaccagcccatgcagccccagccacctgtgcaacccatgcagcccctgctgccacagccacctctgcctccaatgttccccctgcggcccctgccccccatacttcctgatctgcatctggaagcttggccagcaacagacaagaccaagcaggaggaagtg

SEQ ID NO: 325470 - DNA, 621 bp, Artificial Sequence
  derived and/or modified sequence
atgggaacttggatcctttttgcgtgcctcgtcggagcagctttcgcgatgcccttgcccccccacccagggcaccctggttacatcaatttctcctacgagaatagccacagccaggccataaacgtcgatcgcatagccctggtgctaacccctctcaagtggtaccagtccatgattagacctccgtacagttcatacggatacgagccaatgggcgggtggctgcaccaccagattattccagtagtcagtcaacaacacccactcacacatactttgcagagtcaccatcacattcccgtggtcccagcccagcaacccagggtcaggcaacaagccctgatgccagtgcccgggcagcagtcaatgacacccacccagcaccaccaacccaacctgcccctgccagcccagcagcccttccaaccacagcctgtgcaaccccagccccaccagcccatgcagccacagcccccagtacagccaatgcagcctttattgcctcaaccacctttgcccccaatgttcccactgcgccctctcccgccaatcctacctgacttgcatctggaggcctggcctgccaccgataagaccaaacaagaggaggtagattag

SEQ ID NO: 325471 - DNA, 618 bp, Artificial Sequence
  derived and/or modified sequence
atgggaacctggatcctcttcgcttgtctggtgggagccgcttttgctatgcccctgcccccccaccccggtcaccccggttatatcaattttagttacgagaactcccactcacaggctataaacgtggacagaattgctttagtgctgacccctctgaagtggtaccagtccatgattcgaccgccttacagcagctacgggtatgaaccaatgggcggatggctgcatcaccagattatacctgtcgtgtcccagcagcacccactgacgcatacactccagagccatcatcacatacccgtggtccctgcccagcagcctcgcgtcagacagcaagctcttatgccggtaccgggccagcagtccatgacccctacacagcatcatcagcccaacctgccgcttccggctcagcaaccatttcagccacaaccagtacagccccagccccaccagcccatgcagccccagccccctgtgcagcccatgcagcccttgttgccacagcctcctcttcctcccatgttccccttgcggccgttaccccctatactccccgatcttcacctcgaagcgtggccagctaccgacaagacgaaacaggaagaggtgtag

SEQ ID NO: 325472 - DNA, 621 bp, Artificial Sequence
  derived and/or modified sequence
atgggcacctggatcctgtttgcctgcctggtgggcgccgcctttgccatgcccctgcccccccaccctggccaccctggctacatcaacttctcctatgagaacagccacagccaggccatcaacgtggaccgcatcgccctggtgctgacccccctgaagtggtaccagagcatgatccggcccccctacagcagctatggctatgagcccatgggcggctggctgcaccaccagatcatccctgtggtgtcccagcagcaccccctgacccacaccctgcagagccaccaccacatccctgtggtgcctgcccagcagccccgggtgcggcagcaggccctgatgcctgtgcccggccagcagagcatgacccccacccagcaccaccagcccaacctgcccctgcctgcccagcagcccttccagccccagcctgtgcagccccagccccaccagcccatgcagccccagccccctgtgcagcccatgcagcccctgctgccccagccccccctgccccccatgttccccctgcggcccctgccccccatcctgcctgacctgcacctggaggcctggccagccacagacaagaccaagcaggaggaggtggactag

SEQ ID NO: 325473 - DNA, 618 bp, Artificial Sequence
  derived and/or modified sequence
atgggcacctggatcctgtttgcctgcctggtgggcgccgcctttgccatgcccctgcccccccaccctggccaccctggctacatcaacttctcctatgagaacagccacagccaggccatcaacgtggaccgcatcgccctggtgctgacccccctgaagtggtaccagagcatgatccggcccccctacagcagctatggctatgagcccatgggcggctggctgcaccaccagatcatccctgtggtgtcccagcagcaccccctgacccacaccctgcagagccaccaccacatccctgtggtgcctgcccagcagccccgggtgcggcagcaggccctgatgcctgtgcccggccagcagagcatgacccccacccagcaccaccagcccaacctgcccctgcctgcccagcagcccttccagccccagcctgtgcagccccagccccaccagcccatgcagccccagccccctgtgcagcccatgcagcccctgctgccccagccccccctgccccccatgttccccctgcggcccctgccccccatcctgcctgacctgcacctggaggcctggccagccacagacaagaccaagcaggaggaggtgtag

SEQ ID NO: 325474 - DNA, 621 bp, Artificial Sequence
  derived and/or modified sequence
atgggcacctggatcctgttcgcctgcctggtgggcgccgccttcgccatgcccctgccaccccaccccggtcaccctggatacatcaacttcagttatgagaattcccattcccaagccattaacgtagatagaatcgctctggtgctaacccctctgaaatggtatcagagcatgattcgccctccctactcttcatatggctatgaacctatgggcggttggctacatcaccagatcatcccagttgtgagtcaacaacaccctttgacgcataccctgcagagccaccatcacattccggtcgtgccagcgcagcagccccgggtgcgtcaacaggccctaatgccggtcccaggtcagcaaagcatgacccccacccaacatcatcagcctaatctaccattgccggcacagcagcctttccagccgcaaccggtccagccccaaccccatcagcctatgcagccacagccaccggttcaacccatgcaaccgcttcttccccagccccctctcccgcccatgttccccctccgtccactgccacctatcctccccgacttgcaccttgaggcctggcctgccacggacaaaacaaaacaggaggaagtggattag

SEQ ID NO: 325475 - DNA, 618 bp, Artificial Sequence
  derived and/or modified sequence
atgggcacctggatcctgttcgcctgcctggtgggcgccgccttcgctatgcccctgccaccacacccgggacacccgggttacatcaatttttcttacgagaattcccacagtcaggccatcaacgtcgatagaatcgccctagttctcactcctctgaagtggtaccagtctatgattaggcctccttactcatcctacgggtatgagcccatgggtggctggctgcaccatcaaattattccagttgtgtcacagcagcaccccttaacccataccctgcaatcccatcaccatatccctgtggtgcccgcacagcagcccagagttaggcagcaggccctgatgcctgtgccaggccagcagtctatgactccgactcaacatcaccagccaaacttaccactgcccgcccagcagccctttcagcctcagcctgtgcagccccagccgcatcagcccatgcaaccccaaccccctgtccagcccatgcagcctctgttaccacagccccctctaccgccaatgttcccgctgaggccgcttcctcctatattgcctgatctccatctggaggcctggccagccaccgataagacaaagcaggaagaggtctag

SEQ ID NO: 325476 - DNA, 621 bp, Artificial Sequence
  derived and/or modified sequence
atggggacatggatcctgttcgcctgcctggtgggggctgccttcgcaatgcctctgccaccacacccgggtcatccgggatacattaacttcagctacgagaactcacattcccaggccattaacgtcgatagaatcgccctagtgctgacaccactcaaatggtatcagagcatgatacgacccccatacagcagctatggatacgaacccatgggaggatggctccatcaccagataattccggtagtgtcccagcaacaccctctcacccatacccttcagtctcaccatcacatacctgtggtcccagcccagcaaccacgagtcaggcagcaggcccttatgcccgtgccgggtcagcagtccatgacaccaacacagcaccaccagcccaacctccctcttccagcccagcaaccatttcagcctcagccagtacagccacagcctcaccagcctatgcaaccgcagccacccgtgcaacccatgcaacccctcctgcctcaaccaccacttccccctatgttccctcttagaccgttgccgccaatcctgcccgacctgcatctagaagcatggcccgctactgacaaaacaaaacaagaggaagtcgattag

SEQ ID NO: 325477 - DNA, 618 bp, Artificial Sequence
  derived and/or modified sequence
atgggaacttggatcctctttgcatgcttagtaggtgccgcatttgcaatgcctttgccgccacatcctggccaccctggctacatcaatttcagttatgaaaactctcactcccaggccattaacgtggaccggatcgctctcgttctcactcccctgaaatggtaccaatctatgatcaggcccccatatagctcatatgggtacgagcccatgggcggatggctccaccaccagattattccagtagtctcacagcagcacccgctaacacacactcttcaatcgcatcaccacatacccgtggtcccagcccaacagccgcgtgtcagacagcaggccctcatgcctgtaccgggtcagcagagtatgacacctacccagcaccaccagcctaatctgccacttcccgctcaacagccgtttcagccacaacccgtgcagcctcagccacatcaaccgatgcaacctcaaccaccagtccagcccatgcagccgctgctgccacagccacctctccctcctatgttccctcttaggccactcccgccaatcctgccggatctgcacctggaggcatggccagctacggataaaacaaaacaagaggaggtctag

SEQ ID NO: 325478 - DNA, 618 bp, Artificial Sequence
  derived and/or modified sequence
atgggaacgtggattcttttcgcatgcctggtaggcgcggcatttgccatgcctctgccgcctcatcctggacatccaggctatatcaacttttcctacgaaaattcacattcccaggcgattaatgtagacagaattgcactggttctgacgccattaaagtggtatcagtcaatgattaggccgccatattcgagctatgggtacgagccgatgggaggatggcttcatcaccaaattatacctgttgttagccaacaacatccattaactcatacacttcagtcgcatcatcacatccctgtagtcccggcccagcagccgcgggttagacaacaggcattaatgccggtacctgggcagcagagcatgacaccgactcaacatcatcaaccgaacctgcctctgccggcacaacagccgtttcagcctcagccggtgcagccacagccacatcagcccatgcagccgcagcctccagttcagcctatgcaaccacttctgcctcaaccgccgctcccgccaatgttcccgcttagaccgcttcctcctatccttcctgacttgcatctggaagcatggcccgccactgataagactaagcaggaagaagttgat

SEQ ID NO: 325479 - DNA, 618 bp, Artificial Sequence
  derived and/or modified sequence
atgggtacctggattttattcgcctgccttgtgggcgcagcgttcgcaatgcccctgccaccccaccccggtcacccgggctacatcaatttttcctacgaaaattcccacagtcaggccatcaacgtggatcgcatagcgttggttctgacccccttgaagtggtaccagagtatgattcgtccaccctacagcagctatggttatgagccgatgggaggctggctgcaccaccaaataattcccgtggtgagtcagcagcatcccttgacacacactctgcagtcccatcatcatatacccgtggtgccggcgcagcaacccagggtccggcagcaggcacttatgcccgtacccggccaacagtctatgacgcccacacagcatcaccagccaaacctgccattgccagcgcagcagccctttcagccgcagccagttcagccccaaccccatcagccgatgcaaccccagccgccggtgcaaccaatgcaaccactcctacctcagccgccgctgccccctatgttcccacttcgcccactgccacccatcttgccagacctgcacctggaagcttggccggccacagacaagacgaagcaggaggaggttgat

SEQ ID NO: 325480 - DNA, 618 bp, Artificial Sequence
  derived and/or modified sequence
atgggaacctggattctctttgcatgtctggtgggcgccgcctttgcgatgcctcttcccccgcaccctggccatccgggatacatcaacttctcctatgagaactctcactcccaggccattaacgtggacagaatcgctctcgtcctaactcccctgaagtggtatcagagcatgatacggccaccctactctagttatggctacgagcccatgggaggttggctgcaccatcagatcatccccgtggtgtctcaacaacacccactcacacacacccttcagagccatcaccacatacccgtggtgcctgcacagcaaccccgcgtgcggcagcaagccttaatgcccgtaccaggtcagcagagtatgacccctacccagcaccatcagcccaatctgcccctccccgcccaacaacccttccagcctcaaccagtgcagccacagcctcaccagcctatgcagccacagccccccgtccagcctatgcaaccgctactgccacagccaccactgcctccaatgttcccgcttaggcccctgccaccaatcctccccgacctccaccttgaagcatggccagcgactgataaaactaagcaggaagaggtggac

SEQ ID NO: 325481 - DNA, 618 bp, Artificial Sequence
  derived and/or modified sequence
atgggtacatggatcttattcgcttgcctggtcggcgccgcattcgcaatgcccctgccgccacaccctgggcaccccggatacataaatttctcatatgagaatagccattcacaagcgattaacgtagacagaattgccttggtcctgacgccactgaagtggtatcagtctatgattagacctccgtatagttcgtatggttacgagccgatgggcggctggctgcatcaccagattatcccggtcgtgagccaacagcaccccctgactcacacattgcaaagccatcaccacatcccggttgtcccagcccaacagcccagagtgagacagcaagcattaatgcccgtgcccggacagcaatccatgacgcccacccagcaccatcaacctaatctacctctcccagctcagcagccatttcaacctcagccagtccaaccccagcctcatcaacctatgcaaccacagccccccgtgcagcctatgcagcctttactgccccagccacctctccccccaatgtttcctctcagacccctgccccccatactccctgatcttcacctggaggcttggcccgccactgacaaaacaaaacaagaggaggtggac

SEQ ID NO: 325482 - DNA, 618 bp, Artificial Sequence
  derived and/or modified sequence
atgggtacttggattctctttgcctgtctggtgggcgcagcattcgccatgcctttgcctccacacccgggacatcctggatacataaacttttcatacgagaattcacactcgcaggcaattaacgtggacagaattgctcttgtcctgacccctctcaaatggtaccaatcgatgattagacctccttactcctcctatggatacgaaccgatgggtggttggctgcatcatcagattattccagtggtgtcgcaacagcatccactcacgcatacgctgcagtcgcatcaccatattcccgtcgtgccggcgcaacagccccgcgtgcgccagcaggctcttatgcctgtgcctggccaacaatccatgacgccaacccaacaccatcaaccgaatctccccctgcctgcgcaacaacccttccagccacaaccggtgcaaccacagcctcaccagcctatgcagccccagccacccgtgcaacccatgcaacccctgcttcctcaacctccattgccacccatgtttccactgaggccactcccaccgatcctcccagatctgcacttggaggcatggccagccacggataagaccaagcaggaagaagtcgac

SEQ ID NO: 325483 - DNA, 618 bp, Artificial Sequence
  derived and/or modified sequence
atgggtacctggatactctttgcatgtctggtgggggcagccttcgctatgcctcttccaccccatccaggacatcctggttacatcaacttttcatacgaaaacagccactcacaggctatcaacgtcgataggattgcactggtgctgactccactcaagtggtaccagtccatgattagacccccatactcgtcctacggatacgaacctatggggggatggcttcatcatcagatcattcctgtcgtctcgcaacagcaccctctgactcatacccttcaatcacatcatcatattccagtggtgccagcccaacaacctcgagtgaggcaacaggcactcatgcctgtccccggacagcaatcaatgacgcctactcaacatcatcaaccaaatctgccgcttcccgcacaacaaccttttcaaccacagcctgtccagccacaaccccatcaacctatgcaacctcaaccccctgttcagcctatgcagcctcttctgccacagcctcctctgcctcctatgttcccacttcgtcctttgccacctattcttcctgatcttcacctcgaagcctggcctgcaaccgataagactaagcaagaagaggtcgac

SEQ ID NO: 325484 - DNA, 618 bp, Artificial Sequence
  derived and/or modified sequence
atgggaacttggattctgttcgcatgtctggtgggggcagcatttgccatgccactgcctccccatcctggtcatccaggttacataaactttagctacgagaactctcattcccaagcgataaacgtggacagaatcgcactcgtccttacgcccctgaagtggtaccagtcgatgattcggccaccatactcgtcctacgggtacgaacctatgggcggatggctccaccatcagattatcccagtcgtgtcccaacaacatccacttactcataccctccaatcacaccaccatatccccgtcgttcccgcccaacagccgcgcgtgcgacagcaggcacttatgcctgtgcctggccaacagtcaatgactcccacccaacatcaccaaccaaacctgccgcttcctgcacagcaaccattccagccacagcctgtccaaccacaaccacatcagcctatgcaacctcaacctccagtccaaccgatgcagcctctgttgcctcagcctcctctgcctcccatgttccctcttcgacctcttcccccaattcttcctgatctgcatctggaggcctggcctgccaccgataagaccaaacaagaagaagtcgac

SEQ ID NO: 325485 - DNA, 618 bp, Artificial Sequence
  derived and/or modified sequence
atgggtacatggatattatttgcttgcttagtgggcgcagcgtttgccatgcctctgcccccccatccagggcaccccgggtatatcaatttcagttatgagaattctcactctcaggctatcaatgtggacagaatcgccttagtcctaacgcctctgaagtggtaccaaagcatgatacggccgccctactcatcatatgggtacgagcccatgggagggtggctacaccaccagatcattcccgtcgtttcccagcagcaccctttgacgcacacgctccaatcccaccaccatattccagttgttccagcccagcaacctagggttcgccagcaggccctcatgccggtcccaggccagcagtctatgacaccaactcagcaccatcagccgaacctgcccctgccagcgcagcagcccttccaaccccagccggtgcagcctcaaccccatcagcctatgcaaccgcagccccccgtccaaccaatgcagcctctcttgcctcaacctcccctcccacctatgttccccctccgaccactgcctccgatactgcctgacttgcacttggaagcatggcctgccacggataagacgaaacaggaggaagttgac

SEQ ID NO: 325486 - DNA, 618 bp, Artificial Sequence
  derived and/or modified sequence
atgggaacatggattttatttgcttgtttagttggtgctgcatttgctatgccattaccaccacatcctggtcatccaggatatataaattttagttatgagaattctcattctcaagcaattaatgttgatagaatcgctttagttctcactccattaaaatggtatcaatcaatgattcgtccaccatattcatcttatggatatgaacctatggggggatggttacatcatcaaattattcctgttgttagtcaacaacatccattaactcacacacttcaaagtcatcatcatataccagtagttccagctcaacaaccaagagtgaggcaacaagcattgatgccagttccaggacaacaatcaatgacaccaacacaacatcatcaaccaaatttaccattaccagcacaacaaccatttcaaccacaaccagttcaaccacaaccacatcaaccaatgcagccacaacctccagttcaaccaatgcaacctctcttaccacaaccaccattaccacctatgtttcctcttcgtccacttccaccaatattaccagatttacatcttgaagcatggccagcaacagataaaactaagcaagaagaagttgac

SEQ ID NO: 325487 - DNA, 618 bp, Artificial Sequence
  derived and/or modified sequence
atgggtacctggatcctgttcgcatgcctggtcggtgccgcttttgccatgccactcccaccccacccaggccacccaggatatattaactttagctacgagaactcacacagtcaagctatcaatgtggacagaatcgcactggtgttgaccccccttaagtggtatcagtctatgatcaggcccccatacagctcctatggttacgaacctatgggtggctggctgcaccatcagatcatccctgtcgtttcccagcagcatcctctcacccacaccctccagagtcaccatcatatccccgttgttcccgcccagcaaccccgtgtccgtcaacaagccttgatgcccgtccccggacagcagtccatgaccccaacccagcatcatcagccaaacctccccctgcccgcacagcagccctttcagccacaacctgttcagccacagccccaccagcccatgcagccacaaccccccgtccagccaatgcaaccacttctcccccaacctccacttccacctatgttccccctgaggcccctcccaccaatccttcctgatttgcacctcgaggcttggcctgccactgacaagacaaagcaggaagaggtggat

SEQ ID NO: 325488 - DNA, 618 bp, Artificial Sequence
  derived and/or modified sequence
atgggaacgtggattctgttcgcatgtttggtgggtgcagcatttgcaatgcctctgcctccacatcccgggcacccaggctacatcaacttctcttatgagaatagccattcccaggcgattaatgtagatcggattgcgctcgtgcttacccccctcaagtggtaccagtcgatgattcgccctccgtactcatcatacggctacgaacccatgggcggatggctccatcatcaaatcattccagtggtatcccaacaacatcctctgacccacactctgcaatcgcaccaccatatccctgttgtgcccgcccagcagccgagggtgagacagcaagcacttatgcccgtgcctggacaacaatccatgaccccgacccagcatcaccaacctaacctcccgctgcctgcgcagcaaccatttcaacctcaaccagtgcagccgcaacctcaccaacctatgcaaccacagcccccggtccagccaatgcagccccttctcccacagcctcctcttccaccaatgtttcctcttcgtcctctcccgccgatcttgccggacctgcaccttgaggcgtggcccgccactgacaaaactaagcaagaagaagtcgat

SEQ ID NO: 325489 - DNA, 618 bp, Artificial Sequence
  derived and/or modified sequence
atgggaacttggatcttgtttgcctgcctggtgggagcggcgtttgcaatgccgctgcccccacaccctggacacccaggttacatcaacttcagctatgagaatagccatagtcaagctattaacgtggatagaatcgctctggtgctgacccccctgaagtggtaccaatcaatgatacgcccaccgtacagttcctatgggtacgaaccgatgggagggtggctccaccaccagataatccccgtggtgtcccaacagcacccactcacacataccctgcaatcacaccaccacatacccgtcgtccccgcccagcaaccccgggtgagacagcaggccctcatgccggtcccaggccagcagtccatgacacccacccagcaccatcagcccaatcttcctctgcccgcccagcagcccttccagccccagccagtgcagccccagccccaccagcccatgcagccccagccgcccgtacagccgatgcagccattattgccacaaccaccgctgccacctatgttccctttacgccccctgccaccaattctcccagacctgcacctcgaagcttggcccgcaaccgataagaccaaacaggaggaggtggat

SEQ ID NO: 325490 - DNA, 618 bp, Artificial Sequence
  derived and/or modified sequence
atgggaacctggattctgttcgcctgccttgtgggcgcagcctttgctatgcctctgccccctcaccctggacaccctggctacatcaacttctcttatgaaaactcacactctcaagccatcaatgtcgaccgcatagctctggtgctaacacctctgaagtggtaccagtctatgatccggccaccctatagtagttatggctatgaaccaatgggcggctggctgcaccaccagatcatccctgttgtgagtcagcagcatcctttgactcatacactgcagagccatcatcacattcctgttgtgccagcccagcagccgagggtgcgtcagcaagccctgatgccagtgcctggtcagcagtctatgacccccacccaacatcaccagccaaatctacccctcccggcccagcagccctttcagccacagcctgtccagccacagccccatcagcctatgcagccccagccccctgtgcagcctatgcagcccctactgccccagcctcctttgccaccaatgttcccactgcggcctctgcctccaattctccctgacctgcacctggaagcatggccagctactgacaagaccaaacaggaagaggtggat

SEQ ID NO: 325491 - DNA, 618 bp, Artificial Sequence
  derived and/or modified sequence
atgggaacctggattctgttcgcctgtttggtgggagcagcattcgcaatgccgttacccccacatcccggacaccccgggtatataaatttctcttatgagaattcccattcacaggccattaacgtggataggattgcactggtgctgaccccactgaaatggtatcaaagcatgatccggccaccttacagctcttatggatatgagcctatgggtggttggttgcaccaccaaatcattccagtggtctcgcaacaacatccactcacccatacccttcagagccaccaccatatccccgtggtaccggcccagcagcctagggtaaggcagcaagccctgatgccggtgccgggacagcagtctatgacacccacgcaacatcatcagcctaacttgcctctgccggctcagcagccgttccagcctcaacccgtgcagcctcagccgcaccaaccaatgcagccacagcctcccgtgcagcccatgcagccgctccttccgcaaccccccctgccccctatgtttcccctgaggccactgccacctattttgcccgatctgcacttagaagcctggccagcaaccgacaagactaagcaggaggaggtggac

SEQ ID NO: 325492 - DNA, 618 bp, Artificial Sequence
  derived and/or modified sequence
atgggaacctggattctctttgcctgtttggtaggagctgcttttgcgatgccattgccccctcatcctggccaccccggatacatcaatttttcctacgagaacagccacagccaggcgatcaacgtggatcggatcgctcttgtgcttaccccactgaagtggtaccaatccatgatccgtccgccatattcaagctatggctatgagcctatgggcggttggttacatcaccagattatcccagtcgtgtctcaacagcacccactgacccacacactgcagagccatcaccatatccccgtcgtccccgctcaacagccaagagtcaggcagcaggctctgatgcctgtccccggccaacagtctatgacaccaacccagcatcatcagcccaatttgccgctgcccgcccaacagccatttcagccccagcctgttcaaccacagcctcaccaacccatgcagccacagcccccggtccaacccatgcagccactgctccctcagccacccttgccaccaatgtttccactgagaccactgccacctatcctccccgacttgcacctcgaggcttggcctgctaccgataagactaagcaggaggaggtggat

SEQ ID NO: 325493 - DNA, 618 bp, Artificial Sequence
  derived and/or modified sequence
atgggcacctggatactgttcgcatgcctggtgggagctgcgtttgccatgcctttgccaccccacccgggacaccccgggtatattaacttctcctacgaaaacagtcattcccaggccatcaatgtggatcggatcgcgctagtgctcaccccactgaagtggtatcagagtatgatccgccccccttattcttcctacggttatgagccaatgggagggtggctgcatcaccagatcatacctgtcgtgagccagcagcatcctttaacacacaccctgcaatcacatcaccacatacccgtggtacccgcccaacagccccgcgtccgacaacaggctctcatgcccgtgcccggccagcaatctatgacaccaacacagcaccaccagccaaatctgcctctgccagcacagcagccattccagccccagccagtacaacctcaaccgcatcagcctatgcagcctcagcctccagtccagccgatgcagcccctgcttccccagccaccactcccacccatgtttcctttacgccctttgccccccatactgccagatttgcatctggaggcatggcctgctacagataagacgaagcaggaggaagtggac

SEQ ID NO: 325494 - DNA, 618 bp, Artificial Sequence
  derived and/or modified sequence
atggggacctggattctgtttgcgtgcttagtgggagccgccttcgccatgcccctacccccacatccaggtcacccagggtatattaacttcagttacgagaattcacacagtcaagccattaacgttgaccggatcgctctcgtgctgactccccttaagtggtaccagagtatgatacggcccccgtatagttcctacggttacgagcccatgggaggctggttgcatcatcaaattatccccgttgtctcacaacaacatcctctgacccacacactccagtcacatcatcatataccggtggtaccagctcagcagccacgggtgaggcaacaggctctaatgccagtacctggacagcagtccatgactcccacacaacaccatcagccgaatttgcctctgccagctcagcaaccgtttcaaccccagcccgtacagccgcagccacaccagcctatgcagccccaaccgccagtgcagccaatgcaacccctactgccccaacccccgctgccacctatgtttcccctcagaccccttccccccattctgccagacctgcacctggaggcatggcctgcaacagataaaacgaagcaagaggaggtcgat

SEQ ID NO: 325495 - DNA, 618 bp, Artificial Sequence
  derived and/or modified sequence
atgggaacgtggatcctgtttgcttgtctggtaggagcggcgttcgcaatgcctctgcccccacatcctggccatccggggtatattaatttttcttatgaaaatagccattctcaggccatcaacgtcgatagaatcgcactggtgctgacccccctgaagtggtaccagtctatgatccgcccaccttactccagttatggctacgagccaatgggtggctggctccaccaccagattatccccgttgtgtcacagcagcatcccctaactcacacccttcagtctcatcatcatattccggtagtaccagcacaacaacctagggtcagacagcaggctttaatgccggtaccggggcagcagtcaatgacgcctacacagcatcaccagccaaacctgccgttgcctgcccagcagccctttcaaccacagcccgtgcagcctcagccgcaccagccaatgcagccacagccacctgtccagcctatgcagccgctactcccccagccccccctgccccctatgtttcctcttcgtccactaccgccgatcctccccgacctccacctggaggcgtggcctgctacggacaagaccaaacaggaagaggtggat

SEQ ID NO: 325496 - DNA, 618 bp, Artificial Sequence
  derived and/or modified sequence
atgggcacctggattctgttcgcctgcctggtgggcgcggcgttcgctatgcccctccctccacatcccgggcatcccggctacatcaacttcagctatgagaactctcatagccaggctatcaatgtcgacagaatcgccctagtcctaacaccgctgaaatggtaccagagcatgatccggcccccgtacagtagctacgggtatgagcccatggggggctggctgcaccaccagattatccccgttgtgagccagcaacatcctcttacacacacactgcagtctcaccatcatattcccgtcgtgcctgcccagcagccccgcgtgcggcagcaagctctgatgcccgtccctggacagcagagtatgaccccgacgcagcaccatcagcctaacttacccctgccggcacagcagccattccagccccagcccgtccaaccccagccccaccagcccatgcaacctcagcctcctgtccagcccatgcagccacttcttccccagcctcccttgccccccatgttccctttgaggccactgccccctatattgccagacctacatctggaagcctggccagccactgacaaaactaaacaggaggaagttgac

SEQ ID NO: 325497 - DNA, 618 bp, Artificial Sequence
  derived and/or modified sequence
atgggtacttggatactcttcgcctgcctggtgggtgcagcgtttgctatgccactccctccgcacccagggcatcccggttatatcaacttctcgtacgaaaactcccacagccaggcaataaatgtggatcggatcgccctggtcctgacccctctgaagtggtaccagagtatgatcaggcccccttactcatcttatggatatgagcccatgggagggtggcttcaccatcagatcatccctgttgtcagtcagcaacaccccctgacccataccctgcaaagccaccaccacatccccgtggttcccgctcaacagcctcgagttaggcagcaggctcttatgcctgtccctggccagcagtctatgactcctacccagcaccaccagcccaacctccccctacctgctcagcaaccattccagccacaaccagtacaaccccagccgcatcaacccatgcagccccagcctcccgttcagcccatgcagccgttgctcccccaacctcctctgccacccatgtttccacttaggccacttccacccattctccctgatcttcacctggaagcttggccagcaacagataagaccaaacaggaagaagtggac

SEQ ID NO: 325498 - DNA, 618 bp, Artificial Sequence
  derived and/or modified sequence
atgggaacatggattctgtttgcctgcctggtgggcgcggccttcgcaatgccactgccaccccatcctggtcacccggggtacatcaatttttcgtacgaaaattctcatagccaggccattaatgtagaccgaatcgccctggtgctcacacctttgaaatggtaccagagtatgatccggccgccctattcttcctacggttatgaaccaatgggaggttggctccaccaccagattataccagtggtcagtcagcaacaccccctgacacacactcttcagagccaccatcacattcctgtggtgcccgcgcagcagccaagggttcgacagcaggccttgatgcccgttccgggccagcaaagtatgaccccaacccaacaccatcagcccaacctacctctgcctgcacaacagccttttcaaccacaacccgtacagccacagccacatcagcccatgcagccacagcctcccgtccagcccatgcaaccgttgcttccgcagccccctctgcctcccatgttccctctgaggccactgccaccaattctccccgacctgcacctcgaagcgtggccagccaccgataagaccaaacaggaggaagtggac

SEQ ID NO: 325499 - DNA, 618 bp, Artificial Sequence
  derived and/or modified sequence
atgggtacgtggatactatttgcgtgtttagtaggtgcggcgtttgcgatgccgctaccgccgcatccgggtcatccgggttatataaatttttcgtatgaaaattcgcattcgcaagcgataaatgttgatcgtatagcgctagttctaacgccgctaaaatggtatcaatcgatgatacgaccgccgtattcgtcgtatggttatgaaccgatgggtggttggctacatcatcaaataataccggtagtatcgcaacaacatccgctaacgcatacgttacaatcgcatcatcatataccggttgttccggcgcaacaaccgcgtgtacgacaacaagcgctaatgccggtaccgggtcaacaatcgatgacgccgacgcaacatcatcaaccgaatttaccgttaccggcgcaacaaccgtttcaaccgcaaccggtacaaccgcaaccgcatcaaccgatgcaaccgcaaccgccggtacaaccgatgcaaccgctattaccgcaaccgccgctaccgccgatgtttccgctacgtccgttaccgccgatattaccggatttacatttagaagcgtggccggcgacggataaaacgaaacaagaagaagttgat

SEQ ID NO: 325500 - DNA, 618 bp, Artificial Sequence
  derived and/or modified sequence
atgggcacttggatcctcttcgcgtgtctcgtcggcgcagcgttcgccatgccccttcccccccatccaggccacccgggctacatcaatttctcgtatgagaactcgcattcccaggccatcaacgtcgaccgcatcgctctagtgctgacccccctcaagtggtaccagagcatgatccgccccccctactccagctatgggtacgaacccatgggcggttggctgcaccatcaaatcatacccgtagtgagccaacaacaccccctgacccatactctgcaatcccaccaccacatccccgtcgttccggcgcaacagccaagagtccgccagcaggctctgatgccggtccccgggcagcagtcgatgacaccgacgcagcaccaccagcctaatctgcctttgcccgcccagcagcccttccagccccagcccgtccagccccagccacaccagcccatgcagccccagccccctgttcagcctatgcaaccgctcctcccgcagcccccgctccctcctatgttccccctgcgtccgctgccgcccatcctgcccgatctccacttggaagcctggccggccaccgacaagacgaagcaagaggaggtcgat

SEQ ID NO: 325501 - DNA, 618 bp, Artificial Sequence
  derived and/or modified sequence
atgggaacatggatcttattcgcttgtctggtgggggccgcttttgcaatgcctcttcccccacatcctggacacccaggctacattaacttttcttacgagaatagccacagccaggctatcaatgtggacaggatcgctcttgtgctcacccccctgaagtggtatcagagtatgatccgcccaccatattccagctatggctatgaacccatggggggctggctgcaccaccaaatcataccagtggtctcccagcagcacccattgacacacacactccagagccaccatcacatcccagtcgtccctgcacagcaacccagggtgaggcagcaggctcttatgccagttcccggccagcagtctatgactccaacccaacaccatcagccaaatctgccacttcccgcacaacagccttttcagccccaaccagtccagccccagccacaccaacctatgcaaccccagccccccgtgcaacctatgcagccacttcttcctcaaccacctctgcctcccatgtttccacttagaccactcccccccatcctgccagatttgcacttagaagcttggccagccacggataaaacaaagcaagaagaggtggat

SEQ ID NO: 325502 - DNA, 618 bp, Artificial Sequence
  derived and/or modified sequence
atgggcacctggatattgtttgcctgcctggtgggggctgcattcgccatgccactgcctccacacccgggccatccaggatacatcaacttctcttatgaaaatagccattcacaagcaattaatgttgaccggatcgcgctggtgttgaccccattgaagtggtaccagtcaatgatcagacccccgtactcttcctatggctacgagccaatgggagggtggctgcaccaccagatcatccctgtggtctcacagcagcatcccctcacgcataccctgcagtcccaccaccacatcccagtcgtgcctgcgcagcaaccacgggtccggcagcaggccctcatgcccgtgccaggccagcagtctatgacgccgactcagcatcaccaaccaaacctccctctccccgcacagcagccattccagccacaaccggtccaaccccagccccaccagcccatgcagcctcagcctcccgtacagcctatgcagcccctcctgccacaaccaccactcccaccgatgtttccactgcgacctctgccccccatcctcccagacctccacctcgaggcttggcccgcgacagacaaaaccaagcaggaggaggtggat

SEQ ID NO: 325503 - DNA, 618 bp, Artificial Sequence
  derived and/or modified sequence
atggggacctggattctgtttgcgtgcctggtgggagcagcctttgccatgccacttccaccacacccgggacacccaggatacattaacttttcctatgagaacagccactcacaagcaattaacgtggacaggatcgcactggtgcttactcctctgaagtggtaccaatccatgattaggccaccgtactcgtcgtatggatacgagcctatgggcggatggcttcatcatcaaatcatacctgtcgtgtcgcaacagcatccactgacccacacccttcagtcgcaccaccatatccctgtggtcccagctcaacaacctcgtgtgcgccagcaggccttgatgcctgtgcctggccagcaatccatgacgccaacccaacatcatcaaccaaaccttccgcttccggcacaacagccattccagcctcaaccagtgcaaccgcagcctcaccaaccaatgcagccgcagcctccggtgcagccaatgcaaccccttctcccccaacctcctctcccacctatgtttccacttagaccacttcctcccattttgcctgatctccatttggaagcctggcctgcgaccgataagaccaaacaagaagaagtggat

SEQ ID NO: 325504 - DNA, 618 bp, Artificial Sequence
  derived and/or modified sequence
atgggaacctggatcctgtttgcgtgcctggtgggtgcagcctttgccatgcctctgccgccccatccaggtcatccagggtacattaacttttcctacgaaaactcgcactcccaagcaattaacgtcgataggatcgcactggtgctcactccactcaagtggtaccagtcaatgatccgtcctccttactcctcgtacgggtacgagcctatgggcggatggcttcaccatcagattattccagtggtgtcccagcaacatcctcttacccacactctgcagtcgcatcaccacattcccgtggtgcctgcccaacaaccgcgcgtgcggcaacaagcactgatgccagttccagggcaacaatcgatgacccctactcagcaccaccaaccaaacctgccactgcctgcccagcaacctttccagcctcaacctgtgcagccacagccacatcaacccatgcaaccccagccaccagtccaacctatgcaaccacttctgccacagcccccacttccacctatgttcccgcttcgtcccctgcctccaattctccccgatcttcatttggaggcatggccagcaacggataagaccaaacaggaagaagtggac

SEQ ID NO: 325505 - DNA, 618 bp, Artificial Sequence
  derived and/or modified sequence
atgggaacctggatcctgtttgcctgtctggttggagccgcgtttgctatgcctcttcctccccacccgggccatcccggctatatcaatttcagctacgagaattcccatagtcaggcaatcaatgtggaccgaattgccctggtgcttactccactgaagtggtaccaatctatgatccggcccccctattcttcatacggatacgagcctatgggcgggtggctgcaccatcaaatcattccagtcgtcagccagcagcaccctttgactcacacactgcagagccaccaccacattcctgtggtgcctgctcaacagccccgagtgagacaacaggcgctcatgcctgtgccggggcagcagagcatgaccccgactcagcaccatcagcctaacttgcccttgcctgcccagcaaccattccagccacaacctgtgcagccacagcctcaccagcctatgcagccgcaaccacccgtgcagccgatgcagcccctgctgccacagccccccctcccccccatgtttcccctccgcccactgccgcccatactgcccgacttgcatctcgaagcttggcccgctacagacaaaaccaagcaagaggaggtggac

SEQ ID NO: 325506 - DNA, 618 bp, Artificial Sequence
  derived and/or modified sequence
atgggcacctggatcctgtttgcgtgcctggtgggagcagcatttgcgatgcctctgccaccgcacccgggacaccctggatatatcaatttctcatacgagaacagccattcacaagcgatcaacgtggatcgcatcgcgctggtcctcactccgctcaagtggtaccaatcaatgattcggccaccatactcctcatacggatacgaaccaatgggcggctggctccatcatcagatcattcccgtggtgtcccagcaacatccgctgacccatactctccagagccaccaccatatcccagtggtccccgcccaacagcctcgggtccgccaacaggccctgatgccggtccccggacagcagtcgatgaccccgacgcagcaccaccaaccgaatctgccactgccggctcagcaacctttccagcctcaaccggtgcagccgcaaccgcaccaaccgatgcaaccccagccgcctgttcagccaatgcaaccgctcttgccacagccaccccttccgccgatgttcccactgaggccactccctccaattctgccggatctgcacctcgaggcatggccggccaccgacaagaccaaacaagaggaggtcgac

SEQ ID NO: 325507 - DNA, 618 bp, Artificial Sequence
  derived and/or modified sequence
atgggtacgtggattctgttcgcatgcctggtgggggcggcgttcgctatgccgctgccgccgcaccctggccatccaggctacatcaatttcagctatgagaattcccacagccaggccattaatgtggatcgcatcgccctggtgctgacccctctgaagtggtaccagtctatgattcgtccgccatattcaagctacggttatgagcctatgggcggatggctgcaccaccagatcattccagtcgttagccagcaacatcctctgacccacacccttcagagccatcatcacatccctgtggtaccagctcagcaaccgcgcgttcgccagcaggcactgatgccggtcccgggccaacagagcatgactccaacgcagcatcatcagcctaacctcccattgccggcccaacagcccttccaaccacagccagtgcagccgcagcctcaccagccgatgcagcctcagcctccggtgcagccaatgcagcccctgttgccgcaacctccgcttccgccgatgttcccgcttaggccactgccgccaatactgccagatcttcacctggaggcatggcctgccacggataagaccaagcaggaggaagtggac

SEQ ID NO: 325508 - DNA, 618 bp, Artificial Sequence
  derived and/or modified sequence
atgggaacctggattctttttgcatgtcttgtgggtgcagcatttgctatgcctctgccaccacaccctggccacccaggctacatcaacttcagctatgagaactcacactcacaggcaatcaacgtggataggatcgcgcttgtgctgacccctcttaaatggtaccaatcgatgattcgtccaccctacagctcgtacggttacgagcctatgggtggttggctgcatcatcagataattcccgtggtgtcccagcagcatccactcacccatacccttcaaagccatcaccatattcctgtcgttcctgcacagcagccacgggtccgacagcaggcgctgatgcccgtgccgggacaacaatcaatgacccctactcagcaccatcagccaaacctgccactgccagcacagcaaccatttcagcctcaacctgtccaaccacaacctcaccaaccaatgcagccacaaccccccgtgcagcctatgcaaccactcctgccacaacctcccctgccacctatgttcccacttaggcctttgccccctatactcccagatctccacctcgaggcatggccagccaccgataagactaagcaggaagaagtggat

SEQ ID NO: 325509 - DNA, 618 bp, Artificial Sequence
  derived and/or modified sequence
atgggtacgtggatcctcttcgcctgtctcgtcggagcggccttcgcaatgccgttgccgccgcatccggggcacccaggatacattaacttctcctatgaaaattctcacagccaagctatcaacgtggatcggatcgctctggtcctgacccctctgaagtggtaccagagcatgatcagaccgccttactcgtcatacggctatgagccgatggggggctggctgcaccatcagataataccggttgtctcgcagcagcatccgctgactcataccctgcaaagccaccatcacatcccagtggttcctgcccagcagcctcgggtgcgccaacaggccctgatgccggtgcctggccaacaatcgatgactccgactcagcaccaccagccgaatctcccgctgccagcacaacagccgtttcagccacaacccgtgcagccgcagccacatcaacccatgcagccgcaacccccggtgcagccaatgcagccactgcttccccaaccacctctccctcccatgttcccgctgcggccgctgcctccgatcttgccggatcttcaccttgaagcgtggccggcgaccgacaagaccaagcaagaggaagtggac

SEQ ID NO: 325510 - DNA, 618 bp, Artificial Sequence
  derived and/or modified sequence
atgggaacctggatcttgtttgcttgtctggtgggggccgcgtttgccatgcctctcccaccccaccctggccatccgggctacatcaacttctcgtacgaaaacagccactcccaggcgattaacgtcgacaggatcgccctcgtgcttaccccactgaagtggtaccagtcaatgattcgcccgccatactccagctatggatacgaaccaatgggagggtggctgcaccaccaaatcatcccggtggtgtcgcagcagcacccgctgactcacaccctgcagtcccaccaccacatcccggtcgtgccggcccaacaacctcgcgtccgccagcaggcgttgatgcctgtgccaggccaacagtcgatgacgcctactcagcatcatcagccaaaccttccgctgccggcgcagcagccattccagcctcagccggtgcaaccacagccacaccagccgatgcagccacaaccgcctgtgcaaccaatgcagccgctcctcccccaaccacctttgcccccaatgttccccttgcgtccgctcccgccgatcctcccagatctgcatctggaggcgtggcctgccaccgacaagactaagcaagaggaagtggat

SEQ ID NO: 325511 - DNA, 618 bp, Artificial Sequence
  derived and/or modified sequence
atggggacgtggatcctcttcgcctgcctggtgggtgctgcctttgccatgccgctcccgccgcacccagggcatccaggctacatcaacttctcatacgaaaactcgcatagccaagcgatcaatgtggatagaatcgctctggtcctgaccccattgaagtggtaccagtcaatgatccggccgccgtacagttcatacggatatgagccaatgggaggatggctgcaccatcagattatcccagttgtgtcgcagcagcaccctctgacccacaccctgcaatcccatcatcacatacccgtggtgcctgcgcagcagccccgagtgcgtcagcaggcgctcatgccggtcccgggacagcaatccatgactcccactcaacaccatcagccgaacctccctctgcccgcccaacaacccttccagccacaaccagttcagcctcaaccacaccagcctatgcagccccaaccgccggtacaaccaatgcagccgcttctgccgcaacctccactgccccctatgttcccgctccgcccccttccgccaatcctgcctgacctccacttggaagcatggccagcaactgataaaaccaagcaagaggaagtggac

SEQ ID NO: 325512 - DNA, 618 bp, Artificial Sequence
  derived and/or modified sequence
atgggcacttggatcctttttgcatgcctggtgggggcggcattcgctatgcctttgcccccgcatccagggcatcccggttacattaacttctcctacgaaaattctcactcacaggcgatcaacgtggaccggatcgccttggtgctcactccgctcaagtggtaccaatcaatgatcagaccaccttacagctcctacggatatgagccaatgggaggatggctgcaccatcagatcatcccagtcgtgtcgcagcagcatccgctcacgcatactctgcaaagccaccaccatattccagttgtgccagcccagcaaccgcgcgtgaggcagcaagcactgatgcctgtcccaggacaacagtcgatgacgccaactcagcatcatcaacctaatctgccgctgccggcccagcagcctttccagccccagccagtgcaaccgcaaccgcaccagcctatgcagccccagccgccggtgcagccgatgcagccactgttgccacaaccgccgctcccgccgatgtttccgctgaggcccctgccgccaattctgccggacttgcacttggaggcctggccggccaccgacaagactaagcaggaggaggtggat

SEQ ID NO: 325513 - DNA, 618 bp, Artificial Sequence
  derived and/or modified sequence
atgggaacctggattctctttgcctgcctcgttggcgcggcattcgctatgcctctccctccccatccagggcaccctggatacattaatttctcgtatgagaattcccatagccaggcgataaatgttgatcggattgccctcgtccttacaccactaaagtggtatcagtccatgattcgaccgccatattcatcttatggctacgagcctatggggggctggcttcaccaccaaattattcctgtcgtctctcaacaacacccacttactcacacgttgcaatctcaccaccatatcccagttgtacctgcacagcagcctagagtccggcagcaagcacttatgccagtgccaggccagcagagcatgacccccactcagcatcaccaacctaatctgccccttccagctcaacaacccttccagccccaacccgtccagccccagccccatcagcccatgcagccccagccgccagtgcaacctatgcaacccttgcttccccaacccccactgccccctatgttcccactgaggccactgccacctattttacccgacctacatcttgaggcgtggcctgcaacagataagactaagcaggaggaagtcgat

SEQ ID NO: 325514 - DNA, 618 bp, Artificial Sequence
  derived and/or modified sequence
atgggcacttggattctgttcgcctgcctcgtcggcgccgcgtttgcgatgccgctccctccgcacccggggcatccgggatacatcaacttctcgtacgaaaactcgcattcacaagcgatcaacgtggaccgcatcgccctggtgctcactcctctgaagtggtatcagtccatgattcgcccaccgtactccagctacggttacgagccaatgggaggatggctccatcaccagatcatccctgtggtgagccaacagcatccgctgacccataccctccagtcgcaccaccacatcccagtcgtgcctgctcagcagcctcgggtcaggcagcaggccttgatgccggtgccaggacaacagtcaatgacgccgacccagcatcaccaacctaatctccccctgcccgctcaacaaccattccagccgcagcctgtccagccccaaccgcaccagccgatgcaaccacaaccaccggtgcaaccaatgcagccactgcttccccagccgccgttgcccccaatgttcccgcttagaccgctgcctccgatcctgccggacctgcacctggaagcatggccagcaaccgataaaactaagcaggaagaggttgat

SEQ ID NO: 325515 - DNA, 618 bp, Artificial Sequence
  derived and/or modified sequence
atgggaacttggatcctgtttgcctgtctcgtaggcgcagcatttgccatgccactcccaccacatcccggtcaccccggatacatcaacttctcgtacgaaaactcgcactcgcaggctattaacgtggaccgcattgcgcttgtgctcactcccttgaagtggtaccagtccatgatccgccctccctactcgagctacggatatgaacccatggggggatggctccatcatcagattataccggtggtgtcccagcaacacccgcttacccacactctgcaatcccatcaccacattcccgtggtccctgcacagcagcctagagtccgacaacaggccctgatgccagtgcctggtcagcaatctatgactcctacccaacatcatcaaccaaaccttcctcttccagcacaacaaccctttcagcctcagcctgtgcagccacagcctcatcagcctatgcaaccacagcctccagtccaaccgatgcagccacttctgccacaacctccattgccccctatgttccctcttagaccacttccgccgatccttccagatcttcatctcgaggcctggccggccaccgacaagaccaagcaagaagaggtggat

SEQ ID NO: 325516 - DNA, 618 bp, Artificial Sequence
  derived and/or modified sequence
atggggacttggatccttttcgcttgtctcgtaggagccgcctttgctatgcccctgcctccacacccaggacatcctggatacataaatttttcttatgagaactcccattctcaggctatcaatgtagataggattgccctggtcttaacacccctgaaatggtatcagtctatgatcaggccaccttattcttcttatgggtacgaacccatgggggggtggctccatcatcagatcatacctgttgtatctcagcagcatcctttgactcatactctacagtctcatcaccacataccagtggtgcctgcccagcagccgcgagtacgccagcaggcactcatgccagtgccaggacagcaatctatgacacccacacagcaccaccagcccaacctgcccctcccagcccagcagcccttccagccccagccagtacaaccacagcctcaccagcccatgcagcctcagcctccagtgcagcctatgcagcctctccttccccagccacctctgccccccatgttccccctaagaccactgccccctatactacctgatcttcatttggaggcttggcccgcaactgataaaactaaacaggaagaagttgat

SEQ ID NO: 325517 - DNA, 618 bp, Artificial Sequence
  derived and/or modified sequence
atgggaacctggatcctgttcgcctgcctggtcggcgccgcattcgcgatgcccttgccgccgcacccaggccacccgggatacatcaacttctcatacgaaaactcgcattcccaggctatcaatgtggatcgcattgccttggtgctgaccccccttaaatggtatcagtcgatgatcagaccgccatactccagttacggatacgagccaatgggtgggtggttgcaccaccagatcatccctgtggtttctcaacagcatccgttgacccacactctccaatcccaccatcatattccggtcgtgccggctcagcaaccacgcgtcaggcaacaggcactgatgcctgttccaggacagcagtcgatgacgccaactcagcaccatcaaccaaacttgccgctcccggcacagcaaccatttcagccgcagccggtgcaacctcaaccgcaccagccgatgcagccccaacctccggtccaaccaatgcaaccacttctgccgcagcccccgctccctccaatgttcccgctgcgtccgctcccgccaatactcccggacctgcatctggaagcctggcccgccaccgacaagaccaagcaggaagaagtggac

SEQ ID NO: 325518 - DNA, 618 bp, Artificial Sequence
  derived and/or modified sequence
atggggacatggattctattcgcctgtctggtcggtgctgctttcgcaatgccactgcctccccatccaggacaccccggttatattaatttctcatacgagaatagccattcccaagctattaatgttgacaggatcgctctcgtgcttacgccactgaagtggtaccagtcgatgatacgccctccctacagcagctacgggtatgagcctatgggaggatggctgcaccatcagattatccccgtagttagccagcagcaccccctaactcacacgctccagtcacatcaccatattcccgtcgtgccagcacagcaacccagagttaggcaacaggcactgatgcctgttcccggccagcaatctatgacccctacacaacatcatcagccgaacctaccattaccagcccaacagccgttccagccccagccagtccagcctcaaccccatcagcctatgcagccccagccaccggtgcagccaatgcagccactgttacctcaaccaccactcccccctatgtttccactgaggccattgccacccatactcccagacctgcatctggaagcctggcctgccaccgacaagacgaagcaggaggaggtggac

SEQ ID NO: 325519 - DNA, 618 bp, Artificial Sequence
  derived and/or modified sequence
atggggacttggatcctttttgcatgtctcgtgggtgccgcatttgcgatgcctctccctcctcaccctggccaccccggatacattaacttttcttatgagaactcacattcacaggcaattaacgtggacagaattgcactcgttcttacccctctgaagtggtaccaatcgatgattcgcccaccgtacagctcctacgggtacgagccgatgggaggttggttgcatcatcagattataccggtggtgtcgcaacaacacccgcttactcacacgcttcagtcgcatcatcatataccagtcgtcccagcacagcaacctcgtgtgcgtcaacaagctctgatgccggtgccaggacaacaatccatgaccccgactcaacaccatcagccaaatctgccgcttccggctcagcagccttttcaacctcaacccgtgcaaccacagccgcaccaaccaatgcaaccacaacctccagtgcaaccaatgcagccactgctgcctcagccccctctcccgcccatgtttcccctcagaccactgcctcccatccttcctgatcttcatctggaggcgtggccagcgactgacaagaccaaacaggaagaggtcgat

SEQ ID NO: 325520 - DNA, 618 bp, Artificial Sequence
  derived and/or modified sequence
atgggaacctggattttgtttgcgtgcttggttggcgcggccttcgccatgcctctacctccacatcctgggcatccgggctacatcaatttttcgtatgaaaattcacactcacaggccatcaatgtggatcgcatcgccctggttctgacaccactgaagtggtatcagagcatgatccgcccgccctactcatcgtatggatacgagcccatgggaggatggctccaccatcagataattcccgtggtatcacagcagcacccacttacgcataccttgcaaagccatcatcacatacctgttgtgcccgctcaacagcctcgggtgcgccagcaggctctcatgcccgtgcccggtcagcagtcaatgacacccacccagcaccaccaacccaatctccccttgccagcccagcagccattccaacctcagccggtgcagcctcaaccccatcagcctatgcagcctcaaccccccgtccaaccaatgcaacccctgctgcctcagccaccgttacccccaatgttcccactgcgcccgcttcccccaattctcccggatctgcaccttgaagcctggccggcgaccgacaaaacaaagcaggaagaagtagat

SEQ ID NO: 325521 - DNA, 618 bp, Artificial Sequence
  derived and/or modified sequence
atggggacatggatcttattcgcatgtctagtgggagctgccttcgcaatgcctttgccaccccacccaggacaccccgggtacatcaacttttcctatgaaaactcccattcccaggccattaatgtggatcgaatcgccctcgtgttgactcccctcaaatggtatcagtctatgatccggcctccatatagttcttatggatatgaacccatggggggatggctccatcatcaaatcattcccgtcgtgtctcaacagcatcccctgacacacacattgcagagtcaccatcacattcctgtggtccctgctcagcagcccagagtgagacagcaagccttaatgcccgtaccaggacagcagtctatgacacccactcagcatcaccagcctaacctgccattacctgcgcagcagccttttcaaccacaacctgtgcagccacagcctcatcagcccatgcagccacagcctcccgttcagccaatgcagccactcctcccacagcctcccctccctccaatgtttcccctacggccacttcctccaatattgcctgatcttcaccttgaggcctggcctgccacagataaaacaaaacaggaagaagtggat

SEQ ID NO: 325522 - DNA, 618 bp, Artificial Sequence
  derived and/or modified sequence
atgggaacctggattctttttgcgtgtctggtgggagctgcttttgccatgccgctcccccctcatccaggacacccggggtacataaacttttcatacgaaaattcccactcccaagcaatcaacgtggacaggattgcactggtcctgacccctcttaagtggtaccagtcgatgatccgcccaccttactcatcgtatggatacgagccgatggggggatggctccatcaccagattatccccgtggtcagccagcaacatccgctgactcatactcttcagtcgcaccaccatattcccgtggtgcctgcacaacagccacgtgtgagacaacaggctctcatgcctgtgcccggacaacaaagcatgacccctactcagcatcatcaacctaacctgccacttccagcccagcagccttttcagcctcaaccagtgcagcctcaaccgcatcagccaatgcagcctcagcctcctgtgcaaccaatgcagccactccttcctcaaccacctctcccgccaatgttccctctgcgacctttgcctcccatcctgcctgacctccatctggaagcatggccagccaccgataaaaccaaacaagaggaagtggac

SEQ ID NO: 325523 - DNA, 618 bp, Artificial Sequence
  derived and/or modified sequence
atgggcacttggatcctcttcgcatgtctggtgggagctgcgttcgccatgccactgccaccacacccaggccaccccggatacatcaactttagctacgaaaattcgcactcacaagccatcaatgtggacagaatcgctctcgtcttgactccgcttaagtggtatcaatctatgatccgcccaccctactcctcatacgggtacgaacccatggggggttggctgcaccatcagatcatcccggtcgtgagccaacagcatccccttactcacaccctgcagtcccaccatcacatccctgttgtgcctgcccagcagcccagagtgcgccaacaagcgttgatgccggtgccaggacagcagtccatgacccctactcagcaccaccaaccgaacctcccactgccggcgcagcagccttttcaaccacaacctgtgcagccacaaccgcatcagccaatgcagcctcagccgcccgtgcaacctatgcagccgctgctgccacagcctccgctcccgccgatgttcccgcttaggccactgccccctatccttccggatctgcacctggaagcgtggcccgcaactgacaaaactaaacaggaggaggtcgac

SEQ ID NO: 325524 - DNA, 618 bp, Artificial Sequence
  derived and/or modified sequence
atgggaacctggatcttgttcgcatgcctcgttggagccgccttcgccatgccactgccaccgcacccgggccacccgggctacatcaatttcagctacgaaaacagccactcacaggccattaacgtggaccggatagccctggtgctgaccccactcaagtggtaccaatcgatgatccggccaccttactcttcctacggttacgagccgatgggagggtggctgcatcatcaaatcatcccagtggtatcacagcaacatccgctgactcatacgctccagagccaccaccacatcccggttgtcccagcccagcaaccccgcgttcgccagcaagcactgatgcctgtcccaggacagcagagcatgacgccgactcagcaccatcaaccgaacctgcccctgccggcgcaacagccgtttcagccacagcctgtccaacctcaaccacaccagcctatgcagcctcaacctcccgtgcagccgatgcaaccgctcctcccacaaccaccattgccgccaatgttcccccttagacctctgccgcctatcctgcctgatctgcacttggaggcctggcctgcgaccgacaagaccaaacaggaagaagtcgat

SEQ ID NO: 325525 - DNA, 618 bp, Artificial Sequence
  derived and/or modified sequence
atgggaacctggattttgtttgcttgtctggtgggggccgctttcgcaatgccgctgcctccacatccaggacaccccggctatattaacttttcttacgaaaactcgcactctcaagccattaacgtggatagaatcgcacttgtcctaaccccccttaagtggtatcagtcaatgattcggccaccctatagtagttatgggtacgagcctatgggagggtggcttcatcaccaaataattcctgtagtgagccagcagcatcccctcacgcacacattacagtctcatcatcacatccccgtagtgccagcccaacaaccacgggtgcgtcagcaggccctcatgcctgtgcccgggcagcagagcatgaccccaacccagcaccaccagccgaacctccccctgccggctcagcaaccgttccagccgcagccagtgcagcctcagcctcatcaacccatgcagccccagcctccagtccaacccatgcagccactcttacctcagcctcccctaccaccaatgtttcccttgcgtccactgccaccgatccttcccgatttacacctcgaggcctggcccgcaaccgacaagaccaagcaggaggaggtcgac

SEQ ID NO: 325526 - DNA, 618 bp, Artificial Sequence
  derived and/or modified sequence
atgggaacctggatcctctttgcgtgccttgtgggagccgcattcgccatgccgctgccgccccacccgggtcatccggggtacatcaacttctcatacgaaaactctcattcgcaggcgatcaatgtcgacaggattgcgctcgtgcttacccctctgaagtggtaccagtcaatgatccggccaccatacagctcctatggatacgagccgatggggggctggttgcatcaccagatcattccggtggtgtcacaacagcatccgctgactcacacgctccagtcccaccaccacatccccgtggtgccggcgcaacagcctcgcgtacggcaacaagccttgatgccagtgccaggtcagcagagcatgacgcctacccaacaccaccagccaaatctcccgctgcctgcccagcaacccttccaaccacagccagtacaaccgcagccacatcagcccatgcagcctcaaccaccagtgcaaccgatgcagccgctcctgcctcagcccccgctgcccccgatgtttcccctgcgcccccttccaccgatcctcccggatctgcatttggaagcctggccggcaacggacaagaccaaacaagaggaggtcgat

SEQ ID NO: 325527 - DNA, 618 bp, Artificial Sequence
  derived and/or modified sequence
atgggcacttggatcctgttcgcctgcctggttggcgccgcgtttgctatgccgctcccgccgcatccagggcatccgggatacataaactttagctacgaaaattcacattcgcaggcaatcaatgtcgataggatcgctctggtgctgactccgcttaagtggtatcaatcaatgatcagaccgccctattccagctacggatacgagcctatgggagggtggcttcaccaccagatcattccggtcgtctcgcagcaacacccgctcacccacaccctgcagtcccaccatcacatcccagtggtgccagcacaacagcctcgtgtgcgccagcaggcccttatgccagtgcctggacagcaatcaatgacgcccacgcagcatcaccagccgaacctccctttgcctgcgcagcaaccatttcaaccgcagcccgtgcagccccagccccatcagccaatgcagccccaaccgcctgtccaaccgatgcagcctctgctgccgcagcccccgctgccaccaatgttccctctgcgaccgctccctcctattctgccagaccttcatcttgaagcgtggccggctactgataaaaccaagcaggaggaagtggac

SEQ ID NO: 325528 - DNA, 618 bp, Artificial Sequence
  derived and/or modified sequence
atgggcacgtggatactcttcgcgtgtcttgttggagcagccttcgcaatgccccttcccccacatccggggcacccaggttacatcaacttttcctatgaaaatagccattctcaagccattaacgtggaccggatcgcacttgtgctcacccctttgaagtggtaccagtccatgatccgacccccttactcatcttacggatacgaacctatggggggatggctgcatcaccagattatcccggtagtctcacagcaacaccccttgactcacaccctgcagtcgcatcatcatattcctgtggtcccagcgcaacaaccacgcgtcagacagcaggctctgatgccagtgcctggtcagcaatcgatgaccccgacccaacatcatcaaccaaacctgcccctgccagcacagcagccgtttcaaccacaacccgtgcaaccgcagccgcatcagcctatgcaacctcagcctccggttcaaccgatgcagcccttgctgcctcaaccgcccctcccgccgatgtttccactgcggccactccctccaattcttccagatcttcaccttgaagcctggccagcaactgataaaaccaagcaagaggaggtcgac

SEQ ID NO: 325529 - DNA, 618 bp, Artificial Sequence
  derived and/or modified sequence
atgggaacctggattctttttgcctgtcttgtgggagcagcatttgcaatgccattgcctccccacccaggacaccccggatacatcaacttctcctacgagaattcgcattcacaggccattaacgtcgatcgaattgcacttgtcctgacgcctcttaagtggtaccagtctatgatcagacccccatactcgtcgtacggttatgaacctatggggggctggttgcatcatcagataatcccagtcgtctcgcagcaacaccccctgactcacaccctgcaatcccaccatcatattcccgtcgtgcctgcgcaacaaccacgggtgagacagcaagccctgatgcctgtgcccggtcaacaatccatgactcccactcagcatcatcagccaaacctccctctgcctgcgcagcagccatttcaacctcaacccgtccaacctcagccacaccagccaatgcaaccacaaccgcctgtgcaaccgatgcaaccacttcttccccagcccccgcttccacctatgttccctttgcggccgcttcctccgatcctgccagacttgcatctggaagcatggcccgcaactgataagaccaagcaggaagaagtcgac

SEQ ID NO: 325530 - DNA, 618 bp, Artificial Sequence
  derived and/or modified sequence
atggggacgtggatccttttcgcctgcctggtcggtgccgcattcgctatgccattgcctccccatcctggacacccaggatacattaacttttcgtacgagaattcccattcgcaagccatcaacgtggatcggatcgcgttggtgctgactccactgaagtggtaccagtcgatgattcgccccccgtacagctcatacggctatgaaccgatgggaggctggcttcaccatcagattataccagtggtgtctcagcagcacccgctgacgcacactctccagtcccatcaccatatcccggttgtcccagcccagcagccgcgggtgagacagcaagcactgatgccggtcccgggacaacagtccatgacccctacccaacaccaccaacccaacctgccactgcctgcccagcagcctttccagccacagccagtccagcctcagccacatcagccaatgcagcctcaaccacccgtgcagccgatgcaaccgctgctccctcaaccgccgttgccgcccatgttcccactgcgcccgctcccccctatcctgccagatctccacctcgaagcgtggcctgcgaccgacaagaccaaacaagaggaagtggac

SEQ ID NO: 325531 - DNA, 618 bp, Artificial Sequence
  derived and/or modified sequence
atgggcacctggatactctttgcgtgtctcgttggagccgcctttgctatgccccttcccccacacccaggacaccccggctacatcaatttttcatacgagaactctcactctcaggccataaatgtcgaccgtatcgcactagtgctgacaccacttaaatggtatcagagtatgatacgcccaccgtacagcagctacggttatgagcccatgggcgggtggctgcaccatcagatcattcctgttgtatctcagcagcaccctctgacacacaccctgcagtctcatcaccatatcccggtcgtccccgctcagcagcccagggttagacagcaggctctgatgcctgtgcctgggcagcaaagcatgactccgacccagcaccaccagcccaatctaccattgcccgcacagcagcccttccagccccagcccgtccaaccccagcctcaccagccaatgcaaccccagccaccagttcagcccatgcagcctctgttgccccagccaccacttcctccaatgtttcccctgaggccgcttcctcctatactgcctgatcttcacttggaagcgtggccagctaccgataaaaccaaacaggaggaggttgac

SEQ ID NO: 325532 - DNA, 618 bp, Artificial Sequence
  derived and/or modified sequence
atgggaacctggatcttgttcgcatgcctggttggagcggctttcgctatgcctctcccgccacatcctgggcatccaggctacattaacttctcctatgaaaattcccactcgcaagcaatcaatgtcgatagaatcgccctggtgctcaccccgctgaagtggtaccagtcaatgatccggcccccgtattcaagctacggatacgaacctatgggcggatggctccatcaccagatcattccggttgtctcgcaacaacatcccctgacgcacactctgcaatcccaccatcacatcccggtggtgccggcgcagcagccgcgcgtccggcaacaagcactcatgccggtcccgggccaacagagcatgacccctacccaacaccatcaaccaaaccttccattgcctgcccaacaacccttccagccgcagcctgtgcaaccacagccacatcagccgatgcagccccagccaccggtccaaccaatgcaaccacttctcccgcagccgccactgccgccgatgtttcctctgcggccactccctccgatcctgccggacctgcatctggaagcctggcccgccaccgacaagactaagcaggaggaagtagat

SEQ ID NO: 325533 - DNA, 618 bp, Artificial Sequence
  derived and/or modified sequence
atggggacctggatcttgtttgcttgcctggtgggggcagcgttcgcgatgccactgcctccccacccgggacacccaggatacatcaacttcagctacgagaatagccattcacaggctatcaacgtggaccgcattgcactcgtgctcaccccgctgaagtggtaccagtcgatgattcggcctccttactcctcgtacgggtacgagcccatgggcggatggctgcaccaccaaatcatccctgtcgtgtcccaacagcacccacttactcacactctccagtcccatcatcacataccagttgtgccggcccagcagccccgggtgcggcagcaggcgctcatgccggtgccgggacaacagagcatgactccgacccagcatcaccagcctaaccttccactcccggcccaacagccattccagccccaaccggtgcagccacagccacatcaacctatgcagccgcagccgccagtgcagcctatgcaacccctcctgccgcaaccgccactgccgccaatgttcccgctgcgcccgctccccccgatcctgcctgatctccacttggaagcatggccggccacggacaagactaagcaggaggaagtcgat

SEQ ID NO: 325534 - DNA, 618 bp, Artificial Sequence
  derived and/or modified sequence
atggggacctggatactttttgcatgtctcgtgggtgcagcgttcgcgatgccactgcctccccatcctggacaccctggttacatcaacttcagctatgaaaatagccattcccaagcaatcaacgtggatcgtattgcgttggtccttacccctcttaaatggtatcagtcgatgatcagacctccctactcctcgtacggttacgagcctatgggtggctggcttcatcatcagattattccggtcgtgtcacaacaacatccactgactcataccctccaatcacatcaccacatcccagttgtgcctgcacaacaacctcgcgtgaggcagcaagcactcatgcccgtgcccggccagcaatccatgactcctacccaacaccatcagccgaacctccctctccctgcccaacaaccatttcagcctcagccagtgcaacctcaaccgcaccagcctatgcaaccgcagccccctgttcaacctatgcaaccactgctgccgcaaccccccttgccaccaatgtttcctctgaggccgctgcccccaattctgcctgaccttcatcttgaagcatggcccgctactgacaagaccaagcaagaagaagtggat

SEQ ID NO: 325535 - DNA, 618 bp, Artificial Sequence
  derived and/or modified sequence
atgggaacttggattttatttgcctgcctcgttggggctgcttttgcaatgccattgccgccacatcctggacatccaggttacattaatttctcttacgaaaactcccactcacaagctatcaatgttgatcgtatcgcacttgtacttacgccactgaagtggtaccagtcgatgatccgacctccatattcttcttatgggtatgagccaatgggaggctggttgcatcatcaaattatacctgtagtgagtcaacagcacccattgacccacacattacaaagtcaccaccacattccagtcgtccctgcgcaacagccccgcgtgagacagcaggcacttatgcccgttccaggccaacaaagcatgaccccgacacagcaccaccaaccaaacctgccacttccagctcagcaaccgtttcaaccacaaccagtgcaaccgcagccgcaccagccaatgcagccacaacctccagtgcaaccaatgcaaccgttgcttcctcagccgccgttgccaccgatgtttccattgcggcccttaccaccaattctaccggatttgcatttggaggcatggcctgcaacagacaaaaccaaacaagaggaggtagat

SEQ ID NO: 325536 - DNA, 618 bp, Artificial Sequence
  derived and/or modified sequence
atgggaacgtggatccttttcgcttgtctcgtcggggcagccttcgcaatgcccctgcctccacacccgggccacccaggttacatcaacttctcatacgagaattcccatagccaagcaatcaacgtggacagaattgcccttgtcctgaccccactcaaatggtatcaatccatgatcaggcccccctatagctcctacgggtatgaaccaatggggggctggttgcatcaccaaattatccctgtggtcagccagcaacatccgttgacccacactctacagagtcaccaccatatccccgttgtgccggcccagcagcccagagtgcggcaacaggcgttgatgcccgtgcccggccaacaatccatgacgcccactcaacaccaccagccaaatttaccactcccagcacaacagcccttccagccccagccagtgcagcctcagccccatcaaccaatgcagccacagccaccggtccagcctatgcagcctctgctgccgcagccgccactgccacctatgttcccattgcggccccttccacccattcttccagacctccacctggaggcatggccagccacggacaaaaccaagcaggaggaggtggat

SEQ ID NO: 325537 - DNA, 618 bp, Artificial Sequence
  derived and/or modified sequence
atggggacttggatcctgttcgcctgtctcgtgggagcagcattcgctatgccgctgccaccacatcccggacaccccggatacattaatttttcttacgagaacagtcattcccaggccatcaatgttgatcggatcgcactcgtgttgacacccctcaaatggtaccagtcgatgattcgcccaccctacagctcttacgggtatgagcccatggggggatggctgcaccatcaaattatcccagttgtctcacagcagcatcctctaactcacactttgcagtcgcaccaccatatccccgtcgtgccagcccagcaacctcgagtccgtcaacaggcacttatgcccgtcccaggacagcagtcaatgacccctacccaacaccaccagcccaatctgccgttgccagcccagcagcctttccaaccccagcccgtacagcctcaaccccaccagcctatgcagccccagcctcccgtccagcctatgcagcctctgctgcctcagcccccgttaccgcccatgttccctctacggccgctcccccctatcctgccagaccttcatctcgaagcttggcctgctactgacaaaaccaaacaggaagaggtcgac

SEQ ID NO: 325538 - DNA, 618 bp, Artificial Sequence
  derived and/or modified sequence
atgggaacatggattcttttcgcgtgtctggttggtgcggcatttgctatgccgctcccacctcatccgggacaccctgggtatatcaacttctcgtatgagaattcacattctcaggcgatcaatgtcgaccgcattgcacttgttttgaccccattgaaatggtatcaatccatgatccgacctccttactcttcgtacggctatgaaccgatgggtggatggctgcatcatcaaattatccctgttgtgtctcaacagcacccactcacacataccttacaaagccatcatcacattcccgtagtgcccgctcagcaaccccgagtccgacagcaagctttgatgcccgttcctgggcaacagtcaatgacaccgacccaacatcatcagcctaacctccctttgccagcccaacagcccttccagccgcaaccggtgcagcctcagccgcaccagccaatgcaacctcaaccacccgttcagccgatgcagccgttactgccgcagcctcctttgcctccaatgtttccactacgtccattaccccctatactgcccgacctacacttggaggcgtggcccgcaaccgataaaacgaagcaggaggaagtcgac

SEQ ID NO: 325539 - DNA, 618 bp, Artificial Sequence
  derived and/or modified sequence
atgggaacttggattttgttcgcttgcctggttggagccgcatttgctatgcccttgcccccacacccgggtcacccaggatacattaacttttcatatgagaacagccatagccaagccattaacgtggatcgaattgcactggtcctgactcctctcaagtggtaccagagcatgatcaggcctccatacagcagctatggatatgaaccaatggggggctggctccaccatcagatcattcctgttgtctctcagcagcatcctctgacccataccctgcagagccaccatcatattcctgttgtacccgcacagcaaccccgcgtgcgacagcaagccctgatgcccgtgcccgggcagcagtcaatgacgcccacccaacaccaccagcccaatctgcctctccccgcccagcagcccttccaaccacagcccgtgcagcctcagccacaccagcctatgcaaccgcagccccctgttcaacccatgcagcctctgctgccccagcctcccttaccccctatgttccccctacggcccctgccaccgattcttccggatctgcacttggaggcctggcctgcaacggataagacaaaacaggaagaagtagat

SEQ ID NO: 325540 - DNA, 618 bp, Artificial Sequence
  derived and/or modified sequence
atgggaacctggatcctcttcgcctgcctggtgggtgccgcgtttgctatgcccctgccgcctcacccaggccacccaggctatatcaatttctcctacgaaaactcccactcacaagctatcaatgtggatcgcattgcactggttctgaccccgctgaagtggtaccagagcatgattcggccaccgtactcctcctacggttacgaacctatgggagggtggttgcatcatcaaatcatcccggtcgtgtcacaacagcatccactgacccatactctccagagccatcatcatatcccagtggtgccagctcagcagccgcgggtgcgtcaacaggcgctgatgccagtgccgggacaacagtccatgaccccgacgcagcaccaccagccgaacctgccactgccagcccagcaacccttccaaccccaacccgttcagccgcaaccgcaccagccgatgcagccgcagcctccggtgcagccgatgcaacctctgttgccgcaaccaccgctcccgcctatgtttccactccgaccactgccgccaatcctgccggacctgcacctggaggcctggcccgctactgataagaccaaacaggaagaggtggac

SEQ ID NO: 325541 - DNA, 618 bp, Artificial Sequence
  derived and/or modified sequence
atgggaacatggattctcttcgcttgtctcgttggagctgcgttcgccatgcccctcccgccgcacccaggacaccccggctacatcaacttctcatatgaaaacagccatagtcaggcgatcaacgtggacagaatcgctttggtgttgacccccctcaagtggtaccagtccatgatccgccccccctactcatcttacggttacgagcccatgggtggctggctgcatcaccaaattatccccgtcgtgagccaacagcaccctctgactcataccttgcaatctcatcatcatatccccgtggtccctgcccagcagcccagggtgcgccaacaggcccttatgcctgttccaggtcagcagtctatgacccctacacaacaccatcaaccaaatctccccctgcccgcgcagcagcctttccagcctcagccggtgcagccccaaccccaccaacccatgcagcctcaacccccggtgcaacctatgcaaccactgctcccacagccgccgctccctccaatgttccctttgaggcccctgcccccaatcctcccagatctgcacctggaagcgtggcctgctactgataagaccaagcaggaggaagtggac

SEQ ID NO: 325542 - DNA, 618 bp, Artificial Sequence
  derived and/or modified sequence
atggggacgtggatactgttcgcctgtctggtcggcgcagccttcgctatgcctctgcctccacatccgggacaccccggctacatcaatttttcttacgaaaattcccactcccaggcaattaatgtagacaggatcgccttggtgctgactcccctgaagtggtaccagtccatgatccgccctccttattcatcttacggctatgagcctatgggcggttggcttcaccaccagatcattccagtggtcagccagcaacacccactcactcatacccttcagagtcaccatcacatcccggtggtacccgctcagcagccccgggtccgtcaacaggccctgatgcctgtaccaggccagcaatctatgaccccaactcaacatcaccagcccaacttgcctctgccagcacagcagcctttccagccccagcccgtgcaaccccagcctcaccaacccatgcagccccagccacccgttcagccaatgcagcccctacttccacagccaccccttccacctatgtttcctttaagacctctgcctcccatccttcccgatctccatttggaggcctggccagcaactgataaaactaagcaggaggaggtggac

SEQ ID NO: 325543 - DNA, 618 bp, Artificial Sequence
  derived and/or modified sequence
atgggcacctggatcttgttcgcctgcctggttggagcagcattcgccatgcctcttccaccgcatccgggccacccgggttacatcaactttagttacgaaaactcgcacagccaggcaatcaacgtcgatagaatcgccctggtgctcactcctctgaagtggtaccaaagcatgatccgcccaccatactcatcatacggctacgagccgatgggcgggtggctgcaccatcagattatcccggtcgtgagccagcagcacccactgacccacaccctgcaatcgcaccaccatatcccagtggtgccagcccagcagccacgggtccgccagcaggcgctgatgccggtgcccggccagcaatcaatgactccaactcagcaccatcaaccgaacctgccactcccagcccagcaacctttccaaccgcagcctgtgcagccccagccacatcaacccatgcaacctcaaccgcctgtgcaaccgatgcaaccactcctcccgcaaccgccgctcccaccgatgttccctctccgcccgttgccgcccatcctgccggatctgcacctggaagcgtggccggcaactgacaagactaaacaggaggaagtggac

SEQ ID NO: 325544 - DNA, 618 bp, Artificial Sequence
  derived and/or modified sequence
atgggcacgtggattcttttcgcatgtctggtgggcgctgcgtttgcgatgcctctcccaccccaccctggacaccctggctacattaacttctcttacgaaaattctcactcacaagctattaatgtagaccgaatcgctttagtgctgacccctcttaaatggtaccagtcaatgatacgaccgccgtatagcagttatggttacgaaccaatgggcgggtggctccaccaccagattatcccagtggtgtcacagcagcatcccctgactcacaccctccagagtcatcaccacatccctgtggttcccgcccaacagcccagggtcagacagcaggctttaatgcccgtgccaggacaacagtccatgactccgacccagcatcatcagccaaatttgccactgcctgcccaacagcccttccagccgcaaccggtccagccacaaccgcatcaaccgatgcagcctcaaccaccggtgcagccgatgcaacctctgctgccacagccgccactcccacctatgtttcctctgagacctctccctcctatcctgccggatctgcacttggaagcttggccagccacggacaaaacaaagcaagaggaagttgac

SEQ ID NO: 325545 - DNA, 618 bp, Artificial Sequence
  derived and/or modified sequence
atgggtacgtggattctgttcgcgtgtctggtgggagccgcctttgcgatgccccttcccccccatcctgggcatcccggatacattaatttctcttacgagaactcccattcacaggcgattaatgttgaccgaatcgctctggtgttgacgccactcaagtggtaccagagtatgatccgacctccatactcctcttacgggtacgagccaatgggcggctggctgcaccatcaaataatccccgttgtaagtcaacaacatccgctgactcataccctgcagtcacaccatcatattcccgtggtcccagcccagcagcctagggtgaggcagcaagccctgatgcccgtccccggacaacagtccatgactcctactcaacatcaccagccaaacctgccactgcctgcccagcaacccttccagccacaacccgtgcaaccacagccacatcagcccatgcagcctcagccccctgtacagcccatgcagcctctgcttccccagcctccgctgccccccatgtttcctctgcgtccactaccaccaatcttgcccgaccttcacctggaagcttggcctgccaccgataagacaaagcaggaggaagtggac

SEQ ID NO: 325546 - DNA, 618 bp, Artificial Sequence
  derived and/or modified sequence
atgggaacatggatactattcgcctgtctggttggggccgcatttgctatgcccctgcctccgcatcctggtcatccaggatacattaatttcagctacgagaactcccattcacaggcgataaacgttgaccgaatagctctggttctgactccattaaagtggtaccagtccatgataagaccaccatactcgagctacgggtatgaacccatgggcggatggctgcaccaccagatcataccagtggtttcgcaacaacatcctctcacacatacgcttcagagccaccaccacattcctgttgtacccgcccagcaacctcgtgtccgtcagcaggcactcatgcctgttcccggccagcagagtatgacacctacacagcaccaccagccgaacctgccgctgccagcccagcagcccttccagccacaacctgtccaaccacagccccaccaacccatgcagccgcagcctccagtgcagccaatgcagccgttgctcccacaacctccactgccacccatgttccccctgcgtcctctgccaccaattctgcccgatttacatctggaggcatggcccgctactgataaaacgaagcaggaggaagttgat

SEQ ID NO: 325547 - DNA, 618 bp, Artificial Sequence
  derived and/or modified sequence
atggggacctggattctgtttgcatgtctggtgggtgcggcatttgctatgcccctgccacctcaccctggacatcctggttacataaacttcagctacgaaaattctcattcccaggccattaatgtggacagaattgctctggtcttgacccctttgaagtggtaccaatccatgattcggcccccttactcctcgtacgggtatgagccaatgggaggttggctgcatcatcagattatccctgtagtctcccagcaacacccgctcactcacactcttcaaagccatcaccatatccctgtggtgcctgcgcaacaaccccgcgtccgacaacaagcacttatgcctgtgccaggccaacaatccatgacccccacccaacatcaccagcccaatctcccgctcccagcacaacaaccattccagcctcaaccggttcaaccccaaccccaccagcctatgcagccacagcctcccgtccaacccatgcagcctctccttccacaacctcccctgccgcctatgttccccctcaggcctctccctcccatcctgcccgatctccatcttgaggcatggcccgcaactgataagactaaacaagaagaagtggac

SEQ ID NO: 325548 - DNA, 618 bp, Artificial Sequence
  derived and/or modified sequence
atgggcacatggatcctgtttgcgtgtttggtgggggctgcattcgccatgccccttccccctcaccctgggcacccaggctacataaatttttcctacgaaaattctcacagtcaagcgattaatgtagaccggatcgcactggtgcttacaccactgaaatggtatcaatcaatgatacgacccccatatagctcctatggctacgagccaatgggtggctggctgcatcatcagataatcccagtggtttctcagcagcatcctctcacccacacactgcaatctcaccaccacatcccagttgtgccggcacagcagcctcgggtgaggcaacaagcgttgatgcctgtgcctgggcagcagtcaatgacacccacacaacaccatcagcccaacctgccactccccgcacagcagcccttccaaccccagccagtgcaaccccagccacatcagccgatgcagccacagcccccagtgcagccaatgcaacccctccttccgcagcccccactgccaccaatgttccctcttcgtcctctcccacctatcctcccagatcttcatctggaggcttggccggccacagacaaaaccaagcaggaagaggtcgat

SEQ ID NO: 325549 - DNA, 618 bp, Artificial Sequence
  derived and/or modified sequence
atgggcacgtggatcctgttcgcctgcctggttggagcagccttcgctatgcctctgccacctcatccaggacaccccggatacatcaatttcagttacgagaattcacacagccaggccattaatgtggatcggatcgctctggtccttactccacttaaatggtatcaatccatgattagaccaccctatagcagctatgggtacgaaccaatggggggatggttgcaccaccagatcatacccgttgttagccagcagcatccactgacgcatacactccagtcacaccatcacatccccgtggtgccagcacagcaacctcgcgtgaggcagcaggctcttatgcccgtgcccggtcagcaatccatgacacccacacaacatcaccagcctaacttgcccctccctgctcaacagcccttccagccacagccagtgcagccccagccacaccagcccatgcaaccacagcccccagtgcagcctatgcaacctctgctcccgcagcctccactccctcctatgtttccactgagaccactcccacctatcctgcccgacctgcacttggaggcctggcctgcgaccgataagactaaacaggaggaagtggat

SEQ ID NO: 325550 - DNA, 618 bp, Artificial Sequence
  derived and/or modified sequence
atggggacctggatcttattcgcatgtttggtaggcgctgcttttgcaatgccgttgcccccccacccaggccaccctggctatattaatttctcttacgaaaattcacactcccaagcgataaacgtggacaggattgctctggtgcttaccccacttaagtggtaccagtcaatgatacgtcccccttattcttcctatggttacgagccgatgggcggttggctgcaccatcagatcatacccgtcgtgagccagcaacacccactgacacacacactgcagtcgcaccaccatatccccgtggtgcctgctcagcagccgagggttcggcagcaggccctcatgccagtgcccggacagcagtctatgacaccaactcagcaccaccagcctaatcttccccttccagcccagcagccgtttcagccccagccggtgcagccccagcctcaccagcccatgcagccccagccccccgttcagcccatgcagccactgttgccgcagcctccgctgccgcccatgtttccgttgaggccactgcccccaatactgccggacctccacctggaagcatggccggccaccgacaagaccaagcaggaggaggttgac

SEQ ID NO: 325551 - DNA, 618 bp, Artificial Sequence
  derived and/or modified sequence
atggggacatggatactgttcgcatgtcttgtcggggcagccttcgccatgcccctcccccctcaccccgggcacccaggctacatcaacttcagctacgaaaattctcattctcaagcaattaacgtcgatcgaattgccctcgtcctgaccccgcttaagtggtaccagagtatgattcgcccaccctactcaagttacggctacgaacccatgggtggttggttgcatcaccagattatccccgtcgtgagccagcagcatcctctgacccacactcttcaatcacaccaccacattccggtggttcccgcccaacaaccacgggtgcgccagcaggccttaatgcccgtgcccggacaacaatctatgactccgacccagcaccaccagcccaatctccccctgcccgcccagcagccatttcagccccaaccggtgcagccccaaccacatcagcccatgcagccacagccgcccgtgcagcccatgcaaccactgctgccgcagcctcctctgcctcccatgttccctttgcgaccactccctcctatcttgcccgacctacacctggaggcctggcccgccaccgataaaacgaagcaggaggaggtggac

SEQ ID NO: 325552 - DNA, 618 bp, Artificial Sequence
  derived and/or modified sequence
atgggaacctggatcctgttcgcatgtctggtgggtgcagcttttgcaatgccactgcccccacaccccggacatccgggatacattaacttctcgtacgaaaatagccatagccaggccataaacgttgataggatcgcactcgtgctcacccccctcaagtggtaccaatccatgatacgacccccttactcgagctacggatatgagccgatgggtggatggcttcatcatcaaatcattccagtcgtttcgcagcagcacccgcttactcatactctgcagtcccatcatcatattccagtggtcccagcacaacagcctcgcgtgagacaacaggccctcatgccagtccctggacagcaatccatgacccctacccaacaccatcaacctaacctcccgcttcctgctcagcagccatttcagcctcagccagtgcaaccacagcctcaccagccgatgcagccgcaaccaccagtgcaacctatgcaacctcttctcccacaacctccactcccgccaatgtttccactgcgtcctcttccacccatcctcccggacctccacctcgaagcatggcctgcaaccgataagaccaagcaagaggaagtggat

SEQ ID NO: 325553 - DNA, 618 bp, Artificial Sequence
  derived and/or modified sequence
atgggaacctggatcctatttgcctgcttggtaggggccgcctttgctatgccattaccaccacaccccggccatcccggctatatcaattttagttacgagaattcccatagccaagcaatcaatgtggatcgaattgcccttgtgctgactcctctgaagtggtaccagagcatgatcaggcccccctactccagctacggctatgagccaatgggaggatggctgcaccaccagataattccagtcgtctcccagcagcatccactgacccacactctccagtcccaccaccacattccagtggtgcctgcacagcagccacgtgtgcgccagcaggccttaatgcctgtgccaggccagcagagcatgactccgacacagcatcatcaacccaatttaccactgcctgcacagcagccattccagccacagccagttcaaccacagccgcaccagcccatgcaacctcagccccctgttcaaccgatgcagccgctgttgccacaacctccgctgcccccaatgttcccgttaagaccattgcccccaattttgccagaccttcacctggaagcttggccagctactgataaaactaaacaggaggaggtagac

SEQ ID NO: 325554 - DNA, 618 bp, Artificial Sequence
  derived and/or modified sequence
atgggaacatggattctgtttgcctgcttggttggcgcagcctttgcgatgcccctgccgcctcaccccggccaccccggatatataaatttctcatatgaaaattctcattctcaggccataaacgtcgataggatcgccctggtgctgacgccgctgaaatggtatcagtctatgatcaggcccccctattcctcttacgggtatgaacccatgggtgggtggttgcaccaccaaatcatccctgtcgtgtctcagcaacaccccttgacccatactctgcagtcccatcatcacattcccgtagtaccggcacagcagcccagggtgagacagcaggccctcatgcccgtccctgggcaacaatccatgactcccacccagcaccatcagcctaacctacctctgcctgcacagcagccatttcagccgcagcctgtccagccgcagccgcaccagccgatgcaacctcagcccccagtgcagccaatgcaacccctgttacctcaaccccctctgcctcctatgtttccgctgcgacccctgcctccaatcttgccagacctgcaccttgaggcctggcccgctaccgataagacgaagcaggaggaggttgat

SEQ ID NO: 325555 - DNA, 618 bp, Artificial Sequence
  derived and/or modified sequence
atgggcacgtggatcctcttcgcatgtctggtgggcgccgcctttgcgatgccgctgcccccgcacccaggacacccaggatacatcaatttttcctacgaaaactcgcattcgcaggccatcaacgtggaccggattgcgctggtgctgactccgctgaagtggtaccagtcaatgattagaccaccctactcgagctacggctacgaaccgatggggggctggcttcaccatcagatcatcccggtggtgtcccaacagcacccgcttactcacaccctgcagagccaccatcacatcccagtcgtcccagcacagcaaccacgcgtgcggcagcaggcgctcatgccagtgcctggacagcaatcgatgacccctactcagcatcaccagcccaacctcccactgccagcgcagcaacctttccagcctcagccggtccagccacagccgcaccagccgatgcagccccagccaccggtccaaccaatgcaaccactgctgcctcagccgcctctgccgccgatgttcccgctgcgccccctccctcccatccttccggatctgcatctggaggcatggcccgctactgacaagacgaagcaggaagaagtcgat

SEQ ID NO: 325556 - DNA, 618 bp, Artificial Sequence
  derived and/or modified sequence
atgggaacctggatcctgttcgcatgcctggtcggcgccgcgttcgctatgcctcttccgccacatccaggacatccagggtacatcaacttttcctacgaaaactcgcatagccaggccatcaacgtcgaccgcattgccctcgtccttactcccctcaagtggtatcagtcaatgatccgcccgccctacagctcgtacggatacgaacccatgggtgggtggcttcaccaccagattatccctgtggtgtcacaacagcaccccctcacgcacactctgcagagccaccaccacatcccggtcgtgccggcccagcagccacgcgtccggcagcaagcccttatgcctgtgccaggacagcagtcgatgacgcctacccagcaccatcagccgaacctgccactgcctgctcagcaaccattccagccgcagcccgtgcagccgcagcctcaccagccaatgcaaccgcagcctccagtgcagccgatgcagccgctgctgccgcaaccaccgctgccgcctatgtttccactgaggccgctgccacctatcctcccagacctccacttggaggcatggcctgctaccgacaagaccaagcaggaagaagtggat

SEQ ID NO: 325557 - DNA, 618 bp, Artificial Sequence
  derived and/or modified sequence
atgggcacgtggatactgtttgcctgtctcgtgggcgccgcctttgctatgcctttgccgccacatcctggtcatcctggctacataaactttagctacgagaactctcattctcaggccataaacgtcgaccgcattgctttggtcctgaccccccttaagtggtatcagagcatgattcgaccaccttattccagctatggctatgagccaatgggagggtggctgcatcaccagataatccccgtggtttcccaacagcaccctttgacccacacactccagtcccaccatcacatccctgtggttccggcacagcagccccgggtgcgccagcaggccctgatgccagtcccgggccaacagtctatgacccctacccagcatcaccagcccaacctgccactgccagcgcagcagcctttccagcctcagcctgttcaaccacagccccatcaaccaatgcagccccagcctcccgtgcaaccaatgcagccactcctgccacagcccccgctgcctccaatgttcccactgagaccgctccctcctattctgcccgaccttcatcttgaggcttggccggctacggataagacaaagcaggaagaggtggac

SEQ ID NO: 325558 - DNA, 618 bp, Artificial Sequence
  derived and/or modified sequence
atgggaacatggatcttatttgcctgtctcgtgggagccgccttcgccatgcctctgccacctcatcctgggcatcctggctacatcaacttctcctatgagaactcacactcccaggcgatcaacgtcgatagaattgctttggtgcttacacccttaaagtggtaccagagcatgattagacctccctattccagctacggctacgagcccatgggggggtggttacaccaccagatcataccagtcgtgagccaacagcatccccttacacacacactccagagtcaccatcacatccctgtggtgccggctcagcagccccgagtgcgacaacaggcccttatgcctgttcctggccagcagtcaatgacccccactcagcaccaccagccaaacttgccgctcccagcgcagcagccatttcagcctcagcctgtccaacctcagccgcaccagccgatgcagccgcagcctcccgtgcagccaatgcagcccctgctgcctcaaccgcctcttccccccatgtttcccctgaggcctcttccaccaatactcccagacctccaccttgaggcctggccggcgactgataaaacaaagcaggaggaagttgat

SEQ ID NO: 325559 - DNA, 618 bp, Artificial Sequence
  derived and/or modified sequence
atgggaacctggattctcttcgcctgcctggttggagctgcatttgccatgccgttgcctccgcatccgggacatccaggatacatcaacttttcctacgagaactcacactcgcaagcaatcaatgtggacaggattgcactcgtcctgaccccgttgaagtggtaccaatccatgatcagacccccgtattcctcctacggatacgaaccaatgggaggctggctccatcatcaaatcattccagtcgtctcgcaacagcaccctctcacgcacaccctgcaatcacatcaccacataccagtcgtccctgcgcagcaaccgcgggtgcgccaacaggcacttatgccagtccctggtcaacagtcgatgactccaacccagcaccaccaaccgaatctcccacttccggcgcagcagcccttccagccacaaccggttcagccacaaccacatcagccgatgcagccacaacctccggtgcagcctatgcagccgctcctcccgcagccgccactgccaccgatgttcccgttgcgtcccctgccacccatcctgcctgacctgcatctggaagcctggccagccactgataagaccaagcaagaggaagtggac

SEQ ID NO: 325560 - DNA, 618 bp, Artificial Sequence
  derived and/or modified sequence
atgggaacatggattttgttcgcttgtctcgttggcgctgcctttgcaatgccactccccccacatcctggacatcccggttacatcaattttagctacgaaaatagtcattcccaagcgattaacgttgataggattgctctcgttcttacacctctaaagtggtaccagtcaatgataaggcctccttactcttcatatggatatgaacctatgggaggttggcttcaccaccaaattatcccagttgtttcccagcaacaccccctcacacacaccttgcagagccatcaccatattcctgtggttcctgcccaacaaccgagagttagacagcaagctcttatgccagttcctgggcaacaaagcatgactccgacgcaacaccaccaaccaaacttaccattgcctgctcaacagcccttccaacctcagcctgttcaacctcaaccacaccaacctatgcagccccaacctcctgtgcagcctatgcaaccccttcttccacagccgcctctaccgccaatgtttcctctacgaccacttccaccgatcttgccagatttacatctagaggcgtggcctgccaccgataagacaaagcaagaagaggttgac

SEQ ID NO: 325561 - DNA, 618 bp, Artificial Sequence
  derived and/or modified sequence
atggggacctggatactctttgcctgtttggtgggggcggcatttgcgatgccgcttccgccacacccgggccatcctgggtacattaacttttcatacgaaaacagccattcgcaagccataaacgtggataggattgcactggtccttactcctctgaaatggtatcagtctatgattaggcctccgtactcctcctacggatacgagccaatgggtggttggcttcaccaccagatcatccctgtggtttcgcagcaacacccactgacccatacgctccaatcgcatcatcatattcctgtcgtgcctgcacagcaacctcgagtgcgccagcaagctctgatgccagtgcctggccagcaatcaatgactcctacccaacatcaccaaccaaatctgcctcttccggcacaacagcctttccaaccacagcctgtgcagcctcagccccatcagcctatgcagccccaaccgccagtccaacccatgcagccactgctgcctcaaccaccacttccccctatgttcccactccgtccgcttcctcccattctcccggatctgcatcttgaagcgtggccagccaccgacaagactaagcaagaagaggtggac

SEQ ID NO: 325562 - DNA, 618 bp, Artificial Sequence
  derived and/or modified sequence
atgggaacttggatactgtttgcatgccttgtgggtgcagcctttgcaatgcctcttcctcctcatccgggacatcctggttacatcaatttctcatacgaaaactcacattctcaagcaattaacgtcgatcgcatcgccttggtactcaccccattgaaatggtatcaatccatgatacggccgccgtactcctcctacggttacgagccgatggggggttggctgcatcatcagattatacctgtcgtgtcgcaacaacatcctctgacccacacgcttcagtcacatcaccacattcctgtggtcccggcccaacaaccccgagtccggcagcaagcactgatgcccgtgccagggcagcaatcaatgacgccaacccagcaccaccaacctaacctcccacttcccgctcaacaaccttttcagcctcagcccgtgcagccccagcctcatcagcccatgcagccacaaccgccagtgcaacctatgcagcctctccttccacagcccccacttcctccaatgttccccctgcgcccactgccccctattctgcctgatcttcatctcgaagcatggcccgcgaccgacaagaccaagcaagaagaggtggat

SEQ ID NO: 325563 - DNA, 618 bp, Artificial Sequence
  derived and/or modified sequence
atggggacctggatactttttgcttgtctggtgggagccgcctttgctatgcctcttccaccacaccccggacatcccgggtacattaacttctcttatgagaactctcattcccaggctatcaatgtggatagaatcgcgctcgtcttgactcctctaaagtggtatcaaagtatgatccgacccccttacagcagctatggatatgagccaatgggcggatggttgcatcaccagatcatacccgtggtgagccagcaacatccgcttacccatactttacagtcacatcatcacatacccgtggttcccgcacagcagccccgtgttcggcagcaggccctgatgccagtgcccggccagcagagcatgaccccaacgcagcatcatcaacctaacctccccctgccggctcagcagccctttcagcctcagccagttcagcctcagccacaccaaccgatgcagccacagccacccgtacagcctatgcagccactgcttcctcagccgcccctccccccgatgtttccactaagaccactcccgcccattcttccggatttacatctggaggcctggcctgccaccgacaagacaaagcaggaagaggtggat

SEQ ID NO: 325564 - RNA, 764 nt, Artificial Sequence
  derived and/or modified sequence
gggaaauaagagagaaaagaagaguaagaagaaauauaagagccaccaugggaacauggauucucuuugcgugcuuggugggagcggccuucgcgaugccccugccgccucaucccggacauccgggguauaucaacuuuucguacgagaacucccacucccaagccaucaauguagaucgaaucgcgcucgugcuuacgccuuugaagugguaucaaucaaugauucggccacccuauagcagcuacggguacgaaccgauggguggcuggcuccaccaucagauuauccccguagugucgcagcagcacccgcucacgcauacccugcagucgcaccaccacaucccugucgugccagcccagcaaccgagaguccgccagcaggcauugaugcccguccccggucagcagucaaugacuccgacgcagcaucaucagcccaaucucccgcuuccugcucagcagcccuuccagccucagcccgugcaaccgcagccacaccagcccaugcagccccagccgccuguccaaccaaugcagccucugcuuccacaaccgccacugccgccgauguuccccuugaggccucuucccccaauccugccggaucuucaccucgaggcguggcccgcaaccgacaaaacaaagcaagaagagguagacuaaugagcugccuucugcggggcuugccuucuggccaugcccuucuucucucccuugcaccuguaccucuuggucuuugaauaaagccugaguaggaag

SEQ ID NO: 325565 - protein, 91 aa, Artificial Sequence
  derived and/or modified sequence
MDEDEFELQPQEPNSFFDGIGADATHMDGDQIVVEIQEAVFVSNIVDSDITVHNFVPDDPDSVVIQDVVEDVVIEEDVQCSDILEEADVSE

SEQ ID NO: 325566 - DNA, 276 bp, Artificial Sequence
  derived and/or modified sequence
atggacgaggacgagttcgagctgcagccccaggagcccaacagcttcttcgacggcatcggcgccgacgccacccacatggacggcgaccagatcgtggtggagatccaggaggccgtgttcgtgagcaacatcgtggacagcgacatcaccgtgcacaacttcgtgcccgacgaccccgacagcgtggtgatccaggacgtggtggaggacgtggtgatcgaggaggacgtgcagtgcagcgacatcctggaggaggccgacgtgagcgagtag

SEQ ID NO: 325567 - DNA, 2175 bp, Artificial Sequence
  derived and/or modified sequence
atggacggcgaccagatcgtggtggagatccaggaggccgtgttcgtgagcaacatcgtggacagcgacatcaccgtgcacaacttcgtgcccgacgaccccgacagcgtggtgatccaggacgtggtggaggacgtggtgatcgaggaggacgtgcagtgcagcgacatcctggaggaggccgacgtgagcgagaacgtgatcatccccgagcaggtgctggacagcgacgtgaccgaggaggtgagcctgccccactgcaccgtgcccgacgacgtgctggccagcgacatcaccagcaccagcatgagcatgcccgagcacgtgctgaccagcgagagcatgcacgtgtgcgacatcggccacgtggagcacatggtgcacgacagcgtggtggaggccgagatcatcaccgaccccctgaccagcgacatcgtgagcgaggaggtgctggtggccgactgcgcccccgaggccgtgatcgacgccagcggcatcagcgtggaccagcaggacaacgacaaggccagctgcgaggactacctgatgatcagcctggacgacgccggcaagatcgagcacgacggcagcaccggcgtgaccatcgacgccgagagcgagatggacccctgcaaggtggacagcacctgccccgaggtgatcaaggtgtacatcttcaaggccgaccccggcgaggacgacctgggcggcaccgtggacatcgtggagagcgagcccgagaacgaccacggcgtggagctgctggaccagaacagcagcatcagagtgcccagagagaagatggtgtacatgaccgtgaacgacagccagcaggaggacgaggacctgagcaacaacagcgacggcatcgagaacagaaacggcaccgccagcgccctgctgcacatcgacgagagcgccggcctgggcagactggccaagcagaagcccaagaagaagagaagacccgacagcagacagtaccagaccgccatcatcatcggccccgacggccaccccctgaccgtgtacccctgcatgatctgcggcaagaagttcaagagcagaggcttcctgaagagacacatgaagaaccaccccgagcacctggccaagaagaagtaccactgcaccgactgcgactacaccaccaacaagaagatcagcctgcacaaccacctggagagccacaagctgaccagcaaggccgagaaggccatcgagtgcgacgagtgcggcaagcacttcagccacgccggcgccctgttcacccacaagatggtgcacaaggagaagggcgccaacaagatgcacaagtgcaagttctgcgagtacgagaccgccgagcagggcctgctgaacagacacctgctggccgtgcacagcaagaacttcccccacatctgcgtggagtgcggcaagggcttcagacaccccagcgagctgagaaagcacatgagaatccacaccggcgagaagccctaccagtgccagtactgcgagtacagaagcgccgacagcagcaacctgaagacccacatcaagaccaagcacagcaaggagatgcccttcaagtgcgacatctgcctgctgaccttcagcgacaccaaggaggtgcagcagcacaccctggtgcaccaggagagcaagacccaccagtgcctgcactgcgaccacaagagcagcaacagcagcgacctgaagagacacgtgatcagcgtgcacaccaaggactacccccacaagtgcgagatgtgcgagaagggcttccacagacccagcgagctgaagaagcacgtggccgtgcacaagggcaagaagatgcaccagtgcagacactgcgacttcaagatcgccgaccccttcgtgctgagcagacacatcctgagcgtgcacaccaaggacctgcccttcagatgcaagagatgcagaaagggcttcagacagcagaacgagctgaagaagcacatgaagacccacagcggcagaaaggtgtaccagtgcgagtactgcgagtacagcaccaccgacgccagcggcttcaagagacacgtgatcagcatccacaccaaggactacccccacagatgcgagtactgcaagaagggcttcagaagacccagcgagaagaaccagcacatcatgagacaccacaaggaggtgggcctgccctag

SEQ ID NO: 325568 - DNA, 276 bp, Artificial Sequence
  derived and/or modified sequence
atggatgaagatgagttcgagctgcagcctcaggagcccaatagcttcttcgatggaattggcgcagacgccacacacatggatggagaccagatcgtagtggagattcaggaagctgttttcgtctccaacatcgttgatagcgacattactgtgcataactttgttcctgatgaccccgatagcgtagttatacaagacgtggttgaggatgtggtcattgaagaggacgttcagtgttccgatatcttggaggaagctgatgtgtccgagtag

SEQ ID NO: 325569 - DNA, 2175 bp, Artificial Sequence
  derived and/or modified sequence
atggacggagaccagattgtcgtggagatccaagaggcagtctttgtctcaaatatcgtcgacagtgacatcactgtacacaatttcgttcctgacgaccccgactccgtggtcatacaggacgtggtagaggatgtggtaatcgaagaagacgttcagtgcagcgacatcttggaggaggctgacgtatcagagaatgtaattatacctgaacaggttctggacagtgatgtgacagaagaagtgtctctgccgcattgcactgtcccagacgatgttctcgcatccgacatcacttcaacgtctatgtccatgcccgagcacgtcctcaccagtgagagtatgcacgtctgcgatataggacatgttgagcacatggtccatgattcggtggtggaagcagagatcatcaccgacccacttacaagcgatatcgtgtcagaggaagtgttagtggctgactgtgcccccgaggcagttatcgatgcctctgggatttcagttgaccagcaggataacgacaaagcatcatgcgaagactatttaatgatcagcctcgatgacgctggaaagatcgaacacgacggatcgacaggagtcaccattgatgctgagtctgagatggatccctgtaaggtagacagcacatgcccggaagtgataaaagtctacatcttcaaggccgaccccggcgaagacgatttaggaggcacggttgatatcgttgaatccgagcccgagaatgaccacggcgtggagctgctcgaccagaattcctctatcagggtgccgcgcgagaaaatggtttacatgaccgtcaacgatagccaacaggaggatgaggatttgtcaaacaacagcgatggaatcgagaatagaaacggcaccgccagcgcccttctgcatatagacgagtcagcgggtcttggacgactcgccaagcagaaacccaaaaaaaaacgccgtccggattcccggcagtatcaaaccgccattatcatcgggcctgatggccaccctctgaccgtttacccatgcatgatctgcggcaaaaagttcaagagtagggggtttcttaagcgccatatgaaaaaccacccggagcacctggccaaaaaaaagtaccattgtaccgattgcgattatactacgaacaagaaaatctccttacacaaccatctggaatctcataagctcacgtccaaggccgaaaaggccatagaatgcgatgagtgcgggaagcactttagtcacgctggagcccttttcacacataagatggttcacaaggagaaaggcgctaataagatgcacaaatgcaagttttgtgagtatgagactgctgaacagggtctgctgaaccggcacttgctagccgtgcactcaaaaaatttcccacacatatgtgtcgaatgtggcaaaggcttcagacatccatcggaacttagaaaacacatgcggatacatacaggcgaaaagccctatcagtgccagtattgtgagtaccgctcggcagacagtagcaatctcaagacccatataaaaaccaaacatagcaaggaaatgccatttaagtgtgatatctgcctgcttactttttccgacactaaggaggtacagcagcacacactggttcaccaggagtccaaaacccatcagtgcttacattgcgaccacaaaagcagtaatagcagcgatttgaaaagacacgtgatatctgtccacacaaaagactatcctcataagtgcgagatgtgcgaaaagggtttccaccggccttctgaactgaaaaagcatgttgccgtgcataagggaaaaaaaatgcaccagtgtcgccactgtgattttaagatcgccgaccccttcgtgctgtcccgccatattctcagcgtgcacactaaagatctcccatttcggtgtaagaggtgccgaaaaggtttccggcagcagaatgagctcaagaaacacatgaaaacacattcaggaagaaaggtttaccagtgtgagtattgtgaatacagcacaacagatgcatccgggtttaagagacacgtcatttcgatccacacgaaggactatccccacagatgcgaatattgcaagaaagggtttagacggccaagcgagaagaatcaacacataatgcggcaccacaaggaggtgggcctaccgtag

SEQ ID NO: 325570 - DNA, 276 bp, Artificial Sequence
  derived and/or modified sequence
atggatgaagatgaatttgagctgcagccccaggagcccaacagcttctttgatggcatcggggctgatgccacccacatggatggagaccagatcgtggtggagatccaggaggccgtgtttgtgagcaacatcgtggacagcgacatcaccgtgcacaactttgtgcctgatgatcctgacagcgtggtgatccaggatgtggtggaggatgtggtgattgaggaggatgtgcagtgcagcgacatcctggaggaggctgatgtgtctgagtag

SEQ ID NO: 325571 - DNA, 2175 bp, Artificial Sequence
  derived and/or modified sequence
atggatggagaccagatcgtggtggagatccaggaggccgtgtttgtgagcaacatcgtggacagcgacatcaccgtgcacaactttgtgcctgatgatcctgacagcgtggtgatccaggatgtggtggaggatgtggtgattgaggaggatgtgcagtgcagcgacatcctggaggaggctgatgtgtctgaaaatgtcatcatccctgagcaggtgctggacagtgatgtgacagaggaggtgtccctgccccactgcaccgtgcctgatgatgtgctggccagtgacatcaccagcacctccatgtccatgcctgagcacgtgctgaccagcgagagcatgcacgtgtgtgacatcggccacgtggagcacatggtgcatgacagcgtggtggaggccgagatcatcacagaccccctgaccagtgacatcgtgtctgaggaggtgctggtggccgactgtgcccctgaggccgtgattgatgccagcggcatctctgtggaccagcaggacaatgacaaggccagctgtgaggactacctgatgatcagcctggatgatgctgggaagattgaacatgatggcagcactggagtgaccattgatgctgagagcgagatggacccctgcaaggtggacagcacctgcccagaggtgatcaaggtgtacatcttcaaggctgaccccggggaggatgacctgggcggcaccgtggacatcgtggagagcgagccagaaaatgaccacggcgtggagctgctggaccagaacagcagcatccgggtgccccgggagaagatggtgtacatgacagtgaatgacagccagcaggaggatgaggacctgagcaacaacagtgatggcattgaaaatagaaatggaacagccagcgccctgctgcacattgatgagagcgctggcctgggccgcctggccaagcagaagcccaagaagaagagaagaccagacagccggcagtaccagacagccatcatcatcggcccagatggccaccccctgactgtgtacccctgcatgatctgtgggaagaagttcaagagccggggcttcctgaagaggcacatgaagaaccaccctgagcacctggccaagaagaagtaccactgcacagactgtgactacaccaccaacaagaagatcagcctgcacaaccacctggagagccacaagctgaccagcaaggccgagaaggccattgaatgtgatgaatgtgggaagcacttcagccatgctggggccctcttcacccacaagatggtgcacaaggagaagggggccaacaagatgcacaagtgcaagttctgtgaatatgaaacagctgagcagggcctgctgaacagacacctgctggccgtgcacagcaagaacttcccccacatctgtgtggagtgtgggaagggcttccgccaccccagcgagctgaggaagcacatgaggatccacactggagagaagccctaccagtgccagtactgtgagtacagatctgctgacagcagcaacctgaagacccacatcaagaccaagcacagcaaggagatgcccttcaagtgtgacatctgcctgctgaccttcagtgacaccaaggaggtgcagcagcacaccctggtgcaccaggagagcaagacccaccagtgcctgcactgtgaccacaagagcagcaacagcagtgacctgaagagacatgtgatctctgtgcacaccaaggactacccccacaagtgtgagatgtgtgagaagggcttccaccggcccagcgagctgaagaagcacgtggccgtgcacaagggcaagaagatgcaccagtgccgccactgtgacttcaagattgctgacccctttgtgctgagccgccacatcctgtctgtgcacaccaaggacctgcccttccgctgcaagcgctgcaggaagggcttccggcagcagaatgagctgaagaagcacatgaagacccacagcggcaggaaggtgtaccagtgtgagtactgtgagtacagcaccacagatgccagcggcttcaagagacatgtgatcagcatccacaccaaggactacccccaccgctgtgagtactgcaagaagggcttcagaagacccagcgagaagaaccagcacatcatgaggcaccacaaggaggtgggcctgccctag

SEQ ID NO: 325572 - DNA, 276 bp, Artificial Sequence
  derived and/or modified sequence
atggacgaggacgagttcgagctgcagccccaggagcccaacagcttcttcgatggaattggcgccgatgccacccatatggacggggaccagattgtagtggagatccaggaggcagttttcgtttccaacatagtggattccgacatcacagttcacaacttcgtaccagacgatccagattcagtagtgatccaggacgttgtggaggatgttgtgatcgaggaagatgttcaatgtagcgacattctggaggaagcggatgtatcagaatag

SEQ ID NO: 325573 - DNA, 2175 bp, Artificial Sequence
  derived and/or modified sequence
atggacggcgaccagatcgtggtggagatccaggaggccgtgttcgtatctaatatcgtggattcagatatcacagtgcataactttgtgcctgatgatcctgatagtgtcgtgattcaggacgtcgtcgaggacgtagtgattgaggaggacgttcagtgttcagatattttggaagaggctgatgtatccgaaaacgtcataatcccagagcaggtgctggactctgatgtgacggaagaggtcagtttacctcactgcaccgtacctgatgacgtgttggctagtgacatcaccagtacttctatgagtatgccagaacatgtactgacctccgagagcatgcacgtgtgcgacataggtcacgttgagcatatggtacacgatagtgtcgtcgaggccgaaattattactgaccctctgacgtcggatattgtctccgaggaagtgttggtcgcagattgcgccccggaagccgtcatagacgcttccgggatttctgtcgaccaacaggataatgacaaggcctcctgtgaggattaccttatgatcagcctcgatgacgctgggaaaatcgaacacgacgggtccaccggcgtcacaattgatgcggaaagcgaaatggacccttgcaaggtggactctacctgtccagaggttattaaggtgtatattttcaaggcagatccaggagaagatgacctcggtggaactgtggacattgttgaatccgaacccgagaatgatcatggagtggaactgctcgaccagaatagcagtataagggtgccacgcgaaaaaatggtctacatgaccgtgaacgattctcagcaggaggacgaagatttaagcaataattcggacggaattgaaaatcgcaatgggacagcttccgccctcctgcacatagacgaaagcgcaggtctaggaagactggccaaacagaaacctaaaaagaaacgtcgaccggacagtcgccagtaccagacagctataatcatcgggccagacggacatcccctgactgtttatccttgcatgatatgtggaaaaaagtttaaaagcaggggctttctgaagcgacatatgaaaaatcaccccgaacaccttgccaaaaagaagtaccactgtacagactgcgactatacaaccaacaagaagatctctctccacaatcatctcgagagtcacaagttaacaagcaaagctgaaaaagccatcgagtgcgatgagtgcggcaagcacttttctcacgccggagccttatttacacataagatggtacacaaagagaagggtgctaacaagatgcataagtgcaaattctgtgagtacgagacagcagagcaaggtcttctgaatagacaccttctggccgtgcacagcaaaaacttcccacacatctgtgtagaatgcgggaaaggatttcgtcaccctagcgagttgcggaaacatatgcggattcatactggggagaagccctaccaatgtcaatactgcgagtaccggagtgctgacagctcaaacttaaaaacccacattaaaacaaaacactctaaggaaatgccttttaagtgcgatatctgcctgttgacctttagcgacacaaaggaggtccagcagcacacactggtgcatcaggaaagcaagacccaccagtgtcttcactgcgatcacaagagtagcaatagcagtgacctgaagcgccacgtcatttctgtgcacactaaggactatccgcataagtgcgagatgtgcgaaaaaggttttcaccggccttctgagctgaaaaagcatgtggctgtgcacaaaggcaaaaagatgcaccaatgtcgacactgcgactttaaaatcgccgatccatttgtgttaagcaggcacatactgtctgtccacactaaggacctaccctttaggtgcaagcgctgtagaaagggcttccggcaacagaacgaactgaagaaacatatgaagactcattcaggccggaaagtttatcagtgtgagtactgcgagtactctacgactgatgcatcaggttttaagaggcatgtgatcagtattcacaccaaagattatccgcataggtgcgagtactgcaagaaaggctttaggaggccttctgaaaagaaccagcacatcatgcgacatcacaaggaagtcggactgccatag

SEQ ID NO: 325574 - DNA, 276 bp, Artificial Sequence
  derived and/or modified sequence
atggatgaggacgagttcgagttgcaaccccaggagccgaacagctttttcgatggcattggcgcagacgccacacacatggacggcgatcagatcgtggtggaaatccaagaagccgtgttcgtctccaacatcgtagacagcgacataacagttcacaacttcgttcctgacgacccggacagtgtcgttattcaggacgtggtggaggacgtcgtcattgaggaagacgtgcagtgctccgatatcctggaagaggcagacgttagtgagtag

SEQ ID NO: 325575 - DNA, 2175 bp, Artificial Sequence
  derived and/or modified sequence
atggacggggaccagatcgtcgtagagattcaggaggccgtatttgtgtcgaatattgtcgatagcgacatcaccgtccataatttcgtgcctgacgatcctgactcagtggtgattcaggacgttgtggaagatgttgtcattgaagaggatgtccagtgttctgacattctggaagaggccgatgtgtccgaaaatgtcattattcccgaacaggtgctggactctgatgtgaccgaggaagtgtctcttccccattgtaccgtacccgatgatgtgctagcgtccgatatcacttccaccagcatgtcaatgccagagcacgtgctgacctctgaatcaatgcacgtgtgcgatattgggcacgttgagcacatggttcacgatagtgtggtagaagctgaaatcattactgatccgcttaccagtgacatagttagcgaagaagtgctagtggccgattgtgccccagaagctgtgatcgatgcatcagggattagcgtggatcagcaggataacgacaaggcttcttgcgaagattatctaatgatctcactcgacgatgccggaaaaatcgagcatgacgggtccactggcgtcaccattgatgcagagagcgaaatggacccatgcaaggtagactcaacctgtccggaagtcataaaagtctacattttcaaggcagaccctggagaagatgatctgggtgggacggtggatatcgtggagagtgaacccgagaatgatcacggggttgagctcttagatcaaaattcctcaattagagtgcccagagagaaaatggtgtacatgacagtaaatgatagccaacaggaggatgaagacctgagcaacaactccgatggcatcgagaacagaaatggaaccgcctccgcattgctgcatattgatgagtctgcaggcctgggaaggctggcaaaacagaagccaaagaaaaagcgccgtcccgactcccgtcaataccagactgcgatcataattgggcctgacggacacccactgacagtgtatccttgtatgatttgtggcaagaaatttaagtctaggggatttctgaagagacatatgaagaaccacccggaacacctggccaaaaagaaatatcattgcactgactgtgattatacaactaataagaaaatcagtctgcacaaccatctagagagtcataaattaacctcgaaagcggagaaggccatcgagtgcgatgagtgcggcaaacacttcagtcacgcaggagccctgttcacacataagatggtccataaggagaaaggcgcaaataagatgcataagtgcaaattttgtgaatacgagacagccgagcaaggccttctgaaccggcatctgctggcggtgcattctaagaattttccccacatctgcgtagagtgtggcaagggcttcaggcatccgtccgagctgaggaagcatatgagaatccatacaggagaaaagccctaccagtgccagtattgcgagtatcggtccgcggatagtagcaatctgaagacacacatcaagaccaaacattcaaaagagatgcccttcaagtgtgatatttgtttactgacttttagtgacacgaaggaagttcaacagcacactctggtccaccaggaaagtaagacacatcagtgtctgcactgtgaccataaatcctctaacagtagtgacttaaaacgccacgtgatttcagtgcatactaaagactatccccacaagtgcgagatgtgtgagaaggggttccacaggccctcagagctcaagaagcatgttgcggtccacaagggcaagaagatgcatcagtgccgacactgcgattttaagatcgccgacccattcgtattgagcagacatatcctgtcggtccacaccaaggacctaccatttaggtgcaaaaggtgccgcaagggattccggcagcagaatgaactgaagaaacacatgaaaacacatagtggccgtaaagtgtaccaatgcgagtactgcgaatacagtactacggacgcttccggatttaagcggcatgtcatcagtatccacactaaggattatccacatcgctgcgagtactgtaagaagggctttcgccgaccttctgaaaagaatcagcacattatgcggcatcacaaagaagtgggactaccgtag

SEQ ID NO: 325576 - DNA, 7157 bp, Artificial Sequence
  derived and/or modified sequence
agagaaaggccggcctgcagcacccgccaccgtcgccggccgcccgcacgtccgtccggttcttgctatattgccccaggctggtctcgaactcctgggctcaagccgttctcccgcctcccactgcccgcctgtcactgccgtctgttccctgagctgtgctttacgctgggaaagacatagaagaactattaagaagatagaattgttttgctgcgcagtacagcaacagtggatgttcaagattaagattagagtcaagttgtgtgattaagacaggagctgtgactgatgagaattaaaggccatggatgaagatgggcttgaattacaacaagagccaaactcattttttgatgcaacaggagctgatggtacacacatggatggtgatcaaattgttgtggaagtacaagaaactgtttttgtttcagatgttgtggattcagacataactgtgcataactttgttcctgatgacccagattcagttgtaatccaagatgttattgaggacgttgttatagaagatgttcagtgcccagatatcatggaagaagcagatgtgtctgaaacggtcatcattcctgagcaagtgctggactcagatgtaactgaagaagtttctttagcacattgcacagtcccagatgatgttttagcttctgacattacttcagcctcaatgtctatgccagaacacgtcttgacgggtgattctatacatgtgtctgacgttggacatgttggacatgttggacatgttgaacatgtggttcatgatagtgtagtggaagcagaaattgtcactgatcctctgactaccgacgtagtttcagaagaagtattggtagcagactgtgcctctgaagcagtcatagatgccaatgggatccctgtggaccagcaggatgatgacaaaggcaactgtgaggactaccttatgatttcctgtaataattctgatggaattgaaaaccggaatggcactgcaagtgccctcttgcacatagatgagtctgctggcctcggcagactggctaaacaaaaaccaaagaaaaggagaagacctgattccaggcagtaccaaacagcaataattattggccctgatggacatcctttgactgtctatccttgcatgatttgtgggaagaagtttaagtcgagaggttttttgaaaaggcacatgaaaaaccatcccgaacaccttgccaagaagaaataccgctgtactgactgtgattacactaccaacaagaagataagtttacacaaccacctggagagccacaagctgaccagcaaggcagagaaggccattgaatgcgatgagtgtgggaagcatttctctcatgcaggggctttgtttactcacaaaatggtgcataaggaaaaaggagccaacaaaatgcacaagtgtaaattctgtgaatacgagacagctgaacaagggttattgaatcgccacctcttggcagtccacagcaagaactttcctcatatttgtgtggagtgtggtaagggttttcgtcacccgtcagagctcaaaaagcacatgagaatccatactggggagaagccgtaccaatgccagtactgcgaatataggtctgcagactcttctaacttgaaaacgcatgtcaaaactaagcatagtaaagagatgccattcaagtgtgacatttgtcttctgactttctcggataccaaagaggtgcagcaacatgctcttatccaccaagaaagcaaaacacaccagtgtttgcattgcgaccacaagagttcgaactcaagtgatttgaaacgacacataatttcagttcacacgaaagactacccccataagtgtgacatgtgtgataaaggctttcacaggccttcagaactcaagaaacacgtggctgcccacaagggcaaaaaaatgcaccagtgtagacattgtgactttaagattgcagatccatttgttctaagtcgccatattctctcagttcacacaaaggatcttccatttaggtgcaagagatgtagaaagggatttaggcaacagagtgagcttaaaaagcatatgaagacacacagtggcaggaaagtgtatcagtgtgagtactgtgagtatagcactacagatgcctcaggctttaaacggcacgttatttccattcacacgaaagactatcctcaccggtgtgagtactgcaagaaaggcttccgaagaccttcagaaaagaaccagcacataatgcgacatcataaagaagttggcctgccctaacaatacttctacagaacgtttgtagagatattggccttgaagcagaaaattcattttaaagccaatcagtctcattcacatacaatactgtatattgatttatgctgtgtacaaatagaattattacttctagttgacttttttttaaatatacattttgctcagtagtgtgttctgaattctattcagtttgtttaataaatagggaaaactggcaacatgctagttacttttaataaagtaatccctgattctataccgaagttttatatcttagaattttatatttatttaaatatttaccttgcttaccttgatggtactcttctaagaccattaacttaaggtaactttatattggtaactctgaaagtattcatgttgactcatttttttccccatacatttctcacaataaaattgtcagagacatctactaatataaatgggagattttacagtcaggtctaattatcataacatggaagtcatttacttgtcttgcttaatattttcagaccacttgacagtgaaagtttccatttgagctgttgcgtccctggctttgctgagtaaagagcagtggctgggttcgtgtttacttttcaaatatacttcttttggctttctttggattatttacatcttttgtcagcgtagcaaacttttagaaaaccttattgaaaaactgtgcttgctcatgttgtattttgattattctgtctgtgcggcttcatcttggaatggttgtgtgctacaaatgacacttactgaggactgcattttggaatctcctagaggtaactcatggcttataggatcttttgcaactttatgtatgtaaatgtaccctgaattatatatatacacatatatatcatgtacctgtgtgtattgcttattttacatatttatacacacaaccccaagtagtagttgtttaaaatctataatgaaaagtattaaatttacaataacatgaaagatccagggatgcatgagagagcattttgtaagtcatgctcttcagagagactactcaggtgaagaattagaaggaaaataaggacactagtatttttaaagagtaaagatattttcttttaaatatctttggtaattgaaacatagaggttaagatgtttctaggtagaatgttttcatacaatttcacctccatgtctttatgtttttctgaaaagcaaatgagtatccagacatgactcccacagttctctttgagaagcctgagagggaactctgtcttacctagtgagggggatggaaaagaagtgatggctctgtggaccagagaacgggtgctaattatgacttcacactcggcaagttcaggctgatctgttatttctcagttacagttagcaaactttaaaaacttaacactcaagttggctttgattaaaaggtaaagatgtgttttaagtggataaggaaagtctgaggccttatttggaacatcactaagtcttccacaggttttttgtttgtttgtttttttttgttgtttttttttcttaagacggagtcttgctctgttgcccaggctggactgcagtggtgtgatcactgcaacctctgcagctcactgcaacctctgcttcctgggttcaagcaattatctgcctcagcctctcgagtagctgggattacaggcgcccaccaccacgcccggctaattttttgtatttttaatagagatggggtttcaccatcttggccaggctggtcttgaaccctgacctcgtgatccacctgcctcggccttccatagtgctgggtttacaggcgtgagccaccgtgcccagacaccacataggtctgaatcagtgtcatacattcataaaacaaactcggttaattagaacttggttatgttaagacgaatctgggagaacagaaaacagtttttggggtcccttcagttggctattggtccgtatgcatctagcacattgtaggagatttagaaattgtcttcccacccgatagctgccttgtcacctcattatggtgctccatcccctgtgtgcttaggtttttacctttcatctttctctttgccattgatgtttgtattcaagagttatatttttagggttagaaatcaaaatatttggtgtttggcaaacctctgaagtgctagactgatttagtctagttttaaaccaagtgctttaggcaggtgtgaactccagcccaaatgccagtcaaagtcaaggcatgggttttcctagcctatcttataggaaattcctgtaccttcttggcccccataatgtgttttttttttttttttttttttaaactaacttacaattttgtgatccgtgattcattgccctgcgattcttgaaagctctgtctgtttttttgtgagaacctttaaaatctcccttaatttttattttcccagaaataatgtaaaaacacttaaatgaaagtggaaatgtattaattttaaatcctataaaattaatacagaaaatataaatgattgggtcatttaactatatttttttaaataaactgaaagataaagaacacaacacttcacacattttatatttctcttacatactccggaatcatacacagttctttttaaagcacaacattaaaacctttaaaaggtatttaagggtttggtcaagtgaatatgataaaacatacttgtctgtataaagagaaaatgaaattgtagtcactgttatgtactgacattagttacaacctagttttaattcttaaaacaattttgattagcaaagctaaaaaaaaatggatgtttcagttaaatgttttaaagaggtacagatttttacaaggacataatataagttattgttctgtagaaatatcctattaaatattgtatgtccctccctctgtacactttgtaaagaaagtaaaatacataaaaagaaaatcatatagggatgtgtgacattattgtaattgtgtacttgagaataacgtgcaaaaataaaaatcagaatattttcctgttattgaatgtttagtctatttgataccagtactaagttaatgctttttctcaaggaaaaaaaatgtacagtttttgtaaacctaataaacatcaaaagcagtggattattttcatccccccatttcttaatttctttttcacagcagtggaatgcaaagtgcttgattgctttgaattttgtgactcggatgcaaatactggtaatatttcagttctgtgaatttgcaagtaatatttcagagaagttaagaggtgattggtgagtcctttgatgagcatgtccttggaattcattttttcttttatcttcataaaggatttgttttattagcatctccaattcccctgagataaattactcatgcataaagtggtttttgagagcacttaaagttcatttcagtattaatttacagcatatttaatcagtggggactgttaccacctccacaacagaaatcatgccctcgagttaccccactgcgcccagtttagaggactagtagatgctaacatactagggaatggtcattgccacagttaaaaatcggcagttaagtaaatgtcaggagtcaaaagagatagagttgtgccatctttgattttatagacaagattctgcagttcttccaactgtatgaacaaacgtttgcctaatagttgaaacaataaattaaaattttaggtaaatgacgaagggaatgtggtgaatgtcactgtccagagccataaatcagacaaaaccatacatagcatgctgaaaaacttttgtaatggaacacccaacaaatgacacctaacctgtctgtgatccaacaagtccgataacatgctgctgtatttgtattctctgggaatctcagtattaataatttcatttcccacaaattctagcattcatgtaaggaaaaacatggctaatcaatatcttaaaggggcaatctttcagagcagtggttttcaaagtatggccggacagcattggcagcatcttaatctcctgggactttgttaaaaatgcaaattctcagccccaccctagtcctactgaattgggaaactggcgtgggacccagcagtctttgttttaacatgttctccaagtgattctgatgcctgttcaaacttgggaaacacttttagagcacttgaggaacctaaaagatgactggttcagcattttgtgtggtagataagaaagaaattatcacaaaaaatcagaaatgaacagtgagagaaaaataggaccccagacagtttataccttccatttgctgttttaaaagtgtgagcctgccaagtcaacaagtatgcctttagcgcacatgtaaatagcctgcacttcctaaatctcgtgtggcctcccatggttacattcttcaaaggtaaactgagttgagaggaagattcagcatttaaaagagaagggttgaaaaagattgtgtgtgtgtgtgtgtgtgtttaattggcccagggttacttaaataaatcataaccattttgccacattctgtaactgtttagctaaggtcaaattaagtttaccctatggattttgtttcatcttttgtttcgtgtatatactgtttgcctttttcataaaaatcttggatttgttatatattgttcctgttatttttgacatctttgctattgtaaataaattactattttgttttaagttaccctagtggagtgttggctatagacaaggtatatactcgaaacgaggagacttaaatcacacagttaatgaattcccaacttgtttgaagctggaggtgattcgactcccttcagtggttcaacactaataatagcaccaaggaacatgtcactggtgcatatagg

SEQ ID NO: 325577 - DNA, 567 bp, Artificial Sequence
  derived and/or modified sequence
tggcctggtcggcgtcccgtagggcgccctcccgcgctaggccggccggcgtggcgctcggcgccgaacaggccccgaggaggccgcagttaggcctagtgattatccagttgccctgagcggctgcggaggtgcgctccataagcgggcagggtgggaaaagttcgcccgtttgtccggaaggcagttgatggacctggggtcgacaccactgcggacgcagggcacggcacgggggcgagaaggcgaaggctgcaggcgtgaggagctgtgactaatgagaattaaaggccatggatgaagatgaatttgaattgcagccacaagagccaaactcattttttgatggaataggagctgatgctacacacatggatggtgatcagattgttgtggaaatacaagaagcagtttttgtttctaatattgtggattctgacataactgtgcataactttgttcctgatgacccagactcagttgtaatccaagatgttgttgaagatgttgtcatagaggaggatgttcagtgctcagatatcttagaagaggcagatgtatctgaaa

SEQ ID NO: 325578 - DNA, 4997 bp, Artificial Sequence
  derived and/or modified sequence
gcctagtgcgcgcgcagtaacctgtttgtggcctggtcggcgtcccgtagggcgccctcccgcgctaggccggccggcgtggcgctcggcgccgaacaggccccgaggaggccgcagttaggcctagtgattatccagttgccctgagcggctgcggaggtgcgctccataagcgggcagggtgggaaaagttcgcccgtttgtccggaaggcagttgatggacctggggtcgacaccactgcggacgcagggcacggcacgggggcgagaaggcgaaggctgcaggcgtgaggagctgatgctacacacatggatggtgatcagattgttgtggaaatacaagaagcagtttttgtttctaatattgtggattctgacataactgtgcataactttgttcctgatgacccagactcagttgtaatccaagatgttgttgaagatgttgtcatagaggaggatgttcagtgctcagatatcttagaagaggcagatgtatctgaaaatgtcatcattcctgagcaagtgctggactcagatgtaactgaagaagtttctttaccacactgcacagtcccagatgatgttttagcttctgacattacttcaacctcaatgtctatgccagaacatgttttaacgagtgaatccatgcatgtgtgtgacattggacatgttgaacatatggtgcatgatagtgtagtggaagcagaaatcattactgatcctctgacgagtgacatagtttcagaagaagtattggtagcagactgtgcccctgaagcagtcatagatgccagcgggatctcagtggaccagcaagataatgacaaagccagctgtgaggactacctaatgatttcgttggatgatgctggcaaaatagaacatgatggttccactggagtgaccatcgatgcagaatcagaaatggatccttgtaaagtggatagcacttgtcctgaagtcatcaaggtgtacatttttaaagctgaccctggagaagatgacttaggtggaactgtagacattgtggagagtgaacctgaaaatgatcatggagttgaactacttgatcagaacagcagtattcgtgttcccagggaaaagatggtttatatgactgtcaatgactctcaacaagaagatgaagatttaagtaataattctgatggaattgaaaaccggaatggcactgcaagtgccctcttgcacatagatgagtctgctggccttggcagactggctaaacagaaaccaaagaaaaagagaagacctgattccaggcagtaccaaacagcaataattattggccctgatggtcatcctttgactgtctatccttgcatgatttgtgggaagaagtttaagtcgaggggttttttgaaaagacacatgaaaaaccatcctgaacaccttgccaagaagaagtaccactgtactgactgtgattacactaccaataagaagataagtttacataaccacctggagagccacaagctgaccagcaaggcagagaaggccattgaatgtgatgagtgtgggaagcatttttctcatgcaggggctttgtttactcacaaaatggtgcataaggaaaaaggggccaacaaaatgcacaagtgtaaattctgtgaatatgagacagctgaacaggggttattgaatcgccacctcttggcagtccacagcaagaactttcctcatatttgtgtggagtgtggtaaaggtttccgacacccgtcggaactgagaaagcacatgcgaatccataccggcgagaagccataccaatgccagtactgtgaatataggtctgcagactcttctaacttgaaaacacatataaaaacaaagcatagtaaagagatgccattcaagtgtgacatttgtcttctgactttctcagataccaaagaagtgcagcaacatactcttgtccaccaagaaagcaaaacacatcagtgtttgcattgcgaccacaagagttcaaactcaagtgatttgaaacgacatgtaatttcagttcatacgaaagactatcctcataagtgtgagatgtgcgagaaaggctttcacaggccttcagaacttaagaaacatgtggctgtccacaaaggtaaaaaaatgcaccaatgtagacattgtgactttaagattgcagacccatttgttctaagtcgccatattctctcagttcacacaaaggatcttccatttaggtgtaagagatgtagaaagggatttaggcaacaaaatgagcttaaaaagcatatgaagacacacagtggcaggaaagtatatcagtgtgagtactgtgagtatagcactacagatgcctcaggctttaaacggcacgttatttccattcatacaaaagactatcctcatcggtgtgagtactgcaagaaaggcttccgaagaccttcagaaaagaaccagcacataatgagacaccataaagaagttggtctgccctaacagtgtgtctacaagcttgtaaagatgttggccttgaagcagaaaattcattttttaaagccagtcttgttcacatccattactatacattgaattatgctgtgtaaaaatagaattattgcttctagtccacttttctttacattttattcaatacgctgtcctgaatcctattcagtttctttaatagatgaggaaaaatagcaacaagcaagttgcttataataaaataatttgtgattctatactgaattttcagtcataaaagctttactatttatttacatatttattcatgttcatggtactcttctaagacaaaatcagattgataactatgaaagtaacatttttgacccatttcctcctacacaagtgtttcacattggagacatctgctaatataaatgggaggttttactgtcaagtccaattagcaaaacgtggtaataatttttttgtcagtattttcagattacatgataaaattttacatttgagcttctagcattgattaatataggatattgaccacgtttatgtttaaatttcattttgttcagcagacaaaatgtacttcccttaactttcattaatagtgtttacatcttttgtcagcacagcaaacttttagaaagtaatagttttacttatttttatcttctgttttctctttgtactgctttgtcttgcattgtgttccaacacatgagacttactgctcactgaattttggagtcttttagaggtaaattgtggactcaggattttttgaaacttggtgtgtaactctaaatcttgtatatgcatctttgttgcttattacatatttacacacacaaccacaaattttaaacttatgatgaaaatttacaataacctgaaagatccagagatgtatgagagcattttgtaacttgttattcagttactaaatttgaggtgaataattaaaaagaaaaggacattaggagagtgaaaatcttctcttcaaataatctttgatagataaaaatggaaggtaagatgtttctagatagaatgttttcatacaatttcagcttcatatcataaatttttctggaaagctatttcagacatagatttcatagtatttttctgagaatcctgtgaaggaacgctgtctctttgcaaagtaaggaggactaagggaaaatgatggtaccatgtaacagaatgagagctaattccaaattagcaacttcatcctgctttctattttacattgagtaaagttttaaaaagacaacagtcaagttgattttgattagaagataaaagtacataatgaaaatccatggccttatttggaatatatatcactttccaaattttattatttatttgagagttaataagttaatgttattaagcagttaataatttatatgtatggatataatataaaatgaattcatataattaaaaagaatttggttaataagaatttggagaatggaaaatacatttttaggttccttaatttggctgttggtacctgtgtatttggaatattttaggggattcgaattttttttaacccacattacagctaccttctagctttagtatggtagtgcttcattcaacttttgctgtcaggtttttattttcacctttttctgtgccaccaattcaaaagttataggattaggaaatataaatttatatttggtgattggcagcctctgaaatgttagattaatttgatctagttctaaagtgctttagtcatatatgaatttaaacctagtaccatccaaaaccatgtaatggattttaagaatctgttaggccttcttagcctttatacatgtccctacctgatttttactgtccttcatgatcctgttcttgaaaacttcagtttgtatttgagaatcctttaaatctccttccaatttgttttctccctgaagtaatataaaaggaagtatttaagtgaaagtttaagagttttaaaacattctttaaaattaatacagatagttagctatttatcttttaaaaataaactaaggtaaaaaacgtgacactttacatatttcatatttttcatatagtctggaggtatacacagttgttttgtttttaaccacggtattgaaacctttaaaaggtaattaagcatttggtcaagtaaatatagaacatttgtataaagaaagaaatgaaattgtgcttaatgttatatactgttattatttgcaggctggttttaattcttaatttgattagcaaagctaaaaaagtggatgttgaagttgaaagttttaaagaggtacaaaatcttacaaggacataaattattatttggttgaaaaatagcctattagatattgtatgtcccttcctctgtacaaattgtaaaatacttaaaataactatgaagaattcatataggaagtgtgatactattgtaaatgtgtatttgagaatatgcaaaaataaaaataatattttactgttaataaatgtttacttgtatatg

SEQ ID NO: 325579 - DNA, 3831 bp, Artificial Sequence
  derived and/or modified sequence
cacgcgccccgatacccggcacaggagccacctcccagagccccgcagtccatgcctcagtcggcctgcgctcctcagcctggcggttctacctccgagggttcgcccgcccttggttttccttacaccttagcctttggctcctttgaccactcgaagccccacagcgtgttccagcggacttcaccagcagacccagaagtggtgggtgaaacactgcctctgttcctccttgagcctgtcgggagctgctgcctgccaccaccatgtctgctgcaaatcctgagactccaaactcaaccatctccagagaggccagcacccagtcttcatcagctgcagctagccaaggctgggtgttaccagaaggcaaaatcgtgccaaacactgtttttgttggtggaattgatgctaggatggatgaaactgagattggaagctgctttggtagatacggttcagtgaaagaagtgaagataatcacgaatcgaactggtgtgtccaaaggctatggatttgtttcgtttgttaatgacgtggatgtccagaagatagtaggatcacagatacatttccatggtaaaaagctgaagctgggccctgcaatcaggaaacaaaagttatgtgctcgtcatgtgcagccacgtcctttggtagttaatcctcctcctccaccacagtttcagaacgtctggcggaatccaaacactgaaacctacctgcagccccaaatcacgccgaatcctgtaactcagcacgttcaggcttactctgcttatccacattcaccaggtcaggtcatcactggatgtcagttgcttgtatataattatcaggaatatcctacttatcccgattcagcatttcaggtcaccactggatatcagttgcctgtatataattatcagccatttcctgcttatccaagatcaccatttcaggtcactgctggatatcagttgcctgtatataattatcaggcatttcctgcttatccaaattcaccatttcaagtcgccactggatatcagttccctgtatacaattatcagccatttcctgcttatccaagttcaccatttcaggtcactgctggatatcagttgcctgtatataattatcaggcatttcctgcttatccaaattcaccatttcaagtcgccactggatatcagttccctgtatacaattatcaggcatttcctgcttatccaaattcaccagttcaggtcaccactggatatcagttgcctgtatacaattatcaggcatttcctgcttatccaaattcaccatttcaagtcgccactggatatcagttccctgtatacaattatcaggcatttcctgcttatccaaattcaccagttcaggtcaccactggatatcagttgcctgtatacaattatcaggcatttcctgcttatccaagttcaccatttcaggtcaccactggatatcagttgcctgtatataattatcaggcatttcctgcttatccaagttcaccatttcaggtcaccactggatatcagttgcctgtatataattatcaggcatttcctgcttatccaagttcaccatttcaggtcaccactggatatcagttgcctgtatataattatcaggcatttcctgcttatccaagttcaccatttcaggtcaccactggatatcagttgcctgtatataattatcaggcatttcctgcttatccaagttcaccatttcaggtcaccactggatatcagttgcctgtatataattatcaggcatttcctgcttatccaaattcagcagttcaggtcaccactggatatcagttccatgtatacaattaccagatgccaccgcagtgccctgttggggagcaaaggagaaatctgtggaccgaagcatacaaatggtggtatcttgtctgtttaatccagagaagagactgataaattccgttgttactcaagatgactgcttcaagggtaaaagagtgcatcgctttagaagaagtttggcagtatttaaatctgttggatcctctcagctatctagtttcatgggaagttgctggttttgaatattaagctaaaagttttccactattacagaaattctgaattttggtaaatcacactgaaactttctgtataacttgtattattagactctctagttttatcttaacactgaaactgttcttcattagatgtttatttagaacctggttctgtgtttaatatatagtttaaagtaacaaataatcgagactgaaagaatgttaagatttatctgcaaggatttttaaaaaattgaaacttgcattttaagtgtttaaaagcaaatactgactttcaaaaaagtttttaaaacctgatttgaaagctaacaattttgatagtctgaacacaagcatttcacttctccaagaagtacctgtgaacagtacaatatttcagtattgagctttgcatttatgatttatctagaaatttacctcaaaagcagaatttttaaaactgcatttttaatcagtggaactcaatgtatagttagctttattgaagtcttatccaaacccagtaaaacagattctaagcaaacagtccaatcagtgagtcataatgtttattcaaagtattttatcttttatctagaatccacatatgtatgtccaatttgattgggatagtagttaggataactaaaattctgggcctaattttttaaagaatccaagacaaactaaactttactgggtatataaccttctcaatgagttaccattcttttttataaaaaaaattgttccttgaaatgctaaacttaatggctgtatgtgaaatttgcaaaatactggtattaaagaacgctgcagcttttttatgtcactcaaaggttaatcggagtatctgaaaggaattgtttttataaaaacattgaagtattagttacttgctataaatagatttttatttttgttttttagcctgttatatttccttctgtaaaataaaatatgtccagaagaggcatgttgtttctagattaggtagtgtcctcattttatattgtgaccacacagctagagcaccagagcccttttgctatactcacagtcttgttttcccagcctcttttactagtctttcaggaggtttgctcttagaactggtgatgtaaagaatggaagtagctgtatgagcagttcaaaggccaagccgtggaatggtagcaatgggatataatacctttctaagggaaacatttgtatcagtatcatttgatctgccatggacatgtgtttaaagtggctttctggcccttctttcaatggcttcttccctaaaacgtggagactctaagttaatgtcgttactatgggccatattactaatgcccactggggtctatgatttctcaaaattttcattcggaatccgaaggatacagtctttaaactttagaattcccaagaaggctttattacacctcagaaattgaaagcaccatgactttgtccattaaaaaattatccatagtttttttagtgcttttaacattccgacatacatcattctgtgattaaatctccagatttctgtaaatgatacctacattctaaagagttaattctaattattccgatatgaccttaaggaaaagtaaaggaataaatttttgtctttgttgaagtatttaatagagtaaggtaaagaagatattaagtccctttcaaaatggaaaattaattctaaactgagaaaaatgttcctactacctattgctgatactgtctttgcataaatgaataaaaataaactttttttcttcaaa

SEQ ID NO: 325580 - DNA, 1821 bp, Artificial Sequence
  derived and/or modified sequence
atgtctgccgccaatccagaaacacctaattctacaattagtcgcgaggcttcgactcaaagttcttctgccgctgcgagccagggttgggtgctccctgaaggcaaaattgtccctaatacggtgttcgtaggaggaatcgacgcccgcatggacgagacggagatcggctcatgctttggtcgatacggttcagtgaaggaggtaaagatcataaccaaccggaccggtgtttccaaaggctatgggtttgtgtccttcgtcaacgacgtggatgtgcagaagatcgtgggatcccagatccatttccatggtaagaagctgaaactaggtcctgcaatccggaaacagaagttatgcgcaagacatgtgcaacctcggccacttgtagtcaacccacctcccccaccacagttccaaaatgtttggaggaatccaaacacggaaacctacctgcagccccaaatcacaccaaaccctgtaacccagcacgtgcaggcctacagcgcctatcctcactcccccggacaggtgatcacgggatgccagttgctcgtctataattaccaggagtacccgacatatcctgactctgcttttcaagtgactactggctaccagcttccggtatataactaccagccctttccggcatacccccgctcaccctttcaggttactgccggctatcagcttcctgtttacaactatcaggcctttcctgcttaccccaactcgccgtttcaggtcgctactggataccaattccctgtgtataactaccagccatttccagcttacccaagctctccttttcaggtcactgctggatatcagctccctgtttacaactaccaggcttttccggcgtaccccaactcccccttccaagtcgccaccgggtatcaattcccggtttacaactaccaaccgttccccgcctatcctagtagccctttccaggttacagccggctaccagctgcctgtgtataattaccaggcgttccccgcctaccctaacagcccttttcaagttgctactggatatcagtttcctgtgtataattatcaggcattccctgcttatcctaactctcctgtgcaggttactactggataccagcttccagtctacaattaccaagcctttcccgcctaccccaatagtcctgtacaggtgaccacaggatatcagctccccgtctataactatcaggcttttcccgcttacccaagctcaccattccaggtgactaccgggtatcagcttccagtgtacaactaccaggcatttccagcctatcccagcagtccattccaagtaacaacgggctatcagctgcccgtctacaattatcaggcttttcccgcctatccttcatcaccttttcaggttacaactggttatcagctccccgtttataactaccaggctttcccagcatacccttcttcgcctttccaggtaacaacaggttaccaattgcctgtgtacaattaccaagcatttccggcttacccgagttcacctttccaggtgaccaccggataccagctcccagtgtacaactaccaagcctttcctgcctatcccagctctccctttcaagtgaccacggggtatcagctaccagtctacaattaccaggcatttccagcttaccccaacagcgccgtgcaggtgacaacgggttatcagttccatgtttataactaccaaatgccaccacagtgtcctgtcggggagcaacggcgcaacctttggaccgaagcttataagtggtggtacctcgtttgcctcatccagcgccgagactag

SEQ ID NO: 325581 - DNA, 1965 bp, Artificial Sequence
  derived and/or modified sequence
atgagtgccgccaatcccgagacaccaaacagcaccatcagtcgagaggcctctactcagagctcctccgccgccgccagccagggctgggtgctgccagaaggtaagatcgtcccgaacacagtattcgtggggggaatcgacgcacggatggacgaaaccgaaatcgggtcgtgttttggccggtacgggtccgtgaaagaggtgaagattatcactaatcggactggggtgtcaaagggttatggctttgtgagctttgttaacgacgtggatgtccaaaagattgttggcagtcagattcacttccacggcaagaaactaaagttgggccctgctatcaggaagcagaagctgtgcgctagacatgttcagccacgacctcttgtggttaacccaccccctcctccccagttccaaaatgtgtggcggaacccaaacacggaaacttacctgcagccacaaattactccgaacccggtcacccagcacgtgcaggcctactcagcttaccctcattcaccggggcaagtgatcactggctgtcagttgctcgtctacaattaccaggagtaccccacgtacccagactccgcctttcaggtcacaacaggataccagctgcccgtgtataattaccaaccctttccggcctaccccaggtccccctttcaggtaactgctggctatcagctgccggtgtacaactaccaagcattcccagcctatccaaattcaccatttcaggtggccaccggataccagttccccgtgtataattaccagccatttcccgcctacccatcatctccattccaggtgactgctggatatcagttgccagtctataactaccaagccttcccagcctatccgaacagtccattccaggtggccactggctaccaattcccagtgtacaattatcagccctttcctgcctacccctcatcacccttccaggtcacagccgggtaccagctgcccgtttataattatcaggcctttccagcataccctaactccccattccaggtggccaccggttaccagtttcctgtgtacaattatcaggcttttccggcctatcctaattctcctgttcaggtgacaacaggttatcagctccctgtgtataactatcagcctttccccgcctatcccagatcaccattccaggttactgcaggctatcagctccctgtgtataactaccaggctttccccgcatatccaaacagccccttccaggtggccactggatatcagtttccagtatacaactatcaggctttcccagcgtaccccaactctccagttcaggtgacaacgggttaccagcttccggtgtataactaccaggcgttcccagcataccctagttcgccgttccaggtgaccaccgggtatcaactgccggtatacaattatcaggcgttccctgcttacccttcgtcaccatttcaggtcactaccgggtaccagctgccagtttataattatcaggctttccccgcatatcccagctcgcctttccaggtgacgacaggttatcaattgcctgtgtacaactatcaggcattccccgcttatcctagttcacctttccaggtgaccactggatatcagctgccagtgtataactaccaagctttcccagcttacccgtcatcccctttccaggttaccacaggttatcaattaccagtttataactaccaggccttcccagcgtatccaagcagccctttccaggtcactacaggctaccagctcccagtctataactaccaggcattcccagcctaccctaacagtgccgtgcaggtcactacaggctaccagttccatgtgtataactatcagatgcctccccagtgcccggtgggggagcagaggaggaacctttggactgaagcctacaaatggtggtatctggtctgcttgatacagcgcagggattag

SEQ ID NO: 325582 - DNA, 1821 bp, Artificial Sequence
  derived and/or modified sequence
atgtctgctgccaaccctgagacccccaacagcaccatcagccgggaggccagcacccagagcagcagcgctgctgccagccagggctgggtgctgcctgagggcaagatcgtgcccaacacagtgtttgtgggcggcattgatgccaggatggatgaaacagagatcggcagctgcttcggccgctatggctctgtgaaggaggtgaagatcatcaccaacagaactggagtgtccaagggctacggctttgtgtcctttgtgaatgatgtggatgtgcagaagatcgtgggcagccagatccacttccacggcaagaagctgaagctgggccctgccatcaggaagcagaagctgtgtgcccggcacgtgcagccccggcccctggtggtgaaccccccacctccaccccagttccagaatgtgtggaggaaccccaacacagagacctacctgcagccccagatcacccccaaccctgtgacccagcacgtgcaggcctacagcgcctacccccacagccctggccaggtgatcaccggctgccagctgctggtgtacaactaccaggagtaccccacctacccagacagcgccttccaggtgaccaccggctaccagctgcctgtgtacaactaccagcccttccctgcctaccccaggagccccttccaggtgacagctggctaccagctgcctgtgtacaactaccaggccttccctgcctaccccaacagccccttccaggtggccaccggctaccagtttcctgtgtacaactaccagcccttccctgcctaccccagcagccccttccaggtgacagctggctaccagctgcctgtgtacaactaccaggccttccctgcctaccccaacagccccttccaggtggccaccggctaccagtttcctgtgtacaactaccagcccttccctgcctaccccagcagccccttccaggtgacagctggctaccagctgcctgtgtacaactaccaggccttccctgcctaccccaacagccccttccaggtggccaccggctaccagtttcctgtgtacaactaccaggccttccctgcctaccccaacagccctgtgcaggtgaccaccggctaccagctgcctgtgtacaactaccaggccttccctgcctaccccaacagccctgtgcaggtgaccaccggctaccagctgcctgtgtacaactaccaggccttccctgcctaccccagcagccccttccaggtgaccaccggctaccagctgcctgtgtacaactaccaggccttccctgcctaccccagcagccccttccaggtgaccaccggctaccagctgcctgtgtacaactaccaggccttccctgcctaccccagcagccccttccaggtgaccaccggctaccagctgcctgtgtacaactaccaggccttccctgcctaccccagcagccccttccaggtgaccaccggctaccagctgcctgtgtacaactaccaggccttccctgcctaccccagcagccccttccaggtgaccaccggctaccagctgcctgtgtacaactaccaggccttccctgcctaccccagcagccccttccaggtgaccaccggctaccagctgcctgtgtacaactaccaggccttccctgcctaccccaacagcgctgtgcaggtgaccaccggctaccagttccacgtgtacaactaccagatgccaccccagtgccctgtgggggagcagaggaggaacctgtggacagaggcctacaagtggtggtacctggtgtgcctgatccagaggcgggactag

SEQ ID NO: 325583 - DNA, 1965 bp, Artificial Sequence
  derived and/or modified sequence
atgtctgctgccaaccctgagacccccaacagcaccatcagccgggaggccagcacccagagcagcagcgctgctgccagccagggctgggtgctgcctgagggcaagatcgtgcccaacacagtgtttgtgggcggcattgatgccaggatggatgaaacagagatcggcagctgcttcggccgctatggctctgtgaaggaggtgaagatcatcaccaacagaactggagtgtccaagggctacggctttgtgtcctttgtgaatgatgtggatgtgcagaagatcgtgggcagccagatccacttccacggcaagaagctgaagctgggccctgccatcaggaagcagaagctgtgtgcccggcacgtgcagccccggcccctggtggtgaaccccccacctccaccccagttccagaatgtgtggaggaaccccaacacagagacctacctgcagccccagatcacccccaaccctgtgacccagcacgtgcaggcctacagcgcctacccccacagccctggccaggtgatcaccggctgccagctgctggtgtacaactaccaggagtaccccacctacccagacagcgccttccaggtgaccaccggctaccagctgcctgtgtacaactaccagcccttccctgcctaccccaggagccccttccaggtgacagctggctaccagctgcctgtgtacaactaccaggccttccctgcctaccccaacagccccttccaggtggccaccggctaccagtttcctgtgtacaactaccagcccttccctgcctaccccagcagccccttccaggtgacagctggctaccagctgcctgtgtacaactaccaggccttccctgcctaccccaacagccccttccaggtggccaccggctaccagtttcctgtgtacaactaccagcccttccctgcctaccccagcagccccttccaggtgacagctggctaccagctgcctgtgtacaactaccaggccttccctgcctaccccaacagccccttccaggtggccaccggctaccagtttcctgtgtacaactaccaggccttccctgcctaccccaacagccctgtgcaggtgaccaccggctaccagctgcctgtgtacaactaccagcccttccctgcctaccccaggagccccttccaggtgacagctggctaccagctgcctgtgtacaactaccaggccttccctgcctaccccaacagccccttccaggtggccaccggctaccagtttcctgtgtacaactaccaggccttccctgcctaccccaacagccctgtgcaggtgaccaccggctaccagctgcctgtgtacaactaccaggccttccctgcctaccccagcagccccttccaggtgaccaccggctaccagctgcctgtgtacaactaccaggccttccctgcctaccccagcagccccttccaggtgaccaccggctaccagctgcctgtgtacaactaccaggccttccctgcctaccccagcagccccttccaggtgaccaccggctaccagctgcctgtgtacaactaccaggccttccctgcctaccccagcagccccttccaggtgaccaccggctaccagctgcctgtgtacaactaccaggccttccctgcctaccccagcagccccttccaggtgaccaccggctaccagctgcctgtgtacaactaccaggccttccctgcctaccccagcagccccttccaggtgaccaccggctaccagctgcctgtgtacaactaccaggccttccctgcctaccccaacagcgctgtgcaggtgaccaccggctaccagttccacgtgtacaactaccagatgccaccccagtgccctgtgggggagcagaggaggaacctgtggacagaggcctacaagtggtggtacctggtgtgcctgatccagaggcgggactag

SEQ ID NO: 325584 - DNA, 1821 bp, Artificial Sequence
  derived and/or modified sequence
atgagcgccgccaaccccgagacccccaacagcaccatcagccgggaggcctcaactcaatcctctagcgccgcggcttcgcaaggatgggtgctgccagagggaaagattgttcctaatacggtgttcgtgggcggcatcgacgcaaggatggacgaaaccgaaattggtagctgtttcgggagatatggttctgtgaaggaggtcaaaatcattactaacagaaccggagtgtccaaaggctatggtttcgtgagcttcgtaaacgatgtggacgtgcagaaaatcgtgggcagccagattcattttcacggcaaaaaactgaagctcggcccagccattagaaaacagaaactgtgcgccagacacgtgcagccgcggcctctggtggttaacccaccaccgccacctcagttccagaacgtctggcgaaacccgaataccgagacctatctgcagcctcagattacacctaaccccgtcacccaacacgttcaagcttattcagcctaccctcacagtcccggtcaggtcattaccggctgtcagctgttggtgtataattaccaagagtatccaacctatcccgactcagcctttcaggtaaccaccggctatcagcttccagtgtacaactaccagccattccccgcctatcccaggtccccctttcaggtgacagctggataccagctgcccgtgtacaactatcaggcctttccagcttatcccaactcgcctttccaggttgcgacagggtaccagtttccggtgtacaactatcagccttttcctgcgtatccctctagtcctttccaagtaactgctggttaccagctgccagtctataattaccaggcattcccagcctaccctaacagtccctttcaggtggccaccggttatcagttcccggtctacaactatcagccgtttccagcttatcccagctccccgttccaggtgacggcaggttatcagctgcccgtctataactaccaagcttttcccgcatacccgaattcacccttccaagtagccaccgggtatcagtttccagtctacaactaccaggcgtttcccgcctacccaaactctccagtgcaggtcacaactgggtaccaactgccagtctataattaccaggctttccccgcataccctaattcacctgtccaggtgactacagggtaccagctgcctgtctataactatcaagcgttccctgcttacccttcttcccctttccaggtcacaaccgggtaccaacttcccgtttataattatcaggccttccccgcgtacccaagcagcccatttcaagttacaactgggtatcaactgcccgtctataactaccaggccttcccggcttacccttcatccccattccaggttactaccggctaccagctgcctgtgtataactatcaagcatttcccgcctatccctcctctccctttcaagtgacaaccggttatcaactccctgtgtacaattatcaggcttttccagcctatccttccagcccttttcaagttaccacagggtatcagctacctgtttacaattaccaggcattcccagcctacccaagctcaccgtttcaggtgaccaccggataccaactgccggtgtacaactatcaggcttttcccgcataccctaatagcgccgtgcaggtgacgacaggataccagttccatgtctataattatcagatgcctccccagtgtccagtgggtgaacaaagacgcaatctgtggacagaggcatacaagtggtggtacctggtgtgcctgatacagaggagagactag

SEQ ID NO: 325585 - DNA, 1965 bp, Artificial Sequence
  derived and/or modified sequence
atgagcgccgccaaccccgagacccccaacagcaccatcagccgggaggctagtactcaaagctccagcgcagccgcatcacaaggctgggtgctacccgagggaaagatcgtgcccaacaccgttttcgtcgggggcattgacgcaaggatggacgaaactgaaattggtagttgctttggcagatacggcagtgtaaaagaggtgaaaatcatcactaaccggacaggggttagtaagggttacgggttcgtgtcgtttgtgaacgacgtggatgttcagaagattgtggggtctcagattcattttcatgggaagaagctcaaattgggacccgcgatcagaaagcagaagctttgtgctagacacgtgcaacctcgccccctggtagtaaatcccccacctccgccacagtttcaaaacgtttggagaaaccccaatacagaaacgtacctccagccccagatcacccccaaccctgtcacccaacatgtgcaggcctacagtgcttacccacacagccctgggcaggttattacaggatgccaactgctggtatataactaccaggagtacccaacctacccagactcagcgtttcaggtgaccaccggatatcagctcccggtttacaactatcagccctttccagcttaccctaggagcccgtttcaagtgacagccgggtatcagctcccagtgtacaattaccaagcatttcccgcttatcccaactcaccgttccaggttgctacaggctatcaattccctgtctataactaccagccattccccgcttaccctagctctcccttccaggtgaccgccgggtatcagctgccagtttacaattatcaagcattccctgcctatcccaacagtccttttcaggtggcaacaggctaccaatttccagtttacaactaccaaccatttcccgcatacccttccagcccatttcaggtgaccgctggctaccagctgcccgtgtacaattatcaggcattccctgcatatcccaactccccatttcaggtagccactggataccagtttcccgtttacaactatcaggccttccctgcttatccaaactccccggtgcaggttaccactggttaccagctgcctgtttacaattaccagcccttccctgcataccccagaagccccttccaggtcacagccggttatcaactcccagtctataattatcaggctttcccagcatatccaaactctccttttcaggtcgccacaggctaccagttccctgtttataactatcaggcattccctgcctatcccaactcgccggtgcaggtcactactggctatcagttaccagtatacaactaccaggcattccctgcttatccgtcttcacccttccaggtgactaccgggtatcagttacccgtgtataactatcaggcatttcctgcctacccctccagtccatttcaggtgaccaccggctaccaactgccggtgtacaactatcaggcctttcccgcatatcccagctcccccttccaagtgaccacagggtatcagctgcctgtgtataattatcaggcctttccggcctacccatcctccccttttcaggttacaactggataccaattgcctgtgtataactatcaagctttcccagcttacccgagctcgcctttccaagtgacaaccggctatcagttgccagtctataactaccaggcgttccctgcctatccctctagccctttccaggtcaccacgggataccagctgcccgtctataactaccaggcctttcccgcttaccccaactcagcagtccaggtcaccacgggctaccagttccacgtttacaactatcagatgcctcctcagtgccctgtgggtgaacagagacgaaatctgtggacggaggcctacaagtggtggtacctcgtctgcctaatccaacgccgtgattag

SEQ ID NO: 325586 - DNA, 1821 bp, Artificial Sequence
  derived and/or modified sequence
atgtccgccgcaaaccccgagacccctaacagtaccatcagccgcgaagcctctactcagagtagctctgctgctgcttctcagggttgggtgctcccagaagggaaaattgtgccaaatacagtatttgtgggagggattgatgccagaatggatgaaacggagataggctcttgtttcggtaggtacggatctgtgaaggaggttaaaatcataactaacaggaccggtgtctcgaaaggctacggattcgtttccttcgtcaacgatgtagacgtgcagaagatcgtgggctcccagattcattttcacggaaagaagctcaagctaggccctgctatcagaaagcagaaactgtgtgctcgccacgtccaaccccgtcctctcgttgtgaatcctccccctcctccccagtttcagaacgtgtggagaaatccaaacactgagacctacctgcagcctcagataacacccaaccccgttacccaacatgtccaggcatactcagcgtatcctcacagtcccggtcaggttatcaccggttgccagcttctggtgtataattaccaagaatacccaacctatccagactccgccttccaggtaacaaccggttatcagttgcctgtgtacaactatcagccctttcccgcttatcccagatctccctttcaggtgaccgcaggatatcagctcccggtgtacaattaccaggcgttccctgcttatcccaactctccctttcaggtggcaacagggtaccaatttcccgtgtataattaccaacctttccctgcttatccgtctagccccttccaggtcacagccggataccaactgcccgtctacaactaccaggctttcccagcctatcccaattcccccttccaggttgctacgggttatcagtttccggtttacaactaccagccgtttcctgcctacccttcttccccatttcaggtgactgctggataccagctgcctgtgtataactatcaggccttccctgcctaccctaattcgcctttccaggttgcgacaggttaccaattcccagtctacaactatcaagcattcccagcctatcctaacagccctgtccaagtgactactggatatcagctccctgtctacaactatcaggcatttcccgcttaccccaattctccagtgcaggtgactaccggatatcagttgcctgtgtataattatcaggcctttccagcttatccatcctcgccctttcaagtaacaacaggataccagcttccagtgtacaattaccaggccttcccagcctaccccagcagccctttccaggttaccactgggtatcagctgcctgtttataattaccaggcctttccagcatacccctcatctccttttcaggtaacaacaggctaccagttgcccgtttacaactaccaggcgtttccggcataccctagctccccatttcaagtcaccacaggctatcaactcccggtttataactatcaggcctttcccgcataccccagtagtcctttccaagtgacaactggttatcagctgccagtgtacaactaccaggcttttccggcatacccatcttccccctttcaggtcaccacggggtaccagttaccggtgtataattaccaggcctttcccgcttaccctaacagcgccgttcaggtgacaacaggataccaattccacgtctataattatcaaatgccaccacagtgtcctgtgggtgaacagcggaggaacttatggactgaggcttataaatggtggtatctggtgtgcttaatccagcgaagggattag

SEQ ID NO: 325587 - DNA, 1965 bp, Artificial Sequence
  derived and/or modified sequence
atgagtgcagccaaccccgagacaccaaattccacgattagtagggaggctagtacgcagtcctctagtgcagctgcaagccagggctgggtgctccccgaagggaagattgtcccaaatactgtgtttgttgggggaatcgatgccagaatggatgagactgagatagggagctgttttggtcggtatgggagtgtgaaggaggtgaagatcattacgaataggaccggcgtgagtaaaggctatggcttcgtaagtttcgttaacgatgtagacgtccagaagatagttggttctcagatccactttcacggaaaaaaactgaaattaggcccagccatcagaaaacagaagctttgtgctcgccacgtgcaaccgcgaccattggtggtaaatccgccacccccaccgcagttccaaaacgtctggaggaacccaaatacagaaacatatctacaaccgcagatcaccccaaacccagtgacccaacatgtacaggcctatagtgcctacccccattcaccaggccaggtgatcacgggatgtcagctgctggtctataactatcaagagtatcccacctaccccgattcggcttttcaggtgactaccgggtatcaactgccagtgtacaattaccagccctttcctgcctatccaaggtctcccttccaggtaactgccggttaccagctgcccgtatataactaccaggcatttcctgcctatcccaactctccatttcaagtggccacgggctaccagttccccgtctataactatcagccttttcccgcttatccatccagccctttccaggtgaccgccggatatcagctccctgtgtataattatcaggcctttcctgcttacccaaatagtccctttcaggttgcgacgggataccagttcccagtatataactaccaaccttttccggcttacccttccagtccgtttcaggttactgctggctaccagctgcccgtgtataattaccaagctttccccgcttacccgaacagccccttccaagtagcaaccggctatcaattcccggtgtataattaccaggccttccctgcctaccctaactcacccgtccaggtcacaaccggataccagttaccggtctataactaccaaccattccctgcttacccacgatccccttttcaggttactgcaggctatcagctgcctgtgtacaactaccaggcgtttcccgcttaccccaacagtccatttcaagtggccaccgggtaccagtttcctgtctataactaccaggcgtttccagcttaccctaattccccggtacaggtgacaacaggttaccagctgcccgtgtacaactaccaggccttccccgcatacccaagttcaccattccaggtgacaaccgggtaccagctgccagtatacaactaccaggccttccctgcctatccttcaagcccctttcaggtcaccacaggctaccagctccctgtgtataattaccaagcctttcccgcataccccagcagtccattccaggtgactaccggataccagctgcctgtttacaattatcaggcgtttccagcctatccatcgagtcccttccaagtgactacaggataccagctaccggtgtacaactatcaagcttttcccgcatacccaagctcaccatttcaggttaccaccggctatcagctccccgtgtataactatcaggcctttccagcatatccatctagcccctttcaggtcaccactggataccagctgcctgtctataattatcaggcatttcctgcctacccaaactcggctgtccaggtcaccaccgggtatcagttccacgtctataactaccagatgccgccacagtgtccagtaggggaacagcgcaggaatctgtggactgaggcttacaagtggtggtaccttgtctgcttaatccaacgccgagattag

SEQ ID NO: 325588 - DNA, 1821 bp, Artificial Sequence
  derived and/or modified sequence
atgagcgccgccaaccccgagacccccaacagcaccatcagcagagaggccagcacccagagcagcagcgccgccgccagccagggctgggtgctgcccgagggcaagatcgtgcccaacaccgtgttcgtgggcggcatcgacgccagaatggacgagaccgagatcggcagctgcttcggcagatacggcagcgtgaaggaggtgaagatcatcaccaacagaaccggcgtgagcaagggctacggcttcgtgagcttcgtgaacgacgtggacgtgcagaagatcgtgggcagccagatccacttccacggcaagaagctgaagctgggccccgccatcagaaagcagaagctgtgcgccagacacgtgcagcccagacccctggtggtgaacccccccccccccccccagttccagaacgtgtggagaaaccccaacaccgagacctacctgcagccccagatcacccccaaccccgtgacccagcacgtgcaggcctacagcgcctacccccacagccccggccaggtgatcaccggctgccagctgctggtgtacaactaccaggagtaccccacctaccccgacagcgccttccaggtgaccaccggctaccagctgcccgtgtacaactaccagcccttccccgcctaccccagaagccccttccaggtgaccgccggctaccagctgcccgtgtacaactaccaggccttccccgcctaccccaacagccccttccaggtggccaccggctaccagttccccgtgtacaactaccagcccttccccgcctaccccagcagccccttccaggtgaccgccggctaccagctgcccgtgtacaactaccaggccttccccgcctaccccaacagccccttccaggtggccaccggctaccagttccccgtgtacaactaccagcccttccccgcctaccccagcagccccttccaggtgaccgccggctaccagctgcccgtgtacaactaccaggccttccccgcctaccccaacagccccttccaggtggccaccggctaccagttccccgtgtacaactaccaggccttccccgcctaccccaacagccccgtgcaggtgaccaccggctaccagctgcccgtgtacaactaccaggccttccccgcctaccccaacagccccgtgcaggtgaccaccggctaccagctgcccgtgtacaactaccaggccttccccgcctaccccagcagccccttccaggtgaccaccggctaccagctgcccgtgtacaactaccaggccttccccgcctaccccagcagccccttccaggtgaccaccggctaccagctgcccgtgtacaactaccaggccttccccgcctaccccagcagccccttccaggtgaccaccggctaccagctgcccgtgtacaactaccaggccttccccgcctaccccagcagccccttccaggtgaccaccggctaccagctgcccgtgtacaactaccaggccttccccgcctaccccagcagccccttccaggtgaccaccggctaccagctgcccgtgtacaactaccaggccttccccgcctaccccagcagccccttccaggtgaccaccggctaccagctgcccgtgtacaactaccaggccttccccgcctaccccaacagcgccgtgcaggtgaccaccggctaccagttccacgtgtacaactaccagatgcccccccagtgccccgtgggcgagcagagaagaaacctgtggaccgaggcctacaagtggtggtacctggtgtgcctgatccagagaagagactag

SEQ ID NO: 325589 - DNA, 1965 bp, Artificial Sequence
  derived and/or modified sequence
atgagcgccgccaaccccgagacccccaacagcaccatcagcagagaggccagcacccagagcagcagcgccgccgccagccagggctgggtgctgcccgagggcaagatcgtgcccaacaccgtgttcgtgggcggcatcgacgccagaatggacgagaccgagatcggcagctgcttcggcagatacggcagcgtgaaggaggtgaagatcatcaccaacagaaccggcgtgagcaagggctacggcttcgtgagcttcgtgaacgacgtggacgtgcagaagatcgtgggcagccagatccacttccacggcaagaagctgaagctgggccccgccatcagaaagcagaagctgtgcgccagacacgtgcagcccagacccctggtggtgaacccccccccccccccccagttccagaacgtgtggagaaaccccaacaccgagacctacctgcagccccagatcacccccaaccccgtgacccagcacgtgcaggcctacagcgcctacccccacagccccggccaggtgatcaccggctgccagctgctggtgtacaactaccaggagtaccccacctaccccgacagcgccttccaggtgaccaccggctaccagctgcccgtgtacaactaccagcccttccccgcctaccccagaagccccttccaggtgaccgccggctaccagctgcccgtgtacaactaccaggccttccccgcctaccccaacagccccttccaggtggccaccggctaccagttccccgtgtacaactaccagcccttccccgcctaccccagcagccccttccaggtgaccgccggctaccagctgcccgtgtacaactaccaggccttccccgcctaccccaacagccccttccaggtggccaccggctaccagttccccgtgtacaactaccagcccttccccgcctaccccagcagccccttccaggtgaccgccggctaccagctgcccgtgtacaactaccaggccttccccgcctaccccaacagccccttccaggtggccaccggctaccagttccccgtgtacaactaccaggccttccccgcctaccccaacagccccgtgcaggtgaccaccggctaccagctgcccgtgtacaactaccagcccttccccgcctaccccagaagccccttccaggtgaccgccggctaccagctgcccgtgtacaactaccaggccttccccgcctaccccaacagccccttccaggtggccaccggctaccagttccccgtgtacaactaccaggccttccccgcctaccccaacagccccgtgcaggtgaccaccggctaccagctgcccgtgtacaactaccaggccttccccgcctaccccagcagccccttccaggtgaccaccggctaccagctgcccgtgtacaactaccaggccttccccgcctaccccagcagccccttccaggtgaccaccggctaccagctgcccgtgtacaactaccaggccttccccgcctaccccagcagccccttccaggtgaccaccggctaccagctgcccgtgtacaactaccaggccttccccgcctaccccagcagccccttccaggtgaccaccggctaccagctgcccgtgtacaactaccaggccttccccgcctaccccagcagccccttccaggtgaccaccggctaccagctgcccgtgtacaactaccaggccttccccgcctaccccagcagccccttccaggtgaccaccggctaccagctgcccgtgtacaactaccaggccttccccgcctaccccaacagcgccgtgcaggtgaccaccggctaccagttccacgtgtacaactaccagatgcccccccagtgccccgtgggcgagcagagaagaaacctgtggaccgaggcctacaagtggtggtacctggtgtgcctgatccagagaagagactag

SEQ ID NO: 325590 - DNA, 3914 bp, Artificial Sequence
  derived and/or modified sequence
agtcggcctgcgctcctcagcctggcggttctacctccgagggttcgcccgcccttggttttccttacaccttagcctttggctcctttgaccactcgaagccccacagcgtgttccagcggacttcaccagcagacccagaagtggtgggtgaaacactgcctctgttcctccttgagcctgtcgggagctgctgcctgccaccaccatgtctgctgcaaatcctgagactccaaactcaaccatctccagagaggccagcacccagtcttcatcagctgcagctagccaaggctgggtgttaccagaaggcaaaatcgtgccaaacactgtttttgttggtggaattgatgctaggatggatgaaactgagattggaagctgctttggtagatacggttcagtgaaagaagtgaagataatcacgaatcgaactggtgtgtccaaaggctatggatttgtttcgtttgttaatgacgtggatgtccagaagatagtaggatcacagatacatttccatggtaaaaagctgaagctgggccctgcaatcaggaaacaaaagttatgtgctcgtcatgtgcagccacgtcctttggtagttaatcctcctcctccaccacagtttcagaacgtctggcggaatccaaacactgaaacctacctgcagccccaaatcacgccgaatcctgtaactcagcacgttcaggcttattctgcttatccacattcaccaggtcaggtcatcactggatgtcagttgcttgtatataattatcaggaatatcctacttatcccgattcagcatttcaggtcaccactggatatcagttgcctgtatataattatcagccatttcctgcttatccaagatcaccatttcaggtcactgctggatatcagttgcctgtatataattatcaggcatttcctgcttatccaaattcaccatttcaagtcgccactggatatcagttccctgtatacaattatcagccatttcctgcttatccaagttcaccatttcaggtcactgctggatatcagttgcctgtatataattatcaggcatttcctgcttatccaaattcaccatttcaagtcgccactggatatcagttccctgtatacaattatcagccatttcctgcttatccaagttcaccatttcaggtcactgctggatatcagttgcctgtatataattatcaggcatttcctgcttatccaaattcaccatttcaagtcgccactggatatcagttccctgtatacaattatcaggcatttcctgcttatccaaattcaccagttcaggtcaccactggatatcagttgcctgtatacaattatcaggcatttcctgcttatccaaattcaccagttcaggtcaccactggatatcagttgcctgtatacaattatcaggcatttcctgcttatccaagttcaccatttcaggtcaccactggatatcagttgcctgtatataattatcaggcatttcctgcttatccaagttcaccatttcaggtcaccactggatatcagttgcctgtatataattatcaggcatttcctgcttatccaagttcaccatttcaggtcaccactggatatcagttgcctgtatataattatcaggcatttcctgcttatccaagttcaccatttcaggtcaccactggatatcagttgcctgtatataattatcaggcatttcctgcttatccaagttcaccatttcaggtcaccactggatatcagttgcctgtatataattatcaggcatttcctgcttatccaagttcaccatttcaggtcaccactggatatcagttgcctgtatataattatcaggcatttcctgcttatccaaattcagcagttcaggtcaccactggatatcagttccatgtatacaattaccagatgccaccgcagtgccctgttggggagcaaaggagaaatctgtggaccgaagcatacaaatggtggtatcttgtctgtttaatccagagaagagactgataaattccgttgttactcaagatgactgcttcaagggtaaaagagtgcatcgctttagaagaagtttggcagtatttaaatctgttggatcctctcagctatctagtttcatgggaagttgctggttttgaatattaagctaaaagttttccactattacagaaattctgaattttggtaaatcacactgaaactttctgtataacttgtattattagactctctagttttatcttaacactgaaactgttcttcattagatgtttatttagaacctggttctgtgtttaatatatagtttaaagtaacaaataatcgagactgaaagaatgttaagatttatctgcaaggatttttaaaaaattgaaacttgcattttaagtgtttaaaagcaaatactgactttcaaaaaagtttttaaaacctgatttgaaagctaacaattttgatagtctgaacacaagcatttcacttctccaagaagtacctgtgaacagtacaatatttcagtattgagctttgcatttatgatttatctagaaatttacctcaaaagcagaatttttaaaactgcatttttaatcagtggaactcaatgtatagttagctttattgaagtcttatccaaacccagtaaaacagattctaagcaaacagtccaatcagtgagtcataatgtttattcaaagtattttatcttttatctagaatccacatatgtatgtccaatttgattgggatagtagttaggataactaaaattctgggcctaattttttaaagaatccaagacaaactaaactttactgggtatataaccttctcaatgagttaccattcttttttataaaaaaaattgttccttgaaatgctaaacttaatggctgtatgtgaaatttgcaaaatactggtattaaagaacgctgcagcttttttatgtcactcaaaggttaatcggagtatctgaaaggaattgtttttataaaaacattgaagtattagttacttgctataaatagatttttatttttgttttttagcctgttatatttccttctgtaaaataaaatatgtccagaagaggcatgttgtttctagattaggtagtgtcctcattttatattgtgaccacacagctagagcaccagagcccttttgctatactcacagtcttgttttcccagcctcttttactagtctttcaggaggtttgctcttagaactggtgatgtaaagaatggaagtagctgtatgagcagttcaaaggccaagccgtggaatggtagcaatgggatataatacctttctaagggaaacatttgtatcagtatcatttgatctgccatggacatgtgtttaaagtggctttctggcccttctttcaatggcttcttccctaaaacgtggagactctaagttaatgtcgttactatgggccatattactaatgcccactggggtctatgatttctcaaaattttcattcggaatccgaaggatacagtctttaaactttagaattcccaagaaggctttattacacctcagaaattgaaagcaccatgactttgtccattaaaaaattatccatagtttttttagtgcttttaacattccgacatacatcattctgtgattaaatctccagatttctgtaaatgatacctacattctaaagagttaattctaattattccgatatgaccttaaggaaaagtaaaggaataaatttttgtctttgttgaagtatttaatagagtaaggtaaagaagatattaagtccctttcaaaatggaaaattaattctaaactgagaaaaatgttcctactacctattgctgatactgtctttgcataaatgaataaaaataaactttttttcttc

SEQ ID NO: 325591 - DNA, 4119 bp, Artificial Sequence
  derived and/or modified sequence
cacgcgccccgatacccggcacaggagccacctcccagagccccgcagtccatgcctcagtcggcctgcgctcctcagcctggcggttctacctccgagggttcgcccgcccttggttttccttacaccttagcctttggctcctttgaccactcgaagccccacagcgtgttccagcggacttcaccagcagacccagaagtggtgggtgaaacactgcctctgttcctccttgagcctgtcgggagctgctgcctgccaccaccatgtctgctgcaaatcctgagactccaaactcaaccatctccagagaggccagcacccagtcttcatcagctgcagctagccaaggctgggtgttaccagaaggcaaaatcgtgccaaacactgtttttgttggtggaattgatgctaggatggatgaaactgagattggaagctgctttggtagatacggttcagtgaaagaagtgaagataatcacgaatcgaactggtgtgtccaaaggctatggatttgtttcgtttgttaatgacgtggatgtccagaagatagtaggatcacagatacatttccatggtaaaaagctgaagctgggccctgcaatcaggaaacaaaagttatgtgctcgtcatgtgcagccacgtcctttggtagttaatcctcctcctccaccacagtttcagaacgtctggcggaatccaaacactgaaacctacctgcagccccaaatcacgccgaatcctgtaactcagcacgttcaggcttattctgcttatccacattcaccaggtcaggtcatcactggatgtcagttgcttgtatataattatcaggaatatcctacttatcccgattcagcatttcaggtcaccactggatatcagttgcctgtatataattatcagccatttcctgcttatccaagatcaccatttcaggtcactgctggatatcagttgcctgtatataattatcaggcatttcctgcttatccaaattcaccatttcaagtcgccactggatatcagttccctgtatacaattatcagccatttcctgcttatccaagttcaccatttcaggtcactgctggatatcagttgcctgtatataattatcaggcatttcctgcttatccaaattcaccatttcaagtcgccactggatatcagttccctgtatacaattatcagccatttcctgcttatccaagttcaccatttcaggtcactgctggatatcagttgcctgtatataattatcaggcatttcctgcttatccaaattcaccatttcaagtcgccactggatatcagttccctgtatacaattatcaggcatttcctgcttatccaaattcaccagttcaggtcaccactggatatcagttgcctgtatacaattatcagccatttcctgcttatccaagatcaccatttcaggtcactgctggatatcagttgcctgtatataattatcaggcatttcctgcttatccaaattcaccatttcaagtcgccactggatatcagttccctgtatacaattatcaggcatttcctgcttatccaaattcaccagttcaggtcaccactggatatcagttgcctgtatacaattatcaggcatttcctgcttatccaagttcaccatttcaggtcaccactggatatcagttgcctgtatataattatcaggcatttcctgcttatccaagttcaccatttcaggtcaccactggatatcagttgcctgtatataattatcaggcatttcctgcttatccaagttcaccatttcaggtcaccactggatatcagttgcctgtatataattatcaggcatttcctgcttatccaagttcaccatttcaggtcaccactggatatcagttgcctgtatataattatcaggcatttcctgcttatccaagttcaccatttcaggtcaccactggatatcagttgcctgtatataattatcaggcatttcctgcttatccaagttcaccatttcaggtcaccactggatatcagttgcctgtatataattatcaggcatttcctgcttatccaaattcagcagttcaggtcaccactggatatcagttccatgtatacaattaccagatgccaccgcagtgccctgttggggagcaaaggagaaatctgtggaccgaagcatacaaatggtggtatcttgtctgtttaatccagagaagagactgataaattccgttgttactcaagatgactgcttcaagggtaaaagagtgcatcgctttagaagaagtttggcagtatttaaatctgttggatcctctcagctatctagtttcatgggaagttgctggttttgaatattaagctaaaagttttccactattacagaaattctgaattttggtaaatcacactgaaactttctgtataacttgtattattagactctctagttttatcttaacactgaaactgttcttcattagatgtttatttagaacctggttctgtgtttaatatatagtttaaagtaacaaataatcgagactgaaagaatgttaagatttatctgcaaggatttttaaaaaattgaaacttgcattttaagtgtttaaaagcaaatactgactttcaaaaaagtttttaaaacctgatttgaaagctaacaattttgatagtctgaacacaagcatttcacttctccaagaagtacctgtgaacagtacaatatttcagtattgagctttgcatttatgatttatctagaaatttacctcaaaagcagaatttttaaaactgcatttttaatcagtggaactcaatgtatagttagctttattgaagtcttatccaaacccagtaaaacagattctaagcaaacagtccaatcagtgagtcataatgtttattcaaagtattttatcttttatctagaatccacatatgtatgtccaatttgattgggatagtagttaggataactaaaattctgggcctaattttttaaagaatccaagacaaactaaactttactgggtatataaccttctcaatgagttaccattcttttttataaaaaaaattgttccttgaaatgctaaacttaatggctgtatgtgaaatttgcaaaatactggtattaaagaacgctgcagcttttttatgtcactcaaaggttaatcggagtatctgaaaggaattgtttttataaaaacattgaagtattagttacttgctataaatagatttttatttttgttttttagcctgttatatttccttctgtaaaataaaatatgtccagaagaggcatgttgtttctagattaggtagtgtcctcattttatattgtgaccacacagctagagcaccagagcccttttgctatactcacagtcttgttttcccagcctcttttactagtctttcaggaggtttgctcttagaactggtgatgtaaagaatggaagtagctgtatgagcagttcaaaggccaagccgtggaatggtagcaatgggatataatacctttctaagggaaacatttgtatcagtatcatttgatctgccatggacatgtgtttaaagtggctttctggcccttctttcaatggcttcttccctaaaacgtggagactctaagttaatgtcgttactatgggccatattactaatgcccactggggtctatgatttctcaaaattttcattcggaatccgaaggatacagtctttaaactttagaattcccaagaaggctttattacacctcagaaattgaaagcaccatgactttgtccattaaaaaattatccatagtttttttagtgcttttaacattccgacatacatcattctgtgattaaatctccagatttctgtaaatgatacctacattctaaagagttaattctaattattccgatatgaccttaaggaaaagtaaaggaataaatttttgtctttgttgaagtatttaatagagtaaggtaaagaagatattaagtccctttcaaaatggaaaattaattctaaactgagaaaaatgttcctactacctattgctgatactgtctttgcataaatgaataaaaataaactttttttcttcaaa

SEQ ID NO: 325592 - protein, 71 aa, Artificial Sequence
  derived and/or modified sequence
MGATGLGFLLSWRQDNLNGTDCQGCNILYFSETTGSMCSELSLNRGLEARRKKDLKDSFLWRDGVSPCLPC

SEQ ID NO: 325593 - protein, 147 aa, Artificial Sequence
  derived and/or modified sequence
MGATGLGFLLSWRQDNLNGTDCQGCNILYFSETTGSMCSELSLNRGLEARRKKDLKDSFLWRYGKVGCISLPLREMTAWINPPQISEIFQGYHQRVHGADALSLQTNSLRSRLSSQCLGQSFLLRTLERGRGFRALGDICGHVHEED

SEQ ID NO: 325594 - DNA, 216 bp, Artificial Sequence
  derived and/or modified sequence
atgggcgccaccggcctgggcttcctgctgagctggagacaggacaacctgaacggcaccgactgccagggctgcaacatcctgtacttcagcgagaccaccggcagcatgtgcagcgagctgagcctgaacagaggcctggaggccagaagaaagaaggacctgaaggacagcttcctgtggagagacggcgtgagcccctgcctgccctgctag

SEQ ID NO: 325595 - DNA, 444 bp, Artificial Sequence
  derived and/or modified sequence
atgggcgccaccggcctgggcttcctgctgagctggagacaggacaacctgaacggcaccgactgccagggctgcaacatcctgtacttcagcgagaccaccggcagcatgtgcagcgagctgagcctgaacagaggcctggaggccagaagaaagaaggacctgaaggacagcttcctgtggagatacggcaaggtgggctgcatcagcctgcccctgagagagatgaccgcctggatcaaccccccccagatcagcgagatcttccagggctaccaccagagagtgcacggcgccgacgccctgagcctgcagaccaacagcctgagaagcagactgagcagccagtgcctgggccagagcttcctgctgagaaccctggagagaggcagaggcttcagagccctgggcgacatctgcggccacgtgcacgaggaggactag

SEQ ID NO: 325596 - DNA, 216 bp, Artificial Sequence
  derived and/or modified sequence
atgggggccaccggccttggcttcttgctgtcttggcggcaggacaatctgaacggcacagattgccaaggctgcaatatcctgtacttcagcgagactacgggttccatgtgctccgaactgagcttaaatagagggttggaggctcgacgtaagaaagacctgaaggattctttcctctggcgcgacggggtcagcccctgtttaccctgttag

SEQ ID NO: 325597 - DNA, 444 bp, Artificial Sequence
  derived and/or modified sequence
atgggagccaccggcctgggctttttgctgtcttggagacaggacaacctgaacggcaccgattgccagggatgtaatatcctgtactttagcgaaaccactggctccatgtgctctgagctgtctctgaatagaggcctggaggcacgtcgcaaaaaggatctcaaggactcctttttgtggcgctatggaaaggtgggctgtatctccctccccctgcgggagatgacggcctggataaacccgccacaaatttccgaaattttccagggctatcatcaacgtgtgcatggcgccgacgcactgagtctccagaccaattcactcagaagccgactgagcagccagtgccttggtcaatcttttctcctgcgaacgctcgaacgggggaggggattccgggccttgggagacatttgtggtcacgtgcatgaagaagactag

SEQ ID NO: 325598 - DNA, 444 bp, Artificial Sequence
  derived and/or modified sequence
atgggggccacgggactaggcttcctgctgtcttggcgacaagataacctgaacggcacggactgtcaaggctgtaacattctgtatttctccgagaccaccggatctatgtgctccgagctctcccttaaccgcggtctggaggcccgaaggaaaaaagacctgaaagacagctttctgtggaggtatggcaaggtgggttgcatcagcctccctctgcgcgagatgacagcatggatcaacccgccccaaatcagcgaaatctttcaaggataccatcaacgagtgcatggtgccgacgctctcagcctgcagaccaattcattacgctctcgactttcaagccagtgcttaggccagtctttccttttacggactctggagcgcggaagagggttccgggctttgggagacatttgtgggcacgtccacgaagaagactag

SEQ ID NO: 325599 - DNA, 216 bp, Artificial Sequence
  derived and/or modified sequence
atgggagcaactggcctcggcttcctgttgtcctggcggcaggacaatctgaacgggactgattgccaaggatgtaatatactctatttttccgagactaccggatccatgtgctcggaactgtctctgaaccggggccttgaggcaagacggaaaaaggatctgaaagacagctttctgtggagggatggcgtttctccttgcttaccgtgttag

SEQ ID NO: 325600 - DNA, 216 bp, Artificial Sequence
  derived and/or modified sequence
atgggcgccaccggcctgggcttcctgctgtcctggaggcaggacaacctgaatggaacagactgccagggctgcaacatcctgtacttcagcgagaccaccggctccatgtgcagcgagctgagcctgaacagaggcctggaggcccggaggaagaaggacctgaaggacagcttcctgtggagagatggagtgagcccctgcctgccctgctag
